United States Patent Application Publication US 2014/0259212 A1 - sequence listing, part 20

SEQ ID NO: 63026 - protein, 323 aa, Emericella nidulans
MENYQKIEKIGEGTYGVVYKARELTHPNRIVALKKIRLEAEDEGVPSTAIREISLLKEMNDPNIVRLLNIVHADGHKLYLVFEFLDLDLKKYMEALPVSEGGRGRALPDGSTLSRNLGLGDAMVKKFMAQLIEGIRFCHSHRVLHRDLKPQNLLIDRDGNLKLADFGLARAFGVPLRTYTHEVVTLWYRSPEILLGGRQYSTGVDMWSCGAIFAEMCTRKPLFPGDSEIDEIFKIFRILGTPDETIWPGVTSFPDFKPTFPKWKREDIQNVVPGLEEDGLDLLEALLEYDPARRISAKQACMHPYFQHGSSYYSGRARRNGFH

SEQ ID NO: 63027 - DNA, 1325 bp, Zea mays
  CDS (213)..(1097)
cgcgggcgaggagcagaccagcacccagcgccctcgtcggggggcggcacgtgcagcttcaccagccgccgcctttcccccgtctgcctctgcctctgcctctccccctaacccccttccatttctccaccccaccccgctcccgcttccgcttcctcgccacttagttcgttgccaccacgccgcggctgcgttcgcattgggggcacgcaatggagcagtacgagaaggtggagaagatcggggagggcacgtacggggtggtgtacaaggcgctggacaaggccaccaacgagacgatcgcgctcaagaagatccgcctcgagcaggaggacgagggcgtcccgtccaccgccatccgcgagatctctctcctcaaggagatgaaccacggcaacatcgtcagattacatgatgttgtccacagcgagaagcgcatataccttgtcttcgagtacctggatctggacctcaagaagttcatggactcctgcccggagtttgctaagaatcccactttgatcaagtcatacctctaccagatactccacggtgttgcgtactgccattctcatagagttcttcatcgagacttgaaacctcaaaacttattgatagatcggcgcactaatgcactgaagcttgcagactttggtttagccagggcatttggaattcctgtccgtacatttactcatgaggtagtgacattatggtacagagctccagaaattctgcttggagcgcggcagtattccacaccagttgatgtgtggtctgtgggctgtatctttgcggaaatggtgaaccaaaagccactattccctggcgattctgagatcgacgaactttttaagatattcaggatactaggtacaccgaatgagcagagttggccaggagtcagttgtttgcctgacttcaagacagctttccccaggtggcaagctcaggacctggcaacagtagtcccaaatcttgaccctgctgggttggaccttctctctaaaatgcttcgatacgagccaagcaaaagaatcacagcgaggcaagcacttgagcatgagtacttcaaggaccttgaagtggtacagtgacctgctaaatgtgcttgacgttgcattgacatttgtatgagctgagtcgctcattcctttttatgaacgcctgtactcttctcattctctccctgcatttttgtcattcagctggatatttcgaatctggtgtgttttgagatgtattaaagaacgtcaaatagattaccgccttggtctctgtccattgaaagtaaatatccgtcataaaaaaaaaaaaaaaaaaaa

SEQ ID NO: 63028 - protein, 294 aa, Zea mays
MEQYEKVEKIGEGTYGVVYKALDKATNETIALKKIRLEQEDEGVPSTAIREISLLKEMNHGNIVRLHDVVHSEKRIYLVFEYLDLDLKKFMDSCPEFAKNPTLIKSYLYQILHGVAYCHSHRVLHRDLKPQNLLIDRRTNALKLADFGLARAFGIPVRTFTHEVVTLWYRAPEILLGARQYSTPVDVWSVGCIFAEMVNQKPLFPGDSEIDELFKIFRILGTPNEQSWPGVSCLPDFKTAFPRWQAQDLATVVPNLDPAGLDLLSKMLRYEPSKRITARQALEHEYFKDLEVVQ

SEQ ID NO: 63029 - DNA, 894 bp, Schizosaccharomyces pombe
  CDS (1)..(894)
atggagaattatcaaaaagtcgaaaaaattggggaaggaacctatggcgttgtttataaagcaagacataaattgtcagggcgtattgtggccatgaaaaaaattcgccttgaagatgaatctgagggagttcctagcacagctattcgtgaaatttcgcttcttaaagaagtgaatgatgagaataatcgatcaaattgtgttcgacttttggatattttacatgctgaatcaaagttgtatcttgtttttgagtttttagacatggatttgaaaaaatacatggaccgaatttcagaaactggggccactagtttagatccgagacttgttcaaaagtttacctaccagctagtgaacggtgtaaatttttgccattctagaagaatcattcatcgcgatttaaaaccacaaaatttgttgatagacaaagaaggcaatttgaagctagcagattttggacttgcgaggtcatttggtgtccctttgcggaactatacgcatgagattgtcactttatggtatcgtgctcctgaagtattgttgggatcaagacattattccactggggttgatatttggagcgttggatgtatttttgctgaaatgattcgacgaagtccattatttcccggtgactctgagatcgacgaaatttttaaaatttttcaagttttaggtaccccaaacgaagaagtatggcctggagtcacgcttttgcaagattacaaatccacatttcctcgttggaaacgcatggatttgcataaagttgttcccaatggtgaagaggacgctattgaattactctctgctatgcttgtttatgaccctgcccatcgcattagtgcaaaacgagctttgcaacaaaattatcttcgtgattttcattaa

SEQ ID NO: 63030 - protein, 297 aa, Schizosaccharomyces pombe
MENYQKVEKIGEGTYGVVYKARHKLSGRIVAMKKIRLEDESEGVPSTAIREISLLKEVNDENNRSNCVRLLDILHAESKLYLVFEFLDMDLKKYMDRISETGATSLDPRLVQKFTYQLVNGVNFCHSRRIIHRDLKPQNLLIDKEGNLKLADFGLARSFGVPLRNYTHEIVTLWYRAPEVLLGSRHYSTGVDIWSVGCIFAEMIRRSPLFPGDSEIDEIFKIFQVLGTPNEEVWPGVTLLQDYKSTFPRWKRMDLHKVVPNGEEDAIELLSAMLVYDPAHRISAKRALQQNYLRDFH

SEQ ID NO: 63031 - DNA, 1324 bp, Vigna aconitifolia
  CDS (206)..(1090)
gcgggtagtgtatacaatttgtaaatagttaaaagaaaagcattaaacaaaaaaagagggaaaagggtagtaaaggaaagagaagaaagagttgagaagagtgaaagagagagagagagagagagagagaagaagtgacaagagtggagtgtgcgtgagagagtgactgcaaaacgctccacccttgtttcttctcagatcttccatggaacagtacgagaaggtggagaagataggggagggaacatacggcgtcgtttacaaggctcgcgaccgcgtcaccaatgagaccatcgctcttaagaagattcgcctcgagcaggaagacgagggggttcccagcaccgccattcgtgagatttcgctcctcaaagagatgcagcataggaacattgttaggttgcaggatgtagtgcacagtgagaagcgattgtatctggttttcgagtatctggacttggatctaaagaaacacatggattcatctccagagtttgtgaaagatccacggcaagtaaaaatgttcctctatcaaattctctgtggcattgcttactgccattcgcacagagttcttcatcgagacttgaaaccacagaatttgttgatagaccgtcgtacaaattccttaaaacttgcagattttggattggctagggcatttggcattcctgtcaggacatttactcatgaggtggtgacattatggtacagagctccagaaatattgcttgggtctcgtcattattctaccccagttgatgtttggtcagtgggatgtatatttgcagagatggtaaaccgacgacctctattcccaggggactctgagattgatgaattatttaaaatattcagaatattgggtacacctaatgaagaaacatggcctggagttactgcattaccggattttaaatcaacatttcccaaatggccacctaaggatttagcaactgtggttccaaatcttgatgcagcgggtcttaatcttctttctagtatgctatgcttggatcccagcaaaagaattactgccaggatcgctgtggagcacgaatacttcaaagacattaaatttgtaccctaattccatatcttcatggaaaccgtgtttatagtaatattttgtgcagaatttatgggttttgactctgcgagaaatgcgtgctgtcttttgctatttcttcaggacttgggagttgggagtgggtcatatttccattttttgtcctacagatatttgagaatgaacttgagtgtgatcatactgcattttacatttccctttgtccatgcaatgcaatgcaccagttaacttttc

SEQ ID NO: 63032 - protein, 294 aa, Vigna aconitifolia
MEQYEKVEKIGEGTYGVVYKARDRVTNETIALKKIRLEQEDEGVPSTAIREISLLKEMQHRNIVRLQDVVHSEKRLYLVFEYLDLDLKKHMDSSPEFVKDPRQVKMFLYQILCGIAYCHSHRVLHRDLKPQNLLIDRRTNSLKLADFGLARAFGIPVRTFTHEVVTLWYRAPEILLGSRHYSTPVDVWSVGCIFAEMVNRRPLFPGDSEIDELFKIFRILGTPNEETWPGVTALPDFKSTFPKWPPKDLATVVPNLDAAGLNLLSSMLCLDPSKRITARIAVEHEYFKDIKFVP

SEQ ID NO: 63033 - DNA, 1309 bp, Vigna unguiculata
  CDS (76)..(960)
cgaagtgacaagagtggagtgtgcgtgagagagtgactgcaaaccgctccacccttgtttcttctcagatcttccatggaacagtacgagaaggtggagaagataggcgagggaacatacggcgtcgtttacaaggctcgggaccgcgtcactgatgagaccatcgcgctcaagaagattcgcctggagcaggaggacgagggggttcccagcaccgccattcgtgagatttcgctcctcaaagagatgcagcataggaacattgttaggttgcaggatgtagtgcacagtgagaaacgattgtatctggttttcgagtatctggacttggatctaaagaaacacatggattcatctccagagtttgtgaaagatccacggcaagtaaaaatgttcctctatcaaattctctgtggcattgcttactgccattcgcacagagttcttcatcgagacttgaaaccacagaatttgttgatagaccgtcgtacaaattccttaaaacttgcagattttggattggctagggcatttggcattcctgtcaggacatttactcatgaggtggtgacattatggtacagagctccagaaatattgctcgggtctcgtcattattctaccccagttgatgtttggtcagtgggatgtttatttgcagagatggtaaaccgacgacctctattccctggggactctgagattgatgaattatttaaaatattcagaatattgggtacaccaaatgaagaaacatggcctggagttactgcattaccggattttaaatcaacatttcccaaatggccacctaaggatttagcaactatggttccaaatcttgatgcagccggtcttaatcttctttctagtatgctaagcctggatcccagcaaaagaattaccgccaggatcgctgtggagcatgaatacttcaaagacattaaatttgtaccctgattccatatcttcatggaaaacgtgtttatagtaatattttgcgcagaatttatgggttttgactctgcgagaaatgcgtgttgtcttttgctattttcttcaggacttgggagttgggactgggtcatattccattttttgtcctacagaatatttcagaatcaacttgagtgtgatcaaattgcattttacttttccttttgtccagtcaatgcaatgcagcatttaagttttcagtttgtctgatatgtgtgatgctgcttcttgatacagaagaagcgtatctacattctttcaagatgcgttgattgataaaattagtttcatttgtgtttttccaaaaaaaaaa

SEQ ID NO: 63034 - protein, 294 aa, Vigna unguiculata
MEQYEKVEKIGEGTYGVVYKARDRVTDETIALKKIRLEQEDEGVPSTAIREISLLKEMQHRNIVRLQDVVHSEKRLYLVFEYLDLDLKKHMDSSPEFVKDPRQVKMFLYQILCGIAYCHSHRVLHRDLKPQNLLIDRRTNSLKLADFGLARAFGIPVRTFTHEVVTLWYRAPEILLGSRHYSTPVDVWSVGCLFAEMVNRRPLFPGDSEIDELFKIFRILGTPNEETWPGVTALPDFKSTFPKWPPKDLATMVPNLDAAGLNLLSSMLSLDPSKRITARIAVEHEYFKDIKFVP

SEQ ID NO: 63035 - DNA, 885 bp, Drosophila melanogaster
  CDS (1)..(885)
atgcagaagtacgataaaatggagaagatcggggagggcacctacggcacggtgttcaagggtcgcaaccgcgacaccatggaaatagtggccctgaaacgggtgcgactggacgaggacgacgagggtgtgcccagttctgccctccgggagatctgcctgctgaaggagctgaagcacaagaacattgtgcgcctcatagacgtcctgcactcggacaagaaactcaccctggtcttcgagcactgcgaccaggacctcaagaagtactttgacagcctcaacggggagatcgacatggccgtctgcaggagctttatgctccaactgctccgcggactggcattctgccacagccataatgtcctgcatcgcgatctgaaaccacagaacctgctgatcaacaaaaacggcgagctaaagctagctgactttggtctcgctagagcctttggcattcccgtgaagtgctactccgcagaagtggtgaccctgtggtaccgaccacccgatgtcctatttggagccaagctctatacgaccagcatagacatgtggtccgctggatgcattttggccgaactggcggacgctggacgaccgctgtttcctggctctgacgtgctcgatcagctgatgaagatcttccgtgtgctgggcacccccaacgaggactcctggccaggagtttcgcacctctccgactacgtggcgcttccatcttttccggccatcacctcgtggagtcagctggtacctaggctaaactccaagggacgcgacctgctgcaaaagctgctcatctgccggccaaatcagcgaattagcgcggaggcggcgatgcagcatccctactttacggacagcagctcttcgggacattga

SEQ ID NO: 63036 - protein, 294 aa, Drosophila melanogaster
MQKYDKMEKIGEGTYGTVFKGRNRDTMEIVALKRVRLDEDDEGVPSSALREICLLKELKHKNIVRLIDVLHSDKKLTLVFEHCDQDLKKYFDSLNGEIDMAVCRSFMLQLLRGLAFCHSHNVLHRDLKPQNLLINKNGELKLADFGLARAFGIPVKCYSAEVVTLWYRPPDVLFGAKLYTTSIDMWSAGCILAELADAGRPLFPGSDVLDQLMKIFRVLGTPNEDSWPGVSHLSDYVALPSFPAITSWSQLVPRLNSKGRDLLQKLLICRPNQRISAEAAMQHPYFTDSSSSGH

SEQ ID NO: 63037 - DNA, 879 bp, Glossina morsitans morsitans
  CDS (1)..(879)
atgcaaaagtatgaaaaattggagaaaattggtgagggaacttatggaactgtatttaaaggacgaaatcgcgaaacattggaaattgtagccttaaagcgtgttcgtcttgacgaggatgatgaaggtgtcccgagctctgctttacgtgaaatttgtttattgaaggaattaaaacataagaatatagtccgcctgtatgacgtcttgcattcggaaaaaaagttaactttggtttttgaacattgcgatcaggatctaaagaaatattttgacagcttgaacggtgacatcgacatggctgtctgccgtagttttatgttgcaactcctaagaggtttggctttttgccacagtcataatgtattgcatcgagatttgaagccacagaatttactgattaataaaaacggtgaactaaagttggcagatttcggtttggcaagagcttttggaataccagtgaaatgttactcagcagaagtcgttactttatggtatcgtccacctgatgttttgtttggcgcgaaattgtatactactagtattgacatgtggtcagctgggtgcatattcgccgaattagcggatgctggtcgaccgttatttccaggctctgatgttctagatcagttaatgaaaatatttcgtgtgttaggtactcccaccgaagaaagttggcctggtgttactcatctatcggactatgtggctttaccacattttcctgcaattacttcgtggagtcaaattgtgccacgtctcagttcgaaaggtcgtgatcttttacagaagctactagtttgtcgaccaaaccagcgcgttagcgcggagcaagccatgcagcatccatattttacagacagttcaaatcactga

SEQ ID NO: 63038 - protein, 292 aa, Glossina morsitans morsitans
MQKYEKLEKIGEGTYGTVFKGRNRETLEIVALKRVRLDEDDEGVPSSALREICLLKELKHKNIVRLYDVLHSEKKLTLVFEHCDQDLKKYFDSLNGDIDMAVCRSFMLQLLRGLAFCHSHNVLHRDLKPQNLLINKNGELKLADFGLARAFGIPVKCYSAEVVTLWYRPPDVLFGAKLYTTSIDMWSAGCIFAELADAGRPLFPGSDVLDQLMKIFRVLGTPTEESWPGVTHLSDYVALPHFPAITSWSQIVPRLSSKGRDLLQKLLVCRPNQRVSAEQAMQHPYFTDSSNH

SEQ ID NO: 63039 - DNA, 867 bp, Schizosaccharomyces pombe
  CDS (1)..(867)
atgaactaccaaaggcttgaaaagttaggagagggaacatatgcgcatgtttataaggggcaaaatcgagtgactggtgaaattgtcgctctcaaagttattcgtattgatgcagatgaaggaacacctagtactgctatccgtgagattagtcttatgaaggagcttaggcatcccaatattatgtctctctcagacgttttgcaaaccgaaaataagcttatgctcgtttttgaatatatggaaaaagatttgaaaaagtacatggacacttatgggaaccaaggagctcttccaccttctcaagtaaaaaattttactcaacaattactcaaagggatatctttttgtcacgaaaaccgagttctacatcgtgatctgaaacctcaaaatttgcttatcaacagtcgtggtgaattgaaattggcggattttgggttagcccgttcaattggaattccagtgaatactttttcaaacgaagtggtcaccttatggtatcgtgctcctgacgttcttttgggttctcgagtatattcaacttccattgatatttggtcagttggttgtatcatggcagaaatggctacaggacgtcctctatttgctgggtcaaataatgaggatcagctactaaaaatcttccgattattgggaactcctactgaacaatcatggcccggaatttctttacttcctgaatataagcctactttccctatttataaagcacaagatctcgcctacctatttccaacatttgatcctcttggtttggatttgttacgacggatgcttcgtctacaacctgaattaaggacgaccggccaggatgcgcttcaacatgcttggtttttaaccgcatag

SEQ ID NO: 63040 - protein, 288 aa, Schizosaccharomyces pombe
MNYQRLEKLGEGTYAHVYKGQNRVTGEIVALKVIRIDADEGTPSTAIREISLMKELRHPNIMSLSDVLQTENKLMLVFEYMEKDLKKYMDTYGNQGALPPSQVKNFTQQLLKGISFCHENRVLHRDLKPQNLLINSRGELKLADFGLARSIGIPVNTFSNEVVTLWYRAPDVLLGSRVYSTSIDIWSVGCIMAEMATGRPLFAGSNNEDQLLKIFRLLGTPTEQSWPGISLLPEYKPTFPIYKAQDLAYLFPTFDPLGLDLLRRMLRLQPELRTTGQDALQHAWFLTA

SEQ ID NO: 63041 - DNA, 912 bp, Ashbya gossypii
  CDS (1)..(912)
atgactagcacatctcacatcagattcaagcagctggagcggctgggcaatgggacatacgcgactgtgtacaagggcctgaacaagacgaccgggctgtatgttgcgctgaaggaggtgaagctcgactcagaagagggcacgccgtcgacagccatacgtgagatctcgctgatgaaggagctgaagcacgagaacatcgtgaggctgtacgacgtaatacacacggagaacaagctgacgctggtgttcgagttcatggacaacgacctgaagaagttcatggactcgcggctcgaccgggagatgccgcgcgggctggagctgtcgctggtgaagtacttccagtggcaactgctgcagggcgtggcgttctgccacgagaaccggatcctgcaccgcgacctgaagccacagaacttactgatcaacaacaagggtcagttgaagctgggtgacttcgggctggcgcgcgcgttcggcatcccggtgaacacattcagcagcgaggtcgtgacgctctggtaccgtgcgcccgacgtcctgatggggtcgcgcacatactgcacgtctatcgacatctggtcgtgtggctgcattctagctgagatgatcatggggaaggcgctcttccccgggaccaacgacgacgagcagctaaagctgatcttcgagaccatgggcacgccgacagaacagacgtgggtcggcgtcagccagctgcccaagtacaaccctcagataccgctctaccccaacaaggacattaagcagctattgcaggctaccaccaaggagcagatcagcgacgtgctcgtgaacctcatccagggcctcctccagttgaatccaagcatgcgcttgagcgcacaacaggcgctgagtcaccctctattcgaggagtaccactga

SEQ ID NO: 63042 - protein, 303 aa, Ashbya gossypii
MTSTSHIRFKQLERLGNGTYATVYKGLNKTTGLYVALKEVKLDSEEGTPSTAIREISLMKELKHENIVRLYDVIHTENKLTLVFEFMDNDLKKFMDSRLDREMPRGLELSLVKYFQWQLLQGVAFCHENRILHRDLKPQNLLINNKGQLKLGDFGLARAFGIPVNTFSSEVVTLWYRAPDVLMGSRTYCTSIDIWSCGCILAEMIMGKALFPGTNDDEQLKLIFETMGTPTEQTWVGVSQLPKYNPQIPLYPNKDIKQLLQATTKEQISDVLVNLIQGLLQLNPSMRLSAQQALSHPLFEEYH

SEQ ID NO: 63043 - DNA, 981 bp, Candida albicans
  CDS (1)..(981): transl_table=12
atgaccggctcgtcttctcaatttcagcaacttgaaaaattgggtgaaggtacttatgccaccgtgtacaagggaagaaatagggccacaggtgctttggtggcattaaaagaaattagtctagattcagaagaaggtacaccatctactgctattagagaaatttcattaatgaaagaattggaccatgagaatattgtaactttgtatgatgtgatccacactgagaataagttgacattagtatttgaatatatggataaagatttgaagaaatatatggaagttcatggacaacaaagtgcattagacttgaaagttgtcaagtcttttatgtttcaattgttgaaaggaataatgttctgtcatgacaatcgagttttacatcgtgatttgaaaccacagaatttgttgattaacaacaaaggagaattgaaattgggtgattttgggttagctcgtgcttttggtattccgtttaacactttctcgaatgaggttgttactttgtggtatagagctccggacgtcttgttaggatccagagcttatacgacatctattgatatttggtctgctggatgtatctttgcagagatgtgcactggaaaacctttattccctggtactgctaatgaagatcagttgatcaaaattttcaggttgatgggtactccaaatgaaagaacttggccaggaataagtcagtacactaattacaaaaacaattggcaaatatttgttccacaggatttacgattaattgtccctaatcttgactctatgggtttgaatttattgcaaagcttattgcaaatgagaccagagtcaagaataactgctagacaggcattgcaacatccttggtttcatgagataacaatgccaaatgcagtaccacaacatttaagtgacccttaccagcaacaacaacaacaacaacaacatccacatcagcccataattgatcagcaatactag

SEQ ID NO: 63044 - protein, 326 aa, Candida albicans
MTGSSSQFQQLEKLGEGTYATVYKGRNRATGALVALKEISLDSEEGTPSTAIREISLMKELDHENIVTLYDVIHTENKLTLVFEYMDKDLKKYMEVHGQQSALDLKVVKSFMFQLLKGIMFCHDNRVLHRDLKPQNLLINNKGELKLGDFGLARAFGIPFNTFSNEVVTLWYRAPDVLLGSRAYTTSIDIWSAGCIFAEMCTGKPLFPGTANEDQLIKIFRLMGTPNERTWPGISQYTNYKNNWQIFVPQDLRLIVPNLDSMGLNLLQSLLQMRPESRITARQALQHPWFHEITMPNAVPQHLSDPYQQQQQQQQHPHQPIIDQQY

SEQ ID NO: 63045 - DNA, 909 bp, Candida glabrata
  CDS (1)..(909)
atgtcgtcctctcagtttaagcagttggagaagctaggtaacggtacgtatgcgactgtatataagggtctgaacaagagcactggtgtgtatgttgcgttgaaggaagtgaagctggactctgaagagggtacgccctcgactgccatcagggagatctcattgatgaaggagcttaagcacgacaacattgtgaggctgtatgatgtgatacacacggagaacaagcttacgctggtgtttgagtacatggacaacgacctgaagaagtacatggactcgcgcacggttgggaacgctccgcgggggctggagatgaacctggtgaagtacttccagtggcagctgctggaggggctggcgttctgccacgagaacaagatcctgcacagggacctgaagccgcagaacctgctgatcacgaagcgcgggcagctgaagctgggcgacttcgggctggcgcgtgcgttcgggatccccgtgaacacattctcgagcgaggtggtcacgctgtggtaccgtgcgccggacgtgctcatgggctcgcgcacgtactccacgtccatcgacatatggtcctgcgggtgcatcctcgcggagatgatcaccggcaagcctctgttccccggcacaaacgacgaggagcagctcaagctcatcttcgacaagatggggaccccgaacgagaccacctggcccggcgtcacctccctgccaaagtacaacccgaacttccagcagagactgcccaaggacctgaaggccgaactgcaaccgtacgtcaaggaacccctcgacgacaacgtcatcgacctcctccacggcctcctccagctcaacccagacatgcgcctcagcgccaagcaggccctgctccacccctggttctccgagtactacgagtcctaa

SEQ ID NO: 63046 - protein, 302 aa, Candida glabrata
MSSSQFKQLEKLGNGTYATVYKGLNKSTGVYVALKEVKLDSEEGTPSTAIREISLMKELKHDNIVRLYDVIHTENKLTLVFEYMDNDLKKYMDSRTVGNAPRGLEMNLVKYFQWQLLEGLAFCHENKILHRDLKPQNLLITKRGQLKLGDFGLARAFGIPVNTFSSEVVTLWYRAPDVLMGSRTYSTSIDIWSCGCILAEMITGKPLFPGTNDEEQLKLIFDKMGTPNETTWPGVTSLPKYNPNFQQRLPKDLKAELQPYVKEPLDDNVIDLLHGLLQLNPDMRLSAKQALLHPWFSEYYES

SEQ ID NO: 63047 - DNA, 993 bp, Debaryomyces hansenii
  CDS (1)..(993)
atgactgggtcctcttctcaatttcagcagcttgaaaaattaggtgaaggaacatatgctactgtctataaaggtagaaatcgtactaatgggcagcttgtggcattgaaagaaatcaacttagactctgaagaaggtacaccatccacagcaataagagaaatttctttaatgaaggaattggatcatgaaaatatcgtgaccctctatgatgttattcataccgaaaataagcttactttggtgtttgagtttatggataaagacttgaaaaagtatatggaagcacatggtaaccagggagcattagatttgaaaattgtcaagtcatttattttccagttattgaagggaataatgttctgtcacgataatagagtattgcaccgtgatttaaagcctcagaatttattgattaacaataagggagaattaaagttgggtgattttggacttgcgagagcttttgggattccattcaatacattctcgaatgaagttgtgacattatggtatagggcgccagatgtgttattggggtctagagcttatacagcgtcaattgatatctggtcagctggttgtatctttgcagagatgtgcacaggcaagccattattccctggtacttcaaatgatgaccaattgattaaaattttcagattgatgggtactcctaatgaaagaacgtggccaggtgtttcatcgtatgccaactttaagaataattggcaaatatttgttccacaagatttgaggttgttaattccaaacttagattcgatggggcttaatttattaagtagtttgttgcaaatgagaccagacgcaagaatcactgctagacaagcattacaacacccatggttccacgaaatttcaaacccaaatccgttaatgcaacatttagcagatccataccaacaactgcaacagcaactgcaacaacaagctcaacagctgcaacagatggatcctcagacatatcgatag

SEQ ID NO: 63048 - protein, 330 aa, Debaryomyces hansenii
MTGSSSQFQQLEKLGEGTYATVYKGRNRTNGQLVALKEINLDSEEGTPSTAIREISLMKELDHENIVTLYDVIHTENKLTLVFEFMDKDLKKYMEAHGNQGALDLKIVKSFIFQLLKGIMFCHDNRVLHRDLKPQNLLINNKGELKLGDFGLARAFGIPFNTFSNEVVTLWYRAPDVLLGSRAYTASIDIWSAGCIFAEMCTGKPLFPGTSNDDQLIKIFRLMGTPNERTWPGVSSYANFKNNWQIFVPQDLRLLIPNLDSMGLNLLSSLLQMRPDARITARQALQHPWFHEISNPNPLMQHLADPYQQLQQQLQQQAQQLQQMDPQTYR

SEQ ID NO: 63049 - DNA, 915 bp, Kluyveromyces lactis
  CDS (1)..(915)
atggtggcaccatctcaattcaagcaacttgaaaaggttggtaacggtacgtatgctaccgtgtacaaaggattgaataagacgactggtgtatacgttgctttgaaagaagtgaaattggatagcgaagaaggaactccgtcaacggccattagggagatatcgttgatgaaagagttgaaacatgataacatcgtgaggctattcgatgtgattcatactgagaataagttgacgttggtgtttgaattcatggataatgaccttaagaagttcatggacaatagaaacaagggaaattctcataagggcttagagatggatttggtgaaatatttccaatggcagttgttacaaggtgtagcgttttgccatgagaacaggatcttgcatcgtgatttgaaacctcagaacttgttgatcaataacagaggtcaattgaaacttggtgattttgggttggctcgtgcatttggtatcccagttaacactttcagcagtgaagtggtgactctttggtatagggctcctgatgtgttgatggggtcaagaaactattgcacttcaatcgatatttggtcatgcggatgtatcttggctgaaatgattatggggaaaccgttattccctggttccaacgatgaggaacagttgaaactcatattcgatacgatgggtactccagtggagcagacatggccgcaagtgactcaattggctaaatacaatccacttttgcctccacatatgcctcgtgatttgaaacagctattacaaaacaatacggaggaagtgttggacgataatgtagtggatctattgcatggtctattgcaactgaacccagatgcaagactttctgcaaaggatgccttgaaccacccatggtttgcagaatataaccatgccaactaa

SEQ ID NO: 63050 - protein, 304 aa, Kluyveromyces lactis
MVAPSQFKQLEKVGNGTYATVYKGLNKTTGVYVALKEVKLDSEEGTPSTAIREISLMKELKHDNIVRLFDVIHTENKLTLVFEFMDNDLKKFMDNRNKGNSHKGLEMDLVKYFQWQLLQGVAFCHENRILHRDLKPQNLLINNRGQLKLGDFGLARAFGIPVNTFSSEVVTLWYRAPDVLMGSRNYCTSIDIWSCGCILAEMIMGKPLFPGSNDEEQLKLIFDTMGTPVEQTWPQVTQLAKYNPLLPPHMPRDLKQLLQNNTEEVLDDNVVDLLHGLLQLNPDARLSAKDALNHPWFAEYNHAN

SEQ ID NO: 63051 - DNA, 885 bp, Yarrowia lipolytica
  CDS (1)..(885)
atgaacacgtcatcgcaattccagcagctggagaagctcggagaaggcacgtacgccacggtgtacaagggccgcaaccgaaccacgggccagcttgtggcgctcaaggaaattaacctggacagtgaagagggcacgccttccacggccatccgagaaatctcgctgatgaaggagcttaagcacgaaaacattgtgacgctgtacgacgtgatccacacggaaaacaagctgaatctggtgtttgagtacatggacaaggatctcaaaaagttcatggacaccaatggcaacaagggcgcgctggagaccaagcaggtcaagtggttcatgtaccagctactccgtggcattctcttctgccacgacaaccgggttctacacagagacctcaagccccagaacctgctcatcaacgccaagggacagctcaagctggctgactttggtctggcccgagcgtttggaatccccgttaacaccttttccaacgaggtcgtgacgctgtggtaccgggctccggatgtgctccttggatccagaacctactccacctccatcgacatctggtctgcaggctgcatcatggccgagatgttcactggccggcctctgttccccggatcttccaacgacgaccagctgcaacacattttcaagctcatgggcacgcccaacgagagcacgtggcccaatatctcgtcgctgcccaattaccgatccaacttccaggtctatgctccccaggacctccgagtcatcatcccccagattgataacgtggcgctagatctgctcttgtcgctgctgcagctcaagccggagaaccgaatcacggctagacagagtcttgagcatccttggtttgccgagtaccatcagtaa

SEQ ID NO: 63052 - protein, 294 aa, Yarrowia lipolytica
MNTSSQFQQLEKLGEGTYATVYKGRNRTTGQLVALKEINLDSEEGTPSTAIREISLMKELKHENIVTLYDVIHTENKLNLVFEYMDKDLKKFMDTNGNKGALETKQVKWFMYQLLRGILFCHDNRVLHRDLKPQNLLINAKGQLKLADFGLARAFGIPVNTFSNEVVTLWYRAPDVLLGSRTYSTSIDIWSAGCIMAEMFTGRPLFPGSSNDDQLQHIFKLMGTPNESTWPNISSLPNYRSNFQVYAPQDLRVIIPQIDNVALDLLLSLLQLKPENRITARQSLEHPWFAEYHQ

SEQ ID NO: 63053 - DNA, 1197 bp, Schizosaccharomyces pombe
  CDS (1)..(1197)
atggcaggctccaagtgggagacagaagaaacgaatcaattcgcaattgaaaatcaaaaattagaagaggaatggcgtaaaaagcgacggttagaaaaaaaaagaaaaagaaaaatattagaggaagaagagaaagctgaagaaagaaacattgatgcttgcaggctctacttgatggggaatacacctgaacttaagtcttgcaattctattgatgattatgaaatattggaaaaaattgaggagggatcttacggaatcgtttatcgaggtcttgacaaaagtacgaataccctggttgcactcaaaaagattaagtttgaccctaatggaattggattccctattactagtctgcgagaaattgaatcactatccagcattcgacatgataatattgtagaattggaaaaagtggttgttggtaaagatttgaaggatgtttacctagttatggagttcatggaacatgatctcaaaacattacttgataacatgcccgaagatttcttacaatctgaagtcaaaacactgatgcttcaacttttggctgccacggcatttatgcatcaccattggtatctacatagagatttaaagccttctaacttgctaatgaataacaccggcgaaatcaaactcgccgactttggattggcaaggccagtatcagaacccaaatcctctttgacacgcttagttgtgactctttggtatcgtgctcctgaacttttgcttggtgcaccaagctatggtaaagaaattgacatgtggagcattggatgtatcttcgctgaaatgattactaggactcctttgttttctgggaaaagtgagttagatcaattatacaagatattcaatttgctcggttatccgactagggaagagtggccccaatattttcttcttccttatgcaaacaaaattaaacaccctacggtccctacccactctaagattcgtacttctatccctaatttaacgggaaacgcgtacgatttattaaatcgacttttaagtctaaatcctgcgaagagaatatctgccaaagaagcactagaacatccttatttttacgaatctcccagacccaaggatcctaaattttttcctacttttcctagtaaggccaaaggtgaatcaaaagaaaaaaacgtgtttcaaagttttcgtagtgcatctccaaagaagtga

SEQ ID NO: 63054 - protein, 398 aa, Schizosaccharomyces pombe
MAGSKWETEETNQFAIENQKLEEEWRKKRRLEKKRKRKILEEEEKAEERNIDACRLYLMGNTPELKSCNSIDDYEILEKIEEGSYGIVYRGLDKSTNTLVALKKIKFDPNGIGFPITSLREIESLSSIRHDNIVELEKVVVGKDLKDVYLVMEFMEHDLKTLLDNMPEDFLQSEVKTLMLQLLAATAFMHHHWYLHRDLKPSNLLMNNTGEIKLADFGLARPVSEPKSSLTRLVVTLWYRAPELLLGAPSYGKEIDMWSIGCIFAEMITRTPLFSGKSELDQLYKIFNLLGYPTREEWPQYFLLPYANKIKHPTVPTHSKIRTSIPNLTGNAYDLLNRLLSLNPAKRISAKEALEHPYFYESPRPKDPKFFPTFPSKAKGESKEKNVFQSFRSASPKK

SEQ ID NO: 63055 - DNA, 1131 bp, Oryza sativa
  CDS (1)..(1131)
atgccacaagcccaacccaattcatccccaagtccaccaccacacacacacacacacgcacaccactcctctccccacaacccatccactcccacgccgccgccgccgcccggatcgccgcgagatggagcaggtgagcacccctcgacctccgcgatgacgatgccctttgctgtatccgatccatccgcgagcgtggaggaaatggtcgctgctgctgctgctgatgatgagtgtgtttgtgtgtggctggaggagcagtacgagaaggtggagaagatcggggaggggacgtacggggtggtgtacaagggcaagcaccggcataccaacgagacgatcgcgctcaagaagatccgcctggagcaggaggacgagggcgtcccctccaccgccatccgcgagatctcgctgctcaaggagatgcagcatcgcaacatcgtcaggctgcaggacgtcgtgcacaaggagaaatgcatatacctcgtcttcgagtacctcgaccttgacctcaagaagcacatggactcatccccggatttcaagaaccaccgcatagtcaaatcgttcctctaccagattctccggggcattgcgtactgccactcgcaccgtgttctccaccgagatttgaagccccagaacctgctgatagatcggcgtaccaactcattgaagctcgcggactttgggttggccagggcatttggcattcctgtccggacatttactcacgaggtggtgacattgtggtatagagcacctgaaattcttcttggtgcaaggcattattccacccctgttgacatgtggtcagttggttgcatttttgctgaaatggtgaatcagaagccactatttcctggagattctgagattgatgaactctttaagattttcagtattatgggcactccaaatgaagaaacttggccaggtgttgcttcactacctgactacatatcaactttcccaaagtggccatctgtggatcttgcaaccgtggtcccaacacttgattcttcaggactcgatcttctctctaaaatgctccgtttagatccaagcaaaagaatcaatgcccgtgctgccctcgagcacgagtacttcaaggacctggaagtggcgtag

SEQ ID NO: 63056 - protein, 376 aa, Oryza sativa
MPQAQPNSSPSPPPHTHTHAHHSSPHNPSTPTPPPPPGSPRDGAGEHPSTSAMTMPFAVSDPSASVEEMVAAAAADDECVCVWLEEQYEKVEKIGEGTYGVVYKGKHRHTNETIALKKIRLEQEDEGVPSTAIREISLLKEMQHRNIVRLQDVVHKEKCIYLVFEYLDLDLKKHMDSSPDFKNHRIVKSFLYQILRGIAYCHSHRVLHRDLKPQNLLIDRRTNSLKLADFGLARAFGIPVRTFTHEVVTLWYRAPEILLGARHYSTPVDMWSVGCIFAEMVNQKPLFPGDSEIDELFKIFSIMGTPNEETWPGVASLPDYISTFPKWPSVDLATVVPTLDSSGLDLLSKMLRLDPSKRINARAALEHEYFKDLEVA

SEQ ID NO: 63057 - DNA, 1110 bp, Oryza sativa
  CDS (1)..(1110)
atggacggggcgccggtggcggagttcaggccgacgatgacgcacggcggccggtacctgctctacgacatcttcgggaacaagttcgaggtgacgaacaagtaccagccgcccatcatgcccattggccgcggcgcctacgggatcgtctgctccgtgatgaactttgagacgagggagatggtggcgataaagaagatcgccaacgcgttcaacaacgacatggacgccaagcgcacgctccgggagatcaagctcctcaggcacctcgaccacgagaacatcataggcatcagggatgtgatcccgccgccgatccctcaggcgttcaacgacgtctacatcgccacggagctcatggacaccgacctccatcacatcatccgctccaaccaagaactgtcagaagagcactgccagtatttcctgtaccagatcctgcgggggctcaagtacatccactcggcgaacgtgatccaccgcgacctgaagccgagcaacctgctgctgaacgccaactgcgacctcaagatctgcgacttcgggctggcgcggccgtcgtcggagagcgacatgatgacggagtacgtggtcacccggtggtaccgcgcgccggagctgctgctcaactccaccgactactccgccgccatcgacgtctggtccgtcggctgcatcttcatggagctcatcaaccgccagccgctcttccccggcagggaccacatgcaccagatgcgcctcatcaccgaggtgatcgggacgccgacggacgacgagctggggttcatacggaacgaggacgcgaggaagtacatgaggcacctgccgcagtacccgcgccggacgttcgcgagcatgttcccgcgggtgcagcccgccgcgctcgacctcatcgagaggatgctcaccttcaacccgctgcagagaatcacagttgaggaggcgctcgatcatccttacctagagagattgcacgacatcgccgatgagcccatctgcctggagcccttctccttcgacttcgagcagaaggctctaaacgaggaccaaatgaagcagctgatcttcaacgaagcgatcgagatgaacccaaacatccggtactag

SEQ ID NO: 63058 - protein, 369 aa, Oryza sativa
MDGAPVAEFRPTMTHGGRYLLYDIFGNKFEVTNKYQPPIMPIGRGAYGIVCSVMNFETREMVAIKKIANAFNNDMDAKRTLREIKLLRHLDHENIIGIRDVIPPPIPQAFNDVYIATELMDTDLHHIIRSNQELSEEHCQYFLYQILRGLKYIHSANVIHRDLKPSNLLLNANCDLKICDFGLARPSSESDMMTEYVVTRWYRAPELLLNSTDYSAAIDVWSVGCIFMELINRQPLFPGRDHMHQMRLITEVIGTPTDDELGFIRNEDARKYMRHLPQYPRRTFASMFPRVQPAALDLIERMLTFNPLQRITVEEALDHPYLERLHDIADEPICLEPFSFDFEQKALNEDQMKQLIFNEAIEMNPNIRY

SEQ ID NO: 63059 - DNA, 1113 bp, Oryza sativa
  CDS (1)..(1113)
atggcgatcatggtggatcctccaaatgggatgggtaaccaagggaagtattactactcgatgtggcaaactttgtttgagatagacactaagtatgtgccaatcaagcccatcgggcgaggagcttatgggattgtttgttcatccataaatcgtgagaccaacgagaaagtagcaataaagaagatacacaatgtttttgacaaccgtgttgatgcactaaggactttgcgggagctgaaacttctccggcatctccgccatgagaatgttattgctttgaaggatataatgatgccagtacacaggaggagttttaaagatgtgtacttagtttatgaactcatggatactgacctgcatcagataatcaagtcacctcagggtctttccaatgatcactgccaatattttctttttcagttgcttcgaggactgaaatatctccattcagcagagatactccacagagacctgaaacctggaaatctactggttaatgcaaactgtgatctcaagatatgtgattttggtcttgcacgcacaaacagtagtaaaggtcagtttatgactgagtatgttgtcacccgctggtatagagctcctgagttgctcctttgctgtgacaactatggcacttccattgatgtttggtctgttggttgcatcttcgctgagctacttggtcggaaacctattttcccaggaactgagtgcctaaatcagctcaagctcattgtcaatgttcttggcaccatgagcgagtctgacttggagttcattgacaacccaaaagctcgcagatatatcaaatccctcccctacactcccggtgtgcccctcgcgagtatgtatccgcatgcacaccctcttgccattgatcttttacagaagatgctcatatttgatcctaccaaaagaatcagtgtcaccgaggctcttgagcacccttacatgtcccctctgtatgatccaagtgcaaatcctcccgcgcaagtgcctatcgatctggacatagacgagaacatcagtgcagatatgatcagggaaatgatgtggcacgagatgctccactaccaccctgaagttgttgcagcaatgagtgcccgatga

SEQ ID NO: 63060 - protein, 370 aa, Oryza sativa
MAIMVDPPNGMGNQGKYYYSMWQTLFEIDTKYVPIKPIGRGAYGIVCSSINRETNEKVAIKKIHNVFDNRVDALRTLRELKLLRHLRHENVIALKDIMMPVHRRSFKDVYLVYELMDTDLHQIIKSPQGLSNDHCQYFLFQLLRGLKYLHSAEILHRDLKPGNLLVNANCDLKICDFGLARTNSSKGQFMTEYVVTRWYRAPELLLCCDNYGTSIDVWSVGCIFAELLGRKPIFPGTECLNQLKLIVNVLGTMSESDLEFIDNPKARRYIKSLPYTPGVPLASMYPHAHPLAIDLLQKMLIFDPTKRISVTEALEHPYMSPLYDPSANPPAQVPIDLDIDENISADMIREMMWHEMLHYHPEVVAAMSAR

SEQ ID NO: 63061 - DNA, 915 bp, Brassica napus
  CDS (1)..(915)
atggagaagtacgagaagctagagaaagtcggcgaaggaacctacggcaaagtctacaaagccgtcgagaaatccaccggaaagctcgtcgcgctcaagaaaacgcgcctcgagatcgacgaggaaggcatccctcccacggcgctccgcgagatctccctcctccagatgctctccacctccctctacatcgtccgcctcctctgcgtcgagcacgtcctcaagccccccgcgaagtccaacctctacctcgtcttcgagtacctcgacaccgacctcaagaaattcgtcgattcgttccgcaaatccgccaaccctaggccgctcggggatcccctgatccagaagctcatgttccagctctgcaaaggcgtcgcgcactgccacagccacggcgtgcttcaccgcgatttgaagccgcagaatctgcttttgctgaaggataaggagttgcttaagatcgctgatctggggctcgggaggacgttcactgtgccgcttaaggcttatacgcatgagattgttacgctttggtatagagctccggaggttcttcttggctcgactcattattctactgctgttgatatgtggtctgttggttgcatctttgctgagatggttaggaggcaagctcttttccctggtgattctgagtatcagcaactgcttcatatcttcaaattgctaggaacaccaactgagcagcaatggccaggtgtttcctctctgcgtgactggcatgcctacccaaagtgggagccgcaagacttagcacgtgctgttccttctctttcgcctcaaggagttgatcttctcacgaaaatgctcaagtacaatcctgctgaaagaattgcagcaaaaacagcacttgatcacccatactttgacagccttgacaagtcccagttctga

SEQ ID NO: 63062 - protein, 304 aa, Brassica napus
MEKYEKLEKVGEGTYGKVYKAVEKSTGKLVALKKTRLEIDEEGIPPTALREISLLQMLSTSLYIVRLLCVEHVLKPPAKSNLYLVFEYLDTDLKKFVDSFRKSANPRPLGDPLIQKLMFQLCKGVAHCHSHGVLHRDLKPQNLLLLKDKELLKIADLGLGRTFTVPLKAYTHEIVTLWYRAPEVLLGSTHYSTAVDMWSVGCIFAEMVRRQALFPGDSEYQQLLHIFKLLGTPTEQQWPGVSSLRDWHAYPKWEPQDLARAVPSLSPQGVDLLTKMLKYNPAERIAAKTALDHPYFDSLDKSQF

SEQ ID NO: 63063 - DNA, 942 bp, Brassica napus
  CDS (1)..(942)
atggataaggaagttatagcagtttcggccatggacgctttcgagaagctcgagaaagtcggcgaaggcacttacgggaaagtctacagagccagagagaaagctaccggaaagatcgtcgctctcaagaagacgcgtctccacgaggacgaagaaggcgttccttccaccactctccgcgagatctccatcttacgcatgctcgctcgcgatcctcacatcgtcaggttgatggatgttaagcaaggactgagcaaagacggcaaaactgtgctctacctggtgtttgagtacatggacactgacgtcaagaagtacatcagaagtttccgtcaaaccggagacaacattcctccccaaatcgtcaagagcttgatgtaccaactctgcaaaggaatgacgttctgccatggacacggtgtgctgcacagagatcttaagcctcacaatctcttgatggatcccaagacgatgaggctcaagattgcagatcttggtttagccagagccttcactctccctatgaagaagtatactcacgagatattgactctatggtatagagctccagaagttcttcttggtgccactcattactctacagctgtggatatgtggtctgttggctgcgtttttgctgagcttgtgactaaccaagcgatttttgctggagactctgagctccaacagcttctccatattttcaggttgctcggaacacccaatgaagaaatgtggccaggtgtgagcacactcaagaactggcacgagtatccacagtggaagccgttgagtctctccacgtctgttcctaaactcgatcaggctggacttgatcttctctctaaaatgctgcagtatgagccagcgaaacgaatctcagcaaagatggctatggagcatccttacttcgatgatctgcaggacaagtcctctctctga

SEQ ID NO: 63064 - protein, 313 aa, Brassica napus
MDKEVIAVSAMDAFEKLEKVGEGTYGKVYRAREKATGKIVALKKTRLHEDEEGVPSTTLREISILRMLARDPHIVRLMDVKQGLSKDGKTVLYLVFEYMDTDVKKYIRSFRQTGDNIPPQIVKSLMYQLCKGMTFCHGHGVLHRDLKPHNLLMDPKTMRLKIADLGLARAFTLPMKKYTHEILTLWYRAPEVLLGATHYSTAVDMWSVGCVFAELVTNQAIFAGDSELQQLLHIFRLLGTPNEEMWPGVSTLKNWHEYPQWKPLSLSTSVPKLDQAGLDLLSKMLQYEPAKRISAKMAMEHPYFDDLQDKSSL

SEQ ID NO: 63065 - DNA, 1107 bp, Brassica napus
  CDS (1)..(1107)
atggcgatgttagttgagccaccaaatgggatcaaacagcaagggaaacattactactccatgtggcaaacactgttcgaaatcgacactaagtatgttcccatcaaacccatcggaagaggagcttacggtgtggtttgttcttccatcaaccgcgagaccaacgagaaggtcgccatcaaaaagattcacaatgtgttcgagaatcgcgttgacgccttgaggacgctgagagagctcaagcttcttaggcacgtgaggcatgataacgtgatcgcgcttaaagacgttatgctgcctacgaataaatcgagtttcaaagatgtttacttggtttacgagctgatggatactgatcttcatcagatcatcaaatcctctcagtctctttctgatgatcactgcaaatacttcttgtttcagttgctaagaggattgaagtatcttcactctgcaaacatccttcaccgagatttgaagccagggaacctcttagtcaacgctaactgcgatctaaagatatgcgacttcgggttagctagaacgagccagggaaatgaacagttcatgaccgagtatgtggtcacgcgttggtacagagcacctgagcttcttctctgctgtgacaactacggaacctcaattgatgtctggtcggttggatgcatattcgcggagattcttggtcgaaaaccgatattcccggggacggaatgtctcaaccagcttaagctcatcatcaacgtcgttggtagccagcaagagtctgatattcggtttatagacaacccgaaagctcgaagattcatcaagtctcttcctttctcgaggggtacgcatctctccaatctctaccctcaagccaatcctctggctatagatttgctgcagaggatgctagtgtttgatccgaccaagagaatctctgtaaccgatgcactctcgcacccgtacatggcgggactgtttgactctggctctaatccacccgcgcatgtcccaatctctctggacatagatgagaacatggaggaacggatgatcagagagatgatgtgggacgagatgctttattaccaccctggagctgaaactgcaaacccctaa

SEQ ID NO: 63066 - protein, 368 aa, Brassica napus
MAMLVEPPNGIKQQGKHYYSMWQTLFEIDTKYVPIKPIGRGAYGVVCSSINRETNEKVAIKKIHNVFENRVDALRTLRELKLLRHVRHDNVIALKDVMLPTNKSSFKDVYLVYELMDTDLHQIIKSSQSLSDDHCKYFLFQLLRGLKYLHSANILHRDLKPGNLLVNANCDLKICDFGLARTSQGNEQFMTEYVVTRWYRAPELLLCCDNYGTSIDVWSVGCIFAEILGRKPIFPGTECLNQLKLIINVVGSQQESDIRFIDNPKARRFIKSLPFSRGTHLSNLYPQANPLAIDLLQRMLVFDPTKRISVTDALSHPYMAGLFDSGSNPPAHVPISLDIDENMEERMIREMMWDEMLYYHPGAETANP

SEQ ID NO: 63067 - DNA, 1110 bp, Triticum aestivum
  CDS (1)..(1110)
atggcgatgatggtggatccaccgaacggcatgggaaaccacgggaagcactactacaccatgtggcagaccatgttcgagattgacaccaagtacgtgccgatcaagcccatcggaagaggagcctacgggatagtttgctcctcgatcaaccaggagaccaacgagaaggtcgccatcaagaagataaacaacgtctttgacaaccgcgtggatgcgctgaggacgctgcgcgagctgaagctccttcggcacctgcgccatgagaatgtcattgccttgaaggatataatgatgccgatacataggaggagcttcaaggatgtctacttggtctccgagctcatggacacggatctgcatcagattgtcaagtcgtctcagccgctgtccaatgaccactgtcagtatttcctttttcagctgctccgaggactgaagtaccttcattcagcagggatactccatagagacctgaagcctgggaaccttctggtcaatgcaaactgtgacctgaagatctgtgactttggtctggctcgcacaaataacactaaaggtcagtttatgactgaatacgttgtcacccgctggtacagagctcccgagctgctgctctgctgcgacaactatggcacctccatagatgtctggtctgttggctgcatctttgctgagctacttggccgcaagccgatctttccaggaaccgagtgccttaatcagcttaagctcatagtcaatgttcttggcaccatgagcgaggctgacctcgcgttcattgacaacccgaaagcgcgcaactacattaaatcccttccatacaccccagggattcccctcagtagcatgtacccgcaagcgcaccctcttgccattgacctgttgcagaagatgcttgtctttgacccttccaaaaggatcagtgtcacccaggctctggagcacccctacatgtccccgctgtatgatcccagcgcaaaccctcctgcgcaggtgcccatcgatctcgacatagatgaaaacattggcacagatatgatccgagaaatgttgtggcaggagatgctccagtaccaccccgaggccgccaggatggtgaatatgtga

SEQ ID NO: 63068 - protein, 369 aa, Triticum aestivum
MAMMVDPPNGMGNHGKHYYTMWQTMFEIDTKYVPIKPIGRGAYGIVCSSINQETNEKVAIKKINNVFDNRVDALRTLRELKLLRHLRHENVIALKDIMMPIHRRSFKDVYLVSELMDTDLHQIVKSSQPLSNDHCQYFLFQLLRGLKYLHSAGILHRDLKPGNLLVNANCDLKICDFGLARTNNTKGQFMTEYVVTRWYRAPELLLCCDNYGTSIDVWSVGCIFAELLGRKPIFPGTECLNQLKLIVNVLGTMSEADLAFIDNPKARNYIKSLPYTPGIPLSSMYPQAHPLAIDLLQKMLVFDPSKRISVTQALEHPYMSPLYDPSANPPAQVPIDLDIDENIGTDMIREMLWQEMLQYHPEAARMVNM

SEQ ID NO: 63069 - DNA, 885 bp, Linum usitatissimum
  CDS (1)..(885)
atggagcagtacgagaaagtggagaagattggggagggaacttacggagtggtatataaggcccgtgatcgaaacaccaatcagactattgctttgaagaagattcgccttgaacaggaagatgagggcgtgccaagcaccgccattagagaaatttcgcttctgaaagaaatgcagcatggtaacattgtgaggttgcaggatgtggtgcacagtgagaaacggctatatttggtttttgagtacctggacttagatttgaaaaagcacatggactcaagtccggagtttgctaaggatccgcgtatagtcaaaactttcctataccaaatcctccgtggcatttcttattgccactctcacagggttcttcatcgagatctaaagccacagaatctgcttattgatcgtcgtaccaatgcactcaagcttgcagattttggtctggccagagcttttggtatacctgtcaggacattcacccatgaggtggtgactctctggtatagagccccagagattcttctcggatctcaccactactctactccagttgatgtgtggtctataggatgtattttcgccgaaatggtgaaccagcgccccttattccccggggactctgagattgatgagctatttaagattttcagaatcatggggacgcccaatgaagacacctgggccggagtaacatctttacccgatttcaagtccaccttcccaaagtggccttcaaaggacctggcaaccatggttcaaactctcgagtcaaccggtgttgacctcttacgaaaaatgctgtgcttggatccaagcaaaagaattacagccaggactgccctagagcatgaatacttcaaggacattggatttgtgccataa

SEQ ID NO: 63070 - protein, 294 aa, Linum usitatissimum
MEQYEKVEKIGEGTYGVVYKARDRNTNQTIALKKIRLEQEDEGVPSTAIREISLLKEMQHGNIVRLQDVVHSEKRLYLVFEYLDLDLKKHMDSSPEFAKDPRIVKTFLYQILRGISYCHSHRVLHRDLKPQNLLIDRRTNALKLADFGLARAFGIPVRTFTHEVVTLWYRAPEILLGSHHYSTPVDVWSIGCIFAEMVNQRPLFPGDSEIDELFKIFRIMGTPNEDTWAGVTSLPDFKSTFPKWPSKDLATMVQTLESTGVDLLRKMLCLDPSKRITARTALEHEYFKDIGFVP

SEQ ID NO: 63071 - DNA, 1287 bp, Zea mays
  CDS (1)..(1287)
atggcgagcgccggcaacagcggcagcggggacgacgatgcaggagggaagctcctggcggatcgctaccagaagggcgaggtcctcggcgagggcacgtatggagtcgtcttcaaggccatcgacaccaagactggaaatacagtcgcggtaaagcggatccggataggaaaggacaagaaggaaggtgtcaacttcactgcattgagggaaattaaactacttaaggagctgaaagatcctaatattatagagctgattgattgtttcccttacaaggaaaatttgcaccttgtgtttgagtttatggagaccgatctggaagctctcataaaagataagaacataatactctctccagctgacacaaaatcatatgtccagatgatgttaaaaggtctagcgttctgccataagaaatgggtgctacacagggatatgaaaccaaataatttactcattggtgccgatgggcagctcaagcttgctgacttcggtctggcccgtgtgttcgggagtccaggaaggaacttcactcaccaggtctttgcacgttggtaccgggcaccagaattattatttggctcgaagcagtacggatctggggtggatatttgggccgctggatgtatttttgctgaactgcttactcgcagagcctttctccagggttctagtgacattgatcaacttgggaagattttcgcagcacttggaaccccaaaatcttctcaatggcctgacatggtttatcttcctgattatgttgaataccaatatgttgctgcacctccactacgtacgttgtttccaatggccagcgatgatgctttggatcttctgtcaaaaatgcttacctatgatccaaaagcaagaatcagtgctcagcaggctctagaacacaggtacttttcatcgttacctgcaccaacaagaccatcgcagcttccaaggccacgtcggaaaggagatcaagagaataacaagattcctgatctcaacctgcaggatggccctatggtgctctccccgccaagaaagttacgtagggtgacagcgcatgaagggatggaaggtatgcacaggacagataaagtggacgaacatccttctgggatgaggcacaccgatgacatgcccagtcagagttctagaattccaatgtcagttgatgttggggctgtgtttggcacacgacctgcacctaggccaacattgaacagtgcggacaagtctcgtttaaaacggaaacttgatatggatccagagtttggatacgcggagtag

SEQ ID NO: 63072 - protein, 428 aa, Zea mays
MASAGNSGSGDDDAGGKLLADRYQKGEVLGEGTYGVVFKAIDTKTGNTVAVKRIRIGKDKKEGVNFTALREIKLLKELKDPNIIELIDCFPYKENLHLVFEFMETDLEALIKDKNIILSPADTKSYVQMMLKGLAFCHKKWVLHRDMKPNNLLIGADGQLKLADFGLARVFGSPGRNFTHQVFARWYRAPELLFGSKQYGSGVDIWAAGCIFAELLTRRAFLQGSSDIDQLGKIFAALGTPKSSQWPDMVYLPDYVEYQYVAAPPLRTLFPMASDDALDLLSKMLTYDPKARISAQQALEHRYFSSLPAPTRPSQLPRPRRKGDQENNKIPDLNLQDGPMVLSPPRKLRRVTAHEGMEGMHRTDKVDEHPSGMRHTDDMPSQSSRIPMSVDVGAVFGTRPAPRPTLNSADKSRLKRKLDMDPEFGYAE

SEQ ID NO: 63073 - DNA, 927 bp, Zea mays
  CDS (1)..(927)
atggagatcaacatcgtggacaagtacgagaagctggagaaggtcggggagggcacctacggcaaggtgtacaaggcgcaggacaaggcgacggggcagctggtggcgctgaagaagacccgcctcgagatggacgaggagggcatcccgcccacggcgctccgcgagatctccctcctcaacctcctctcccactccatctacatcgtccgcctcctcgccgtcgagcaggccgctaagaatggcaagcccgtcctctacctcgtcttcgagttcctcgacaccgatctcaagaagtacctcgacgtctaccgcagggggcccagcgccaggccgctccccgcgacactcatcaagaatttcctgtatcagttatgcaaaggagttgcacactgccatagccatggtgtccttcaccgggatttaaagccacaaaacctgctggtggacaaggagaagggtatactgaagattgctgatctgggactcggtagggctttcactgtgcccatgaaaagctacacccatgagattgtgaccctttggtacagagctcctgaagttttgcttggagcaacacattactcaactggcgttgatatgtggtctgttggatgcatctttgctgaaatggcccgacggcaggctctctttcctggtgactcggagttgcaacagttgcttcacatcttcaggttgctgggaacacctactgaggaacagtggcctggagtgagtgatttaagggactggcatgagtttccacagtggaagccccagggtttggcacgtgtcgtcccaacactggaacctgaaggagttgaccttctatcgaaaatgcttcagcttgatccttcaaacaggatatcagctttagctgcgatggagcatccctactttaacagccttgacaagtcccagttctag

SEQ ID NO: 63074 - protein, 308 aa, Zea mays
MEINIVDKYEKLEKVGEGTYGKVYKAQDKATGQLVALKKTRLEMDEEGIPPTALREISLLNLLSHSIYIVRLLAVEQAAKNGKPVLYLVFEFLDTDLKKYLDVYRRGPSARPLPATLIKNFLYQLCKGVAHCHSHGVLHRDLKPQNLLVDKEKGILKIADLGLGRAFTVPMKSYTHEIVTLWYRAPEVLLGATHYSTGVDMWSVGCIFAEMARRQALFPGDSELQQLLHIFRLLGTPTEEQWPGVSDLRDWHEFPQWKPQGLARVVPTLEPEGVDLLSKMLQLDPSNRISALAAMEHPYFNSLDKSQF

SEQ ID NO: 63075 - DNA, 885 bp, Helianthus annuus
  CDS (1)..(885)
atggaccagtatgagaaggttgagaagattggtgaaggaacatatggtgtggtctacaaggctcgtgacaaagttaccaatgaaacaatcgctttgaagaagattcgtctggagcaagaagacgagggtgtcccaagcacagctattagagaaatctcgttattgaaagagatgcaacatggaaatattgtcaagttacaggatgttgtgcacagtgacaaacgattgtatctggttttcgagtatctggacctggatttgaagaagcatatggactcatgtcccgagttttcaaaggatccacacattgtaaaaatgtttctatatcagatcctacgtggcattgcttattgccattcccatagagttctccatagagacttaaaacctcaaaaccttttgattgatcgccgtaccaatgcactaaagctcgcagattttggattggccagggcctttggcattcctgtcaggacattcacacacgaggtggttacactgtggtatagagcaccagaaattcttcttggatcgcgtcattattctactcctgttgatgtgtggtcggtcggttgtatatttgctgagatggtgaaccaacggccactcttccctggtgaatctgagattgatgagctgttcaaaattttcagaatcatgggaactccaaatgaagatacatggcatggtgtgacatcactgcctgactttaagtccgcctttccaaaatggtcatcaaaggaccttgcgactatcgtcccgaatcttgaaaagcccggtcttgatctcctacgtaaaatgctgtgcttggatcccagtagaagaattacagcccgggccgcactggaacacgaatactttaaagatatcgggtttgtgccataa

SEQ ID NO: 63076 - protein, 294 aa, Helianthus annuus
MDQYEKVEKIGEGTYGVVYKARDKVTNETIALKKIRLEQEDEGVPSTAIREISLLKEMQHGNIVKLQDVVHSDKRLYLVFEYLDLDLKKHMDSCPEFSKDPHIVKMFLYQILRGIAYCHSHRVLHRDLKPQNLLIDRRTNALKLADFGLARAFGIPVRTFTHEVVTLWYRAPEILLGSRHYSTPVDVWSVGCIFAEMVNQRPLFPGESEIDELFKIFRIMGTPNEDTWHGVTSLPDFKSAFPKWSSKDLATIVPNLEKPGLDLLRKMLCLDPSRRITARAALEHEYFKDIGFVP

SEQ ID NO: 63077 - DNA, 885 bp, Brassica napus
  CDS (1)..(885)
atggatcagtacgagaaagttgagaagatcggtgaaggaacctacggtgtggtgtacaaggcacgagacaaggtcaccaatgagactattgctttgaagaagatccgcctcgagcaggaggatgaaggtgtacctagcacagccattagagaaatctccctcttgaaagaaatgcagcacagcaacattgtcaagctgcaggatgtagtgcacagcgagaagcgtttgtatcttgttttcgagtatcttgacttggatctcaaaaagcacatggactcatctcctgatttctccaaggatcttcatatgatcaaaaggtatgtttaccagattctccgtggaatcgcgtattgccactctcacagggttctccaccgtgacctcaagccacagaatttgttgattgatcgccccacaaactcactaaagcttgcagattttggactggccagagcattcggtatccctgtcaggacttttactcacgaggtggttactctctggtaccgagcaccagagatactcctagggtctcatcactactctacacccgttgatatttggtctgtggggtgcatatttgccgagatgatcacccaaaagcccctgtttcctggagactccgagattgatcaactcttcaagattttcagaatcatgggaactccaaacgaagatacatggcctggggtaacttcgctgccggattacaaatctgctttccctaaatggaaaccaacggacttagaatcttttgtcccaaatctggatcccaatggaatagatctcctatctaaaatgctgttaatggatccaaccaaaagaatcaacgcaagagctgccctggagcatgattacttcaaggatcttggcgtcatgccttag

SEQ ID NO: 63078 - protein, 294 aa, Brassica napus
MDQYEKVEKIGEGTYGVVYKARDKVTNETIALKKIRLEQEDEGVPSTAIREISLLKEMQHSNIVKLQDVVHSEKRLYLVFEYLDLDLKKHMDSSPDFSKDLHMIKRYVYQILRGIAYCHSHRVLHRDLKPQNLLIDRPTNSLKLADFGLARAFGIPVRTFTHEVVTLWYRAPEILLGSHHYSTPVDIWSVGCIFAEMITQKPLFPGDSEIDQLFKIFRIMGTPNEDTWPGVTSLPDYKSAFPKWKPTDLESFVPNLDPNGIDLLSKMLLMDPTKRINARAALEHDYFKDLGVMP

SEQ ID NO: 63079 - DNA, 1107 bp, Brassica napus
  CDS (1)..(1107)
atggcgatgttagttgagccaccaaatgggatcaaacagcaagggaaacattactactccatgtggcaaacactgttcgaaatcgacaccaagtatgttcccatcaaacccatcggaagaggagcttacggtgtggtttgctcttccatcaaccgcgagaccaacgagaaagtcgccatcaaaaagattcacaacgtgttcgagaatcgagttgacgccttgaggacgctgagagagctcaagcttcttaggcacgtgaggcacgagaacgtgatcgcgcttaaagacgttatgctgcctacgaataaatcgagtttcaaagatgtgtacttggtttacgagctgatggatactgatcttcatcagatcatcaaatcctcccagtctctttctgatgatcactgcaaatacttcttgttccagttgctaagaggattgaagtatcttcactctgcaaacatccttcaccgagatttgaagccagggaacctcttagtcaacgctaactgcgatctaaagatatgcgacttcgggttagcgagaacaagccaaggaaacgaacagttcatgaccgagtacgtggtcacacgttggtacagagcacctgagcttcttctctgctgtgacaactacggaacctccattgatgtctggtcggtaggatgcatattcgcggagattcttggtcgaaaaccgatattcccggggacagaatgtctcaaccagcttaagctcatcatcaacgtcgttggtagccagcaagaatctgatattcggtttatagacaacccgaaagctcaaagattcataaagtctcttccttactcgaggggtacacatctctccaatctctacccgcaagccaatcctctggctatagatttgctgcagaggatgctagtgtttgatccgaccaagagaatctctgtaaccgatgcactctcgcacccgtacatggcgggactgtttgaccctggctctaatccacccgcacatgtcccaatctctctggacatagatgagaacatggaggaacggatgatcagagagatgatgtgggacgagatgctttattaccaccctggagctgaaactgcaaacccctaa

SEQ ID NO: 63080 - protein, 368 aa, Brassica napus
MAMLVEPPNGIKQQGKHYYSMWQTLFEIDTKYVPIKPIGRGAYGVVCSSINRETNEKVAIKKIHNVFENRVDALRTLRELKLLRHVRHENVIALKDVMLPTNKSSFKDVYLVYELMDTDLHQIIKSSQSLSDDHCKYFLFQLLRGLKYLHSANILHRDLKPGNLLVNANCDLKICDFGLARTSQGNEQFMTEYVVTRWYRAPELLLCCDNYGTSIDVWSVGCIFAEILGRKPIFPGTECLNQLKLIINVVGSQQESDIRFIDNPKAQRFIKSLPYSRGTHLSNLYPQANPLAIDLLQRMLVFDPTKRISVTDALSHPYMAGLFDPGSNPPAHVPISLDIDENMEERMIREMMWDEMLYYHPGAETANP

SEQ ID NO: 63081 - DNA, 1173 bp, Brassica napus
  CDS (1)..(1173)
atggagcagccaaagaaagtacctgataggtatctcaagcaagaggtcctcggacaaggtacttacggagtcgtcttcaaagccactgacactaagacaggagaaacagtagcaatcaagaagataaggattggtaaacacaaggaaggtgtaaacatcacggctctcagggaaatcaaaatgctgaaagagctaaagcatccacatattattctcttgattgatgcgtttcctcacaaacagaacttgcatcttgtgtttgagttcatggagactgacctcgaaggagtcattcgagattcaaacgtattcctctcacctgccgacatcaaatcttacctcctaatgacactgaaaggacttgcttattgccacgagaaacgggttttgcacagggatatgaagccaaataacttgttgataggacctgatggacagctgaaacttgcagattttggattagcacgtatatttggtactcctgatcgtaagtttacccaccaggtgtttgctagatggtacagagcaccagaacttttgtttggtgcaaaacaatatggtgctgcagttgatgtttgggctgcgggctgcgtatttgctgaacttctgctacgcagaccatttcttcagggaaacagtgatatcgatcaattaagcaaaatatttgctgcctttgggacaccaaaagcggatcaaaggccagacatgaaaagccttcctgattacgtagagtatcaatttgtcccagcaccttctctacgttctttattcccagcagttagtgaagatgctctcgatttattgtccaagatgtttacatatgacccaaaggctagaatttctgttaagcaggctctagaacacaggtactttacttctgcaccttctcctactgaccctgccaagctcccaaagccacttcgaaagcaggaaactaaagcctcttacggtaaacacgaggcgatcaaagtgatatcaccaccacgtaagattagaagagtaataccggagcgtgggaggcttgatggtatgaagtctcaagttgacaaggatcaacaagcacccatgtcattagatttcaccatcctcgctgagcgtcctccaaaccgacctaccatcaccagtgcggatagatctcatctgaagaggaagctcgacctcgacttccaatag

SEQ ID NO: 63082 - protein, 390 aa, Brassica napus
MEQPKKVPDRYLKQEVLGQGTYGVVFKATDTKTGETVAIKKIRIGKHKEGVNITALREIKMLKELKHPHIILLIDAFPHKQNLHLVFEFMETDLEGVIRDSNVFLSPADIKSYLLMTLKGLAYCHEKRVLHRDMKPNNLLIGPDGQLKLADFGLARIFGTPDRKFTHQVFARWYRAPELLFGAKQYGAAVDVWAAGCVFAELLLRRPFLQGNSDIDQLSKIFAAFGTPKADQRPDMKSLPDYVEYQFVPAPSLRSLFPAVSEDALDLLSKMFTYDPKARISVKQALEHRYFTSAPSPTDPAKLPKPLRKQETKASYGKHEAIKVISPPRKIRRVIPERGRLDGMKSQVDKDQQAPMSLDFTILAERPPNRPTITSADRSHLKRKLDLDFQ

SEQ ID NO: 63083 - DNA, 951 bp, Brassica napus
  CDS (1)..(951)
atggagaacaacggagtaaagagtgcagcgtcgtcggccatggaagccttcgagaagctagagaaagtaggagaaggcacttacggcaaagtgtacagagcaagagagaaggccaccggtctcatcgtcgctctgaagaagactcgtctccatgaggacgaagaaggcgttcctcccaccactctccgcgagatctccatcctccgcatgctcgctcgcgatccccacatcgtcaggttgatggacgttaagcaaggattgaacaaagaaggcaagactgtgctctaccttgtgttcgagtacgttgacactgatctcaagaagttcatcagaagctttaagcaagctgggcagaacattcctcagaacactgtcaagagcttgatgtaccaactatgcaaaggcatggctttctgccatggccatggagtgttacacagggatcttaagcctcacaatctcttgatggaccgccagaaaatgaccctcaaaatagctgatcttggattagccagagccttcactctccctatgaaaaagtatacacatgagattctaactctatggtatagagctccagaagtccttcttggagcaacccattactcaaccgctgttgatatgtggtctgttggctgcatttttgctgagctagtgaacaagcaagcaatctttgctggagactctgagctccaacagctcctcagcattttcaggttgctgggaacaccaaacgaacaagtgtggcctggagtgagcaaactcaaggactggcatgaatacccacagtggaaaccattgagcctctcaacagctgttccaaacctcgatgagtctggacttgatctcttatcaaaaatgctggagtatgagccagttaaacgaatctcagcaaagaaggctatggagcatccttacttcgatgatctacctgacaagtcctctctctga

SEQ ID NO: 63084 - protein, 316 aa, Brassica napus
MENNGVKSAASSAMEAFEKLEKVGEGTYGKVYRAREKATGLIVALKKTRLHEDEEGVPPTTLREISILRMLARDPHIVRLMDVKQGLNKEGKTVLYLVFEYVDTDLKKFIRSFKQAGQNIPQNTVKSLMYQLCKGMAFCHGHGVLHRDLKPHNLLMDRQKMTLKIADLGLARAFTLPMKKYTHEILTLWYRAPEVLLGATHYSTAVDMWSVGCIFAELVNKQAIFAGDSELQQLLSIFRLLGTPNEQVWPGVSKLKDWHEYPQWKPLSLSTAVPNLDESGLDLLSKMLEYEPVKRISAKKAMEHPYFDDLPDKSSL

SEQ ID NO: 63085 - DNA, 1122 bp, Brassica napus
  CDS (1)..(1122)
atgtcggcggagaactgttttggcggcggcggtggtgatcagagcacgaaaggattggctactcacggtggtcagtacgttcagtacaatgtctacggaaacatcttcgaagtgactagaaagtacgttcctcctcttcgccccatcggcagaggcgcttacggcatcgtctgtgctgctacaaactcagagacgggagaggaagtagctatcaagaagatcggtaacgcttttgacaacatcatcgacgccaagagaaccttgagagagattaagctcctcaagcacatggatcacgagaatgttattgctgtgaaggatataataagaccacccctgagagagaacttcaacgatgtttacattgtttatgagctcatggacactgatctccaccagattatacgctctaaccaacccttaactgatgatcattgtcggttcttcttgtatcagttgttgcgtgggctcaagtacgttcattcagccaatgtgttacaccgagatttaaagcccagcaatttgctcctgaacgcaaactgtgatctaaagcttggggatttcgggcttgcgaggaccaaatccgagactgacttcatgactgagtacgttgttacacgctggtaccgagctccagagttgctccttaactgctccgagtacacagcagcgatcgatatctggtccgtcggttgtattctcggtgaaacaatgacaagagagcccttgtttccgggtaaagattatgttcatcagcttaggcttatcactgagcttataggatcacctgatgattcaagcttggggttcttaaggagcgacaacgcaaggagatacgttaaacagcttccacagtacccgagacagaacttcgctgctaggttcccaaacatgtcagctggcgcagccgatttgcttgagaaaatgctcgtctttgatccaagcagacgcatcactgttgatgaggcgttgtgccacccatatttggcgccgctgcacgatataaacgaggaaccggtgtgtgtgaggccgttcaatttcgattttgagcaaccttctttgacagaagagaacatcaaggagcttatatatcgtgaaacagtcaagttcaatcctcagtaa

SEQ ID NO: 63086 - protein, 373 aa, Brassica napus
MSAENCFGGGGGDQSTKGLATHGGQYVQYNVYGNIFEVTRKYVPPLRPIGRGAYGIVCAATNSETGEEVAIKKIGNAFDNIIDAKRTLREIKLLKHMDHENVIAVKDIIRPPLRENFNDVYIVYELMDTDLHQIIRSNQPLTDDHCRFFLYQLLRGLKYVHSANVLHRDLKPSNLLLNANCDLKLGDFGLARTKSETDFMTEYVVTRWYRAPELLLNCSEYTAAIDIWSVGCILGETMTREPLFPGKDYVHQLRLITELIGSPDDSSLGFLRSDNARRYVKQLPQYPRQNFAARFPNMSAGAADLLEKMLVFDPSRRITVDEALCHPYLAPLHDINEEPVCVRPFNFDFEQPSLTEENIKELIYRETVKFNPQ

SEQ ID NO: 63087 - DNA, 1107 bp, Brassica napus
  CDS (1)..(1107)
atggcgatgttagttgagccaccaaatgggatcaaacagcaagggaaacattactactccatgtggcaaacactgttcgaaatcgacactaagtatgttcccatcaaacccatcggaagaggagcttacggtgtggtttgttcttccatcaaccgcgagaccaacgagaaggtcgccatcaaaaagattcacaatgtgttcgagaatcgcgttgacgccttgaggacgctgagagagctcaagcttcttaggcacgtgaggcatgataacgtgatcgcgcttaaagacgttatgctgcctacgaataaatcgagtttcaaagatgtttacttggtttatgagctgatggatactgatcttcatcagatcatcaaatcttctcagtctctttctgatgatcactgcaagtacttcttgtttcagttgctaagaggattgaagtatcttcactctgcaaacatccttcaccgagatttgaagccagggaacctcttagtcaacgctaactgcgatctaaagatatgtgacttcgggttagccagaacgagccagggaaatgaacagttcatgaccgagtatgtggtcacgcgttggtacagagcacctgagcttcttctctgctgtgacaactacggaacctccattgatgtctggtcggtaggatgcatattcgcggagattcttggtcgaaaaccgatattcccggggacagaatgtctcaaccagcttaagctcatcatcaacgtcgttggtagccagcaagaatctgatattcggtttatagacaacccgaaagctcaaagattcataaagtctcttccttactcgaggggtacacatctctccaatctctacccgcaagccaatcctctggctatagatttgctgcagaggatgctagtgtttgatccgaccaagagaatctctgtaaccgatgcactctcgcacccgtacatggcgggactgtttgaccctggctctaatccacccgcacatgtcccaatctctctggacatagatgagaacatggaggaacggatgatcagagagatgatgtgggacgagatgctttattaccaccctggagctgaaactgcaaacccctaa

SEQ ID NO: 63088 - protein, 368 aa, Brassica napus
MAMLVEPPNGIKQQGKHYYSMWQTLFEIDTKYVPIKPIGRGAYGVVCSSINRETNEKVAIKKIHNVFENRVDALRTLRELKLLRHVRHDNVIALKDVMLPTNKSSFKDVYLVYELMDTDLHQIIKSSQSLSDDHCKYFLFQLLRGLKYLHSANILHRDLKPGNLLVNANCDLKICDFGLARTSQGNEQFMTEYVVTRWYRAPELLLCCDNYGTSIDVWSVGCIFAEILGRKPIFPGTECLNQLKLIINVVGSQQESDIRFIDNPKAQRFIKSLPYSRGTHLSNLYPQANPLAIDLLQRMLVFDPTKRISVTDALSHPYMAGLFDPGSNPPAHVPISLDIDENMEERMIREMMWDEMLYYHPGAETANP

SEQ ID NO: 63089 - DNA, 1044 bp, Brassica napus
  CDS (1)..(1044)
atgtcgaaatcgggcggaaaccaacccgtagatcgatacctaagacgccaagtgctcggagaaggaacatacggtgtcgtttacaaagccaccgacaccaagacaggtaagacagtagcagtgaagaagatcaggttaggaaaccagaaagaaggcgtcaatttcacggcccttagggagatcaagctcctaaaagagctgaaccatccccacatcgtcgagctcatcgacgcgtttcctcacgacgggagcttgcatctggttttcgagtatatgcagacggatttggaagctgtgattcgtgaccgtaacatttttctttctcctggtgatatcaagtcttatatgttgatgactcttaagggtttagcttattgtcacaagaaatgggttcttcatagggatatgaagcctaataatctactgattggagagaatggtctgttgaagttagctgattttggtttggcgagagtgtttgggagtccgaatcggaggtttactcatcaggtatttgcgacgtggtacagagcccccgagttgctgtttgggagtagacagtatggtgcaggagttgatgtctgggctgcaggctgtatcttcgctgagctattacttcgtcgaccctttctacctggttccactgagatagatcaactgggaaagatctttcaagcttttggaactccaacacaatcccaatggtctgacatgatctatctcccagagtacatggagttctcctacacacctgctccaccactacgtaccattttccctatggcaagcgacgacgctttggatcttctatccaaaatgttcatctacgacccacgccaacgtatcaccatacagcaagctttggaccacaggtatttctcgtcttctccatcaccaactgagccagggaagcttcagattccagcttcgaaaggagacgccctcgaaccaaaggcatctgagcaaaacaaccaacacggaaacagccccgccgtgctatcacctcctggaaaaatgaggagagtgatgggtcctgagggataa

SEQ ID NO: 63090 - protein, 347 aa, Brassica napus
MSKSGGNQPVDRYLRRQVLGEGTYGVVYKATDTKTGKTVAVKKIRLGNQKEGVNFTALREIKLLKELNHPHIVELIDAFPHDGSLHLVFEYMQTDLEAVIRDRNIFLSPGDIKSYMLMTLKGLAYCHKKWVLHRDMKPNNLLIGENGLLKLADFGLARVFGSPNRRFTHQVFATWYRAPELLFGSRQYGAGVDVWAAGCIFAELLLRRPFLPGSTEIDQLGKIFQAFGTPTQSQWSDMIYLPEYMEFSYTPAPPLRTIFPMASDDALDLLSKMFIYDPRQRITIQQALDHRYFSSSPSPTEPGKLQIPASKGDALEPKASEQNNQHGNSPAVLSPPGKMRRVMGPEG

SEQ ID NO: 63091 - DNA, 1107 bp, Brassica napus
  CDS (1)..(1107)
atggcgatgttagttgagccaccaaatgggatcaaacagcaagggaaacattactactccatgtggcaaacactgttcgaaatcgacactaagtatgttcccatcaaacccatcggaagaggagcttacggtgtggtttgttcttccatcaaccgcgagaccaacgagaaggtcgccatcaaaaagattcacaatgtgttcgagaatcgcgttgacgccttgaggacgctgagagagctcaagcttcttaggcacgtgaggcatgataacgtgatcgcgcttaaagacgttatgctgcctacgaataaatcgagtttcaaagatgtttacttggtttatgagctgatggatactgatcttcatcagatcatcaaatcttcccagtctctttctgatgatcactgcaagtacttcttgttccagttgctaagaggattgaagtatcttcactctgcaaacatccttcaccgagatttgaagccagggaacctcttagtcaacgctaactgcgatctaaagatatgtgacttcgggttagccaggacgagccagggaaatgaacagttcatgaccgagtatgtggtcacgcgttggtacagagcacctgagcttcttctctgctgtgacaactacggaacctccattgatgtctggtcggttgggtgcatattcgcggagattcttggtcgaaaaccgatattcccggggacagaatgtctcaaccagcttaagctcatcatcaacgtcgttggtagccagcaagaatctgatattcggtttatagacaacccgaaagctcgaagattcatcaagtctcttccttactcgaggggtacacatctctccaatctctacccgcaagccaatcctctggctatagatttgctgcagaggatgctagtgtttgatccgaccaagagaatctctgtaaccgatgcactctcgcacccgtacatggcgggactgtttgaccctggctctaatccacccgcacatgtcccaatctctctggacatagatgagaacatggaggaacggatgatcagagagatgatgtgggacgagatgctttattaccaccctggagctgaaactgcaaacccctaa

SEQ ID NO: 63092 - protein, 368 aa, Brassica napus
MAMLVEPPNGIKQQGKHYYSMWQTLFEIDTKYVPIKPIGRGAYGVVCSSINRETNEKVAIKKIHNVFENRVDALRTLRELKLLRHVRHDNVIALKDVMLPTNKSSFKDVYLVYELMDTDLHQIIKSSQSLSDDHCKYFLFQLLRGLKYLHSANILHRDLKPGNLLVNANCDLKICDFGLARTSQGNEQFMTEYVVTRWYRAPELLLCCDNYGTSIDVWSVGCIFAEILGRKPIFPGTECLNQLKLIINVVGSQQESDIRFIDNPKARRFIKSLPYSRGTHLSNLYPQANPLAIDLLQRMLVFDPTKRISVTDALSHPYMAGLFDPGSNPPAHVPISLDIDENMEERMIREMMWDEMLYYHPGAETANP

SEQ ID NO: 63093 - DNA, 885 bp, Brassica napus
  CDS (1)..(885)
atggatcagtacgagaaagttgagaagatcggtgaaggaacttacggtgttgtgtacaaggcacgagacaaggtcaccaatgagactattgctttgaagaagatccgcctcgagcaggaggatgaaggtgttcctagcactgccattagagaaatctctcttttgaaagaaatgcagcacagcaacattgtcaagctgcaggatgtagtgcacagcgagaagcgtttgtatcttgttttcgagtatcttgacttggatctcaaaaagcacatggactcttctcctgatttctccaaggatcttcatatgatcaaaacctatctttaccagattctccgtggaatcgcgtattgccactctcacagggttctccaccgtgatctgaagccgcagaatttgttgattgatcgcgccacaaactcactaaagcttgcagattttggactggccagagctttcggtatccccgtcaggacatttactcatgaggtggttactctctggtaccgagcacctgagatactcctaggttctcatcattactctacacccgttgatatttggtctgtgggatgcatatttgccgagatgatcacccaaaagcccctgtttcctggagactccgagattgatcaactcttcaagattttcagaatcatgggaactccaaacgaagatacatggcccggtgtaacttcgctgccggattacaaatctgctctgcctaaatggaaaccaacggacttaagatcttttgtcccgaatctggatcccgagggaatagatctcctatctaaaatgctgttaatggatcccacgaaaagaatcaacgcaagagctgccctggagcatgattacttcaaggatcttggcgtcatgccttag

SEQ ID NO: 63094 - protein, 294 aa, Brassica napus
MDQYEKVEKIGEGTYGVVYKARDKVTNETIALKKIRLEQEDEGVPSTAIREISLLKEMQHSNIVKLQDVVHSEKRLYLVFEYLDLDLKKHMDSSPDFSKDLHMIKTYLYQILRGIAYCHSHRVLHRDLKPQNLLIDRATNSLKLADFGLARAFGIPVRTFTHEVVTLWYRAPEILLGSHHYSTPVDIWSVGCIFAEMITQKPLFPGDSEIDQLFKIFRIMGTPNEDTWPGVTSLPDYKSALPKWKPTDLRSFVPNLDPEGIDLLSKMLLMDPTKRINARAALEHDYFKDLGVMP

SEQ ID NO: 63095 - DNA, 1107 bp, Glycine max
  CDS (1)..(1107)
atggctactttagttgaaccccccaacagaattaagcctaaggggaagcattattatacaatatggcaaacattgtttgagattgatacgaagtacgttccaatcaagcctataggccgaggagcatatggcgtggtgtgctcttccatcaacagggagaccaatgagaaagttgcaattaagaagattggtaatatatttgagaattctattgatgcattgagaactttaagggagctgaagctgcttagacatattcggcacgagaatgtcattgctttgaaagatgttatgatgccaatccacagaacaagttttaaagatgtctacttggtctacgagctcatggatacagatcttcatcaaattattaagtcctctcaaccactttccaatgatcattgcaaatatttcttgtttcagctccttcgaggtctaaaatatcttcattcagcaaacattcttcaccgggacttgaagcctgggaatctgctcgtcaatgccaattgcgatttgaaaatatgcgactttgggcttgcacgaactaatggagttgatggccagtttatgacagagtatgttgtcactcgctggtatcgtgcaccggagctcttgttatgctgtgacaattacggaacctctattgatgtctggtcagtagggtgcatttttgctgagattcttggtagaaagccaatcttccctgggactgagtgtctcaaccagctgaaactaattataagcgttcttggaagccagcatgaatctcatcttgagtttattgataatgcaaaagcaaggaggtttatcaaatcactgccctatactaggggcagacacttctctcagctatacccacaagcagatccattagccatagatttgttgcaaaaaatgcttgtgttcgatccaaccaagagaattactgtcttggaagctctccaacacccgtatatggctagcctatatgatccaaggtgcgaccctcctgctcaggttcccatcagtctcgacatagatgaacattggggagaaccgatgattagggaaatgttttggaatgagatgctacattatcatcctgaagctgcttccgccaatgcataa

SEQ ID NO: 63096 - protein, 368 aa, Glycine max
MATLVEPPNRIKPKGKHYYTIWQTLFEIDTKYVPIKPIGRGAYGVVCSSINRETNEKVAIKKIGNIFENSIDALRTLRELKLLRHIRHENVIALKDVMMPIHRTSFKDVYLVYELMDTDLHQIIKSSQPLSNDHCKYFLFQLLRGLKYLHSANILHRDLKPGNLLVNANCDLKICDFGLARTNGVDGQFMTEYVVTRWYRAPELLLCCDNYGTSIDVWSVGCIFAEILGRKPIFPGTECLNQLKLIISVLGSQHESHLEFIDNAKARRFIKSLPYTRGRHFSQLYPQADPLAIDLLQKMLVFDPTKRITVLEALQHPYMASLYDPRCDPPAQVPISLDIDEHWGEPMIREMFWNEMLHYHPEAASANA

SEQ ID NO: 63097 - DNA, 885 bp, Glycine max
  CDS (1)..(885)
atggaacagtacgagaaggttgagaagataggcgaaggaacatacggcgtcgtttacaagggtcgcgaccgcgtcaccaacgagaccatcgcgttgaagaagattcgcctcgagcaggaggatgagggggttcccagcaccgccattcgcgagatttctctcttgaaagaaatgcagcacaggaacattgttaggttgcaggatgtagtgcacgatgagaagagtttgtatctggtttttgagtaccttgacttagatctaaagaagcacatggattcatctccagaatttgcaaaagatccacgacaactaaaaatgttcctgtaccaaattctctgtggcatcgcttactgtcattcacgtagagttcttcatcgagacttaaaaccacagaatttgttgatagatcgcagcaataatgcactaaaacttgcagattttggattggctagggcttttggaattcctgttaggacatttacacatgaggtggtaacactgtggtacagagctccagaaattttgcttggatcccatcattattctaccccagttgatatttggtcagtgggatgcatatttgcagagatggtaaatcaacgacctcttttccctggggactctgagattgatgaattgtttaaaatattcagaatcatgggtacaccaaatgaagatacatggcctggagtgacatcattgcctgattttaaatcagccttccccaaatggcagcctaaggacctgaaaattgtggttccaaatcttgagccagctggtcttgatcttctttctagcatgctttacttggatcccagcaaaagaattactgctaggagcgctcttgagcatgaatacttcaaagacattaaatttgtaccctga

SEQ ID NO: 63098 - protein, 294 aa, Glycine max
MEQYEKVEKIGEGTYGVVYKGRDRVTNETIALKKIRLEQEDEGVPSTAIREISLLKEMQHRNIVRLQDVVHDEKSLYLVFEYLDLDLKKHMDSSPEFAKDPRQLKMFLYQILCGIAYCHSRRVLHRDLKPQNLLIDRSNNALKLADFGLARAFGIPVRTFTHEVVTLWYRAPEILLGSHHYSTPVDIWSVGCIFAEMVNQRPLFPGDSEIDELFKIFRIMGTPNEDTWPGVTSLPDFKSAFPKWQPKDLKIVVPNLEPAGLDLLSSMLYLDPSKRITARSALEHEYFKDIKFVP

SEQ ID NO: 63099 - DNA, 885 bp, Zea mays
  CDS (1)..(885)
atggagcagtacgagaaggtggagaagatcggggagggcacgtacggggtggtgtacaaggcgctggacaaggccaccaacgagacgatcgcgctcaagaagatccgcctcgagcaggaggacgagggcgtcccgtccaccgccatccgcgagatctctctcctcaaggagatgaaccacggcaacatcgtcagattacatgatgttgtccacagcgagaagcgcatatacctcgtcttcgagtacctggatctggacctcaagaagttcatggactcttgcccggagtttgctaagaatcccactttgattaagtcatacctctaccagatactccgtggtgttgcgtactgccattctcatagagttcttcaccgagatttgaaacctcagaacttgttgatagatcggcgtaataatgcactgaagcttgcagactttggtttagccagggcatttggaattcctgtccgtacatttactcatgaggtagtgacattatggtacagagctccagaaatccttcttggagcgagacagtattccacaccagttgacgtatggtctgtgggctgtatctttgcggaaatggtgaaccaaaagccactattccctggtgattctgagatcgacgaactgttcaagatattcagggtgctaggtacaccgaatgaacaaagttggcctggagtcagttgtttgcctgacttcaagactgctttccccaggtggcaagctcaggacctggcaacaatagtcccaaatctagaacctgctggcttggaccttctctctaaaatgcttaggtatgagccaagcaaaagaatcacagctaggcaagcacttgagcacgagtacttcaaggaccttgagatggtacagtga

SEQ ID NO: 63100 - protein, 294 aa, Zea mays
MEQYEKVEKIGEGTYGVVYKALDKATNETIALKKIRLEQEDEGVPSTAIREISLLKEMNHGNIVRLHDVVHSEKRIYLVFEYLDLDLKKFMDSCPEFAKNPTLIKSYLYQILRGVAYCHSHRVLHRDLKPQNLLIDRRNNALKLADFGLARAFGIPVRTFTHEVVTLWYRAPEILLGARQYSTPVDVWSVGCIFAEMVNQKPLFPGDSEIDELFKIFRVLGTPNEQSWPGVSCLPDFKTAFPRWQAQDLATIVPNLEPAGLDLLSKMLRYEPSKRITARQALEHEYFKDLEMVQ

SEQ ID NO: 63101 - DNA, 981 bp, Zea mays
  CDS (1)..(981)
atggcgacgatccagaacaagccgactccgacgggccgtccacgacgacgggcggcggactgcgcgccatggatctgttacgagaagctggagaaggtcggagaggggacctacgggaaggtgtacagggcgcgggagaaggcgacggggcggatcgtggcgctgaagaagacgcggctccccgaggacgacgagggcgtgccccccaccgcgatgcgggaggtctccttgctgcggatgctgtcgcaggacccgcacgtggtgcgcctgctggacctcaagcagggcgtgaacaaggaggggcagaccatcctctacctggtcttcgagtacatggacaccgacctcaagaagttcatccggggacaccgcagcaacaacgagaagatccccgcggccaccgtcaagatcctgatgtaccagctctgcaagggcgtggccttcgtccacggccgcggggtgctgcaccgggacctcaagccgcacaacctcctcatggaccgcaagaccatggcgctcaagatcgccgacctcggcctcagccgcgccatcaccgtcccggtgaagaagtacacccacgagatacttaccctgtggtacagggcccccgagattctgcttggagccacgcactactccaccccggttgacatatggtccgttggctgcattttcgccgagctggtcactaaccagccacttttccctggcgactcggagctgcagcagctgctccacatcttcaagttgcttggcaccccaaacgaacaggtgtggccaggcgtcggcaagctgcccaactggcacgagtacccccagtggaagccgacgaagctgtctgcttttgtgcccggcctcgacgctgatggctacgatcttcttgagaaattgctggaatacgagccggcgaagcggatccccgcgaagaaggccctggagcacccctacttcaaagatgtgaggaagggagatgcgcactga

SEQ ID NO: 63102 - protein, 326 aa, Zea mays
MATIQNKPTPTGRPRRRAADCAPWICYEKLEKVGEGTYGKVYRAREKATGRIVALKKTRLPEDDEGVPPTAMREVSLLRMLSQDPHVVRLLDLKQGVNKEGQTILYLVFEYMDTDLKKFIRGHRSNNEKIPAATVKILMYQLCKGVAFVHGRGVLHRDLKPHNLLMDRKTMALKIADLGLSRAITVPVKKYTHEILTLWYRAPEILLGATHYSTPVDIWSVGCIFAELVTNQPLFPGDSELQQLLHIFKLLGTPNEQVWPGVGKLPNWHEYPQWKPTKLSAFVPGLDADGYDLLEKLLEYEPAKRIPAKKALEHPYFKDVRKGDAH

SEQ ID NO: 63103 - DNA, 1119 bp, Zea mays
  CDS (1)..(1119)
atggattcctccggcggcggcggtggagcgcagatcaagggtatggcgacgcacgggggccgctacgtgctgtacaacgtgtacggaaacctcttcgaggtctcctccaagtacgccccacccatccgccccatcggtcgcggcgcctacggcattgtctgcgcggctgtcaactcgcagtcaggggaggaggttgcgatcaagaaggttggcaatgcgttcgacaaccacatcgacgccaagcggacgctcagggaaatcaagctgctgcgccacatggaccatgagaacatccttgccttaaaggatgtaattcggcccccaactagagagaactttaatgacgtgtacattgttactgagttaatggatacagatctccatcagatcgtacgctcaaatcagccattgactgatgatcattgccagtacttcttgtatcagttgctacgagggctaaaatatgtgcactcagcaaatatattgcaccgcgatctgaagccgagcaatttgttcctaaatgcaaattgtgacctcaagattgcagactttgggcttgcaaggaccacttcagagacagatctcatgacagagtatgtggtcactcgttggtaccgggcaccagagctgctgttgaactgttcacagtatactgctgccattgatgtctggtcagttggatgcatactaggtgaaatcgttactcgtcaacccctatttcctggacgggattacatccagcaattaaaattgatcactgagctcataggctctccagatgatgcaagcctgggattccttcgaagtgataatgcaaaaagatacatgaaacaactaccacagtttccaagacaggacttccgcctgcgtttctgcaacatgtctcctggcgcagtcgatttgttggaaaggatgcttgtgtttgatccaagcagacggattacagttgatgaggctctgcatcatccatacttggcttcacttcatgagatcaatgatgaacctacctgccctgcacctttcagctttgattttgagcaaccatcctttacagaagcgcatataaaagaactcatctggagggaatctttagcatttaacccagagcctccctactaa

SEQ ID NO: 63104 - protein, 372 aa, Zea mays
MDSSGGGGGAQIKGMATHGGRYVLYNVYGNLFEVSSKYAPPIRPIGRGAYGIVCAAVNSQSGEEVAIKKVGNAFDNHIDAKRTLREIKLLRHMDHENILALKDVIRPPTRENFNDVYIVTELMDTDLHQIVRSNQPLTDDHCQYFLYQLLRGLKYVHSANILHRDLKPSNLFLNANCDLKIADFGLARTTSETDLMTEYVVTRWYRAPELLLNCSQYTAAIDVWSVGCILGEIVTRQPLFPGRDYIQQLKLITELIGSPDDASLGFLRSDNAKRYMKQLPQFPRQDFRLRFCNMSPGAVDLLERMLVFDPSRRITVDEALHHPYLASLHEINDEPTCPAPFSFDFEQPSFTEAHIKELIWRESLAFNPEPPY

SEQ ID NO: 63105 - DNA, 1110 bp, Zea mays
  CDS (1)..(1110)
atggcgatgatggtggatccgccgaatggaatcgggaaccaaggaaagcattactactctatgtggcagaccttatttgagatagacaccaaatatgtgccgatcaagcccattggtcgaggagcttatgggatagtttgttcatccattaatcgtgaaacaaatgagaaagtagcaataaagaagatacacaacgttttcgacaaccgtgtggatgcactacggaccttgcgggagctgaaactccttcgccatctccggcatgagaatgtcattgctttgaaggatataatgatgccaatacacaggagaagctttaaggatgtgtacttggtatacgaactcatggatactgatttgcaccagataatcaaatcacctcagggcctttccaatgaccactgccagtattttctttttcagttgctccgaggactcaaatatctccattcagcagaaatactccacagagacctaaaacctggaaacctgctggtgaatgcaaattgtgatctgaagatatgtgattttggtctcgcacgtacaaacagtagcaaaggccagttcatgactgaatacgtcgtcacccgctggtacagagctcctgagctgctcctctgctgcgacaactacggcacatccatagacgtctggtctgtggggtgcatctttgctgagctccttggccgcaagccgatcttcccaggaaccgagtgcctgaaccagctcaagctcatcgtcaacgtcctcggcaccatgggcgaggccgacctcgcgttcatcgacaacccgaaggcccgcaagtacatcaagtcccttccgtacgccccgggcgcccccttcaccggcatgtaccctcaggcgcaccctctcgccatcgacctgctgcagaagatgctcgtgttcgacccgtccaagaggatcagcgtcaccgaggcgctggagcacccgtacatgtctccgctctatgacccgagcgcgaaccctcccgcgcaggtgccgatcgacctcgacatcgacgagaacctcggcgtcgacatgatcagggagatgatgtggcaggagatgatccactaccaccccgaggtcctcacgagaatcagcatgtga

SEQ ID NO: 63106 - protein, 369 aa, Zea mays
MAMMVDPPNGIGNQGKHYYSMWQTLFEIDTKYVPIKPIGRGAYGIVCSSINRETNEKVAIKKIHNVFDNRVDALRTLRELKLLRHLRHENVIALKDIMMPIHRRSFKDVYLVYELMDTDLHQIIKSPQGLSNDHCQYFLFQLLRGLKYLHSAEILHRDLKPGNLLVNANCDLKICDFGLARTNSSKGQFMTEYVVTRWYRAPELLLCCDNYGTSIDVWSVGCIFAELLGRKPIFPGTECLNQLKLIVNVLGTMGEADLAFIDNPKARKYIKSLPYAPGAPFTGMYPQAHPLAIDLLQKMLVFDPSKRISVTEALEHPYMSPLYDPSANPPAQVPIDLDIDENLGVDMIREMMWQEMIHYHPEVLTRISM

SEQ ID NO: 63107 - DNA, 1113 bp, Brassica napus
  CDS (1)..(1113)
atgaacaacgccggcggccaatatccagattttccggcggtgcagacgcacggaggacagttcataagctacgatatcttcggtagtttattcgaggtcacatccaagtaccgtcctccgattgttccaatcggtcggggcgcatacggcatcgtttgctctgtgttggattcggagacgaacgagcttgtggcgatgaagaagatagccaacgcctttgataatcacatggacgccaagcgtacacttcgcgagatcaagcttcttcgtcatctcgatcatgaaaacatcatagctataagagatgtggttcctccaccacttagaagagagttcagtgatgtttatatcgccactgagttaatggacactgatcttcatcaaatcatcagatccaaccagggcttgtctgaggaacactgtcagtacttcctgtaccagcttcttcgagggctcaagtacatccactcggctaaagttatccacagggatctaaagcctagcaatcttctcctgaacgccaactgcgatttaaagatctgtgattttggtcttgctagacccacttcagagaacgagtttatgactgagtatgttgttaccagatggtatagagcacctgagcttctgctcaactcatcggattacacagctgctatagatgtttggtctgttggttgtatctttatggagctcatgaacagaaagcctttgttccctggtaaagaccatgtccatcagatgcgcttattgacagagttgcttggcacgccgacagaatcagatctcgggtttacacacaacgaggatgccaaaagatacatccggcagcttcccaacttccctcgccaaccgttagctaaactgttctctcatgttaactcattggccattgatctagttgacagaatgttgacgtttgaccccaacgaaagaatcactgttgaagaagctctgaatcacccgtacctagccaagttgcacgacccgaatgatgagccaatctgtctaaagccattctctttcgactttgaacaacaacctctagacgaggaacagataaaagagatgatctacagggaagccattgcactcaatccaacatatgcttag

SEQ ID NO: 63108 - protein, 370 aa, Brassica napus
MNNAGGQYPDFPAVQTHGGQFISYDIFGSLFEVTSKYRPPIVPIGRGAYGIVCSVLDSETNELVAMKKIANAFDNHMDAKRTLREIKLLRHLDHENIIAIRDVVPPPLRREFSDVYIATELMDTDLHQIIRSNQGLSEEHCQYFLYQLLRGLKYIHSAKVIHRDLKPSNLLLNANCDLKICDFGLARPTSENEFMTEYVVTRWYRAPELLLNSSDYTAAIDVWSVGCIFMELMNRKPLFPGKDHVHQMRLLTELLGTPTESDLGFTHNEDAKRYIRQLPNFPRQPLAKLFSHVNSLAIDLVDRMLTFDPNERITVEEALNHPYLAKLHDPNDEPICLKPFSFDFEQQPLDEEQIKEMIYREAIALNPTYA

SEQ ID NO: 63109 - DNA, 1548 bp, Glycine max
  CDS (1)..(1548)
atggacagatcaactggccgtggtggtggtggaagtgtggacatgtttctccgaaattataagttgggaaaaacactcggcattgggtcctttggcaaggtgaaaattgctgagcatgtacggactggtcataaagttgctataaagatccttaaccgccacaagattaaaaacatggaaatggaagaaaaagttagaagagaaatcaaaattttaagattgtttatgcatcatcacattataagactatatgaggttgtagaaaccccaacagacatatatgttgttatggagtatgtgaaatctggagagctctttgattacatagtagagaagggtcggctgcaagaggatgaagcccgtcatttttttcagcagataatttctggtgtggagtactgtcacaggaatatggtggttcatagagacctgaagcctgagaatttactcttggactcaaaatttaacatcaagattgctgattttgggttgagcaacatcatgcgtgatggtcactttcttaaaacaagttgtggaagccctaattatgcggctccagaggttatctctggaaaattgtatgctggaccagaagtagatgtctggagctgtggtgtaattttatatgctcttctctgtggcactcttccttttgacgatgaaaacatcccaaatctcttcaaaaaaataaagggtgggatatacactcttcctagccatctatcacctggagccagagatttgataccaaagatgctcatgatggaccccatgaagaggatgaccatacctgagatacgccaacacccatggttccaagttcatctaccgcgttatttagcagtgccaccaccagatacactgcaacaagccaaaaagattgatgaggagattcttcaggaagtggttaatatgggatttgacaggaatcaattggttgaatctcttagcaacaggatacaaaatgagggtactgtaacatactatttgttattggacaaccggtttcgtgtttctagtggttatcttggagctgaatttcaagagacaatggattctggttttaaccgtatgcattccggcgaagttgcttctccagttgttggacaccacagcacagggtatatggattatcaaggggtaggaatgcggcaacagttccctgttgagagaaaatgggcccttgggcttcagtctcgagcccaaccacgtgaaataatgactgaggtccttaaagctctacaagaattaaatgtttgttggaagaagattggacactataacatgaagtgcagatgggttgctggcactgctggtcatcatgaaggaatgattaacaattctctgcatagtaatcattactttggaaatgattccggcattattgaaaatgaagctgtttctaagtcaaatgtggtcaagtttgaagtgcagctttacaaaactcgtgaggagaaatatctgcttgatcttcaaagggtccagggcccacagtttcttttcttggatctgtgcgctgctttcctttcacagctacgtgttctctag

SEQ ID NO: 63110 - protein, 515 aa, Glycine max
MDRSTGRGGGGSVDMFLRNYKLGKTLGIGSFGKVKIAEHVRTGHKVAIKILNRHKIKNMEMEEKVRREIKILRLFMHHHIIRLYEVVETPTDIYVVMEYVKSGELFDYIVEKGRLQEDEARHFFQQIISGVEYCHRNMVVHRDLKPENLLLDSKFNIKIADFGLSNIMRDGHFLKTSCGSPNYAAPEVISGKLYAGPEVDVWSCGVILYALLCGTLPFDDENIPNLFKKIKGGIYTLPSHLSPGARDLIPKMLMMDPMKRMTIPEIRQHPWFQVHLPRYLAVPPPDTLQQAKKIDEEILQEVVNMGFDRNQLVESLSNRIQNEGTVTYYLLLDNRFRVSSGYLGAEFQETMDSGFNRMHSGEVASPVVGHHSTGYMDYQGVGMRQQFPVERKWALGLQSRAQPREIMTEVLKALQELNVCWKKIGHYNMKCRWVAGTAGHHEGMINNSLHSNHYFGNDSGIIENEAVSKSNVVKFEVQLYKTREEKYLLDLQRVQGPQFLFLDLCAAFLSQLRVL

SEQ ID NO: 63111 - DNA, 1626 bp, Glycine max
  CDS (1)..(1626)
atggggtgtgcgtttgggagagaggcttcgagggaggagaggagagaggaagtgagagaggcaaaagctgaggaggagggtagaggagaggttgttgagaatgagaacattgagaaggagggtggaagagaggagaggaggacaagggcaaggggagagagaaggcgatcttcgaagccgaatccgaggttgagcaatcctcctaaccatgttcacggtgagcaggttgctgcagggtggccctcttggctctctaaggttgctggtgaggctatcaatggattgacccctcggagggccgacacttttgagaagattgataagatcgggcaaggtacatacagcaatgtttacaaagctagggatactttaacggggaaaattgttgctctaaagaaggtccgttttgacaatttagagcctgagagtgtcaagttcatggccagagagattttgattctccggcgtttggatcatcccaatgtcatcaaactggaaggcttagtgacttctagaatgtcatgcagtttatatcttgtgtttgaatacatggtgcatgatttggctggacttgccacaaacccagcaatcaagttcacagagtctcaggtaaaatgttacatgcatcagctattttctggactggaacattgtcacaaccgtcatgtgctgcatcgtgatataaaggggtcaaaccttcttattgacaatgatggaattctcaagattggtgattttggattagcttccttctttgatcctaatcacaagcaccctatgaccagtagagtggttactttatggtatcgacctccagaacttcttcttggggccactgaatatagtgtaggagtggatctctggagtgctggctgcattcttgctgaattgttggctggaaagcctattatgcctggtcgaacagaggtggagcagctacacaagatattcaaactatgtggttctccttctgatgaatattggaaaaagtcaaagttgcctcatgctaccatttttaagccccaacaatcatacaagcgatgcattgcagagacatataaagattttcctccatcatctctgccacttatggatacccttctcgcaatcaatccagatgaacgtttgactgccactgctgcattgcatagtgaattcttcacaacaaaaccatatgcttgtgagccctctagccttccaaaatatcctcccagcaaggagatggatgcaaagctacgggatgaagaagctaggagattgagagcagctggtaaagctaatgctgatggtgtcaagaaatctcgtccacgtgagcgagttgggaggggaattgcagttccagaggccaatgccgaactgcaagcaaatattgatagacgacggctgatcacacattcaaatgctaagagcaagagtgagaagtttcctcctccccaccaagatggagctctaggctatcctttgggttcttcacatcacatggatccagtttttgatccccctgatgttccatttagttctacaaacttctcacaacctaaagcaaatatccaaacctggtccggcccattggtagatccttctggtgtgggcgtgccgaggagaaagaagaaacatggcaagtga

SEQ ID NO: 63112 - protein, 541 aa, Glycine max
MGCAFGREASREERREEVREAKAEEEGRGEVVENENIEKEGGREERRTRARGERRRSSKPNPRLSNPPNHVHGEQVAAGWPSWLSKVAGEAINGLTPRRADTFEKIDKIGQGTYSNVYKARDTLTGKIVALKKVRFDNLEPESVKFMAREILILRRLDHPNVIKLEGLVTSRMSCSLYLVFEYMVHDLAGLATNPAIKFTESQVKCYMHQLFSGLEHCHNRHVLHRDIKGSNLLIDNDGILKIGDFGLASFFDPNHKHPMTSRVVTLWYRPPELLLGATEYSVGVDLWSAGCILAELLAGKPIMPGRTEVEQLHKIFKLCGSPSDEYWKKSKLPHATIFKPQQSYKRCIAETYKDFPPSSLPLMDTLLAINPDERLTATAALHSEFFTTKPYACEPSSLPKYPPSKEMDAKLRDEEARRLRAAGKANADGVKKSRPRERVGRGIAVPEANAELQANIDRRRLITHSNAKSKSEKFPPPHQDGALGYPLGSSHHMDPVFDPPDVPFSSTNFSQPKANIQTWSGPLVDPSGVGVPRRKKKHGK

SEQ ID NO: 63113 - DNA, 885 bp, Glycine max
  CDS (1)..(885)
atggaacagtacgagaaggttgagaagataggcgaaggaacatacggcgtcgtttacaagggtcgcgaccgcgtcaccaacgagaccatcgcgttgaagaagattcgcctcgagcaggaggatgagggggttcccagcaccgccattcgcgagatttctctcttgaaagaaatgcagcacaggaacattgttaggttgcaggatgtagtgcacgatgagaagagtttgtatctggtttttgagtaccttgacttagatctaaagaagcacatggattcatctccagaatttgcaaaagatccacgacaagtaaaaatgttcctgtaccaaattctctgtggcattgcatactgtcattcacatagagttcttcatcgagacttaaaaccacagaatttgttgatagatcgcagcactaatgcactgaaacttgcagattttggattggccagggcttttggaattcctgttaggacatttacacatgaggtggtaacactgtggtacagagctccagaaattttgcttggatcccatcagtattctaccccagttgatatttggtcagtgggatgcatatttgcagagatggtaaatcaacgaccacttttccctggggactctgagattgatgaattgtttaaaatattcagaatcatgggtacaccaaatgaagacacatggcctggagtgacatcattgcctgattttaaatcagccttccccaaatggcagcctaaggacctgaaaattgtggttccaaatctcaagccagctggtcttgatcttctttctagcatgctttacttggatcccagcaaaagaattactgctaggagcgctcttgagcatgaatacttcaaagacattaaatttgtaccctga

SEQ ID NO: 63114 - protein, 294 aa, Glycine max
MEQYEKVEKIGEGTYGVVYKGRDRVTNETIALKKIRLEQEDEGVPSTAIREISLLKEMQHRNIVRLQDVVHDEKSLYLVFEYLDLDLKKHMDSSPEFAKDPRQVKMFLYQILCGIAYCHSHRVLHRDLKPQNLLIDRSTNALKLADFGLARAFGIPVRTFTHEVVTLWYRAPEILLGSHQYSTPVDIWSVGCIFAEMVNQRPLFPGDSEIDELFKIFRIMGTPNEDTWPGVTSLPDFKSAFPKWQPKDLKIVVPNLKPAGLDLLSSMLYLDPSKRITARSALEHEYFKDIKFVP

SEQ ID NO: 63115 - DNA, 1107 bp, Glycine max
  CDS (1)..(1107)
atggctactttagttgaaccccccaacagaattaagcctaaggggaagcattattatacaatatggcaaacattgtttgagattgatacgaagtacgttccaatcaagcctataggccgaggagcatatggcgtggtgtgctcttccatcaacagggagaccaatgagaaagttgcaattaagaagattggtaatatatttgagaattctattgatgcattgagaactttaagggagctgaagctgcttagacatattcggcacgagaatgtcattgctttgaaagatgttatgatgccaatccacagaacaagttttaaagatgtctacttggtctacgagctcatggatacagatcttcatcaaattattaagtcctctcaaccactttccaatgatcattgcaaatatttcttgtttcagctccttcgaggtctaaaatatcttcattcagcaaacattcttcaccgggacttgaagcctgggaatctgctcgtcaatgccaattgcgatttgaagatatgtgactttgggcttgcacgaactaatggagttgatggccagtttatgacagagtatgttgtcactcgctggtatcgtgcaccggagctcttgttatgctgtgacaattatggaacctctattgatgtctggtcagtagggtgcatttttgctgagattcttggtagaaagccaatcttccctggaactgaatgtctcaaccagctgaaactaattataagcgttcttggaagccagcatgaatctcatattgagtttattgacaatgcaaaagccaggagatttatcaaatcactgccctgtactagaggcagacacttctctcagctatacccacaagcagatccattagccatagatttgttgcaaaaaatgcttgtgtttgatccaaccaagagaattactgtcttggaagctctccaacacccgtatatggctggcctatatgatccaaggtgcaaccctcctgctcaggttcccatcagtcttgacatagatgaacattggggagaaccgatgattagggaaatgatgtggaatgagatgctacattatcatcctgaagctgcttctaccaatgcatag

SEQ ID NO: 63116 - protein, 368 aa, Glycine max
MATLVEPPNRIKPKGKHYYTIWQTLFEIDTKYVPIKPIGRGAYGVVCSSINRETNEKVAIKKIGNIFENSIDALRTLRELKLLRHIRHENVIALKDVMMPIHRTSFKDVYLVYELMDTDLHQIIKSSQPLSNDHCKYFLFQLLRGLKYLHSANILHRDLKPGNLLVNANCDLKICDFGLARTNGVDGQFMTEYVVTRWYRAPELLLCCDNYGTSIDVWSVGCIFAEILGRKPIFPGTECLNQLKLIISVLGSQHESHIEFIDNAKARRFIKSLPCTRGRHFSQLYPQADPLAIDLLQKMLVFDPTKRITVLEALQHPYMAGLYDPRCNPPAQVPISLDIDEHWGEPMIREMMWNEMLHYHPEAASTNA

SEQ ID NO: 63117 - DNA, 1107 bp, Glycine max
  CDS (1)..(1107)
atggcaactctagttgaacctcccaacagaattaagccaaagggcaagcattattatacaatatggcaaacattgtttgagattgatacgaagtatgttccaattaaacctataggccgaggagcgtatggcgtggtgtgctcttcgatcaacagggagaccaatgagaaagttgcaattaagaagattggtaatatatttgagaattctattgatgcattgagaactttaagggagctgaagctgcttagacatattcggcatgagaatgtcattgctttgaaagatgttatgatgccaatccacaaaacaagttttaaggatgtctacctggtctacgaactcatggatacagatcttcatcaaattattaagtcctctcagccactttccaatgatcattgcaaatatttcttgtttcagctccttcgaggtcttaaataccttcattcagcaaacattcttcaccgggacttgaagcctgggaatctgctcgtcaatgccaattgcgatttgaaaatatgcgactttgggcttgcacgaactaatggagttgatggccagtttatgacagagtatgttgtcactcgctggtatcgtgcaccggagctcttgttatgctgtgacaattacggaacctctattgatgtctggtcagtagggtgcatttttgctgagattcttggtagaaagccaatcttccctgggactgagtgtctcaaccagctgaaactaattataagcgttcttggaagccagcatgaatctcatcttgagtttattgataatgcaaaagcaaggaggtttatcaaatcactgccctatactaggggcagacacttctctcagctatacccacaagcagatccattagccatagatttgttgcaaaaaatgcttgtgttcgatccaaccaagagaattactgtcttggaagctctccaacacccgtatatggctagcctatatgatccaaggtgcgaccctcctgctcaggttcccatcagtctcgacatagatgaacattggggagaaccgatgattagggaaatgttttggaatgagatgctacattatcatcctgaagctgcttccgccaatgcataa

SEQ ID NO: 63118 - protein, 368 aa, Glycine max
MATLVEPPNRIKPKGKHYYTIWQTLFEIDTKYVPIKPIGRGAYGVVCSSINRETNEKVAIKKIGNIFENSIDALRTLRELKLLRHIRHENVIALKDVMMPIHKTSFKDVYLVYELMDTDLHQIIKSSQPLSNDHCKYFLFQLLRGLKYLHSANILHRDLKPGNLLVNANCDLKICDFGLARTNGVDGQFMTEYVVTRWYRAPELLLCCDNYGTSIDVWSVGCIFAEILGRKPIFPGTECLNQLKLIISVLGSQHESHLEFIDNAKARRFIKSLPYTRGRHFSQLYPQADPLAIDLLQKMLVFDPTKRITVLEALQHPYMASLYDPRCDPPAQVPISLDIDEHWGEPMIREMFWNEMLHYHPEAASANA

SEQ ID NO: 63119 - DNA, 945 bp, Glycine max
  CDS (1)..(945)
atggagaagccaggaggaggaggagtgttatcggcgaaggaggcattcgagaagcttgaaaaggtgggagaagggacatatgggaaggtgtacagagcaagagagaaggccacggggaagatcgtggctctgaagaagactcgtctccacgaggacgaagaaggtgtccctcccaccactctccgtgaggtttccattctgcgaatgctctctcgcgatccccatgtcgttaggttaatggatgtcaaacaaggtcagaacaaggaagggaagacagtgctctacttggtctttgagtacatggacaccgatctcaagaaattcattcgctctttccgtcaaactggacaaaccattccaccccaaaccatcaaaagcttgatgtaccagctttgcaagggcgttgctttctgccacggtcatgggatcttgcacagggacttgaagcctcacaatctcttgatggaccgaaaaaccatgatgcttaaaattgctgatcttggactcgctcgagcatttaccgtgccaattaagaaatatacacatgagatactaaccctgtggtatagagctcctgaagtcctcttgggtgctacccattactcaatggcggtggacatgtggtccgttggctgcatatttgccgaacttgtaaccaaacaagcactctttcctggtgattccgagctgcaacaactcctgcatatattcaggctattgggtactcccaatgaagatgtgtggccaggcgtgagtaaactaatgaactggcacgaatatcctcaatggaaccctcaaagtctatcaacggctgttccaagtttagatgagcttggactggatttgctatctcaaatgttgaaatatgaaccttccaagaggatttctgccaagaaagcaatggaacatgtatactttgatgacctggacaagaggcacctttag

SEQ ID NO: 63120 - protein, 314 aa, Glycine max
MEKPGGGGVLSAKEAFEKLEKVGEGTYGKVYRAREKATGKIVALKKTRLHEDEEGVPPTTLREVSILRMLSRDPHVVRLMDVKQGQNKEGKTVLYLVFEYMDTDLKKFIRSFRQTGQTIPPQTIKSLMYQLCKGVAFCHGHGILHRDLKPHNLLMDRKTMMLKIADLGLARAFTVPIKKYTHEILTLWYRAPEVLLGATHYSMAVDMWSVGCIFAELVTKQALFPGDSELQQLLHIFRLLGTPNEDVWPGVSKLMNWHEYPQWNPQSLSTAVPSLDELGLDLLSQMLKYEPSKRISAKKAMEHVYFDDLDKRHL

SEQ ID NO: 63121 - DNA, 1116 bp, Glycine max
  CDS (1)..(1116)
atggcgactcctgttgagcctccaaacgggatcagaactgaagggaagcattattattccatgtggcaaaccctgtttgagattgactcaaaatacgttcccatcaagccgattggtcgcggagcatatggaattgtgtgctcttctgtgaatagagagataaatgagaaggttgccatcaagaagatacagaatgcctttgaaaaccgggttgatgccctgaggactttgcgcgaactcaagcttcttcgccaccttcaccatgagaatgtgattgctttgaaggacatcatgatgcctgttcacaggaatagtttcaaggatgtctatctggtttatgaactcatggacacggatttgcatcagattattaagtcttctcaagctttgtctaatgatcactgccagtatttcctctttcagttgctccggggcttgaaatatcttcactccgctaacattcttcatcgtgacttgaaacctgggaatcttctaatcaatgcaaattgtgacctaaaaatatgtgatttcgggctagctcgtactaattgcagcaagaaccagttcatgaccgagtatgttgtcactcggtggtatagggcaccagagctcctactctgctgtgacaactatgggacatctattgatgtttggtcagttggatgtatctttgcagagcttcttggccgaaaaccgattttccctggttcagagtgtctcaaccagctgaagttgattatcaatatccttggtagtcaaagggaggaggatattgaattcattgataacccaaaggcaaagaagtatatcaaatcacttccttattctcctggaacccccctttcgcaactttatcctaatgcgcatccattggcaattgatcttctggcaaagatgcttgttttcgatccaacaaagaggatcagtgtcactcaagcacttcaacacccttacatggcccctctgtatgatcctaactgtgaccctccagccgtcattccaattgatcttgacattgatgaggatctaggggaagagatgataagggacatgatgtggaaagaaatgcttcattaccatcctgaatctgctatggagagtgcagggttgtgctaa

SEQ ID NO: 63122 - protein, 371 aa, Glycine max
MATPVEPPNGIRTEGKHYYSMWQTLFEIDSKYVPIKPIGRGAYGIVCSSVNREINEKVAIKKIQNAFENRVDALRTLRELKLLRHLHHENVIALKDIMMPVHRNSFKDVYLVYELMDTDLHQIIKSSQALSNDHCQYFLFQLLRGLKYLHSANILHRDLKPGNLLINANCDLKICDFGLARTNCSKNQFMTEYVVTRWYRAPELLLCCDNYGTSIDVWSVGCIFAELLGRKPIFPGSECLNQLKLIINILGSQREEDIEFIDNPKAKKYIKSLPYSPGTPLSQLYPNAHPLAIDLLAKMLVFDPTKRISVTQALQHPYMAPLYDPNCDPPAVIPIDLDIDEDLGEEMIRDMMWKEMLHYHPESAMESAGLC

SEQ ID NO: 63123 - DNA, 885 bp, Glycine max
  CDS (1)..(885)
atggaccagtacgagaaggtggagaagataggcgagggaacatacggcgtcgtttacaaggctcgcgaccgcgccaccaatgagacaatcgctctgaagaagattcgcctcgagcaggaggacgaaggcgttcccagcaccgccattcgcgagatttctcttctcaaagagatgcagcataggaacattgttaggttgcaggatgtagtgcacagtgagaagcgattgtatctggtttttgagtatctggacttggatctaaaaaaacacatggattcatctccagagtttgtgaaagatccgcggcaagtaaagatgttcctttatcaaattctctgtggcattgcttactgtcattcacatagagttcttcatcgagacttgaaaccacagaatttgttgatagatcgccgtactaattcactgaagcttgcagattttggattggctagggcatttggcattcctgtcaggacctttacacatgaggtggtgacattatggtacagagctccagaaatattgcttggatctcgtcattattctacgccagttgatgtttggtcagtgggatgcatatttgcagagatggtaaacagacgacctctattccctggggactctgagattgatgaattatttaaaatattcagaatcttgggtaccccaaatgaagacacatggcctggagtaacttcattgcctgatttcaaatcaacatttcccaaatggccatccaaggacttagcaaatgtggttccaaatcttgatgcagctggtcttaatcttctttctagtatgctttgcttggatcccagcaaaagaattaccgccaggagcgctgtggagcatgaatacttcaaagacattaaatttgtgccctga

SEQ ID NO: 63124 - protein, 294 aa, Glycine max
MDQYEKVEKIGEGTYGVVYKARDRATNETIALKKIRLEQEDEGVPSTAIREISLLKEMQHRNIVRLQDVVHSEKRLYLVFEYLDLDLKKHMDSSPEFVKDPRQVKMFLYQILCGIAYCHSHRVLHRDLKPQNLLIDRRTNSLKLADFGLARAFGIPVRTFTHEVVTLWYRAPEILLGSRHYSTPVDVWSVGCIFAEMVNRRPLFPGDSEIDELFKIFRILGTPNEDTWPGVTSLPDFKSTFPKWPSKDLANVVPNLDAAGLNLLSSMLCLDPSKRITARSAVEHEYFKDIKFVP

SEQ ID NO: 63125 - DNA, 1116 bp, Glycine max
  CDS (1)..(1116)
atggcgactcctgttgagcctccaaatgggatcagaactgaagggaagcattattattccatgtggcaaaccctgtttgagattgactcaaaatacgttcccatcaagccgattggtcgcggagcatatggaattgtgtgctcttctgtgaatagagagataaatgagaaggttgccatcaagaagatacagaatgcctttgaaaaccgggttgatgccctgaggactttgcgcgaactcaagcttcttcgccaccttcaccatgagaatgtgattgctttgaaggacatcatgatgcctgttcacaggaatagtttcaaggatgtctatctagtttatgaactcatggacacggatttgcatcagattattaagtcttctcaagctttgtctaatgatcactgccagtatttcctctttcagttgctccggggcttgaaatatcttcactccgctaacattcttcatcgtgacttgaaacctgggaatcttctaatcaatgcaaattgtgacctaaaaatatgtgatttcgggctagctcgtactaattgcagcaagaaccagttcatgaccgagtatgttgtcactcggtggtatagggcaccagagctcctactctgctgtgacaactatgggacatctattgatgtttggtcagttggatgtatctttgcagagcttcttggccgaaaaccgattttccctggttcagagtgtctcaaccagctgaagttgattatcaatatccttggtagtcaaagggaggaggatattgaattcattgataacccaaaggcaaagaagtatatcaaatcacttccttattctcctggaagccccctttcgcgactttatcctaatgcgcatccattggcaattgatcttctggcaaagatgcttgttttcgatccaacaaagaggatcagtgtcactcaagcacttcaacacccttacatggcccctctgtatgatcctaactgtgaccctccagccgtcattccaattgatcttgacattgatgaggatctaggggaagagatgataagggacatgatgtggaaagaaatgcttcattaccatcctgaatctgctatggagagtgcagggttgtgctaa

SEQ ID NO: 63126 - protein, 371 aa, Glycine max
MATPVEPPNGIRTEGKHYYSMWQTLFEIDSKYVPIKPIGRGAYGIVCSSVNREINEKVAIKKIQNAFENRVDALRTLRELKLLRHLHHENVIALKDIMMPVHRNSFKDVYLVYELMDTDLHQIIKSSQALSNDHCQYFLFQLLRGLKYLHSANILHRDLKPGNLLINANCDLKICDFGLARTNCSKNQFMTEYVVTRWYRAPELLLCCDNYGTSIDVWSVGCIFAELLGRKPIFPGSECLNQLKLIINILGSQREEDIEFIDNPKAKKYIKSLPYSPGSPLSRLYPNAHPLAIDLLAKMLVFDPTKRISVTQALQHPYMAPLYDPNCDPPAVIPIDLDIDEDLGEEMIRDMMWKEMLHYHPESAMESAGLC

SEQ ID NO: 63127 - DNA, 1110 bp, Hordeum vulgare
  CDS (1)..(1110)
atggcgatgatggtggatcctccgaacggcatcggaaaccatggcaagcactactacaccatgtggcagaccatgttcgagatcgacaccaagtacgtgcccatcaagcccatcgggaggggagcctacgggatagtttgctcctccatcaaccaggagaccaatgagaaggtcgccatcaaaaagataaacaacgtctttgacaaccgtgtggatgcgttaaggacgctgcgcgagctgaagctcctccggcacctgcgccacgagaatgtcattgctttgaaggatataatgatgccgatacataggaggagcttcaaggatgtctacttggtctccgagctcatggacacggatctgcatcagattgtcaagtcgtctcagccgctgtccaatgaccactgccagtatttcctttttcagctgctccgaggactgaagtaccttcattcagcagggatactccatagagacctgaagcctgggaaccttctggtcaatgcaaactgtgacctgaagatctgtgactttggtctggctcgcacaaataacactaaaggtcagtttatgactgaatatgttgtcacccgctggtatagagctcccgagttgctgctctgctgcgacaactatggcacatccatagatgtctggtctgttggctgcatctttgctgagctacttggccgcaagccgatctttccaggaaccgagtgccttaatcagcttaagcttatagtcaatgttcttggcaccatgagcgaagctgacctcgcattcattgacaactcaaaagcacgcaagtacattaaatcccttccatacaccccagggattcccctcagtagcatgtacccgcaagcgcatcctcttgccattgatctgttgcagaagatgcttgtcttcgacccttccaaaaggatcagtgtcacccaggctctggagcacccctacatgtccccactgtatgatcccagcgcaaaccctcctgctcaggtgcccatcgatcttgacatagatgaaaacattggcacagatatgatccgggaaatgttgtggcaggagatgctccagtatcaccccgaggccgccaggatggtgaatatgtga

SEQ ID NO: 63128 - protein, 369 aa, Hordeum vulgare
MAMMVDPPNGIGNHGKHYYTMWQTMFEIDTKYVPIKPIGRGAYGIVCSSINQETNEKVAIKKINNVFDNRVDALRTLRELKLLRHLRHENVIALKDIMMPIHRRSFKDVYLVSELMDTDLHQIVKSSQPLSNDHCQYFLFQLLRGLKYLHSAGILHRDLKPGNLLVNANCDLKICDFGLARTNNTKGQFMTEYVVTRWYRAPELLLCCDNYGTSIDVWSVGCIFAELLGRKPIFPGTECLNQLKLIVNVLGTMSEADLAFIDNSKARKYIKSLPYTPGIPLSSMYPQAHPLAIDLLQKMLVFDPSKRISVTQALEHPYMSPLYDPSANPPAQVPIDLDIDENIGTDMIREMLWQEMLQYHPEAARMVNM

SEQ ID NO: 63129 - DNA, 882 bp, Hordeum vulgare
  CDS (1)..(882)
atggaccactacgagaaggtggagaagatcggggagggaacgtacggggtggtgtacaaggccaaggaccgctacaccaacgagacgatcgccctcaagaagatccggctggagcaagaggacgagggcgtcccctccaccgccatccgcgagatctccctcctcaaggagatgcagcaccgtaacatcgtcaggctgcaggacgtggtgcacaacgagaagtgcatatacctcgtcttcgagtacctcgacctcgacctcaagaagcacatggactcctccccggacttcaagaaccaccacatagtcaagtccttcctctaccagatcctgcgcggcatcgcctactgccactcgcaccgcgtgcttcacagggatctcaagccccagaacctgctcatagatcgccgcaccaattcgttgaagcttgctgacttcggattggccagggcgttcggcattcctgtcaggacattcactcatgaggtggtaacattatggtacagagcgccagaaattcttctgggtgcaaggcaatattctacccctgttgatgtgtggtcggttggttgcatttttgctgaaatggtgaatcagaaacctttatttcctggtgattctgagattgatgaactcttcaagattttcagaattatgggcactcctaatgaagaaacctggccaggtgtttcttcgttacctgactacaaatcagctttccccaagtggccgtccgtggatcttgcaactgtggttccaacactcgaacctttgggacttgatcttctctctaaaatgctctgcttagatccaagcagaagaatcaacgcccgaaccgccctcgagcacgagtacttcaaggatctggacgtgtccttgtag

SEQ ID NO: 63130 - protein, 293 aa, Hordeum vulgare
MDHYEKVEKIGEGTYGVVYKAKDRYTNETIALKKIRLEQEDEGVPSTAIREISLLKEMQHRNIVRLQDVVHNEKCIYLVFEYLDLDLKKHMDSSPDFKNHHIVKSFLYQILRGIAYCHSHRVLHRDLKPQNLLIDRRTNSLKLADFGLARAFGIPVRTFTHEVVTLWYRAPEILLGARQYSTPVDVWSVGCIFAEMVNQKPLFPGDSEIDELFKIFRIMGTPNEETWPGVSSLPDYKSAFPKWPSVDLATVVPTLEPLGLDLLSKMLCLDPSRRINARTALEHEYFKDLDVSL

SEQ ID NO: 63131 - DNA, 885 bp, Linum usitatissimum
  CDS (1)..(885)
atggagcagtacgagaaagtggagaagattggggagggaacttacggagtggtatataaggcccgtgatcgaaacaccaatcagactattgctttgaagaagattcgcctcgaacaggaagatgaaggcgtcccaagcaccgccattagagaaatttcgcttctgaaagaaatgcagcatggcaacattgtgaggttgcaggatgtagtgcacagtgagaaacgcctatatttagtttttgagtacctggacctagatttgaaaaagcacatggactcaagtccggagtttgccaaggatccccgtatagtcaaaactttcctacaccaaatcctccgtggcattgcttattgccactcgcacagggttcttcatcgagatctaaagccacagaatctgcttattgatcggcgtaccaatgcactcaagcttgcagattttgggctggccagagcttttggtatacctgtcaggacattcacccatgaggtggtgactctctggtatagagccccagagattcttctcggatctcaccactactctactccagttgatatatggtctataggatgtatcttcgccgaaatggtgaacaagagccccttattccccggggactccgagattgatcagctattcaagattttcagaatcatggggacgcccaatgaagacacctgggccggagtaacatctttacccgatttcaagtccaccttcccaaagtggccttcaaaggacctggcaaccatggttcaaactctcgagtcaaccggtgttgacctcttacgaaaaatgctgtgcttggatccaagcaaaagaattacagccaggactgccctagagcatgaatacttcaaggacattggatttgtgccataa

SEQ ID NO: 63132 - protein, 294 aa, Linum usitatissimum
MEQYEKVEKIGEGTYGVVYKARDRNTNQTIALKKIRLEQEDEGVPSTAIREISLLKEMQHGNIVRLQDVVHSEKRLYLVFEYLDLDLKKHMDSSPEFAKDPRIVKTFLHQILRGIAYCHSHRVLHRDLKPQNLLIDRRTNALKLADFGLARAFGIPVRTFTHEVVTLWYRAPEILLGSHHYSTPVDIWSIGCIFAEMVNKSPLFPGDSEIDQLFKIFRIMGTPNEDTWAGVTSLPDFKSTFPKWPSKDLATMVQTLESTGVDLLRKMLCLDPSKRITARTALEHEYFKDIGFVP

SEQ ID NO: 63133 - DNA, 879 bp, Zea mays
  CDS (1)..(879)
atggaccagtacgagaaggtggagaagatcggggagggcacgtacggggtggtgtacaagggcaaggaccgccacaccaacgagacgatcgcgctcaagaagatccgcctcgagcaggaggacgagggcgtcccctccaccgccatccgcgagatctccctcctcaaggagatgcagcaccgcaacatcgtcaggctgcaggacgtcgtgcacaacgacaagtgcatctacctcgtcttcgagtacctcgacctcgacctcaagaagcacatggactcctccacggacttcaagaaccaccgcatagtcaaatccttcctctaccagattctgcggggcatcgcctactgccactcgcaccgcgtgctccaccgcgacctgaagccgcagaacctgctgattgaccgccgcaacaacctcttgaagctcgcggactttggactggcgagggcgttcggcatccctgtccggacgttcactcatgaggtggtgacgctttggtatagagcgcctgaaatccttctcggtgcaaggcattattccacccctgttgatgtgtggtcagttggttgcattttcgctgaaatggtgaaccagaaggcgctttttcctggcgactctgagatcgatgagctgtttaagattttcagaattttgggcactccaactaaagaaacatggccaggcgttgcttcgttgcctgattacaagtcaactttcccaaagtggccacctgtggatcttgcaacggtggtcccgacactcgaaccgtcgggaatcgatctcctatctaagatgctgcgtctagatcccagcaagaggatcaccgcccgcgccgccctcgagcacgactacttcagggacctcgagcacgcctag

SEQ ID NO: 63134 - protein, 292 aa, Zea mays
MDQYEKVEKIGEGTYGVVYKGKDRHTNETIALKKIRLEQEDEGVPSTAIREISLLKEMQHRNIVRLQDVVHNDKCIYLVFEYLDLDLKKHMDSSTDFKNHRIVKSFLYQILRGIAYCHSHRVLHRDLKPQNLLIDRRNNLLKLADFGLARAFGIPVRTFTHEVVTLWYRAPEILLGARHYSTPVDVWSVGCIFAEMVNQKALFPGDSEIDELFKIFRILGTPTKETWPGVASLPDYKSTFPKWPPVDLATVVPTLEPSGIDLLSKMLRLDPSKRITARAALEHDYFRDLEHA

SEQ ID NO: 63135 - DNA, 1110 bp, Triticum aestivum
  CDS (1)..(1110)
atggcaatgctggtggatcctccgaatggcatgggaaaccaagggaagcactactactcaatgtggcaaaccttgtttgagattgacaccaagtatgtgcctatcaagcccataggccgaggagcttatggaatagtttgctcatccataaaccgtgagacaaacgagaaagtagcgataaagaagatacataatgtattcgacaaccgtgtggatgcactaaggaccttgcgggagctgaaactcctccggcatctccgccatgagaatgttatttctttgaaggatataatgatgcctgtacaaaggaggagctttaaggatgtgtacttggtttatgagctcatggatactgacctgcatcagataatcaaatcgcctcaggggctttccaacgaccactgccaatattttctttttcagttgcttcgaggactgaaatacctccattcagcagagatactccacagagacctaaaacctgggaacctactggtgaatgcaaactgtgatctgaagatatgcgattttggtcttgcacgtacaaacagtagtaaaggccagtttatgactgaatacgtcgtcacccgctggtatagggctcctgagttgctgctttgctgtgacaactacggcacttccatcgatgtttggtctgttggctgcatctttgctgagctacttggccgcaagcctatttttcctgggacagagtgcctaaatcagctaaaactgatagtcaatgttcttggcacgatgagcgagtctgacctggagttcatcgacaacccaaaggcccgcagatatatcaagaccctcccctacactcctggtgttccacttgcaagtatgtacccacatgcacaccctctggccatcgatctattacagaagatgctcatcttcgaccctaccaaaagggtcagtgttacccaggcccttgagcacccttacatgtctcctctgtatgacccaagtgcaaaccctcccgcgcaagtgcccatcgatctcgacatagatgagaacatcagctcagagatgatcagggaaatgatgtggcaggagatgcttcactaccaccctgaagccgccacggcagtaaacatgtga

SEQ ID NO: 63136 - protein, 369 aa, Triticum aestivum
MAMLVDPPNGMGNQGKHYYSMWQTLFEIDTKYVPIKPIGRGAYGIVCSSINRETNEKVAIKKIHNVFDNRVDALRTLRELKLLRHLRHENVISLKDIMMPVQRRSFKDVYLVYELMDTDLHQIIKSPQGLSNDHCQYFLFQLLRGLKYLHSAEILHRDLKPGNLLVNANCDLKICDFGLARTNSSKGQFMTEYVVTRWYRAPELLLCCDNYGTSIDVWSVGCIFAELLGRKPIFPGTECLNQLKLIVNVLGTMSESDLEFIDNPKARRYIKTLPYTPGVPLASMYPHAHPLAIDLLQKMLIFDPTKRVSVTQALEHPYMSPLYDPSANPPAQVPIDLDIDENISSEMIREMMWQEMLHYHPEAATAVNM

SEQ ID NO: 63137 - DNA, 981 bp, Triticum aestivum
  CDS (1)..(981)
atggcgacgctccagcaccagaaccagggggcagcggcgccgatgaccaccacgggcggcgggctgcgcgccatggacctctacgagaagctggagaaggtcggggagggcacctacggcaaggtgtacaaggcccgggagaaggcgacgggccggatcgtggcgctcaagaagacgcgcctcccggaggacgacgagggcgtgccccccacggcgctcagggaggtctcgctgctgcggatgctgtcgcaggacccgcacgtcgtgcgcctgctggatctcaagcagggccagaacaaggagggccagaccatcctctacctcgtcttcgagtacatggacaccgacctcaagaaattcatccgcggccaccgccagaaccacgagaagatccccgcccacaccgtcaagatcctgatgtaccagctctgcaagggcgtggctttctgccacggacgcggtgtcctgcaccgtgacctcaagccccacaacctgctcatggaccgcaagaccatggctctcaagatcgccgatcttgggctcagtcgtgccttcacggttcctctcaagaagtacacacacgagatccttactctgtggtacagagctcctgaggtccttcttggcgccacacactactcaacgccggttgacatgtggtctgtgggctgcatatttgctgaattgatcactaccacggcacttttccctggagactctgaggtgcagcagctcctgcacattttcaagttgctgggcactccaaatgaggatgtctggccaggagtaggcaaactcccgaactggcatgagtaccctcagtggaacgtctcaaagctgtcttctgtaattcctagtctcgatgccgatggtatcgatctgcttgagaaaatgctgcagtatgagccggcaaagcggatctctgcgaagaaggccatggagcacccatacttcgatgatgtggacaaggcgctgtactga

SEQ ID NO: 63138 - protein, 326 aa, Triticum aestivum
MATLQHQNQGAAAPMTTTGGGLRAMDLYEKLEKVGEGTYGKVYKAREKATGRIVALKKTRLPEDDEGVPPTALREVSLLRMLSQDPHVVRLLDLKQGQNKEGQTILYLVFEYMDTDLKKFIRGHRQNHEKIPAHTVKILMYQLCKGVAFCHGRGVLHRDLKPHNLLMDRKTMALKIADLGLSRAFTVPLKKYTHEILTLWYRAPEVLLGATHYSTPVDMWSVGCIFAELITTTALFPGDSEVQQLLHIFKLLGTPNEDVWPGVGKLPNWHEYPQWNVSKLSSVIPSLDADGIDLLEKMLQYEPAKRISAKKAMEHPYFDDVDKALY

SEQ ID NO: 63139 - DNA, 1110 bp, Triticum aestivum
  CDS (1)..(1110)
atggcgatgatggtggatcctccgaacggcatgggaaaccacgggaagcactactacaccatgtggcagaccatgttcgagatcgacaccaagtacgtgccgatcaagcccatagggagaggagcctacgggatagtttgctcctcgatcaaccaggagaccaacgagaaggtcgccatcaagaagataaacaacgtctttgacaaccgcgtggatgcgctgaggacgctgcgcgaactgaagctccttcggcacctgcgccatgagaatgtcattgccttgaaggatataatgatgccgatacataggaggagcttcaaggatgtctacttggtctccgagctcatggacacggatctgcatcagattgtcaagtcgtctcagccgctgtccaatgaccactgccagtatttcctttttcagctgctccgaggactgaagtaccttcattcagcagggatactccatagagacctgaagcctgggaaccttctggtcaatgcaaactgtgacctgaagatctgtgactttggtctggctcgcacaaataacactaaaggtcagtttatgactgaatacgttgtcacccgctggtacagagctcccgagctgctgctctgctgcgacaactatggcacctccatagatgtctggtctgttggctgcatctttgctgagctacttggccgcaagccgatctttccaggaaccgagtgccttaatcagcttaagctcatagtcaatgttcttggcaccatgagcgaggctgacctcgcgttcattgacaacccaaaagctcgcaactacattaaatcccttccatacaccccggggatgcccctcagtagcatgtacccgcacgcgcaccctcttgccattgatctgttgcagaagatgcttgtctttgacccttccaagaggatcagtgtcacccaggctctggagcacccctacatgtccccgctgtatgatcccagcgcaaaccctcctgctcaggtgcccatcgatctcgacatagatgaaaacattggcacagatatgatccgagaaatgttgtggcaggagatgctccagtaccaccctgaggccgccaggatggtgaatatgtga

SEQ ID NO: 63140 - protein, 369 aa, Triticum aestivum
MAMMVDPPNGMGNHGKHYYTMWQTMFEIDTKYVPIKPIGRGAYGIVCSSINQETNEKVAIKKINNVFDNRVDALRTLRELKLLRHLRHENVIALKDIMMPIHRRSFKDVYLVSELMDTDLHQIVKSSQPLSNDHCQYFLFQLLRGLKYLHSAGILHRDLKPGNLLVNANCDLKICDFGLARTNNTKGQFMTEYVVTRWYRAPELLLCCDNYGTSIDVWSVGCIFAELLGRKPIFPGTECLNQLKLIVNVLGTMSEADLAFIDNPKARNYIKSLPYTPGMPLSSMYPHAHPLAIDLLQKMLVFDPSKRISVTQALEHPYMSPLYDPSANPPAQVPIDLDIDENIGTDMIREMLWQEMLQYHPEAARMVNM

SEQ ID NO: 63141 - DNA, 972 bp, Zea mays
  CDS (1)..(972)
atggacggcgaggaggcgccccttggcgcgctcaacctggctgagtacgcccccgccggcgcccgcaccgtcgactgctacaggcgtatccgcaagatcggcgagggcacctacggtgaggtatttgaagctgtggatattattactggggaaagagcagcacttaagaaaataaaactggatgatggcaaagaagggtttccacgccaaatcttgcgtgagattaaactattaaaaaagctggatcatgagaacatcatcagattgaaagagattgtagtatctcctggttctgcacatggaacaggcggatcagatgatcacatctataggggagatatctacatggtgtttgaatacatggaccatgatttgaagaaagtattgcaccatagtgccccatcccaagtcaaggtttatatggggcagctgctaaaaggattgcagtactgccatgccaacaatgtacttcatcgggatatcaaaggggctaatcttctaataactggtggtaagttgttaaaactcgcagattttggccttgcaaggctgttcactagagacggaactttaacaaatcatgtcatcactttatggtaccgaccccctgagttgcttcttggtgccacaagttatgctgaacctgtggatatttggtctgtcggttgcatatttgcagaatttttacttaagaaaccattatttcctggcagaactgagcaagagcagttatcaaaaatatttgaactgtgtggatctccaaacgaggaaagctggccaagtgtttccaagctaccattgtataagacaatgactatccgtcctgcgactcctaccaaacgaagcctgagagatatcttgcagaactttgactgtcctactgttgaattaattgaacgaatgttgatccttaatccttcacagaggatttctgcacaagatgctcttggtgcggcatacttcatcaactaa

SEQ ID NO: 63142 - protein, 323 aa, Zea mays
MDGEEAPLGALNLAEYAPAGARTVDCYRRIRKIGEGTYGEVFEAVDIITGERAALKKIKLDDGKEGFPRQILREIKLLKKLDHENIIRLKEIVVSPGSAHGTGGSDDHIYRGDIYMVFEYMDHDLKKVLHHSAPSQVKVYMGQLLKGLQYCHANNVLHRDIKGANLLITGGKLLKLADFGLARLFTRDGTLTNHVITLWYRPPELLLGATSYAEPVDIWSVGCIFAEFLLKKPLFPGRTEQEQLSKIFELCGSPNEESWPSVSKLPLYKTMTIRPATPTKRSLRDILQNFDCPTVELIERMLILNPSQRISAQDALGAAYFIN

SEQ ID NO: 63143 - DNA, 981 bp, Zea mays
  CDS (1)..(981)
atggcgacgctccagcaccagaaccagggggcagcggcgccgatgaccaccacgggcggcgggctgcgcgccatggatctgtacgagaagctggagaaggtgggggagggcacgtacgggaaggtgtacaaggcccgggagaaggcgacgggccggatcgtggcgctcaagaagacgcggctccccgaggacgacgagggcgtgccgcccaccgcgctgcgggaggtctcgctgctgcggatgctgtcgcaggacccgcacgtggtccgcctgctcgacctcaagcagggcgtcaacaaggaggggcagaccatcctctacctcgtcttcgagtacatggacaccgacctcaagaagttcatccgcggacaccgcgacaaccacgagaagatccccgcacaaaccgtcaagatcctgatgtaccagctgtgcaagggcgtggctttcgtccacggccgcggggtgctccaccgtgatctcaaaccgcacaacctgctcatggaccgcaagaccatggcgctcaagatcgccgacctcggactcagccgcgccatcaccgtccctataaagaagtacacccacgagatcctgacgctctggtacagggcgcccgagattctcctaggcgccacacactactccacgccggttgacatttggtccgtgggctgcatatttgctgagttggtcactaaccagccacttttccctggcgactccgagttgcagcagctcctccacatcttcaagttgctgggcaccccaaatgaggagatgtggccaggagtagacaagctgcccaactggcacgtgtacccccagtggaagcccactaagctgtccactcttgtccctggtcttgactccgatggctatgatttacttgagaaaatgcttgcatatgagccagggaagcgggtctcggcgaagaaggccctggagcacccgtacttcaatgatgttaacaaggaggtgtactga

SEQ ID NO: 63144 - protein, 326 aa, Zea mays
MATLQHQNQGAAAPMTTTGGGLRAMDLYEKLEKVGEGTYGKVYKAREKATGRIVALKKTRLPEDDEGVPPTALREVSLLRMLSQDPHVVRLLDLKQGVNKEGQTILYLVFEYMDTDLKKFIRGHRDNHEKIPAQTVKILMYQLCKGVAFVHGRGVLHRDLKPHNLLMDRKTMALKIADLGLSRAITVPIKKYTHEILTLWYRAPEILLGATHYSTPVDIWSVGCIFAELVTNQPLFPGDSELQQLLHIFKLLGTPNEEMWPGVDKLPNWHVYPQWKPTKLSTLVPGLDSDGYDLLEKMLAYEPGKRVSAKKALEHPYFNDVNKEVY

SEQ ID NO: 63145 - DNA, 909 bp, Zea mays
  CDS (1)..(909)
atggatctgtacgagaagctggagaaggtgggggagggcacgtacgggaaggtgtacaaggcccgggagaaggcgacgggccggatcgtggcgctcaagaagacgcggctccccgaggacgacgagggcgtgccgcccaccgcgctgcgggaggtctcgctgctgcggatgctgtcgcaggacccgcacgtggtccgcctgctcgacctcaagcagggcgtcaacaaggaggggcagaccatcctctacctcgtcttcgagtacatggacaccgacctcaagaagttcatccgcggacaccgcgacaaccacgagaagatccccgcacaaaccgtcaagatcctgatgtaccagctgtgcaagggcgtggctttcgtccacggccgcggggtgctccaccgtgatctcaaaccgcacaacctgctcatggaccgcaagaccatggcgctcaagatcgccgacctcggactcagccgcgccatcaccgtccctataaagaagtacacccacgagatcctgacgctctggtacagggcgcccgagattctcctaggcgccacacactactccacgccggttgacatttggtccgtgggctgcatatttgctgagttggtcactaaccagccacttttccctggcgactccgagttgcagcagctcctccacatcttcaagttgctgggcaccccaaatgaggagatgtggccaggagtagacaagctgcccaactggcacgtgtacccccagtggaagcccactaagctgtccactcttgtccctggtcttgactccgatggctatgatttacttgagaaaatgcttgcatatgagccagggaagcgggtctcggcgaagaaggccctggagcacccgtacttcaatgatgttaacaaggaggtgtactga

SEQ ID NO: 63146 - protein, 302 aa, Zea mays
MDLYEKLEKVGEGTYGKVYKAREKATGRIVALKKTRLPEDDEGVPPTALREVSLLRMLSQDPHVVRLLDLKQGVNKEGQTILYLVFEYMDTDLKKFIRGHRDNHEKIPAQTVKILMYQLCKGVAFVHGRGVLHRDLKPHNLLMDRKTMALKIADLGLSRAITVPIKKYTHEILTLWYRAPEILLGATHYSTPVDIWSVGCIFAELVTNQPLFPGDSELQQLLHIFKLLGTPNEEMWPGVDKLPNWHVYPQWKPTKLSTLVPGLDSDGYDLLEKMLAYEPGKRVSAKKALEHPYFNDVNKEVY

SEQ ID NO: 63147 - DNA, 879 bp, Zea mays
  CDS (1)..(879)
atggaccagtacgagaaggtggagaagatcggggacggcacgtacggggtggtgtacaagggcaaggaccgccacaccaacgagacgatcgcgctcaagaagatccgcctcgagcaggaggacgagggcgtcccctccaccgccatccgcgagatctccctcctcaaggagatgcagcaccgcaacatcgtcaggctgcaggacgtcgtgcacaacgacaagtgcatctacctcgtcttcgagtacctcgacctcgacctcaagaagcacatggactcctccacggacttcaagaaccaccgcatagtcaaatccttcctctaccagattctgcggggcatcgcctactgccactcgcaccgcgtgctccaccgcgacctgaagccgcagaacctgctgattgaccgccgcaacaacctcttgaagctcgcggactttggactggcgagggcgttcggcatccctgtccggacgttcactcatgaggtggtgacgctttggtatagagcgcccgaaatccttctcggtgcaaggcattattccacccctgttgatgtgtggtcagttggttgcattttcgctgaaatggtgaaccagaaggcgctttttcctggcgactctgagatcgatgagctgtttaagattttcagaattttgggcactccaactaaagaaacatggccaggcgttgcttcgttgcccgattacaagtcaactttcccaaagtggccacctgtggatcttgcaacggtggtcccgacactcgaaccgtcgggaatcgatctcctatctaagatgctgcgtctagatcccagcaagaggatcaccgcccgcgccgccctcgagcacgactacttcagggacctcgagcacgcctag

SEQ ID NO: 63148 - protein, 292 aa, Zea mays
MDQYEKVEKIGDGTYGVVYKGKDRHTNETIALKKIRLEQEDEGVPSTAIREISLLKEMQHRNIVRLQDVVHNDKCIYLVFEYLDLDLKKHMDSSTDFKNHRIVKSFLYQILRGIAYCHSHRVLHRDLKPQNLLIDRRNNLLKLADFGLARAFGIPVRTFTHEVVTLWYRAPEILLGARHYSTPVDVWSVGCIFAEMVNQKALFPGDSEIDELFKIFRILGTPTKETWPGVASLPDYKSTFPKWPPVDLATVVPTLEPSGIDLLSKMLRLDPSKRITARAALEHDYFRDLEHA

SEQ ID NO: 63149 - DNA, 1110 bp, Zea mays
  CDS (1)..(1110)
atggcgatgatggtggatccccccaatggcatggcaagtcaaggaaagcattactatactatgtggcagacactgtttgagatcgacaccaagtacgtgccgatcaagcccatcggaagaggagcttacggaatcgtttgctcatctgttaaccgcgagaccaatgaaaaagtcgcgataaaaaagataaacaacgtctttgacaaccgtgtggatgcgctaaggacgctgagagagctgaaactccttcggcacctgaggcacgagaatgttattgctctcaaggacataatgatgcctgcgcatagaaggagcttcaaggacgtttacttggtttatgagctcatggacactgatctgcatcaaataattaagtcatctcaaccactatccaatgaccactgccagtatttcctttttcagctgctccgaggcctgaagtacctccattcagccgggatactccacagagacctaaagccagggaacctcctggtcaacgcaaactgtgacctgaagatatgcgacttcgggctcgcccgcacgaacaacaccaagggccagttcatgacggagtacgtggtgacccgctggtacagggcacccgagctgctgctctgctgcgacaactacggcacgtccattgacgtctggtctgtggggtgcatattcgcggagctgcttggccgcaagccgatcttcccaggaaccgagtgcctgaaccagctcaagctcatcgtcaacgtcctcggcaccatgggcgaggccgacctcgcgttcatcgacaacccgaaggcccgcaagtacatcaagtcccttccgtacgccccgggcgcccccttcaccggcatgtaccctcaggcgcaccctctcgccatcgacctgctgcagaagatgctcgtgttcgacccgtccaagaggatcagcgtcaccgaggcgctggagcacccgtacatgtctccgctctatgacccgagcgcgaaccctcccgcgcaggtgccgatcgacctcgacatcgacgagaacctcggcgtcgacatgatcagggagatgatgtggcaggagatgatccactaccaccccgaggtcctcacgagaatcagcatgtga

SEQ ID NO: 63150 - protein, 369 aa, Zea mays
MAMMVDPPNGMASQGKHYYTMWQTLFEIDTKYVPIKPIGRGAYGIVCSSVNRETNEKVAIKKINNVFDNRVDALRTLRELKLLRHLRHENVIALKDIMMPAHRRSFKDVYLVYELMDTDLHQIIKSSQPLSNDHCQYFLFQLLRGLKYLHSAGILHRDLKPGNLLVNANCDLKICDFGLARTNNTKGQFMTEYVVTRWYRAPELLLCCDNYGTSIDVWSVGCIFAELLGRKPIFPGTECLNQLKLIVNVLGTMGEADLAFIDNPKARKYIKSLPYAPGAPFTGMYPQAHPLAIDLLQKMLVFDPSKRISVTEALEHPYMSPLYDPSANPPAQVPIDLDIDENLGVDMIREMMWQEMIHYHPEVLTRISM

SEQ ID NO: 63151 - DNA, 1113 bp, Zea mays
  CDS (1)..(1113)
atggcgatgatggtggatcctccgaatggaatcgggaaccaaggaaagcattactactcaatgtggcagaccttatttgagatagacaccaaatatgtaccgatcaagcccattggtcgaggagcttatgggatagtttgttcatccattaatcgtgaaacaaatgagaaagtagcaataaagaagatacacaacgttttcgacaaccgtgtggatgcactacggaccttgcgggagctgaaactccttcgccatctccggcatgagaatgtcattgctttgaaggatataatgatgccaatacacaggagaagctttaaggatgtgtacttggtatacgaactcatggatactgatttgcaccagataatcaaatcacctcagggcctttccaatgaccactgccagtattttctttttcagttgctccgaggactcaaatatctccattcagcagaaatactccacagagacctaaaacctggaaacctgctggtgaatgcaaattgtgatctgaagatatgtgattttggtctcgcacgtacaaacagtagcaaaggccagttcatgactgaatacgtcgtcacccgctggtacagagctcctgagctgctcctctgctgcgacaactacggcacatccatagacgtctggtctgttgggtgcatctttgctgagctccttggccgcaagccaatatttccaggaactgaatgcctgaatcaactcaagctcatagtgaacgtcctcggcacaatgagtgaggctgacctagagttcatcgacaacccaaaggctcggagatacatcaagtcccttccctatacccctggtgttcctctcgtaagtatgtacccacatgcgcaccctcttgccattgatctgttgcagaagatgctcatcttcgaccccaccaaaaggatcagtgtcaccgaggctctcgagcacccttacatgtcccctctgtatgacccaagcgcaaatcccccagcccaagtgcccatcgatctggacatagacgaaaacatcagctcagagatgatccgggaaatgatgtggcaggagatgcttcactaccaccctgaagttgccacagcaataagcatgtcatga

SEQ ID NO: 63152 - protein, 370 aa, Zea mays
MAMMVDPPNGIGNQGKHYYSMWQTLFEIDTKYVPIKPIGRGAYGIVCSSINRETNEKVAIKKIHNVFDNRVDALRTLRELKLLRHLRHENVIALKDIMMPIHRRSFKDVYLVYELMDTDLHQIIKSPQGLSNDHCQYFLFQLLRGLKYLHSAEILHRDLKPGNLLVNANCDLKICDFGLARTNSSKGQFMTEYVVTRWYRAPELLLCCDNYGTSIDVWSVGCIFAELLGRKPIFPGTECLNQLKLIVNVLGTMSEADLEFIDNPKARRYIKSLPYTPGVPLVSMYPHAHPLAIDLLQKMLIFDPTKRISVTEALEHPYMSPLYDPSANPPAQVPIDLDIDENISSEMIREMMWQEMLHYHPEVATAISMS

SEQ ID NO: 63153 - DNA, 1476 bp, Zea mays
  CDS (1)..(1476)
atggacttcttcacggaatatggggaggcgagtcagtatcaaatccaagaggtcattggtaagggaagttatggagtagttgctgctgcaattgatagtcacactggggagcgggttgcgatcaagaagataaatgatatttttggtaatgtctcggatgctgctcgcattttgcgggaaatcaagcttcttcgtctgcttcgtcacccaaacatagtccagattaagcacattatgttgccccctacccgaagggagttcaaagatatctatgttgtttttgagctcatggagtctgacctgcatcaagtgatcaaagcaaatgataacctgactccagagcatcaccgctttttcctgtatcaacttatttgtgctctcaagtacatgcattcagcccatgtatttcatcgtgatttaaagcccaggaacatactggccaattcagacagcaaactaaagatctgcgactttggacttgcacgtgcatcatttaacgactctctttcagctatctattggacagattatgtcgcaacaaggtggtaccgggctcctgaattatgtggctcctttttctccagttacacccctgcaattgatatttggagtatagggtgcatttttgctgaagttctcaccggaacgccattgtttcctgggaggaatgttgtgcaccaattagacttaataacagatctccttggaacaccatcgtttagatccttatcccagattcacagtgataaggccagggaatatttgcttggcatgccgaggaagcgccctattccattttctcataagttccataatgccgatcctctggctctccggttgctagagcgtttacttgcatttgacccgaaagatcgacctactgctgaagaggctttagctgatccatacttcagtggcctttctaaattggaacttgagccttcagcacaaccaatttcgaaggttgactttgaattcgagggaaggaaactaacaaaggctggtgtgagagaaatgatatatcgggagattttggagtaccatccccagatgcttcaggagtacatcgaaggtggagatcagattcacttcctatacccaagtggggtcgatcgcttccagcgacagtttgctcatctcgaggagaactacaggagaggagtagctagcaccccgccgcgaaggcagcccacatctctgccgagagagcgagtctgctcatcagaagatggccacagtcaggactctgacagcgaagagcagagagcagcatcctacgttgcccgaacaaccataagccctccaagatcacaagaggagggcggcaagctccagcctgcctaccagagcgccgccgccgccgcagactcctgcgccaagagctatctgaagggtgccgctagtatcagtagtgcttccaggcgtaccatcaagggggataatggccgaaaggagaagggatctccgaggctgtga

SEQ ID NO: 63154 - protein, 491 aa, Zea mays
MDFFTEYGEASQYQIQEVIGKGSYGVVAAAIDSHTGERVAIKKINDIFGNVSDAARILREIKLLRLLRHPNIVQIKHIMLPPTRREFKDIYVVFELMESDLHQVIKANDNLTPEHHRFFLYQLICALKYMHSAHVFHRDLKPRNILANSDSKLKICDFGLARASFNDSLSAIYWTDYVATRWYRAPELCGSFFSSYTPAIDIWSIGCIFAEVLTGTPLFPGRNVVHQLDLITDLLGTPSFRSLSQIHSDKAREYLLGMPRKRPIPFSHKFHNADPLALRLLERLLAFDPKDRPTAEEALADPYFSGLSKLELEPSAQPISKVDFEFEGRKLTKAGVREMIYREILEYHPQMLQEYIEGGDQIHFLYPSGVDRFQRQFAHLEENYRRGVASTPPRRQPTSLPRERVCSSEDGHSQDSDSEEQRAASYVARTTISPPRSQEEGGKLQPAYQSAAAAADSCAKSYLKGAASISSASRRTIKGDNGRKEKGSPRL

SEQ ID NO: 63155 - DNA, 1287 bp, Zea mays
  CDS (1)..(1287)
atggcgagcgccggcaacagcggcagcggggacgacgatgcaggagggaagctcctggcggatcgctaccagaagggcgaggtcctcggcgagggcacgtatggagtcgtcttcaaggccatcgacaccaagactggaaatacagtcgcggtaaagcgaatccggataggaaaggacaagaaggaaggtgtcaacttcactgcgttgagggaaattaaactacttaaggagctgaaagatcctaatattatagagctgattgattgtttcccttacaaggaaaatttgcaccttgtgtttgagtttatggagaccgatctggaagctctcataaaagataagaacataatactctctccagctgacacaaaatcatatgtccagatgatgttaaaaggtctagcgttctgccataagaaatgggtgctacacagggatatgaaaccaaataatttactcattggtgccgatgggcagctcaagcttgctgacttcggtctggcccgtgtgttcgggagtccaggaaggaacttcactcaccaggtctttgcacgttggtaccgggcaccagaattattatttggctcgaagcagtacggatctggggtggatatttgggccgctggatgtatttttgctgaactgcttactcgcagagcctttctccagggttctagtgacattgatcaacttgggaagattttcgcagcacttgggaccccaaaatcttctcaatggcctgacatggtttatcttcctgattatgttgaataccaatatgttgctgcacctccactacgtacgttgtttccaatggccagcgatgatgctttggatcttctgtcaaaaatgcttacctatgatccaaaagcaagaatcagtgctcagcaggctctagaacacaggtacttttcatcgttacctgcaccaacaagaccatcgcagcttccaaggccacgtcggaaaggagatcaagggaataacaagattcctgatctcaacctgcaggatggccctatggtgctctccccgccaagaaagttacgtagggtgacagcgcatgaagggatggaaggtatgcacaggacagataaagtggacgaacatccttctgggatgaggcacaccgatgacatgcccagtcagagttctagaattccaatgtcagttgatgttggggctgtgtttggcacacgacctgcacctaggccaacattgaacagtgcggacaagtctcgtttaaaacggaaacttgatatggatccagagtttggatacgcggagtag

SEQ ID NO: 63156 - protein, 428 aa, Zea mays
MASAGNSGSGDDDAGGKLLADRYQKGEVLGEGTYGVVFKAIDTKTGNTVAVKRIRIGKDKKEGVNFTALREIKLLKELKDPNIIELIDCFPYKENLHLVFEFMETDLEALIKDKNIILSPADTKSYVQMMLKGLAFCHKKWVLHRDMKPNNLLIGADGQLKLADFGLARVFGSPGRNFTHQVFARWYRAPELLFGSKQYGSGVDIWAAGCIFAELLTRRAFLQGSSDIDQLGKIFAALGTPKSSQWPDMVYLPDYVEYQYVAAPPLRTLFPMASDDALDLLSKMLTYDPKARISAQQALEHRYFSSLPAPTRPSQLPRPRRKGDQGNNKIPDLNLQDGPMVLSPPRKLRRVTAHEGMEGMHRTDKVDEHPSGMRHTDDMPSQSSRIPMSVDVGAVFGTRPAPRPTLNSADKSRLKRKLDMDPEFGYAE

SEQ ID NO: 63157 - DNA, 978 bp, Zea mays
  CDS (1)..(978)
atggcgacgatccagaacaagccgactccgacggcgccgtccacgacgacgggcggcggactgcgcgccatggatctgtacgagaagctggagaaggtgggggagggcacgtacgggaaggtgtacaaggcccgggagaaggcgacgggccggatcgtggcgctcaagaagacgcggctccccgaggacgacgagggcgtgccgcccaccgcgctgcgggaggtctcgctgctgcggatgctgtcgcaggacccgcacgtggtccgcctgctcgacctcaagcagggcgtcaacaaggaggggcagaccatcctgtacctcgtcttcgagtacatggacaccgacctgaagaagttcatccggggctatcgcgccaaccacgagaagatccccgcacaaaccgtcaagatcctgatgtaccagctgtgcaagggcgtgggttttgttcacggccgcggggtgctccaccgtgatctgaaaccgcacaacctgctcatggaccgcaagaccatggcgctcaagatcgctgacctcggactcagccgtgccatcaccgtccctgtaaagaagtacacgcacgagattctgacgctgtggtacagggcgcccgaggttcttcttggcgccacacactactccacgccggttgacatttggtccgtggggtgcatatttgctgagttggttactaatcagccacttttccctggcgactccgagttgcagcagctcctccacatcttcaagttgctgggcaccccaaatgaggagatgtggccaggagtaggcaagctgccgaactggcacgtgtacccccagtggaagcccactaagctgtccactcttgtccctggtcttgactccgatggctatgatttacttgagaaaatgcttgcatatgagccagggaagcgggtctcggcgaagaaggccctggagcacccgtacttcaatgatgttaacaaggaggtgtactga

SEQ ID NO: 63158 - protein, 325 aa, Zea mays
MATIQNKPTPTAPSTTTGGGLRAMDLYEKLEKVGEGTYGKVYKAREKATGRIVALKKTRLPEDDEGVPPTALREVSLLRMLSQDPHVVRLLDLKQGVNKEGQTILYLVFEYMDTDLKKFIRGYRANHEKIPAQTVKILMYQLCKGVGFVHGRGVLHRDLKPHNLLMDRKTMALKIADLGLSRAITVPVKKYTHEILTLWYRAPEVLLGATHYSTPVDIWSVGCIFAELVTNQPLFPGDSELQQLLHIFKLLGTPNEEMWPGVGKLPNWHVYPQWKPTKLSTLVPGLDSDGYDLLEKMLAYEPGKRVSAKKALEHPYFNDVNKEVY

SEQ ID NO: 63159 - DNA, 25 bp, Artificial sequence
  primer
atgagcggtgaattagcaaattaca

SEQ ID NO: 63160 - DNA, 24 bp, Artificial sequence
  primer
ttatgattcttggaagtaggggtg

SEQ ID NO: 63161 - protein, 359 aa, Artificial sequence
  consensus sequence
  Variant (2)..(2): Xaa in position 2 is any amino acid
  Variant (4)..(4): Xaa in position 4 is any amino acid
  Variant (7)..(7): Xaa in position 7 is any amino acid
  Variant (9)..(15): Xaa in position 9 to 15 is any amino acid
  Variant (16)..(18): Xaa in position 16 to 18 is any or no amino acid
  Variant (20)..(22): Xaa in position 20 to 22 is any amino acid
  Variant (23)..(23): Xaa in position 23 is any or no amino acid
  Variant (25)..(25): Xaa in position 25 is any amino acid
  Variant (28)..(34): Xaa in position 28 to 34 is any amino acid
  Variant (35)..(38): Xaa in position 35 to 38 is any or no amino acid
  Variant (40)..(40): Xaa in position 40 is any amino acid
  Variant (42)..(45): Xaa in position 42 to 45 is any amino acid
  Variant (48)..(49): Xaa in position 48 to 49 is any amino acid
  Variant (52)..(61): Xaa in position 52 to 61 is any amino acid
  Variant (62)..(65): Xaa in position 62 to 65 is any or no amino acid
  Variant (67)..(75): Xaa in position 67 to 75 is any amino acid
  Variant (76)..(92): Xaa in position 76 to 92 is any or no amino acid
  Variant (97)..(100): Xaa in position 97 to 100 is any amino acid
  Variant (101)..(101): Xaa in position 101 is any or no amino acid
  Variant (104)..(119): Xaa in position 104 to 119 is any amino acid
  Variant (120)..(144): Xaa in position 120 to 144 is any or no amino acid
  Variant (146)..(148): Xaa in position 146 to 148 is any amino acid
  Variant (150)..(153): Xaa in position 150 to 153 is any amino acid
  Variant (155)..(158): Xaa in position 155 to 158 is any amino acid
  Variant (166)..(166): Xaa in position 166 is any amino acid
  Variant (170)..(175): Xaa in position 170 to 175 is any amino acid
  Variant (176)..(176): Xaa in position 176 is any or no amino acid
  Variant (179)..(180): Xaa in position 179 to 180 is any amino acid
  Variant (187)..(194): Xaa in position 187 to 194 is any amino acid
  Variant (195)..(199): Xaa in position 195 to 199 is any or no amino acid
  Variant (201)..(203): Xaa in position 201 to 203 is any amino acid
  Variant (206)..(206): Xaa in position 206 is any amino acid
  Variant (213)..(213): Xaa in position 213 is any amino acid
  Variant (217)..(218): Xaa in position 217 to 218 is any amino acid
  Variant (219)..(220): Xaa in position 219 to 220 is any or no amino acid
  Variant (222)..(225): Xaa in position 222 to 225 is any amino acid
  Variant (227)..(227): Xaa in position 227 is any amino acid
  Variant (230)..(230): Xaa in position 230 is any amino acid
  Variant (234)..(234): Xaa in position 234 is any amino acid
  Variant (237)..(240): Xaa in position 237 to 240 is any amino acid
  Variant (241)..(244): Xaa in position 241 to 244 is any or no amino acid
  Variant (248)..(252): Xaa in position 248 to 252 is any amino acid
  Variant (253)..(254): Xaa in position 253 to 254 is any or no amino acid
  Variant (256)..(257): Xaa in position 256 to 257 is any amino acid
  Variant (259)..(260): Xaa in position 259 to 260 is any amino acid
  Variant (261)..(262): Xaa in position 261 to 262 is any or no amino acid
  Variant (266)..(266): Xaa in position 266 is any amino acid
  Variant (268)..(269): Xaa in position 268 to 269 is any amino acid
  Variant (272)..(280): Xaa in position 272 to 280 is any amino acid
  Variant (281)..(291): Xaa in position 281 to 291 is any or no amino acid
  Variant (293)..(309): Xaa in position 293 to 309 is any amino acid
  Variant (310)..(324): Xaa in position 310 to 324 is any or no amino acid
  Variant (328)..(330): Xaa in position 328 to 330 is any amino acid
  Variant (332)..(334): Xaa in position 332 to 334 is any amino acid
  Variant (336)..(337): Xaa in position 336 to 337 is any amino acid
  Variant (339)..(346): Xaa in position 339 to 346 is any amino acid
  Variant (347)..(347): Xaa in position 347 is any or no amino acid
  Variant (349)..(349): Xaa in position 349 is any amino acid
  Variant (351)..(352): Xaa in position 351 to 352 is any amino acid
  Variant (354)..(355): Xaa in position 354 to 355 is any amino acid
  Variant (357)..(357): Xaa in position 357 is any amino acid
GXGXYGXVXXXXXXXXXXTXXXXAXKKXXXXXXXXXXXGXPXXXXREXXLLXXXXXXXXXXXXXXLXXXXXXXXXXXXXXXXXXXXXXXXXXLVFEXXXXXDLXXXXXXXXXXXXXXXXXXXXXXXXXXXXXXXXXXXXXXXXXQXXXGXXXXHXXXXLHRDLKPXNLLXXXXXXXLKXXDFGLARXXXXXXXXXXXXXTXXXVTXWYRAPEXLLGXXXXYXXXXDXWSXGCIXAEXXXXXXXXFPGXXXXXXXLXXIXXXXGTPXEXXWPXXXXXXXXXXXXXXXXXXXXPXXXXXXXXXXXXXXXXXXXXXXXXXXXXXXXXDLLXXXLXXXPXXRXXXXXXXXXIXAXXAXXHXYF

SEQ ID NO: 63162 - protein, 16 aa, Artificial sequence
  protein pattern
  Variant (2)..(2): Xaa in position 2 is Ala, Gly, Asn, Ser or Thr
  Variant (3)..(4): Xaa in position 3 to 4 is any amino acid
  Variant (5)..(5): Xaa in position 5 is Ile, Leu or Val
  Variant (7)..(7): Xaa in position 7 is any amino acid
  Variant (10)..(10): Xaa in position 10 is Ala, Ile, Leu or Val
  Variant (14)..(14): Xaa in position 14 is Phe, Ile, Leu or Met
  Variant (15)..(15): Xaa in position 15 is any amino acid
YXXXXDXWSXGCIXXE

SEQ ID NO: 63163 - protein, 17 aa, Artificial sequence
  protein pattern
  Variant (2)..(4): Xaa in position 2 to 4 is any amino acid
  Variant (5)..(5): Xaa in position 5 is Ile or Val
  Variant (13)..(13): Xaa in position 13 is any amino acid
  Variant (17)..(17): Xaa in position 17 is Ile, Leu, Met or Val
HXXXXLHRDLKPXNLLX

SEQ ID NO: 63164 - protein, 14 aa, Artificial sequence
  protein pattern
  Variant (2)..(3): Xaa in position 2 to 3 is any amino acid
  Variant (4)..(4): Xaa in position 4 is Ile or Val
  Variant (5)..(5): Xaa in position 5 is Phe, Leu or Val
  Variant (6)..(6): Xaa in position 6 is Ala or Thr
  Variant (7)..(7): Xaa in position 7 is any amino acid
  Variant (11)..(11): Xaa in position 11 is any amino acid
  Variant (14)..(14): Xaa in position 14 is Ile, Leu or Val
TXXXXXXWYRXPEX

SEQ ID NO: 63165 - protein, 14 aa, Artificial sequence
  protein pattern
  Variant (2)..(2): Xaa in position 2 is any amino acid
  Variant (3)..(3): Xaa in position 3 is any or no amino acid
  Variant (5)..(5): Xaa in position 5 is Glu, Gln or Arg
  Variant (7)..(7): Xaa in position 7 is Ala or Thr
  Variant (9)..(9): Xaa in position 9 is Ala or Gly
  Variant (10)..(10): Xaa in position 10 is any amino acid
  Variant (12)..(13): Xaa in position 12 to 13 is any amino acid
  Variant (14)..(14): Xaa in position 14 is Ala, Gly or Ser
KXXGXGXYXXVXXX

SEQ ID NO: 63166 - protein, 13 aa, Artificial sequence
  protein pattern
  Variant (3)..(3): Xaa in position 3 is Ile or Leu
  Variant (4)..(4): Xaa in position 4 is Ala, Cys or Gly
  Variant (6)..(6): Xaa in position 6 is Phe or Leu
  Variant (9)..(10): Xaa in position 9 to 10 is any or no amino acid
  Variant (12)..(12): Xaa in position 12 is any amino acid
  Variant (13)..(13): Xaa in position 13 is Ala, Gly, Ser, Thr or Val
LKXXDXGLXXAXX

SEQ ID NO: 63167 - DNA, 582 bp, Saccharomyces cerevisiae
  CDS (1)..(582)
atgtccccaactggaaactacttaaacgctattacaaaccgtcgtaccatctacaatttgaagcccgaattaccacaaggtgtcggtttggatgatgtaaagagaactgtacacgttattctcaagaatacgccaacagcttttaactcacaagtgaatcgcgctgtcattatcgttggtgatacacacaaaaggatatgggatgctgttgcgagcgcaatgccaactgctgaagccaagaagagaccagagtcttgcagagatgaggcttacggttcagtcattttcttcactgatgaaggaccaactgaaaaactgcaaagagattttccagccttggcagccgctttcccaacatgcgccgctcatacgaccggtgctgtgcaaattcagtcttggactgccctcgaactattgggattgggggctaatttgcaacactataatgactacgtcaaatctgctttgcctcaagatgttcctattgcgtggactgtacaatctcaattggtctttggtgttccaactgccttgccagaagaaaagacttttatcaataacgtaatcaacgtttatcactga

SEQ ID NO: 63168 - protein, 193 aa, Saccharomyces cerevisiae
MSPTGNYLNAITNRRTIYNLKPELPQGVGLDDVKRTVHVILKNTPTAFNSQVNRAVIIVGDTHKRIWDAVASAMPTAEAKKRPESCRDEAYGSVIFFTDEGPTEKLQRDFPALAAAFPTCAAHTTGAVQIQSWTALELLGLGANLQHYNDYVKSALPQDVPIAWTVQSQLVFGVPTALPEEKTFINNVINVYH

SEQ ID NO: 63169 - DNA, 759 bp, Zea mays
  CDS (86)..(712)
  misc_feature (555)..(555): n is a, g, c or t
cctgccggaactaagacttacctcacttgcttctccgtgttcctccttgttacccagcaaatcattctccaccacatcaccaacaatggcttcttctcagctcacaaagtcggtcatcgaggccatcaaggagcgccgcacatactaccagctcaacaaggaggcgcccatctcggacaagaagatccaggagctcgttgagcaggcccttctccatgtcccctcctcgttcaactcccagtccacccgccttgttgttctcctgaacaaggaccacgagcagttctgggactacgttatcgaggtcctcaagcctctcactcccgaggacaagttcgacggcaccaagcagaagatcaacagcttccgcgctgcctacggcactgtcctcttctacgaagcccccgagcccgtcgagaacctccgcaaagccttccctctgtacgcacaccacttcggcgactggtccgagcacaccaacgccatgcaccagtacgcgctctgggttgcgctcgaggccgagggcttcggtgccaacctgcagcactacaaccncatcattgaccagaaggctgctgagcactggagcatccctctcgagtggaagctcaggtcgcagcttgtctttggtggccgcgcgggcgagcccggcgagaagcagttccagaagactttcggcgagaggctgtttgtccacggctccaaggagtaaatgtccatggcattgcattagatagcgaattgagcattgaaccttcc

SEQ ID NO: 63170 - protein, 208 aa, Zea mays
  misc_feature (157)..(157): The Xaa at location 157 stands for Arg, His, Leu, or Pro.
MASSQLTKSVIEAIKERRTYYQLNKEAPISDKKIQELVEQALLHVPSSFNSQSTRLVVLLNKDHEQFWDYVIEVLKPLTPEDKFDGTKQKINSFRAAYGTVLFYEAPEPVENLRKAFPLYAHHFGDWSEHTNAMHQYALWVALEAEGFGANLQHYNXIIDQKAAEHWSIPLEWKLRSQLVFGGRAGEPGEKQFQKTFGERLFVHGSKE

SEQ ID NO: 63171 - DNA, 603 bp, Pseudomonas aeruginosa PAO1
  CDS (1)..(603): transl_table=11
atgtctgacgcattcctctcctccatcaagaaccgccgcaccatctacgccctggacaagcaactgcccgtctcccaggagaaaatcgtcgaactggtcaaggaggccgtctcgcacagcccttccgcgttcaactcgcagagctcgcgggtggtcgtcctgttcggcgccgagcacgagcagttctggaacatcgccaaggacgagttgaagaagatcgttcccgccgacgctttcgccgccaccgaaaccaagctcaattccttcgccgccggtgccggcaccgtactgttcttcgaagaccagacggtagtgcgccagcttcaggagcagttcgccctctacgccgacaacttcccggtgtggtcggagcaggccagcggcatggcccagttcgcggtctggaccgccctcgccgagcacaaggtcggcgccagcctgcagcactacaacccgctggtagatgcgcagacccacaagacctggaacctgccggaaagctggaagctgcgcgcacagatgcctttcggcgccatcgccgctccggcgggggagaaagccttcatcgccgaaagcgaacgcttcaaggtcttcggcaactga

SEQ ID NO: 63172 - protein, 200 aa, Pseudomonas aeruginosa PAO1
MSDAFLSSIKNRRTIYALDKQLPVSQEKIVELVKEAVSHSPSAFNSQSSRVVVLFGAEHEQFWNIAKDELKKIVPADAFAATETKLNSFAAGAGTVLFFEDQTVVRQLQEQFALYADNFPVWSEQASGMAQFAVWTALAEHKVGASLQHYNPLVDAQTHKTWNLPESWKLRAQMPFGAIAAPAGEKAFIAESERFKVFGN

SEQ ID NO: 63173 - DNA, 609 bp, Lactococcus lactis subsp. lactis Il1403
  CDS (1)..(609): transl_table=11
atgtcattcattaaatcattagaaaaccgtcgcacaatctacgctcttggaagaaacgttcaagatgaagaaaaagtgattgaaacaattaaagaagctgtacgtttttcaccaacagctttcaattcacaaactggacgtcttttgattctcacaggtgatgcccaagataaactttgggatgaaattgttgccccagaacttaaagcagccatggaagcacaaggtgttcctgaatcagcttgggataacacacgtgcaaaacttgatggatttaaagctgcttttggtacaattcttttctttgaagaccaagcagttgttaaaaatcttcaagaacaatttgctctttatgcagataacttcccagtttggtcagaacaaggttcaggaattatttctgtaaatgtatggactgctcttgctgaacttggtttaggcgctaacttgcaacactacaatccattgattgacgaagctgttgctaaagaatggaatcttccagaaagctggaaacttcgtggacaacttgtatttggttcaatcgaagcacctgctggcgaaaaaactttcatggatgatgcagaccgtttcatcgttgctaaataa

SEQ ID NO: 63174 - protein, 202 aa, Lactococcus lactis subsp. lactis Il1403
MSFIKSLENRRTIYALGRNVQDEEKVIETIKEAVRFSPTAFNSQTGRLLILTGDAQDKLWDEIVAPELKAAMEAQGVPESAWDNTRAKLDGFKAAFGTILFFEDQAVVKNLQEQFALYADNFPVWSEQGSGIISVNVWTALAELGLGANLQHYNPLIDEAVAKEWNLPESWKLRGQLVFGSIEAPAGEKTFMDDADRFIVAK

SEQ ID NO: 63175 - DNA, 606 bp, Neisseria meningitidis MC58
  CDS (1)..(606): transl_table=11
atgacccgtcaatctctgcaacaggctgccgaaagccgccgttccatttattcgttaaataaaaatctgcccgtcggcaaagatgaagttgtccaaatcgtcgaacacgccgttttgcacacaccttcttcgttcaattcccaatctgcccgcgtggtcgtgctgtttggcgaagagcatgataaggtgtggcaatttgtcgaagacgcgctgcgtgccgtcgtgcctgccgacagttttgaaccgaccgcgcaaaaattgaacctgtttaaggcgggtgcggcaaccattttgttttatgaagatcaaaatgtcgtcaaaggtttgcaggagcagttccctgcttatgccgctaacttccccgtttgggcggatcaggcaaacgcgatggtgcagtatgccgtttggacgacacttgccgcggtcggcgtaggtgcaaacctgcaacattacaatcccttgcccgatgcggcgattgccaaagcgtggaatatccccgaaaactggttgttgcgcgcacaaatggttatcggcggtattgaaggggcggcaggtgaaaagacctttgaacccgttgcagaacgtttgaaagtgttcggcgcataa

SEQ ID NO: 63176 - protein, 201 aa, Neisseria meningitidis MC58
MTRQSLQQAAESRRSIYSLNKNLPVGKDEVVQIVEHAVLHTPSSFNSQSARVVVLFGEEHDKVWQFVEDALRAVVPADSFEPTAQKLNLFKAGAATILFYEDQNVVKGLQEQFPAYAANFPVWADQANAMVQYAVWTTLAAVGVGANLQHYNPLPDAAIAKAWNIPENWLLRAQMVIGGIEGAAGEKTFEPVAERLKVFGA

SEQ ID NO: 63177 - DNA, 606 bp, Neisseria meningitidis Z2491
  CDS (1)..(606): transl_table=11
atgacccgtcaatctctgcaacaggctgccgaaagccgccgttccatttattcgttaaataaaaatctgcccgtcggcaaagatgaaatcgtccaaatcgtcgaacacgccgttttgcacacaccttcttcgttcaattcccaatctgcccgtgtggtcgtgctgtttggcgaagagcatgataaggtgtggcaatttgtcgaagacgcgctgcgtgccgtcgtgcctgccgacagttttgaaccgaccgcgcaaaaattgaacctgtttaaggcgggtgcggcaactattttgttttatgaagatcaaaatgtcgtcaaaggtttgcaggagcagttccctgcttatgccgccaactttcccgtttgggcggaccaggcgaacgcgatggtgcagtatgccgtttggacgacacttgccgcggtcggcgtaggtgcaaacctgcaacattacaatcccttgcccgatgcggcgattgccaaagcgtggaatatccccgaaaactggttgttgcgcgcacaaatggttatcggcggtattgaaggggcggcaggtgaaaagacctttgaaccagttgcagaacgtttgaaagtgttcggcgcataa

SEQ ID NO: 63178 - protein, 201 aa, Neisseria meningitidis Z2491
MTRQSLQQAAESRRSIYSLNKNLPVGKDEIVQIVEHAVLHTPSSFNSQSARVVVLFGEEHDKVWQFVEDALRAVVPADSFEPTAQKLNLFKAGAATILFYEDQNVVKGLQEQFPAYAANFPVWADQANAMVQYAVWTTLAAVGVGANLQHYNPLPDAAIAKAWNIPENWLLRAQMVIGGIEGAAGEKTFEPVAERLKVFGA

SEQ ID NO: 63179 - DNA, 597 bp, Clostridium acetobutylicum ATCC 824
  CDS (1)..(597): transl_table=11
atgtcaaaggatttttatgaagcagttaagaaaagaagaactatttatggaattggtaaggaaagcccaatttcagatgaaagaataaaggaaatagtagagcttttagttaaggagactccatcatcttttaattcacaaagctctagagtagttgttttatttggaaaaaatcatgataagctttgggaaataactaaggaaactcttagaaaaatagttccagaaggaaatttttcaagtacagaagaaaaaattaattcctttaagagcggatatggaacaatactttattttgaagatcaaaatgttataaaaagtcttcaagatcaattccaattgtataaggataattttcctgtttggtcagagcaatcatcaggaatgcttcaaataaatatttggaatgctctttcgctagaaggtcttggagcctcacttcagcattataatccacttattgatgatgctgtaagagatgaatggcatattcctcagaattggaaacttataggacaaatgccttttggaaaaccaacagcagatccaggagacaaagactttataccaatagatagcagagttaagtttttttaa

SEQ ID NO: 63180 - protein, 198 aa, Clostridium acetobutylicum ATCC 824
MSKDFYEAVKKRRTIYGIGKESPISDERIKEIVELLVKETPSSFNSQSSRVVVLFGKNHDKLWEITKETLRKIVPEGNFSSTEEKINSFKSGYGTILYFEDQNVIKSLQDQFQLYKDNFPVWSEQSSGMLQINIWNALSLEGLGASLQHYNPLIDDAVRDEWHIPQNWKLIGQMPFGKPTADPGDKDFIPIDSRVKFF

SEQ ID NO: 63181 - DNA, 834 bp, Agrobacterium tumefaciens str. C58
  CDS (1)..(834): transl_table=11
ttgacccggcattatgatcgactttgggaaggcaggtggccctctgcctcggaattctgccgcattagccgcccgaactttatccacgcagtaagggcgtgtcgcgtcgttcgtaattccgcaacaacgggtttcgccttgacgggctattgcgtcggcgatccaggcctcatgcttgttttgacagaaaaccaggagattgaattggagctgccaaacgaaaaatccgctagccgcatcatggtggcgcaacttcttgcaaaacgtcggacgcagtattcacttggcaaaaacatcgtgcttcccgacgaggagatcgatgcacttattcgcgaggcggttcgcctatccccctcggcgtttaactcgcagagttcgcgggttgtgatcctgcatcgcgacgaaaatcaaaaactctgggatattgtgaagtctgagctaagtcatatcgtcgaaggagaagctaagaagcactcctttagaaagatcgacagcttcgcagctggagcaggagctgttttattcttcgaggaccggaatgtgatcagaatcttacaagatcagtggcccctatacgctgatcacttcccagattggtcagagcaagcctctggaatggctcaactttcggtctggatcgcgctcgcgggcatcggaattggtgcaagccttcagcactacaaccctttggttgatgcaaagatcaaaaggcattggaacatacctgatacctggagattacgcgcgcagatgccgttcggctccaacgaggcgccttttcccccaaagacaatcatttccgacggtgaccgctttcgaagcttctttcgctag

SEQ ID NO: 63182 - protein, 277 aa, Agrobacterium tumefaciens str. C58
MTRHYDRLWEGRWPSASEFCRISRPNFIHAVRACRVVRNSATTGFALTGYCVGDPGLMLVLTENQEIELELPNEKSASRIMVAQLLAKRRTQYSLGKNIVLPDEEIDALIREAVRLSPSAFNSQSSRVVILHRDENQKLWDIVKSELSHIVEGEAKKHSFRKIDSFAAGAGAVLFFEDRNVIRILQDQWPLYADHFPDWSEQASGMAQLSVWIALAGIGIGASLQHYNPLVDAKIKRHWNIPDTWRLRAQMPFGSNEAPFPPKTIISDGDRFRSFFR

SEQ ID NO: 63183 - DNA, 600 bp, Listeria innocua Clip11262
  CDS (1)..(600): transl_table=11
atgactaatacatttttagattctattaaagttcgtcgttccatttatgcactagataaaaacgtttccgtagaggattccaaaattgaagaaatcattaaagacgcagttaaatacagcccatcttctttcaactctcaaagttctcgcgctgttattcttttaggagaaaaccatgataaactttggaatatcgtagaagacacattgcgcgctatcgtacctgctgaaaactttgcagctactgaagaaaaagttggttctttccgcgctggatacggaacagttcttttctttgaagatactgctgttattgaaggtctacaagaaaactttgcactatatgcagataatttccctgtatggtctgaacaatcttcaggtattgcacaacattcagtatgggttgctcttgcaaacgctggaattggcgcatctctacaacattacaacccactaattgacgatgctgttaaagctgaatggaatattcctgcaagctggaacttacgcgctcaaatgccgtttggtaacatcgttcaagaagctggcgaaaaagaattcatcgatgacgctgaccgtttccgcgttttcaaataa

SEQ ID NO: 63184 - protein, 199 aa, Listeria innocua Clip11262
MTNTFLDSIKVRRSIYALDKNVSVEDSKIEEIIKDAVKYSPSSFNSQSSRAVILLGENHDKLWNIVEDTLRAIVPAENFAATEEKVGSFRAGYGTVLFFEDTAVIEGLQENFALYADNFPVWSEQSSGIAQHSVWVALANAGIGASLQHYNPLIDDAVKAEWNIPASWNLRAQMPFGNIVQEAGEKEFIDDADRFRVFK

SEQ ID NO: 63185 - DNA, 603 bp, Streptococcus mutans UA159
  CDS (1)..(603): transl_table=11
atgtcaaattttttagatttacaaaaacaacgtcgcagtatctatgccttaggcaaaactgttgatttatcaaaggctgaattagttgcattaattcaaaatgccattaagcaggcgccgtcagcttttaattcgcaaaccagccgtgctctcgttcttttcgggcaagactctcaagatttttggaataaaattgcttacagtgaattagaaaaagtcacaccagcagaagcctttgcagggacaaaagcgaagttggaaagttttgctgctggagttggaaccattctgctatttgaagatcaagctgttgtcagaaatttagaagaaaactttccgctttatgcagagaatttccagccttggtctgaacaagcacacggtattgctctttatgctatttggttagcactagctgaacaaaatattggtatgagtgttcagcactacaatccgcttgttgatgctcaagttgctgaaaaatatgatttaccaactaactggaaaatgcgtgcacaaataccttttggttcaattgaagcacctgctggtgagaaagaattcatggcagaccaagaacgtttcaaagtatttggtgactag

SEQ ID NO: 63186 - protein, 200 aa, Streptococcus mutans UA159
MSNFLDLQKQRRSIYALGKTVDLSKAELVALIQNAIKQAPSAFNSQTSRALVLFGQDSQDFWNKIAYSELEKVTPAEAFAGTKAKLESFAAGVGTILLFEDQAVVRNLEENFPLYAENFQPWSEQAHGIALYAIWLALAEQNIGMSVQHYNPLVDAQVAEKYDLPTNWKMRAQIPFGSIEAPAGEKEFMADQERFKVFGD

SEQ ID NO: 63187 - DNA, 615 bp, Streptococcus agalactiae NEM316
  CDS (1)..(615): transl_table=11
atgtcatttttggaagaattaaaaaaccgtcgctctatttacgctcttggtcgcaatacagaagtttctgatgagaaaatagtagagattattaaagaggcagttcgccaatccccatctgcttttaatagtcaaacttcccgtgttgtcattttattgaatgatgaagttactaagttctgggatgaattggttgctaatgatttggtagaaacaatgaaagtacaaggtgctccagagacagctattgctggaactaaggaaaaattagctagttttggagcttcaaagggaacagtactcttctttgaagatcaagatgttgtcaaatctcttcaagaacaattcgttctttatgcggataactttccagtttggtctgagcaatcaacaggtattgcctcagtaaatacttggacagccctttctgcagaacttggacttggtggtaatttacaacattacaatccagttattgatgcatcagtacaagctgtttatggtgttccagctagttggaaacttcgtggacaactaaattttggttcaatcgaagctgaaacaggagaaaaagaattcatgaatgatgatgaccgctttaaagtcatcggataa

SEQ ID NO: 63188 - protein, 204 aa, Streptococcus agalactiae NEM316
MSFLEELKNRRSIYALGRNTEVSDEKIVEIIKEAVRQSPSAFNSQTSRVVILLNDEVTKFWDELVANDLVETMKVQGAPETAIAGTKEKLASFGASKGTVLFFEDQDVVKSLQEQFVLYADNFPVWSEQSTGIASVNTWTALSAELGLGGNLQHYNPVIDASVQAVYGVPASWKLRGQLNFGSIEAETGEKEFMNDDDRFKVIG

SEQ ID NO: 63189 - DNA, 603 bp, Bacteroides thetaiotaomicron VPI-5482
  CDS (1)..(603): transl_table=11
atggaaagaacttttagtgaagctttgaagaatcgtcggacttattattcgattaccgaccagtcacctattccggatcaggagatagaatgcattatcaatctggctgtgagacacgtgccgtcggcattcaattctcaatctacccgtgtggtgcttcttcttggcaagtctcataaaaagttatggaacattgtaaaagatgcgttgaggaagattgtgccgggagaagcgtttgcgaaaaccgaagaaaagattgacaattcctttgcctgtggatatggtacggtgttgttctttgaagatcagaaggtggtgaaggggcttcaggaagctttcccgtcttatcaggagaatttccccggatggtcattacaaacctcagcgatgcatcagctggctgtttgggtcatgcttgaagatgtgggcttcggtgcttccttgcaacattataatccgttgattgatgatgaggtgcgtcgggcatggaatttgcctgcacattggcatctgattgcggaaatgccgtttggagtgcccgtcaataagccgggagaaaaagagttccagccactggaagaacggataaaagtttttaaataa

SEQ ID NO: 63190 - protein, 200 aa, Bacteroides thetaiotaomicron VPI-5482
MERTFSEALKNRRTYYSITDQSPIPDQEIECIINLAVRHVPSAFNSQSTRVVLLLGKSHKKLWNIVKDALRKIVPGEAFAKTEEKIDNSFACGYGTVLFFEDQKVVKGLQEAFPSYQENFPGWSLQTSAMHQLAVWVMLEDVGFGASLQHYNPLIDDEVRRAWNLPAHWHLIAEMPFGVPVNKPGEKEFQPLEERIKVFK

SEQ ID NO: 63191 - DNA, 597 bp, Enterococcus faecalis V583
  CDS (1)..(597): transl_table=11
atgtcaaaatttactgaaatgatgaaaaaccgtcgttcaatctatgctttaggagaaaacttaccaatttcaaaagaagaagtaactgctttagtaaaagaagttgttagagaaagtccaacagcttttaactctcaaacacaacgtgttgtgttcttattcggcgatgctcacaaaaaattatgggcaatgactgaagacgccttaaaaccattaactccagcagaagcatttccaaacacacaagctaaattacaaggttttgcagctggtgcgggcacaattttattctttgaagatacagatatcgtgaaaaacttacaagatagcttcccattatatgcggataacttccctgtttggtctgaacaagcaactggtttaacacaagcgaacgtttggactgccttagcgcaagaaaatatcggcgcaaacctacaacactacaatccagttattgacgaagcggttgctgcagaatggtcaattcctgcaaactggaatttacgtgcacaaatggtcattggttccattgaagcgccagctggcgaaaaagaatacatggaagatagtgctcgttttaaagaattcaactaa

SEQ ID NO: 63192 - protein, 198 aa, Enterococcus faecalis V583
MSKFTEMMKNRRSIYALGENLPISKEEVTALVKEVVRESPTAFNSQTQRVVFLFGDAHKKLWAMTEDALKPLTPAEAFPNTQAKLQGFAAGAGTILFFEDTDIVKNLQDSFPLYADNFPVWSEQATGLTQANVWTALAQENIGANLQHYNPVIDEAVAAEWSIPANWNLRAQMVIGSIEAPAGEKEYMEDSARFKEFN

SEQ ID NO: 63193 - DNA, 603 bp, Bacillus cereus ATCC 14579
  CDS (1)..(603): transl_table=11
atgtcagcaactacaacaaacttaaaagaagcaatcgtgaaccgccgttcaattcgtaaagtaacaaaaaacgatgcaattacgaaagaaagaattgaagaagtgttaaaaacagctttacacgcaccaacatctttcaatatgcaaagtggtcgtatggttgtattaatggatggagagcatgaaaagttttgggatatcgttaaagaaacactaagagcacgcgtaccagcagaaaactttgaagcgactgtagaaagactaaaaggcttccatgcaggtgtaggaacagttctattctttgaagatcaagcaactgtagaaaaaatgcaagaaaatgccccattatacaaagatcagttcccattctggtctcatcaaggaaatgcgatgttacaacatactgtgtggatgctattatctgctgaaggaattggggcgtcattacaacattacaacccaatcgtagatgctgaagtgaaagaaacttggaacattccggcagagtggagcttagtaggtcaaatgccatttggtgaaccaaacgaacaaccagcagaaagaacgttcttgcctactgaagatgtagtgaaattttattaa

SEQ ID NO: 63194 - protein, 200 aa, Bacillus cereus ATCC 14579
MSATTTNLKEAIVNRRSIRKVTKNDAITKERIEEVLKTALHAPTSFNMQSGRMVVLMDGEHEKFWDIVKETLRARVPAENFEATVERLKGFHAGVGTVLFFEDQATVEKMQENAPLYKDQFPFWSHQGNAMLQHTVWMLLSAEGIGASLQHYNPIVDAEVKETWNIPAEWSLVGQMPFGEPNEQPAERTFLPTEDVVKFY

SEQ ID NO: 63195 - DNA, 603 bp, Bacillus cereus ATCC 14579
  CDS (1)..(603): transl_table=11
atgatggcaaaagatttttactcagcaattgaagacagaagatctatttatgcaattagtaaagagcaagtagtttctgatgagaaaattcaagaagtgatttatcatgctgtaaaacatacaccttcagcttttaattctcaaagtgctcgcgttgttgttttattaggagaacaacatgataaattatgggatattacgaaagaaacgttacgaaaaattgtacctgaaaataactttgcacctactgaagaaaaaatgaatgcatttaaaagtggttatggaacggttttatattttgaagacagtgaagtagtggaaagccttcaagctaactttgcattatataaagataatttcccaacttggtctcagcaatcatcaggaatgttacaatttgcaatttggacagctttagaaattgaagggtttggtgctacgttacagcattacaatccgctaattgatgaagaagtgagaaaagagtgggatgttccagcaaattggaaacttattgcgcaaatgccatttggtaaaccggtagtacaggctggtgaaaaagaattccaaccgttagaaaaccgtgtgaaaatttataaataa

SEQ ID NO: 63196 - protein, 200 aa, Bacillus cereus ATCC 14579
MMAKDFYSAIEDRRSIYAISKEQVVSDEKIQEVIYHAVKHTPSAFNSQSARVVVLLGEQHDKLWDITKETLRKIVPENNFAPTEEKMNAFKSGYGTVLYFEDSEVVESLQANFALYKDNFPTWSQQSSGMLQFAIWTALEIEGFGATLQHYNPLIDEEVRKEWDVPANWKLIAQMPFGKPVVQAGEKEFQPLENRVKIYK

SEQ ID NO: 63197 - DNA, 600 bp, Bacillus cereus ATCC 10987
  CDS (1)..(600): transl_table=11
atggcaaaagatttttactcagcaattgaagacagaagatctatttacgcaattagtaaagaacaagtagtttctgatgaaaaaattcaagaagtgatttatcatgctgtaaaacatacaccttcagcttttaactctcagagtgctcgtgttgtcgtcttgcttggagaacaacacgataagttatgggatattacgaaagaaacgttacgaaaaattgtacctgaaaataacttagcttctacggaagaaaaaatgaatgcatttaaaagtggttatggaacagttctatacttcgaagatagtgaagtggtggaacaactgcaagaaaaatttgcattatacaaagagaactttccaatttggtctcagcaatcctctggaatgttacaatttgcaatttggacagctttggaaattgaagggtttggtgctacattgcaacattacaatccattaattgatgaagaagtgagaaaagaatggggagttccagaaaattggaagcttattgcgcaaatgccgtttggtaaaccagttgtacctgcaggtgaaaaagaataccagcctttagaaaaccgtgtgaaaatttataaataa

SEQ ID NO: 63198 - protein, 199 aa, Bacillus cereus ATCC 10987
MAKDFYSAIEDRRSIYAISKEQVVSDEKIQEVIYHAVKHTPSAFNSQSARVVVLLGEQHDKLWDITKETLRKIVPENNLASTEEKMNAFKSGYGTVLYFEDSEVVEQLQEKFALYKENFPIWSQQSSGMLQFAIWTALEIEGFGATLQHYNPLIDEEVRKEWGVPENWKLIAQMPFGKPVVPAGEKEYQPLENRVKIYK

SEQ ID NO: 63199 - DNA, 618 bp, Gibberella zeae PH-1
  CDS (1)..(618)
atggccgccaaactctctgccaacgccctcatcgagctggccaagaaccgccgctcttactacgctctctccaagaacctccccatccctacctcgcgcatcaccgagctcgtcaaccagaccaccctcgagagcccctcatccttcaactcccagaccaaccgtgtcgtcgtcctctacggcgctgagcacgacaagctctgggacatcacatccgatgccctccgtgccatcgtccccgctgaggcctgggaggccactgccaaccgtgtcgccggcttcaagaacgccgccggaactgtcctcttctacgtcgacaacaccaccatccagaccttccagggcaaatttgccatctatgctgaccgcttcgagccctgggctgttcagtccgctgctatccagcaatacctcctctggactgctctcgaggctgagggtctcggtgccaacctccagcactacaaccctctgatcgatgagaaggttgccgagacctggaagatcccctccacctggaccctcaacgctcagctcgtcttcggtgccaaggagggcgaggctggccccaagacatacgtccctcttgaggagcgtgtcaaggtctacggcgcttaa

SEQ ID NO: 63200 - protein, 205 aa, Gibberella zeae PH-1
MAAKLSANALIELAKNRRSYYALSKNLPIPTSRITELVNQTTLESPSSFNSQTNRVVVLYGAEHDKLWDITSDALRAIVPAEAWEATANRVAGFKNAAGTVLFYVDNTTIQTFQGKFAIYADRFEPWAVQSAAIQQYLLWTALEAEGLGANLQHYNPLIDEKVAETWKIPSTWTLNAQLVFGAKEGEAGPKTYVPLEERVKVYGA

SEQ ID NO: 63201 - DNA, 582 bp, Candida glabrata CBS 138
  CDS (1)..(582)
atgtccgctgttgctccatacttgaagaccattgcttctagaagaactatctacgctctaaagccagaattgccatccggtgttactatcaatgacgttcaatctaccatccaagctatcgtcaaggaaactccaactgctttcaactctcaagttaaccgtgctgttatcttgaccggtgaaacccacaagaaggtctgggacagtgttgctaacgccattgccgacccagctggtaagaagagaccagaatctgtcagagatgaagcttacggttccgttatcttcttcactgatgacaagaccaccgaaaagctacaagctgacttcccagcttggtctgccgctttcccacaattcgctgaccacgcctctggtgccgctcaaatcaactcatgggctgctttggaagctttgggtctaggtggtcacctacaacattacaacggttacgttaaggctgctttgccatccaagatcccagcctcttggtccgttcactctcaattggtcttcggtgctccaggtgctgctccaggtgagaagacttacattgacaacgaagtcgaaatcttcaactaa

SEQ ID NO: 63202 - protein, 193 aa, Candida glabrata CBS 138
MSAVAPYLKTIASRRTIYALKPELPSGVTINDVQSTIQAIVKETPTAFNSQVNRAVILTGETHKKVWDSVANAIADPAGKKRPESVRDEAYGSVIFFTDDKTTEKLQADFPAWSAAFPQFADHASGAAQINSWAALEALGLGGHLQHYNGYVKAALPSKIPASWSVHSQLVFGAPGAAPGEKTYIDNEVEIFN

SEQ ID NO: 63203 - DNA, 618 bp, Candida glabrata CBS 138
  CDS (1)..(618)
atgaccaagcattcacctacttcacatgaggcttccgcatcgaacccagtcttagaggcgattgtggcccgccgtagtattcactacttgaagccagagctaccagaaggtgttaccttcgatgacatataccacattgtccaagaatgtgtgaaacatacaccaacgtcgttcaactcacaagttaacagggcattcatagtgcgtggggccttacattacaagatctgggaccaagttgttaataagatcaaggaaccggagtacagagctaggccattgagaataagagatggtgcttacggttctatcttcttctatgtagatgaaaacgttactgagagaaacaaagttgaacatcccgaatgggcacctgtgtgcgaagcgtacgcagatcaggctatgggagcagcctcgattgctgcatggactgtgatgcataacatgggtattggttgtaatatgcaacactatggtaagtatatgcatgatcctaatgtgctaccagaagacataccatctcattggactatgaaatgccagctggtatttggcgttcctgataaggaccctaatgaaaagaaattcattgaaaacatagtcaaagtgtatgagtaa

SEQ ID NO: 63204 - protein, 205 aa, Candida glabrata CBS 138
MTKHSPTSHEASASNPVLEAIVARRSIHYLKPELPEGVTFDDIYHIVQECVKHTPTSFNSQVNRAFIVRGALHYKIWDQVVNKIKEPEYRARPLRIRDGAYGSIFFYVDENVTERNKVEHPEWAPVCEAYADQAMGAASIAAWTVMHNMGIGCNMQHYGKYMHDPNVLPEDIPSHWTMKCQLVFGVPDKDPNEKKFIENIVKVYE

SEQ ID NO: 63205 - DNA, 591 bp, Kluyveromyces lactis NRRL Y-1140
  CDS (1)..(591)
atgtctgctgctgccactaaacaattcttgaaagctattgctgctcgtcgtactatctatgcgttgaagcctgaattgccatctggtgtatctatcaatgatgttcaggaagtggtccaggccattgtcaaggacaccccaacttctttcaactgccaaggtaacagagcaattattctgactggtgaaacccacaagagtgtatgggattctgttgtgaatgccattgaaggtgataacggtaagaaaagacctgcttctgccagagatgaagccttcggttctattatctttttgaccgatgacaagactactgaaaagttgcaagctgacttcccagcatggtctgctatcttcccatctttcgccgaacattccagtggtgctgctcaaatctccacatggactgccatcgaattgttgggtctgggtggtcacttgcaacattacaacggttacgttaaggctgctttgccagaaggtgctattccacaagaatggactgttcaagctcaattggtctttggactaccagctgctgaagccggtgaaaagacgtacatcgataaccctgtcaaaatcttgaactag

SEQ ID NO: 63206 - protein, 196 aa, Kluyveromyces lactis NRRL Y-1140
MSAAATKQFLKAIAARRTIYALKPELPSGVSINDVQEVVQAIVKDTPTSFNCQGNRAIILTGETHKSVWDSVVNAIEGDNGKKRPASARDEAFGSIIFLTDDKTTEKLQADFPAWSAIFPSFAEHSSGAAQISTWTAIELLGLGGHLQHYNGYVKAALPEGAIPQEWTVQAQLVFGLPAAEAGEKTYIDNPVKILN

SEQ ID NO: 63207 - DNA, 729 bp, Aspergillus nidulans FGSC A4
  CDS (1)..(729)
atggcaatcccacgcatcgcttctcggctattttttacattgcctctttcaataccgcaaggagtccgcggtttctcaccaaacaaggctgtagctgttcgaccgttctcttactccgcgcggaatggatcccctaagacagacatcctggtggaattggccaaagctcgacgaaccgtctatcagttgggcagtaacagccctgttccggactccgaaatcgagaagcttgttcatgctgccattctgaacgtccccagtgccttcaatacccagtcgacacgactgcttgtgctgttgcaccgcgagcacgagcgcctgtgggatgtcgcaatcgaagtctttaagaacctactgaacacaggtgctattcccaaagaagtttgggaaaggcagacactgccgaagctgcagggattccgagccggcgtgggaacgccttgggctgaacactccaatgccatgcatcagttcttccgtgcgtctgacccccgcctccctacttttggtcccatcctttgtttctggaccggactcgaatcccttggcttcgcggcaaacttgcagcattataatcctctaattgacggcccagtcgctaagcaatgggatatcccttccgagtggaaacttgtcgcacagttggtgttcggtagccctaagggagttcctggggagaagagccagaagccaattgaggaccgcgttaagatatatgggaggcggtaa

SEQ ID NO: 63208 - protein, 242 aa, Aspergillus nidulans FGSC A4
MAIPRIASRLFFTLPLSIPQGVRGFSPNKAVAVRPFSYSARNGSPKTDILVELAKARRTVYQLGSNSPVPDSEIEKLVHAAILNVPSAFNTQSTRLLVLLHREHERLWDVAIEVFKNLLNTGAIPKEVWERQTLPKLQGFRAGVGTPWAEHSNAMHQFFRASDPRLPTFGPILCFWTGLESLGFAANLQHYNPLIDGPVAKQWDIPSEWKLVAQLVFGSPKGVPGEKSQKPIEDRVKIYGRR

SEQ ID NO: 63209 - DNA, 627 bp, Aspergillus nidulans FGSC A4
  CDS (1)..(627)
atgccctccatcaccaccgatcagtggctcgaagccgccgcctaccgtcgcagtgtccgtgccttggaggggacctccaaggtctcagatgaacgagttcatgagattgtcgccaaggtgctttcctttgctccctcgtcttacaatactcagccagttcgcatctcgcttgcttttgggaagaagcacaaggagctctggagtattattctcagggaggctgaaccgatcctcaagtcaattaatccggatctctggcagaagttgggccccctttacgaaggccataaagctgcatatggatcagtactcttctgggagcgcggtgggacgacgaaagaggctgctgagacgcacaaagcaaccgagcatatgtttggcgaatggggagagcatactcagggcatccaccaaatccttgtctggactgccttggaacttgagggagtcggagccaatctgcaacacatgaacgccattccacccattgagatggccatcaaaaaattcgcgggggtccctgatgattacaaactaaaggcccacttgaactatggcgatgagcagggttctcgtcccgagagcccgccgaaactgccaattaccgagacgctcacaattctatga

SEQ ID NO: 63210 - protein, 208 aa, Aspergillus nidulans FGSC A4
MPSITTDQWLEAAAYRRSVRALEGTSKVSDERVHEIVAKVLSFAPSSYNTQPVRISLAFGKKHKELWSIILREAEPILKSINPDLWQKLGPLYEGHKAAYGSVLFWERGGTTKEAAETHKATEHMFGEWGEHTQGIHQILVWTALELEGVGANLQHMNAIPPIEMAIKKFAGVPDDYKLKAHLNYGDEQGSRPESPPKLPITETLTIL

SEQ ID NO: 63211 - DNA, 669 bp, Aspergillus nidulans FGSC A4
  CDS (1)..(669)
atggtcgagttcaagaaccccgctactgccaccctcctcgaggccgtcaaggctcgccgcaccatctacggcctcaaggctgagagccccgtctccgatgacaccatcgaggccattgtccgcgatgccgtcctgcacgtgcccagctctttcaacacgcagacctcgcgcgtggttctgctgctgaaggaggaacaccagaaggtctgggacattgccctccaggcaatggagggtctcgtggctgcgggtgcgctgcccaaggaggcgtttgagtcctcgaccaagccgaagctagagggattccgtgctggttacggaactgtcctcttcttcgtcgactacgacgctctcaaggacatcaaggagaagtttgccatctacgctgacaagtttgatccttttgctctcgagtccaatgccatgtctcagtacttgggtatgcatcaatctgcaggcatctggaccgccctagcctctgaaggcttcggcgccaacctgcagcactacagtcccctgatcgacgagcagatcgccaagcagtggaatatccctgccaactggaagcttgatgcccagctcgtttttggtactcccacctctggtcctctggagaagacctttgctcccatcgaggaccgcttcaaggtgtttggcaagtccgcgtaa

SEQ ID NO: 63212 - protein, 222 aa, Aspergillus nidulans FGSC A4
MVEFKNPATATLLEAVKARRTIYGLKAESPVSDDTIEAIVRDAVLHVPSSFNTQTSRVVLLLKEEHQKVWDIALQAMEGLVAAGALPKEAFESSTKPKLEGFRAGYGTVLFFVDYDALKDIKEKFAIYADKFDPFALESNAMSQYLGMHQSAGIWTALASEGFGANLQHYSPLIDEQIAKQWNIPANWKLDAQLVFGTPTSGPLEKTFAPIEDRFKVFGKSA

SEQ ID NO: 63213 - DNA, 648 bp, Ustilago maydis 521
  CDS (1)..(648)
atgtctctgcctcaagccaccacctctttcctctcgcagctcgctgtgcgacgtagcacctacactctggccaagagcccgtcaatcctgaacgttgatcagatccagacggtcctcagcaaggtgttgcgcgaatctccgtcttcgttcaactccaagtctccgcgtttggtgcttctgctcggtgacgagcacgacgagtactggtccaagacggttcccgaagcgctgagtgcggctatcaagtcgcatggtggcgacgacaaggctgtcgccggtgcgctcggtcgtcttgacctcttcaaacctgcgtttggtacggttctattcttcgaatcgaagtccgtcgtcgaggctcagcagaagaacatcccacagtacgccgaaaacttccccatctggtctcaacacgcttcggccatcgtgcaaaccaacacgtgggttgcgctcaccaacgccggttacggtgccaacttgcagcactacggaaacttgacccaggatcagcttaagaagaagcacaacttgccaagcgactggcagatcgtcgccgaactcgtgtttggcgccaagacagacgagcccaaacccaaggagtacgacgagcaacacgaaaacgccgaccgtatcaaggtgtttggcgcataa

SEQ ID NO: 63214 - protein, 215 aa, Ustilago maydis 521
MSLPQATTSFLSQLAVRRSTYTLAKSPSILNVDQIQTVLSKVLRESPSSFNSKSPRLVLLLGDEHDEYWSKTVPEALSAAIKSHGGDDKAVAGALGRLDLFKPAFGTVLFFESKSVVEAQQKNIPQYAENFPIWSQHASAIVQTNTWVALTNAGYGANLQHYGNLTQDQLKKKHNLPSDWQIVAELVFGAKTDEPKPKEYDEQHENADRIKVFGA

SEQ ID NO: 63215 - DNA, 633 bp, Cryptococcus neoformans var. neoformans B-3501A
  CDS (1)..(633)
atgtccaagtctgctgctttctttgaggccgtcatcgcccgacgaagctactacaatcttaccaacaagactactctcagcaacgcccagctccaggagatcattgagaagtccgtgaagtatgctcctacatctttcaatggccagcagtctcgggcagtccttgtctctgggtccaagcacaacgagctttgggacaagattactgaaactcatttaaggactctcaagggtgacaagagccaggaggaattctgggccaacaagatcaaggaccaatatagagccgggtacggtactgtcatctttttcgaagaccaggacattgtcaatggcttctcagccaagatgcccgcttttgcacaggctttccctgtttggtctgagaactctgcaggtatcttgcagcacatcgtctggaccgctttggtggctgagggtcatggtgctagcttgcagcactacgcccaatactctgctgagactcaggccgccattaccgaactggtggatgtttctcccaactggaaggttactggcctcctccccttcggtatcccttccggcccccccggtaaggagaaggtttacgagcctatcgagaagcgcaccaagttcttctttgacgaataa

SEQ ID NO: 63216 - protein, 210 aa, Cryptococcus neoformans var. neoformans B-3501A
MSKSAAFFEAVIARRSYYNLTNKTTLSNAQLQEIIEKSVKYAPTSFNGQQSRAVLVSGSKHNELWDKITETHLRTLKGDKSQEEFWANKIKDQYRAGYGTVIFFEDQDIVNGFSAKMPAFAQAFPVWSENSAGILQHIVWTALVAEGHGASLQHYAQYSAETQAAITELVDVSPNWKVTGLLPFGIPSGPPGKEKVYEPIEKRTKFFFDE

SEQ ID NO: 63217 - DNA, 600 bp, Bacillus anthracis str. Sterne
  CDS (1)..(600): transl_table=11
atggcaaaagatttttactcagcaattgaagaccgaagatctatttatgcgattagtaaagagcaagtagtttctgatgagaaaattcaagaagtgatttatcatgctgtaaaacatacaccttcagcttttaactctcaaagcgctcgcgttgttgtcttgttaggagaacaacatgataagttatgggatattacgaaagagacgttacgaaaaattgtacctgaaaataactttgcatctactgaagaaaaaatgaatgcatttaaaagtggttatggaacggttttatacttcgaagataatcaagtagtggaagagctacaagaaaacttcgcgttatataaagataattttccaatttggtctcaacaatcctcaggaatgttacaatttgcaatttggacagctttagaaatcgaaggatttggtgctacattgcagcattacaatccactaattgatgaagaagtgagaaaagaatgggaagttccagaaagctggaaactcattgcgcaaatgccgtttggtaaaccagtggtacctgcaggggaaaaagaattccaaccattagaaaactgtgtgaaattttataaataa

SEQ ID NO: 63218 - protein, 199 aa, Bacillus anthracis str. Sterne
MAKDFYSAIEDRRSIYAISKEQVVSDEKIQEVIYHAVKHTPSAFNSQSARVVVLLGEQHDKLWDITKETLRKIVPENNFASTEEKMNAFKSGYGTVLYFEDNQVVEELQENFALYKDNFPIWSQQSSGMLQFAIWTALEIEGFGATLQHYNPLIDEEVRKEWEVPESWKLIAQMPFGKPVVPAGEKEFQPLENCVKFYK

SEQ ID NO: 63219 - DNA, 600 bp, Bacillus thuringiensis serovar konkukian str. 97-27
  CDS (1)..(600): transl_table=11
atgacaaaagatttctatactgcactgaaagaaagacgtacttactatgggattaataaagaggtacaagtatcagatgaaaaaattaaagaaattgtggagtttgctgtgaaatatactccatcagcttttaattcacaaactgcgcgagtagttgtattatttggtgaagctcataataaattatgggatattacaactgaaacattaagaaaagtagttggagatggagatttttcaggaacgcaacaaaaaatggattcctttaaagctggttatggaaccgtactattctttgaagatgagtctatcgttaaatcgcttcaagaaaaatttgctgcatatgctgaaaactttccaatttggtcacaccaagcatcaggtatgcaccaattagttgtgtggacaggattagaagcagagggattaggggcgtctttacaacattataatccattaattgatgatgaggtaaaacaagaatggaacgttcctgctaattggaaactgattgcgcaaatgccatttggtaatccaacggctgcaccaggagaaaaagaattccaaccacttgaagagcgtgtgaaatttcataagtaa

SEQ ID NO: 63220 - protein, 199 aa, Bacillus thuringiensis serovar konkukian str. 97-27
MTKDFYTALKERRTYYGINKEVQVSDEKIKEIVEFAVKYTPSAFNSQTARVVVLFGEAHNKLWDITTETLRKVVGDGDFSGTQQKMDSFKAGYGTVLFFEDESIVKSLQEKFAAYAENFPIWSHQASGMHQLVVWTGLEAEGLGASLQHYNPLIDDEVKQEWNVPANWKLIAQMPFGNPTAAPGEKEFQPLEERVKFHK

SEQ ID NO: 63221 - DNA, 627 bp, Staphylococcus aureus subsp. aureus MRSA252
  CDS (1)..(627): transl_table=11
atgggtttatttaaaaaagataaaaaagcaatgacttttgacaacgcaatggaagaaagacgttcaatatataatttgaaagattcaatatcaattagcgatgacgaattagaatcaatgattgcacatgcagttaaacatgttccttcatcatttaattctcaatcaactagaattgttctcttattaaatgacaacaataataaattttgggataacacaaaagcaattttaaaagaagtcatgggagagaatcgtgatttcgagccaactgaacaaaaaattgataacttcaaacattcatacggtacaattttgttttatgaaaatcaagatgttgtaagtggtttacaagaacaaatgccaaactactatgataattttgcaatatggtcaactcaaacaaatgccatgcatcaatttgcaatttggactgcattagctactaaaggcataggtgcttcattacaacactataatccacttgttgatgagatgacttcaaatgaatttaatattcctaaaagttggaaacttattgctcaaatgccatttggtgatattcgtgaagctgctggcgaaaaaacatttaatccagtggaagatcgtttcgtaataaaaaaataa

SEQ ID NO: 63222 - protein, 208 aa, Staphylococcus aureus subsp. aureus MRSA252
MGLFKKDKKAMTFDNAMEERRSIYNLKDSISISDDELESMIAHAVKHVPSSFNSQSTRIVLLLNDNNNKFWDNTKAILKEVMGENRDFEPTEQKIDNFKHSYGTILFYENQDVVSGLQEQMPNYYDNFAIWSTQTNAMHQFAIWTALATKGIGASLQHYNPLVDEMTSNEFNIPKSWKLIAQMPFGDIREAAGEKTFNPVEDRFVIKK

SEQ ID NO: 63223 - DNA, 603 bp, Acinetobacter sp. ADP1
  CDS (1)..(603): transl_table=11
atgtccaatcaatttcttccttttttgcaaaatcgtcgtaccatttatgccattggtaaaaatctatcccagacaccagaacaattgacaaaagttattcaagaagcgattcgccaaagtccttcgtcttttaattcacaatcttcacgtgcagttatactgtttaatgccgaacacgagaaattttggggctttgtaaaagataaattacgtgaatatgcaacggatgacgctgctgcagtcaagaccagtgcaaaaatggatagctttgctgctggggtagggactatattattttttgaagatcaggatgtgattaatgaacttcaggaaaaatttgcgctttatgcagagaacttcccaatttggtcagaacattcaactgctatggctcaacttgctgtatggacagcattagcagcagagaatgtaggtgcatctttacagcattacaatccagttgtagatgacaaagtacatgcagaatgggagattccttcgagttggaagttacgcgctcaacttgtatttggttctattgaggcgcctgcaagtgaaaaatcatatattgatgactcatcaagattcaaagtatttaaataa

SEQ ID NO: 63224 - protein, 200 aa, Acinetobacter sp. ADP1
MSNQFLPFLQNRRTIYAIGKNLSQTPEQLTKVIQEAIRQSPSSFNSQSSRAVILFNAEHEKFWGFVKDKLREYATDDAAAVKTSAKMDSFAAGVGTILFFEDQDVINELQEKFALYAENFPIWSEHSTAMAQLAVWTALAAENVGASLQHYNPVVDDKVHAEWEIPSSWKLRAQLVFGSIEAPASEKSYIDDSSRFKVFK

SEQ ID NO: 63225 - DNA, 597 bp, Acinetobacter sp. ADP1
  CDS (1)..(597): transl_table=11
atgacttcttttttagataaaatcaaacaacgtcgctcaatctatgccattggtaaaaatgtagcgcttgagcaagacaagattgaagatcttatcaaggatgcagttaagcatagtccttcttcatttaactctcagtcttcacgtgtcgttattctgtttggtgaatcacatcataaattctggaatattgtacgtgaaacattgagaaaaatggttcctgccgacgcttttgctggaacaaatgcaaaaattgacagcttctctgctggtttaggcacagtattgttttatgaagatcaaaaagtcattgaaggtttgcaagaacaatttaaactttatgcagataactttccagtatggtctgaacattcaagcgcgattgcacagtttgcgacttggacagctttggctgaacataatatcggtgcatcattacagcattacaacccgattattgatgaagaagtcgctgctacatttgatgtacctgcaagttggaaacttcgtgcacaacttgtatttggttcggttgaagcgccagcagatgaaaaaagttttatgaatgatgctgaacgttttaaaacgtttaactaa

SEQ ID NO: 63226 - protein, 198 aa, Acinetobacter sp. ADP1
MTSFLDKIKQRRSIYAIGKNVALEQDKIEDLIKDAVKHSPSSFNSQSSRVVILFGESHHKFWNIVRETLRKMVPADAFAGTNAKIDSFSAGLGTVLFYEDQKVIEGLQEQFKLYADNFPVWSEHSSAIAQFATWTALAEHNIGASLQHYNPIIDEEVAATFDVPASWKLRAQLVFGSVEAPADEKSFMNDAERFKTFN

SEQ ID NO: 63227 - DNA, 600 bp, Erwinia carotovora subsp. atroseptica SCRI1043
  CDS (1)..(600): transl_table=11
atgagtaatgcttttttgcagtcaatcaaggcccgtcgttcaatctatgccatcggcgataaacttccgatatcagaagatcaggttaccgccctcattaccgaagccgttaatgaaagcccctcctcttttaattcacaaacttctcgcgttgtcattctgttcggcgagcagcaccacaaactgtgggatattgttaaacagcaactgaagaaaattgtgcctgcggacgcttttgccccgacagaaggcaaactggcttcgtttgccgccggtgcgggaaccgtcctgttctttgaagacaccagcgtaattgaagcgctacaggaaaagttcgcgctttatgccgataacttcccggtttggtcagaacattcaacgggtatcgcccagttcgccgtatggtcgacgctggcgcaggaaaaaattggtgcctcactccagcactacaacccgctgatcgacaatgatgtcaaagcacagtgggatctgcctgccagttggaaactgcgtgctcaaatgccattcggttccgttgagcaacccgctggtgagaaaacctacattgcctttgaagaacgtttccgcgtatttaaataa

SEQ ID NO: 63228 - protein, 199 aa, Erwinia carotovora subsp. atroseptica SCRI1043
MSNAFLQSIKARRSIYAIGDKLPISEDQVTALITEAVNESPSSFNSQTSRVVILFGEQHHKLWDIVKQQLKKIVPADAFAPTEGKLASFAAGAGTVLFFEDTSVIEALQEKFALYADNFPVWSEHSTGIAQFAVWSTLAQEKIGASLQHYNPLIDNDVKAQWDLPASWKLRAQMPFGSVEQPAGEKTYIAFEERFRVFK

SEQ ID NO: 63229 - DNA, 600 bp, Bacillus cereus E33L
  CDS (1)..(600): transl_table=11
atgacaaaagatttctatactgcactgaaagaaagacgtacttactatgggattaataaagaggtacaagtatcagatgaaaaaattaaagaaattgtggagtttgctgtaaaatatactccatcagctttcaattcacaaactgcgcgagtagttgtattatttggtgaagctcataataaattatgggatattacaactgaaacattaagaaaagtagttggagatggagatttttcaggaacgcaacaaaaaatggattcttttaaagctggttatggaaccgtactattctttgaagatgagtctatcgttaaatcgcttcaagaaaaatttgctgcatatgctgaaaacttcccaatttggtcacaccaagcatcaggtatgcaccaattagtcgtgtggacagggctagaagcagagggattaggggcgtctttacaacattataatccattaatcgatgatgaagtgaaaacagaatggaatgttcctgctaattggaagctcattgcacaaatgccatttggtaatccaacggctgcaccaggagaaaaagaattccaaccacttgaagagcgtgtgaaatttcataagtaa

SEQ ID NO: 63230 - protein, 199 aa, Bacillus cereus E33L
MTKDFYTALKERRTYYGINKEVQVSDEKIKEIVEFAVKYTPSAFNSQTARVVVLFGEAHNKLWDITTETLRKVVGDGDFSGTQQKMDSFKAGYGTVLFFEDESIVKSLQEKFAAYAENFPIWSHQASGMHQLVVWTGLEAEGLGASLQHYNPLIDDEVKTEWNVPANWKLIAQMPFGNPTAAPGEKEFQPLEERVKFHK

SEQ ID NO: 63231 - DNA, 597 bp, Bacillus clausii KSM-K16
  CDS (1)..(597): transl_table=11
atggctactttttttgaagcaattgagaaacggcgttcctattacgcaattagcaaagaccctgtcgcatcagatgaacgcattaaagaagtcgtcgagcatgctgtaaaacatgttccgtctgcgtttaattcccaatcagcacgcgtgatcattctgcttggaaaagaacatgacaagttttgggatttaacgacagatgctttaaaagcagtagttggagacggagacttctcaggcacacaacagaaaatggatggattcaaagcagggtacggcactgtattgttttttgaagaccaggagccaattctgaagctacaagagtcttacccgctttatgcagaaaactttccgatttggtcagagcaatcctcaggcatgcatcaacttgctgtatggactggtttagaaaacgaaggatttggtgcttcattgcaacattataacccgattgttgacgaattggtgataaaagaatggaatgttccagaaacgtggaaacttcgtgcgcaaatgccttttggcaaacctgtgcaagagccaggagagaaagaatttctgccgcttgaagatcgtgttaaattatataagtaa

SEQ ID NO: 63232 - protein, 198 aa, Bacillus clausii KSM-K16
MATFFEAIEKRRSYYAISKDPVASDERIKEVVEHAVKHVPSAFNSQSARVIILLGKEHDKFWDLTTDALKAVVGDGDFSGTQQKMDGFKAGYGTVLFFEDQEPILKLQESYPLYAENFPIWSEQSSGMHQLAVWTGLENEGFGASLQHYNPIVDELVIKEWNVPETWKLRAQMPFGKPVQEPGEKEFLPLEDRVKLYK

SEQ ID NO: 63233 - DNA, 600 bp, Bacillus cereus E33L
  CDS (1)..(600): transl_table=11
atgaagaaagacttttatacagcaattgaagaaagaagatccatttatgcaattagtaaagaacaggtagtttctgatgagaagattcaagaggtaattcatcatactgtaaagcacacaccttcggcttttaactctcaaagtgcacgagtaattgttttattaggagagcaacatgataaattatgggacattacaaaagaaacattacgaaaaattgttccagaaaacaactttggatcaactgaagaaaaaatgaatggatttaaaagtggatatggaacagtattattttttgaagatagtaaaatagttgaagaacttcaagaaaaattcgcattatataaagacaatttcccaaaatggtctgagcaatcatcaggtatgttacaattcgcagtttggacatcattggaaattgaagggttcggcgcaacgttacagcattacaatccaataattgacgatgaagtgaaaaaagagtggaatgttccagaaagttggaaattaattgcgcaaatgccatttggtaaaccagtagcaccagccggtgaaaaagaattccaaccattagaaactcgtgtgaaaatttataaataa

SEQ ID NO: 63234 - protein, 199 aa, Bacillus cereus E33L
MKKDFYTAIEERRSIYAISKEQVVSDEKIQEVIHHTVKHTPSAFNSQSARVIVLLGEQHDKLWDITKETLRKIVPENNFGSTEEKMNGFKSGYGTVLFFEDSKIVEELQEKFALYKDNFPKWSEQSSGMLQFAVWTSLEIEGFGATLQHYNPIIDDEVKKEWNVPESWKLIAQMPFGKPVAPAGEKEFQPLETRVKIYK

SEQ ID NO: 63235 - DNA, 609 bp, Psychrobacter arcticus 273-4
  CDS (1)..(609): transl_table=11
atgtcggaattacaaaaattgcagcaacttgttgagcagcgccgttcgatttatgctttgagtagtcagttaccggtatcaaatagtgaagtggttaaattggtcgagcatgctattttgcatacgccttcatcgtttaactcgcagtcaacccgaatcattgtcttgtttggcgatgagcatcataaactctggcaactgactgaagataccttgcgcagtatcgtcgataatgatgagcaatttgcctcaaccaaacaaaaaatagacagctttaaagccggtgctggtacggtattgttctttgaagatcataaggttattagagccctacaagaaaaagctcctttatatgcagataagttcccaatttgggcgcagcataccagtgccatgcatcaatatgtgatttggacagccttggcgagcgtaaatatcggtgcaagcttacagcactataaccctgttattgatgccaaagtggctgagacttgggatgtggatagggattgggaattggttgcgcagatggtgtttggcgctattgagcagccagcaggcgataaagcatttgagccgctcaacaagcgactcaaggtatttggttaa

SEQ ID NO: 63236 - protein, 202 aa, Psychrobacter arcticus 273-4
MSELQKLQQLVEQRRSIYALSSQLPVSNSEVVKLVEHAILHTPSSFNSQSTRIIVLFGDEHHKLWQLTEDTLRSIVDNDEQFASTKQKIDSFKAGAGTVLFFEDHKVIRALQEKAPLYADKFPIWAQHTSAMHQYVIWTALASVNIGASLQHYNPVIDAKVAETWDVDRDWELVAQMVFGAIEQPAGDKAFEPLNKRLKVFG

SEQ ID NO: 63237 - DNA, 603 bp, Pseudomonas aeruginosa UCBPP-PA14
  CDS (1)..(603): transl_table=11
atgtctgacgcattcctctcctccatcaagaaccgccgcaccatctacgccctggacaagcaactgcctatctcccaggagaaagtcgtcgaactggtcaaggaggccgtctcgcacagcccttccgcgttcaactcgcagacctcgcgggtggtcgtgctgttcggcgccgagcacgagcagttctggaacatcgccaaggacgagttgaagaagatcgttcccgccgacgccttcgccgccaccgaaaccaagctcaactccttcgctgccggtgccggcaccgtactgttcttcgaagaccagacggtagtgcgccagcttcaggagcagttcgccctctacgccgacaacttcccggtgtggtcggagcaggccagcggcatggcccagttcgcggtctggaccgtcctcgccgagcacaaggtcggcgccagcctgcagcactacaacccgctggtagatgcccagacccacaagacctggaacctgccggaaagctggaagctgcgcgcacagatgcctttcggtgccatcgccgccccggcgggcgagaaagccttcatcgccgaaagcgaacgtttcaaggtcttcggcaactga

SEQ ID NO: 63238 - protein, 200 aa, Pseudomonas aeruginosa UCBPP-PA14
MSDAFLSSIKNRRTIYALDKQLPISQEKVVELVKEAVSHSPSAFNSQTSRVVVLFGAEHEQFWNIAKDELKKIVPADAFAATETKLNSFAAGAGTVLFFEDQTVVRQLQEQFALYADNFPVWSEQASGMAQFAVWTVLAEHKVGASLQHYNPLVDAQTHKTWNLPESWKLRAQMPFGAIAAPAGEKAFIAESERFKVFGN

SEQ ID NO: 63239 - DNA, 606 bp, Pediococcus pentosaceus ATCC 25745
  CDS (1)..(606): transl_table=11
atgtcaaattcattcttagatgcaattaaaaaacgtcgttcaatttacgctcttggtaaaaatgtttcactcagtgaagatgaaattactgatttaattaaagaagctatccgtcaaagtccttcagcttttaacagtcaaacggtccgcgccgtaatcctattcggtaaggcccatgatgaactatgggatggcattctagacattcttcatggtgaggttccgaacgaagaggctttccaagcttccaaagccaaggtggaaggagcttttaaggctggagttggtacagtattattctatactgatgaaaaagttatcgaggaccttaaaactaacttcccattgtataaggatgctttcgacatgtttggtgaacacggaatgggaattgccaacatggatgtttggacaacgcttgctaatgaaggcattggggcatcattacaacattacaatccaattgctgacaagttcatcgctgataaatttgatattccggctaactggacccttaaagcccaaatgccatttggttcaattgaacaacctgccggtgacaaagaattcatgaatgacgaagatcgttttcgcgttattaaataa

SEQ ID NO: 63240 - protein, 201 aa, Pediococcus pentosaceus ATCC 25745
MSNSFLDAIKKRRSIYALGKNVSLSEDEITDLIKEAIRQSPSAFNSQTVRAVILFGKAHDELWDGILDILHGEVPNEEAFQASKAKVEGAFKAGVGTVLFYTDEKVIEDLKTNFPLYKDAFDMFGEHGMGIANMDVWTTLANEGIGASLQHYNPIADKFIADKFDIPANWTLKAQMPFGSIEQPAGDKEFMNDEDRFRVIK

SEQ ID NO: 63241 - DNA, 606 bp, Leuconostoc mesenteroides subsp. mesenteroides ATCC 8293
  CDS (1)..(606): transl_table=11
atggttaatcaagattatattgaaacaattaagaaaaggcgatcgatttatgcattaggcaagaatgtagctgataacaatgaggacattgcccaattaattcagtcagcaattaaagaatcaccaagctcttttaacaaccaaacggtcagagctgcgattttatttggtgaatcatctgataaattatgggaaatagttgccgaaagattaaagtcagaagttcctgatgaagaaagttacaaagcaactcgtcaaaaagttgatagtttcaaggcgggcgttggaacaatcctgttcttcacggatgatgatattgttcagcaatatcaagaacagctttctttatatgcggaaaactttccaatttgggctgatcaagcaaatggtatggcccagattaatgtttggcaagccttggcagcaaatgacattggtgccagcctgcaacactataatcctttgatagatgacgacgtacatacagcatttgatatacctgaatcatggaacttacgtggtcagatgccatttggatcaattgaagcaccagcaggtactaaagaatacatgacggatgatgcacgctttaagatctttaagtaa

SEQ ID NO: 63242 - protein, 201 aa, Leuconostoc mesenteroides subsp. mesenteroides ATCC 8293
MVNQDYIETIKKRRSIYALGKNVADNNEDIAQLIQSAIKESPSSFNNQTVRAAILFGESSDKLWEIVAERLKSEVPDEESYKATRQKVDSFKAGVGTILFFTDDDIVQQYQEQLSLYAENFPIWADQANGMAQINVWQALAANDIGASLQHYNPLIDDDVHTAFDIPESWNLRGQMPFGSIEAPAGTKEYMTDDARFKIFK

SEQ ID NO: 63243 - DNA, 639 bp, Acidovorax sp. JS42
  CDS (1)..(639): transl_table=11
atgcctgcacctgtctatctaccagttggaagattacccatgaacaatgcttacctggacgcgctgaagaagcgccgcacccaatacgccctgggccgcaacctgtccgcctccaaggaggaactgctggccctgatccaggacgcgatcaagcacagcccgtcgtccttcaattcgcagagctcgcgcgcgctggtgctgttcggcgcggaaagcgaaaagctgtgggacatcgccatcgaggaagtccgcaaggtcgcgccggccgaaggcttcgacaagaccgaggccaagctcaagagcttcgcggccggcgtgggcacggtgctgttcttcgaagaccaggacgtggtgcgcagcctgcaggagaaattcgccctctacgccgacaacttcccggtctggtccgagcaggcgggcggcatggcccagctgtcggtgtggtctgccctggccaacgccgacgtgggcgccagcctgcagcactacaacccgctgatcgacgccgccgtggcgcgcgcatggaacattcccgcctcgtggaagctgcgcgcgcagatgccgttcggctccaacgaagccggcttcggcgaaaaagccttcatggacgacgccgagcgcttccgcgtcgcgggctga

SEQ ID NO: 63244 - protein, 212 aa, Acidovorax sp. JS42
MPAPVYLPVGRLPMNNAYLDALKKRRTQYALGRNLSASKEELLALIQDAIKHSPSSFNSQSSRALVLFGAESEKLWDIAIEEVRKVAPAEGFDKTEAKLKSFAAGVGTVLFFEDQDVVRSLQEKFALYADNFPVWSEQAGGMAQLSVWSALANADVGASLQHYNPLIDAAVARAWNIPASWKLRAQMPFGSNEAGFGEKAFMDDAERFRVAG

SEQ ID NO: 63245 - DNA, 603 bp, Bacillus anthracis str. A2012
  CDS (1)..(603): transl_table=11
atgatggcaaaagatttttactcagcaattgaagaccgaagatctatttatgcgattagtaaagagcaagtagtttctgatgagaaaattcaagaagtgatttatcatgctgtaaaacatacaccttcagcttttaactctcaaagcgctcgcgttgttgtcttgttaggagaacaacatgataagttatgggatattacgaaagagacgttacgaaaaattgtacctgaaaataactttgcatctactgaagaaaaaatgaatgcatttaaaagtggttatggaacggttttatacttcgaagataatcaagtagtggaagagctacaagaaaacttcgcgttatataaagataattttccaatttggtctcaacaatcctcaggaatgttacaatttgcaatttggacagctttagaaatcgaaggatttggtgctacattgcagcattacaatccactaattgatgaagaagtgagaaaagaatgggaagttccagaaagctggaaactcattgcgcaaatgccgtttggtaaaccagtggtacctgcaggggaaaaagaattccaaccattagaaaactgtgtgaaattttataaataa

SEQ ID NO: 63246 - protein, 200 aa, Bacillus anthracis str. A2012
MMAKDFYSAIEDRRSIYAISKEQVVSDEKIQEVIYHAVKHTPSAFNSQSARVVVLLGEQHDKLWDITKETLRKIVPENNFASTEEKMNAFKSGYGTVLYFEDNQVVEELQENFALYKDNFPIWSQQSSGMLQFAIWTALEIEGFGATLQHYNPLIDEEVRKEWEVPESWKLIAQMPFGKPVVPAGEKEFQPLENCVKFYK

SEQ ID NO: 63247 - DNA, 600 bp, Bacillus anthracis str. A2012
  CDS (1)..(600): transl_table=11
  misc_feature (205)..(205): m is a or c
atgacaaaagatttctatactgcattgaaagaaagacgtacttactatgggattaataaagaggtacaagtattagatgaaaaaattaaagaaattgtggagtttgctgtgaaatatactccatccgctttcaattctcaaactgcgcgattagttgtattatttggtgaagctcataataaattatgggatattacaactgaamcattaagaaaagtagttggagatggagatttttcaggaacgcaacaaaaaatggattcttttaaagctggttatggaacagtactattctttgaagatgaagctatcgttaaatcgcttcaagaaaaatttgctgcatatgctgaaaacttcccaatttggtcacaccaagcatcaggtatgcaccaattagttgtgtggacaggattagaagcagagggattaggggcgtctttacaacattataatccattaattgatgatgaggtaaaacaagaatggaacgttcctgctaattggaaacggattgcgcaaatgccatttggtaatccaacggctgcaccaggagaaaaagaattccaaccgcttgaagaacgtgtgaaatttcataagtaa

SEQ ID NO: 63248 - protein, 199 aa, Bacillus anthracis str. A2012
  misc_feature (69)..(69): The Xaa at location 69 stands for Pro, or Thr.
MTKDFYTALKERRTYYGINKEVQVLDEKIKEIVEFAVKYTPSAFNSQTARLVVLFGEAHNKLWDITTEXLRKVVGDGDFSGTQQKMDSFKAGYGTVLFFEDEAIVKSLQEKFAAYAENFPIWSHQASGMHQLVVWTGLEAEGLGASLQHYNPLIDDEVKQEWNVPANWKRIAQMPFGNPTAAPGEKEFQPLEERVKFHK

SEQ ID NO: 63249 - DNA, 633 bp, Phaeosphaeria nodorum
  CDS (1)..(633)
atggcatatactactccattcctcgacgcggttgccaaacgtcgctcagtgtacacgctgacgaatacgtcgccagtctcacagacccgcatcactgagattgtgcatgaggcactcaagtactgccctacgcctttcaatgttcgcagcaaccgctgcataatcctctatggcgccgagcacactgcactgtggacgcataccgaggaaatcatgccttcctgtgctcccaaagatctattcaatctactcgttccaagaattggcatattcaagagagcctacggcaccgtcctcttcttcgatgacccaaccacagtctccaatctgccagatatgttcaaacctgtctttaaggagttcgccaacgttcacgaacccgcgtcgggaatgctgcaatttgtggtctggacagcgcttgaagctgaagggcttggatgcaacttgcagcattaccagccgcacattctgccgtggatcagaaagaagtacaatgttccggaaagctggactttggaggcccagctcgtgtttggagaaatgactgagggccctggggacgagccagagaggacttatttggaggaatctttgaaagtctttggagggaacgatgcaacaggttcgagctag

SEQ ID NO: 63250 - protein, 210 aa, Phaeosphaeria nodorum
MAYTTPFLDAVAKRRSVYTLTNTSPVSQTRITEIVHEALKYCPTPFNVRSNRCIILYGAEHTALWTHTEEIMPSCAPKDLFNLLVPRIGIFKRAYGTVLFFDDPTTVSNLPDMFKPVFKEFANVHEPASGMLQFVVWTALEAEGLGCNLQHYQPHILPWIRKKYNVPESWTLEAQLVFGEMTEGPGDEPERTYLEESLKVFGGNDATGSS

SEQ ID NO: 63251 - DNA, 621 bp, Aspergillus oryzae
  CDS (1)..(621)
atgtcaaaaggcagtgcttccctcctcgccgccctggccaaccggcgctcctactacgcgctgcgccgcgaatcacccatcccagacagcaaaatccaatccatcctcggctcaataatgcacaaaaccccatccgccttcaactcccagaccacgcgcacaatcctcctcctcaaccaagaacacgagaaactctggaacatcaccaaggacgtattattggcgcgcatcggacccgagcgattcaaaccgacgggagcgaagttggacgggtttaagggggcgtacggcaccgtactgttctatgaagatcagccggtgattgaagatctgaaggccaagtttcccctctatgcggagaacttcgagccttggtctgagcatacgagtggcatgcatcagttgatggcttgggttgcgttggaggaggaggggttcggggctaatttgcagcattataaccctatcattgatgagaaggttgcggcgaattggaatgtgccggctagttggaagttgagggcgcagcttgtgtttggggttcccgagggggacaggccggcggagaaggagaagaaggagctgggggaggtgttgaaggtttatggggcgaagatttga

SEQ ID NO: 63252 - protein, 206 aa, Aspergillus oryzae
MSKGSASLLAALANRRSYYALRRESPIPDSKIQSILGSIMHKTPSAFNSQTTRTILLLNQEHEKLWNITKDVLLARIGPERFKPTGAKLDGFKGAYGTVLFYEDQPVIEDLKAKFPLYAENFEPWSEHTSGMHQLMAWVALEEEGFGANLQHYNPIIDEKVAANWNVPASWKLRAQLVFGVPEGDRPAEKEKKELGEVLKVYGAKI

SEQ ID NO: 63253 - DNA, 660 bp, Aspergillus oryzae
  CDS (1)..(660)
atgggctccgctcaggttgaattcaagaacgcctccaccaacactctcctcgagttggtcaaggcccgccgtacctactatggtctcaaggccgagagccccatctccgacgatgccatccagtccattgtcgagacctccgtcctccacgtccccagctctttcaacacccagacctcccgtgtcgttctcctgctgaaggaggagcaccagaaggtctgggacatcgccatcaaggccatggagggcctcgttgccgccggtgccgtccccaaggaggcgttcgagaaccacaccaagcctaagctcgaggctttccgcgctgcctacggaactgtcctcttcttcgtcgactacgagtctctcgctcccatcaaggagaagttcgccatctacgccgacaagttcgaccccttcgccctcgagtccaacgccatgtcccagtacctcgtctggaccgccctcgagtccgaaggcttcggcgccaacctccagcactacagccccctcatcgacgctgacatccagaagacctgggacctccccgcctcctggaagttggacgcccagctcgtcttcggtgctcctaccagcgagcccggcgagaaggagtttgcccctcttgagaaccgcttcaaggtcttcggcaagtctgcatga

SEQ ID NO: 63254 - protein, 219 aa, Aspergillus oryzae
MGSAQVEFKNASTNTLLELVKARRTYYGLKAESPISDDAIQSIVETSVLHVPSSFNTQTSRVVLLLKEEHQKVWDIAIKAMEGLVAAGAVPKEAFENHTKPKLEAFRAAYGTVLFFVDYESLAPIKEKFAIYADKFDPFALESNAMSQYLVWTALESEGFGANLQHYSPLIDADIQKTWDLPASWKLDAQLVFGAPTSEPGEKEFAPLENRFKVFGKSA

SEQ ID NO: 63255 - DNA, 606 bp, Aspergillus oryzae
  CDS (1)..(606)
atgaccaagagcatcagcgacagcttcaaagaccgtcggaccatctatgccctgacgaacgaatcgactatctccgatgatcgactagaggaattgcttaccgacgttgtcctgcacactccaagtcccttcaacagtcagacatcgcggctggtcgtgctcctgaaggatgagcaccagaaactgtgggatatagcatatgaagttgccagctcaaccgttcccctagaagtgtttgacaaagtctacaagccacggatcgccatgtttcgtgcgggatatgggactgtgctgttctacgaggatcctgcacccatccggcctctagaagaaaagtggcctatgctgaaagacaagcttccccagtggtctgaacatgccaatgccatgcaccaatatgccctttggacgcttctggaagcagaagggctcggatgtagtctccagcattataacccaatgtttgatgatcgcatcgccgagcaatggaaggttcctgcggattggagtctcaaggcgcagttggtcttcggaaagccgatcggtggccctcgcgaaaagacttctgagcctgtaaaccagaggctgtttgtgcatgggaagtaa

SEQ ID NO: 63256 - protein, 201 aa, Aspergillus oryzae
MTKSISDSFKDRRTIYALTNESTISDDRLEELLTDVVLHTPSPFNSQTSRLVVLLKDEHQKLWDIAYEVASSTVPLEVFDKVYKPRIAMFRAGYGTVLFYEDPAPIRPLEEKWPMLKDKLPQWSEHANAMHQYALWTLLEAEGLGCSLQHYNPMFDDRIAEQWKVPADWSLKAQLVFGKPIGGPREKTSEPVNQRLFVHGK

SEQ ID NO: 63257 - DNA, 582 bp, Saccharomyces cerevisiae
  CDS (1)..(582)
atgtctgctgttgcaacttatttgaaaactttaactgctcgtcgtactatttacgctttgaaaccggagttacctggtgaaattactatcaacgacatccaatccgtcgtccaaaccatcattaaagaaacacccaccgctttcaactcccagccaaatcgcgctgttatcttgactggtgaaactcacaaaaaagtttgggacgaagtgactaaggctatagaaagccctgccggtcaaaagaggcctgcttcagcaagggatgaggcctttggttctgtaatcttcttcaccgacgacaaggtaactgaaaagctaaaggctgacttcccagcgtacgcagctgcattccctagtttcgcggaccatacctctggtgccgctcaaatcaactcgtgggttgccttggaggcaatgggcctgggtggtcacctacaacactacaatggttacataaaagctgctttgccaagcaaaatccctgagtcttggaccgtacaagctcaattagtcttcggtaccccagccgcacctccaggtgaaaagacctacatcaaaaacgatgttgaaatcttcaattaa

SEQ ID NO: 63258 - protein, 193 aa, Saccharomyces cerevisiae
MSAVATYLKTLTARRTIYALKPELPGEITINDIQSVVQTIIKETPTAFNSQPNRAVILTGETHKKVWDEVTKAIESPAGQKRPASARDEAFGSVIFFTDDKVTEKLKADFPAYAAAFPSFADHTSGAAQINSWVALEAMGLGGHLQHYNGYIKAALPSKIPESWTVQAQLVFGTPAAPPGEKTYIKNDVEIFN

SEQ ID NO: 63259 - DNA, 25 bp, Artificial sequence
  primer
atgtccccaactggaaactacttaa

SEQ ID NO: 63260 - DNA, 26 bp, Artificial sequence
  primer
tcagtgataaacgttgattacgttat

SEQ ID NO: 63261 - protein, 196 aa, Artificial sequence
  consensus sequence
  Variant (3)..(4): Xaa in position 3 to 4 is any amino acid
  Variant (6)..(28): Xaa in position 6 to 28 is any amino acid
  Variant (29)..(31): Xaa in position 29 to 31 is any or no amino acid
  Variant (33)..(34): Xaa in position 33 to 34 is any amino acid
  Variant (39)..(40): Xaa in position 39 to 40 is any amino acid
  Variant (42)..(44): Xaa in position 42 to 44 is any amino acid
  Variant (46)..(49): Xaa in position 46 to 49 is any amino acid
  Variant (51)..(53): Xaa in position 51 to 53 is any amino acid
  Variant (55)..(73): Xaa in position 55 to 73 is any amino acid
  Variant (74)..(85): Xaa in position 74 to 85 is any or no amino acid
  Variant (87)..(90): Xaa in position 87 to 90 is any amino acid
  Variant (93)..(93): Xaa in position 93 is any amino acid
  Variant (96)..(97): Xaa in position 96 to 97 is any amino acid
  Variant (99)..(101): Xaa in position 99 to 101 is any amino acid
  Variant (102)..(111): Xaa in position 102 to 111 is any or no amino acid
  Variant (113)..(115): Xaa in position 113 to 115 is any amino acid
  Variant (117)..(127): Xaa in position 117 to 127 is any amino acid
  Variant (129)..(131): Xaa in position 129 to 131 is any amino acid
  Variant (132)..(138): Xaa in position 132 to 138 is any or no amino acid
  Variant (140)..(141): Xaa in position 140 to 141 is any amino acid
  Variant (143)..(147): Xaa in position 143 to 147 is any amino acid
  Variant (148)..(148): Xaa in position 148 is any or no amino acid
  Variant (151)..(151): Xaa in position 151 is any amino acid
  Variant (157)..(157): Xaa in position 157 is any amino acid
  Variant (158)..(159): Xaa in position 158 to 159 is any or no amino acid
  Variant (161)..(162): Xaa in position 161 to 162 is any amino acid
  Variant (164)..(169): Xaa in position 164 to 169 is any amino acid
  Variant (170)..(172): Xaa in position 170 to 172 is any or no amino acid
  Variant (174)..(175): Xaa in position 174 to 175 is any amino acid
  Variant (177)..(177): Xaa in position 177 is any amino acid
  Variant (179)..(180): Xaa in position 179 to 180 is any amino acid
  Variant (182)..(183): Xaa in position 182 to 183 is any amino acid
  Variant (186)..(192): Xaa in position 186 to 192 is any amino acid
  Variant (193)..(194): Xaa in position 193 to 194 is any or no amino acid
RRXXYXXXXXXXXXXXXXXXXXXXXXXXXXXPXXFNSQXXRXXXLXXXXHXXXWXXXXXXXXXXXXXXXXXXXXXXXXXXXXXXXFXXXXGTXLFXXDXXXXXXXXXXXXXYXXXFXXXXXXXXXXXQXXXXXXXXXXWXXLXXXXXXGAXLQHYNXXXPXXDXXXXXXXXXPXXWXLXXQXXFGXXXXXXXXXEK

SEQ ID NO: 63262 - protein, 21 aa, Artificial sequence
  protein pattern
  Variant (2)..(3): Xaa in position 2 to 3 is any amino acid
  Variant (4)..(4): Xaa in position 4 is Ile or Leu
  Variant (5)..(5): Xaa in position 5 is Ala, Glu or Ser
  Variant (6)..(8): Xaa in position 6 to 8 is any amino acid
  Variant (9)..(9): Xaa in position 9 is Phe, Ile, Leu or Val
  Variant (10)..(10): Xaa in position 10 is Ala or Gly
  Variant (11)..(11): Xaa in position 11 is Ala, Cys or Gly
  Variant (12)..(12): Xaa in position 12 is any amino acid
  Variant (18)..(20): Xaa in position 18 to 20 is any amino acid
  Variant (21)..(21): Xaa in position 21 is Asp or Lys
WXXXXXXXXXXXLQHYNXXXX

SEQ ID NO: 63263 - protein, 13 aa, Artificial sequence
  protein pattern
  Variant (2)..(2): Xaa in position 2 is any amino acid
  Variant (3)..(3): Xaa in position 3 is Ala, Asp, Glu, Asn, Ser or Thr
  Variant (5)..(7): Xaa in position 5 to 7 is any amino acid
  Variant (8)..(8): Xaa in position 8 is Ala, Gly or Ser
  Variant (10)..(10): Xaa in position 10 is Ile, Leu or Met
  Variant (11)..(11): Xaa in position 11 is any amino acid
PXXWXXXXQXXFG

SEQ ID NO: 63264 - DNA, 1107 bp, Saccharomyces cerevisiae
  CDS (1)..(1107)
atgaaggctgtcgtcattgaagacggtaaagcggttgtcaaagagggcgttcccattcctgaattggaagaaggattcgtattgattaagacactcgctgttgctggtaacccgactgattgggcacacattgactacaaggtcgggcctcaaggatctattctgggatgtgacgctgccggccaaattgtcaaattgggcccagccgtcgatcctaaagacttttctattggtgattatatttatgggttcattcacggatcttccgtaaggtttccttccaatggtgcttttgctgaatattctgctatttcaactgtggttgcctacaaatcacccaatgaactcaaatttttgggtgaagatgttctacctgccggccctgtcaggtctttggaaggggcagccactatcccagtgtcactgaccacagctggcttggtgttgacctataacttgggcttgaacctgaagtgggagccatcaaccccacaaagaaacggccccatcttattatggggcggtgcaactgcagtaggtcagtcgctcatccaattagccaataaattgaatggcttcaccaagatcattgttgtggcttctcggaaacacgaaaaactgttgaaagaatatggtgctgatcaactatttgattaccatgatattgacgtggtagaacaaattaaacacaagtacaacaatatctcgtatttagtcgactgtgtcgcgaatcaaaatacgcttcaacaagtgtacaaatgtgcggccgataaacaggatgctaccgttgtcgaattaactaatttgacagaagaaaacgtcaaaaaggagaataggaggcaaaatgtcactattgacagaacaagactgtattcaataggcggccatgaagtaccatttggtggcattactttccctgctgacccagaagccaggagagctgccaccgaattcgtcaagttcatcaatccaaagattagtgatgggcaaattcaccatattccagcaagggtctataagaacgggctttacgatgttcctcgtatcctggaagacattaaaatcggtaagaactctggtgaaaaactagttgccgtattaaactag

SEQ ID NO: 63265 - protein, 368 aa, Saccharomyces cerevisiae
MKAVVIEDGKAVVKEGVPIPELEEGFVLIKTLAVAGNPTDWAHIDYKVGPQGSILGCDAAGQIVKLGPAVDPKDFSIGDYIYGFIHGSSVRFPSNGAFAEYSAISTVVAYKSPNELKFLGEDVLPAGPVRSLEGAATIPVSLTTAGLVLTYNLGLNLKWEPSTPQRNGPILLWGGATAVGQSLIQLANKLNGFTKIIVVASRKHEKLLKEYGADQLFDYHDIDVVEQIKHKYNNISYLVDCVANQNTLQQVYKCAADKQDATVVELTNLTEENVKKENRRQNVTIDRTRLYSIGGHEVPFGGITFPADPEARRAATEFVKFINPKISDGQIHHIPARVYKNGLYDVPRILEDIKIGKNSGEKLVAVLN

SEQ ID NO: 63266 - DNA, 1086 bp, Magnaporthe grisea 70-15
  CDS (1)..(1086)
atggccatcccatcaaaagcgcgagcgctcatcaaaacccagaagggcaaggttgaggtgcagaccgtgccgacgcccaagctccgggacaattacgtactggtcaagacgactgcagttgcgttgaaccccaccgaacctcacgccgtcttcgatgatgacacggtgcaacccggtagccttgtggggtgcgactttgccggcgtagttgtcgaggctggcgacaacagcaggttcaagcccggcgacaggatcgcgggaatggctcatggaggaaatgccgaaaatatggaggacggcgcgtttgcagagtacataaacgtcaaggatggcatcgcactcaagattccagacaatatcacggacgagcaggcggcgacgttgggtgttggcgtcacgactgtgggtcaaggtctctaccaagctctccgcctgccactccccaacgacgccgaggccgtggcagctcatgcagggaccccgatcctcatctacggcggcagcacggcaacgggcgtgctgggcatccagtacgccaagctctcggggctgagggtgctggcgacggcgtcaccgcggaaccacgagtacctcaagtcaatcggggcggacgaggtgtacgaccactcgtcgccgacctgggtggacgaggtgcgcaagtcgacgggcggccggctgcggctgtgctgggactgcatcgcgcgcgacgggagcccgcaggcctgcgcgagggcgctggatcaggacgagcccggcgcagtgtaccgcaacctgctccccgtcgaggacgacgaggtcaagagtgtcaacccggtcttggatgggcccgccttcaccttgggctacacggcctttggggaggacatgagtaagttgggcaagaactggccggcctccaaggaggattacgagtttgccaaggtcttttggaagctgaccgaggacctgctcgcccagggcaagctcaagcccgtcaggcagcaggttgatcgaggaggcaagggtttggagcatgtgtttgaggggatccaggatttgagggattggaaggttagcggctccaagctggtttaccatgtcgcttga

SEQ ID NO: 63267 - protein, 361 aa, Magnaporthe grisea 70-15
MAIPSKARALIKTQKGKVEVQTVPTPKLRDNYVLVKTTAVALNPTEPHAVFDDDTVQPGSLVGCDFAGVVVEAGDNSRFKPGDRIAGMAHGGNAENMEDGAFAEYINVKDGIALKIPDNITDEQAATLGVGVTTVGQGLYQALRLPLPNDAEAVAAHAGTPILIYGGSTATGVLGIQYAKLSGLRVLATASPRNHEYLKSIGADEVYDHSSPTWVDEVRKSTGGRLRLCWDCIARDGSPQACARALDQDEPGAVYRNLLPVEDDEVKSVNPVLDGPAFTLGYTAFGEDMSKLGKNWPASKEDYEFAKVFWKLTEDLLAQGKLKPVRQQVDRGGKGLEHVFEGIQDLRDWKVSGSKLVYHVA

SEQ ID NO: 63268 - DNA, 1053 bp, Magnaporthe grisea 70-15
  CDS (1)..(1053)
atgacctttacaccgcctgccacccagccgggcctcgtggtcgacgagcacgacaacgtagtggtgcgggcagactgcccgttcccgtcgctgccggcggaccaggtgctggtgcgggtgcgcgcggtgggcgtcaaccccagcgacaccaagatgcgcgggccgtttgcgctgccgcaggcgatcctgggggcggactttgcgggcgacgtggtggcggtgggcgcagaggtcagggacgtggcggtgggcgacagggtctgcggggcgcagaacgagctgttcaggccagagcccgagaggggcgcgtttgcggcctacaatgtgactcgcgggcgcatgtggatgaagatcccagacggctggtcctacgaggccgccgccagcctgcccgtcggcctgtgcactgcggggctggcgctgaggctgctggggctgccgctgcctgacgcgcccgtcgagaaggggtctcacgtcctggtctacggggggagcactgccacggggacgattgccatgcagttgttgagattgtccggcatgattcccatcgcagtatgctcgcctagaaactttgctttggccaagagcaacggggccgaggaggtctttgaccgaaacgataaggaatgcgtgcaaaagattaaagcgtatgcgaaaaaccttaaatacgcgctcgactgcatcaccagcgtcgagtccaccatcctctgctacggcgccctcgggcgcgcgggcgggcgatacgtctccctggacccctggcaggagcacgcggccacgcgcagggtggtcaagcccgacttcaccgtgggacccagggtgtttggcgagggctgcacctggccggcgccctacggcagcgggcccgacgaggagctcagggagtttggcgtcaggctctgggacgtggccacgcgcctggtgcacgagggcaggctcaagcaccaccccctgcgcgtgatcgagggtgggttcgaggcaattattgccggcatggacatgatcaaggagaagaagctttctgggaccaagattgtggttcggatgtaa

SEQ ID NO: 63269 - protein, 350 aa, Magnaporthe grisea 70-15
MTFTPPATQPGLVVDEHDNVVVRADCPFPSLPADQVLVRVRAVGVNPSDTKMRGPFALPQAILGADFAGDVVAVGAEVRDVAVGDRVCGAQNELFRPEPERGAFAAYNVTRGRMWMKIPDGWSYEAAASLPVGLCTAGLALRLLGLPLPDAPVEKGSHVLVYGGSTATGTIAMQLLRLSGMIPIAVCSPRNFALAKSNGAEEVFDRNDKECVQKIKAYAKNLKYALDCITSVESTILCYGALGRAGGRYVSLDPWQEHAATRRVVKPDFTVGPRVFGEGCTWPAPYGSGPDEELREFGVRLWDVATRLVHEGRLKHHPLRVIEGGFEAIIAGMDMIKEKKLSGTKIVVRM

SEQ ID NO: 63270 - DNA, 1122 bp, Candida glabrata CBS 138
  CDS (1)..(1122)
atgtctacccctcaaacaatgcaagctgctgttatcgatggcgatcacttgaccttaaaggaagttcctgtcccagaattgcgtgatggttttgttctagttaagaatagagctgtcgctggtaacccaaccgactggaagcacatcacatggaagattggaccacaaggttccatcgccggttgtgacattgccggtgaaattgttaagctaggcccaaatgttgacactaataagttcaaggttggccaaaaagtgtatggctttgttcatggtgcttccgtcaagcatccagataatggtggttttgccacttattccgccctagactccaaaatcgcctacactgtggatgattcctttgaagtaagtggtaaggaccagattccagaaggtgccattaagtactacgaagatgtcgctactctaccaatctctttaacaactgcaggtgccgttctaaccacgaatttcaatatcaacctagaatggcaaccaagtgaagcccaaagagacttccctatcttattctggggtggtgctactgctgttggccaactattgatccaagtcgccaagaagcttcatgggtacaagaagattattgctgtcgcctctaagaagcatgaagctcacttgaaatcatatggcgctgatgatgtttttgattatcatgacgccgatgttatcgaacaaatcaagaacaagtacccagacattcaaaatctagttgactgtgtttctaacaatgacaccataaagcaagtttacgctgttgcttctgaaacaaagccagctaccattgtccaattgacaactttgtcaatcaatgacatcccagaatctgaaagaaaggacaataagaccattgtcggttgcctgctatactgtgcaagtggtgaagagattcctttcggtgcttttactttaccagccaacccagaattcagggaaaaggtcatcaagtttattgagtttattagtccaaaggtcactgctggtgacattcaccatatccctgtcaaggtttacaagaacggtctaaatgatgttcaacaaatccttgatgacattcaatacaacagaaactcaggtgaaaagttggtggctgtgttgaactaa

SEQ ID NO: 63271 - protein, 373 aa, Candida glabrata CBS 138
MSTPQTMQAAVIDGDHLTLKEVPVPELRDGFVLVKNRAVAGNPTDWKHITWKIGPQGSIAGCDIAGEIVKLGPNVDTNKFKVGQKVYGFVHGASVKHPDNGGFATYSALDSKIAYTVDDSFEVSGKDQIPEGAIKYYEDVATLPISLTTAGAVLTTNFNINLEWQPSEAQRDFPILFWGGATAVGQLLIQVAKKLHGYKKIIAVASKKHEAHLKSYGADDVFDYHDADVIEQIKNKYPDIQNLVDCVSNNDTIKQVYAVASETKPATIVQLTTLSINDIPESERKDNKTIVGCLLYCASGEEIPFGAFTLPANPEFREKVIKFIEFISPKVTAGDIHHIPVKVYKNGLNDVQQILDDIQYNRNSGEKLVAVLN

SEQ ID NO: 63272 - DNA, 1122 bp, Candida glabrata CBS 138
  CDS (1)..(1122)
atgtctatccctgccaccatgaaagctgctgtaattgatggtgaccaccttaccgttaaggaggtcccagtcccagaagtcagagacggtatggtcttgatcaagaccagagctgttgctggtaatccaactgattggaagcacattgtttctaagattggcccacaaggttccatctccggttgtgatgtcagtggtgagattgtcaagatcggtgccaatgttgacacttccaagtacaagattggtcagaaggcctatggtttgacccatggttcttctgtcaagcacccagacaatggtgcctttgctgagtactccttacttgacccaaagattgcctatttcccaaaccaggatatcaccatgagtggtaaggataccattccagaaggcaccgtcaagtactttgaagatggtgctagtttcccagtctccctaaccactgctggtgctgttcttcactctaacttgggccttgacttgaaatgggagccaagcgaacctcagagagaccacccagttctattttggggtggtgccactggtgttggtcaattgttgatccaagtggctaagaagatccatggattcaccaagattgtcactgttgcttccaagaagcacgaagctcaattgaagacctacggtgcagatgaagtcttcgactaccacgatgcagatgtcattgagcaaatcaagaagaaatacccagacttgcaaatcgtagtcgactgtgtctccaacgaaaacaccataaaacaagtctacaagtgtgccaccgagtccaagtctgctaccattgtgcaattgacacatttgtccataaaggatatcccagaagaggacagaagagacaacaagaccatcatcggtagtatgctgtacttggccaccggtgaagacgtcccattcggtccggtacacctgccagctgatcctaagttcagaaaagatgtcgaggaatttgtcgctttcatcaacccaagaatcaacgaaggaatcatccaccacatcccaattaaaatctataagaacggtctagacgacgtccaacagatcctagacgacatcaaattcggcaagaactccggtgagaaattggttgccatcctaaactaa

SEQ ID NO: 63273 - protein, 373 aa, Candida glabrata CBS 138
MSIPATMKAAVIDGDHLTVKEVPVPEVRDGMVLIKTRAVAGNPTDWKHIVSKIGPQGSISGCDVSGEIVKIGANVDTSKYKIGQKAYGLTHGSSVKHPDNGAFAEYSLLDPKIAYFPNQDITMSGKDTIPEGTVKYFEDGASFPVSLTTAGAVLHSNLGLDLKWEPSEPQRDHPVLFWGGATGVGQLLIQVAKKIHGFTKIVTVASKKHEAQLKTYGADEVFDYHDADVIEQIKKKYPDLQIVVDCVSNENTIKQVYKCATESKSATIVQLTHLSIKDIPEEDRRDNKTIIGSMLYLATGEDVPFGPVHLPADPKFRKDVEEFVAFINPRINEGIIHHIPIKIYKNGLDDVQQILDDIKFGKNSGEKLVAILN

SEQ ID NO: 63274 - DNA, 1113 bp, Kluyveromyces lactis NRRL Y-1140
  CDS (1)..(1113)
atgtcagttccaaccactcaaaaagccgtcatcattgaaggtgacaaagctgttgttaaaacagatgtctcagttccagaattaaaggagggtacagccttggtgaaggttgaggctgttgctggtaacccaactgattggaagcatattgcttataagattggtccagaaggttcaattctaggatgtgacattgctggtacagttgtcaaacttggaccaaatgctagtactgacttgaaggttggagataccggtttcggttttgttcacggtgcttcccaaacagatcctaaaaatggtgcatttgctgaatatgccagggtttatccacctttgttttacaagagtaacttaactcactcaactgctgatgaaatttctgaaggccctgtgaagaacttcgaatctgctgcatcattgccagtttcgttgacaactgctggtgttagtttgtgtcatcacttgggctcaaaaatggaatggcacccatctaccccgcaacatactcatccattattgatttggggtggtgctacagcagtgggtcaacaactaatccaagttgccaaacatatcaatgcttatactaagattgtaactgttgcttctaaaaagcatgaaaagcttttaaagtcttatggtgctgatgatgtctttgactatcatgatgcaggcgttattgagcagatcaaatcgaagtatccaaacctgcaacatgttattgacgctgtgggaagcgaagatagtatccccgaggcctataaagtcacagcagatagtctacctgccacattattagaagtggttccaatgaccattgaaagcattcctgaagaaatcagaaaagataatgttaaaattgatattactttgttgtatcgtgcatctggtcaagaaattctattgggtgcaacaagatttcctgctagtccagaatatcatgaagccacagttaaattcgttaagtttataaatccacaccttaacaacggtgatatccatcatatgaatattaaagttttcagcaacggcttagatgatgtcccagctctcactgaaggtataaaagaaggtaaaaacaaaaatgttaagtatgttgccaggttataa

SEQ ID NO: 63275 - protein, 370 aa, Kluyveromyces lactis NRRL Y-1140
MSVPTTQKAVIIEGDKAVVKTDVSVPELKEGTALVKVEAVAGNPTDWKHIAYKIGPEGSILGCDIAGTVVKLGPNASTDLKVGDTGFGFVHGASQTDPKNGAFAEYARVYPPLFYKSNLTHSTADEISEGPVKNFESAASLPVSLTTAGVSLCHHLGSKMEWHPSTPQHTHPLLIWGGATAVGQQLIQVAKHINAYTKIVTVASKKHEKLLKSYGADDVFDYHDAGVIEQIKSKYPNLQHVIDAVGSEDSIPEAYKVTADSLPATLLEVVPMTIESIPEEIRKDNVKIDITLLYRASGQEILLGATRFPASPEYHEATVKFVKFINPHLNNGDIHHMNIKVFSNGLDDVPALTEGIKEGKNKNVKYVARL

SEQ ID NO: 63276 - DNA, 1083 bp, Debaryomyces hansenii CBS767
  CDS (1)..(1083)
atgactaccactatagctgctgtattgcaaaaatcaacttcgcaattacaagtaaaagaagttccagttgcaccaattaactccgatgagattttgattgaatctaaagctgcttctattaatggtactgattactatcatatagattatgattgggcccctgatggtgcaatcatgggtttaactgtaagtggtatcgttttgaaagttggtaaggatgtaaagagatttggtcctggtgattttatagccagctttatccacggcggtgattattccaatcctgataaaggtgcctattctaagtttgcaattgttcaagaagtctactcaattaagttaaacgagctcagttcatccaatcttcaaattttacagtcaggaaatattgatacatttgaaggtgcatgttcaattcctgacgcaataataaccttaggatgcagcttatactttacattaggcgggagttttctgcaattacaaaataaaagccttttgatctatggtggctcaacagcaacaggattggtggcaagtcaaatcgcaaaacaatttgggtggactgtcatttcggtggcatccaaaaagcatgcaactttaattaagggtttcggtgcggattatttaattgattatcacgacctgaatgtaatgcaacagatcaaaaatattgacccaaatataactatggcattacatactataggaggcattgcaactttgcagcttacccatgattctgtttctgatgttatgccaacaaagatagactccttggtagcttcaaattttgaagctattaagaatccaaagtccaatgtagaattcactatgacaagagcatttactgcaaatggaaatgaggctagatataataatggatctgtatttccagcgatccctggaattaaagaagctatgctcgaattcattcctactattcaaaaatcgataaataataatgaaataaagcacataccaataaaaattcaaccaaatggattgaatggtattaatgatgggctcaaacttattcgagaaggtgaaatcagtggagaaaagttggttatacagttttag

SEQ ID NO: 63277 - protein, 360 aa, Debaryomyces hansenii CBS767
MTTTIAAVLQKSTSQLQVKEVPVAPINSDEILIESKAASINGTDYYHIDYDWAPDGAIMGLTVSGIVLKVGKDVKRFGPGDFIASFIHGGDYSNPDKGAYSKFAIVQEVYSIKLNELSSSNLQILQSGNIDTFEGACSIPDAIITLGCSLYFTLGGSFLQLQNKSLLIYGGSTATGLVASQIAKQFGWTVISVASKKHATLIKGFGADYLIDYHDLNVMQQIKNIDPNITMALHTIGGIATLQLTHDSVSDVMPTKIDSLVASNFEAIKNPKSNVEFTMTRAFTANGNEARYNNGSVFPAIPGIKEAMLEFIPTIQKSINNNEIKHIPIKIQPNGLNGINDGLKLIREGEISGEKLVIQF

SEQ ID NO: 63278 - DNA, 1083 bp, Debaryomyces hansenii CBS767
  CDS (1)..(1083)
atgacaaccactatagctgctgtattacaaaaatcaacttcacaattagaagtaaaagaagttccggttgcacccattagctccgatgagattttggttgaatcaagagccgcatctattaacggtaccgattattatcatatagattatgattgggctcccgatggtgcaatcatgggtttaactgtaagtggagtcgttttgaaagttggtaaggatgtcacgagatttattcctggtgattatatagctagctttattcatggcggtgattattccaatcctgaaaaaggcgcctattcgaagttggcagttgttcaagaagtctactcaataaagttaaacaagctcagttcatccaattctcaagttttgcctccaggaaatattgacacatttgaaggtgcatgttcactttctaacacaatagtaaccttgggatgcagtctatactttacattaggtgggagttttctgcaatcacaaaataaaagccttttgatctatggtggctcaactgcaacagggttggtggcaagtcaaatcgcaaaacaatttgggtggactgtcatttcggtggcatccaaaaagcatgcaactttaattaaaggtttcggtgctgatcatttaattgattaccacgacctgaatgttacacaacagataaaaaatattgacccaaatatcactatggcattacacactgtaggaggcacagcaactttgcagcttacccatgattctgtttctgatgttttgccaacaaagatagactccttggtagtttcaagttttgaagctatcaagaatcctaagtccaatgtaaaattcactatgacaagagcatttactgcaaatggaaatgatgttatatataataatggatcttcatttccagctattcctggcgttaaagaggctatccttgaatttattcccagtattcaaaatttgataaatggtaataagataaagcatatacctataagaattcaaccaaatggattgaatggtattaatgatggattgaagcttattcgaggaggtcaaatcagtggagaaaagttggttatacagttttag

SEQ ID NO: 63279 - protein, 360 aa, Debaryomyces hansenii CBS767
MTTTIAAVLQKSTSQLEVKEVPVAPISSDEILVESRAASINGTDYYHIDYDWAPDGAIMGLTVSGVVLKVGKDVTRFIPGDYIASFIHGGDYSNPEKGAYSKLAVVQEVYSIKLNKLSSSNSQVLPPGNIDTFEGACSLSNTIVTLGCSLYFTLGGSFLQSQNKSLLIYGGSTATGLVASQIAKQFGWTVISVASKKHATLIKGFGADHLIDYHDLNVTQQIKNIDPNITMALHTVGGTATLQLTHDSVSDVLPTKIDSLVVSSFEAIKNPKSNVKFTMTRAFTANGNDVIYNNGSSFPAIPGVKEAILEFIPSIQNLINGNKIKHIPIRIQPNGLNGINDGLKLIRGGQISGEKLVIQF

SEQ ID NO: 63280 - DNA, 1116 bp, Debaryomyces hansenii CBS767
  CDS (1)..(1116)
atgcctgtaaataacaatgcttgtatacatacaggggctcttaaacgtggacaaagcactatagttaagtcaattccttatccaaagatcaatgatgatcaaatcttgatcaaagctgttgcatatgcagctaatcctactgattggaagcacatcgctgttaactggggaggcaaaggagcaatcgcaggatcagatgtaagtggaattgtttcagaagttggatttaacgttaaggggtttgaagttggtgatatagtttcatcatttatgcatggaaatttcacggaaaccagaggggcgtttagtgagtatgttattgctgatgtaaatacgacaatcaaatatgataaatccaacttcaattcacaggctatcgaagagggagaccatagatcgaactttataaatacgtacgaaggggctgcttcagttacattgggacttggtacagttggtgtttcgtttcattatcatctaggaataaaggttgataaacaagccaatgcatctaaatacattttgatttggggtggggctacaggtacaggtattttagccattcagatagccaagctcatctatggcttgaaggttatcaccactgcatcttccgatcatcataattttttaaggacattaggtgccgatgaagtatttgattaccatgattcggatgttgttgatcagataaagaaagtaggcaattctaacatcaactacgcattggatactgtttcagacacgcagacttttcaatctgtttatgatgctacggtagaaaccaaagaagtgaccattgacaatttattatttttgaaattggacgaagctaagatggacccatcaagaaagatcacttcaacatcaacattggtttttcatgtagacggaacagaaatgaacttagatggtctgattattccaccagatatggaattggtgaacgtctacaatgacttctggtttaatattcttcccccatacatttcaaaaattaaacacgctgatttgaaagttttgaaggctggtttagaatcagctaatgaagctttggacttgctaagagataataaaattaaggccgaaaagatagtgtttagattatctgtttag

SEQ ID NO: 63281 - protein, 371 aa, Debaryomyces hansenii CBS767
MPVNNNACIHTGALKRGQSTIVKSIPYPKINDDQILIKAVAYAANPTDWKHIAVNWGGKGAIAGSDVSGIVSEVGFNVKGFEVGDIVSSFMHGNFTETRGAFSEYVIADVNTTIKYDKSNFNSQAIEEGDHRSNFINTYEGAASVTLGLGTVGVSFHYHLGIKVDKQANASKYILIWGGATGTGILAIQIAKLIYGLKVITTASSDHHNFLRTLGADEVFDYHDSDVVDQIKKVGNSNINYALDTVSDTQTFQSVYDATVETKEVTIDNLLFLKLDEAKMDPSRKITSTSTLVFHVDGTEMNLDGLIIPPDMELVNVYNDFWFNILPPYISKIKHADLKVLKAGLESANEALDLLRDNKIKAEKIVFRLSV

SEQ ID NO: 63282 - DNA, 1119 bp, Debaryomyces hansenii CBS767
  CDS (1)..(1119)
atgtatcctcaaaacaaagcatcacttcttactggcgccaccgaaaggggccagttgactagagtcggcgagactatttatccttctataaatgacaatcagatactaatcaaggctgttgcgtatgcagctaatccaacagattggaaacaccctgtttttggctggggaggtgaaggggcaatagcaggctcagatgtcagtggagtcgttgaagaagtgggatcaggcgcaaatgacttcaaagtcggggatgtggtttcatcgtttatacacggaaattatttcaaggacagaggtgcgtttagtgattatgttgttctcgacccaattactaccattaaatacccgaaaaggatcttgaaaaacgaaccacttgaagttggtttggaatctgcgggtttaattgatacttttgaaggtgctgcttcggttaatctaggacttgctacgattgggttatcgttccatcacaacctttctatcaaggctgacaagaagaaaaatgcttctcagtatatcttactttggggtggtggtactacaacaggtattttagcaatccaagtggctaaactcgtttatggcctaagggttatcaccactgcttcaccaaagcatcatgattttttaagatcattaggcgctgatgcagtttttgattaccatgattctgatgtagtagatcagatcaaaaaggttggtggagctaatattccctatgcatttgatatggtttcgattgacacgagctttcagctgatttacgatgctacctcagaaaccgaagaagtcaaccttgataatttaggatttttaaatgctagtagcatcaaaactgaaaattcaagaaaggtcaggttcgaaaccacattagtgaattcagttactggggaggattcaaactatgatggccttaagttttattctaacccaaaactagtacaagatttccacgaattttggtatgatgttttccctcaatatattactaagatcaagcatcccaatttgatagttttgaaggagggtttagagtccgtaaatgaagcgcttgagattttgagagataataaagtcagtggtgagaagatagttttcagggcatcacgtaagtaa

SEQ ID NO: 63283 - protein, 372 aa, Debaryomyces hansenii CBS767
MYPQNKASLLTGATERGQLTRVGETIYPSINDNQILIKAVAYAANPTDWKHPVFGWGGEGAIAGSDVSGVVEEVGSGANDFKVGDVVSSFIHGNYFKDRGAFSDYVVLDPITTIKYPKRILKNEPLEVGLESAGLIDTFEGAASVNLGLATIGLSFHHNLSIKADKKKNASQYILLWGGGTTTGILAIQVAKLVYGLRVITTASPKHHDFLRSLGADAVFDYHDSDVVDQIKKVGGANIPYAFDMVSIDTSFQLIYDATSETEEVNLDNLGFLNASSIKTENSRKVRFETTLVNSVTGEDSNYDGLKFYSNPKLVQDFHEFWYDVFPQYITKIKHPNLIVLKEGLESVNEALEILRDNKVSGEKIVFRASRK

SEQ ID NO: 63284 - DNA, 1113 bp, Debaryomyces hansenii CBS767
  CDS (1)..(1113)
atgtctcacattaacaaagctgctcttcttactggatcgactgataaaggccaattgactgaagttggcgaaattgcttatccaaaaattaatgatgatcaaattttaattaaagctattgcttatgctgccaatcctactgattggaaacacgttcttggcaaatggggtggaaaaggtgatattgcaggatctgatgttagtggtacagttattgaagttggtcctaaggttaaggggtttgaagttggcgatgtggtttcgtcatttatgcacggtaacttctctaagactagaggagcattcagtgactacgtgattgccgatgtcaacaccacaatcaagtacgacaagtctacgttcaattctaaaccacttgaagttggtgatcataagtcagattcgattaatacatttgaaggcgctgcgtccattaatttggggcttgtaacggtaggcttgtctttcaaccataagcttggtatcaaggctgataaacaaactaacgcttccaagtatattttgatttggggtggtgctacggctacaggtatcttagcaatccaagtcgctaagcttgcatatggtttaaaggtcattacaaccgcatcctcaaagcatcacgatttcttgaaatcgttaggtgctgatgaagtatttgattaccatgactcaaatgtcattgagcagataaagaaaactggtggtgctaacatcaactacgcattggatactgtttccaacgaacaaactttccaatcggtgtacgatgccacggctgatactaaggatgttgctattgataatttgctctttttaactcctgacaaaattaagactgatgattcaagaaaggtttctttccaaacttcccttgcatattgtgtggatggaaatgatgttaacttgaatggcttagtcgttccatcaccaccggagttagtaaaggaattcaacgatttttggttcaatgttatcccacaatacgtcacaaaactcagacatgctaacttgaaggttttggagcctggtttgaaaaccaccaatgaggctttggaattattaagagaggataaagtggccggtcaaaaggttgttttcagagcaaattaa

SEQ ID NO: 63285 - protein, 370 aa, Debaryomyces hansenii CBS767
MSHINKAALLTGSTDKGQLTEVGEIAYPKINDDQILIKAIAYAANPTDWKHVLGKWGGKGDIAGSDVSGTVIEVGPKVKGFEVGDVVSSFMHGNFSKTRGAFSDYVIADVNTTIKYDKSTFNSKPLEVGDHKSDSINTFEGAASINLGLVTVGLSFNHKLGIKADKQTNASKYILIWGGATATGILAIQVAKLAYGLKVITTASSKHHDFLKSLGADEVFDYHDSNVIEQIKKTGGANINYALDTVSNEQTFQSVYDATADTKDVAIDNLLFLTPDKIKTDDSRKVSFQTSLAYCVDGNDVNLNGLVVPSPPELVKEFNDFWFNVIPQYVTKLRHANLKVLEPGLKTTNEALELLREDKVAGQKVVFRAN

SEQ ID NO: 63286 - DNA, 1071 bp, Candida albicans SC5314
  CDS (1)..(1071): transl_table=12
atgaaagctgctgttgtatcaaatcctgtcgaacctactaaattgacagaagtcaaagaaattcccaaacctaaaattcaagataatgaaattttaatcaaagcaaaggcatatgccatcaatccgacagactggaaacacattgtctttaaaatgagcaagcctggtgatgttgccggtagtgatgcaagtggcattgttgaggaagttggatctcaagttacaaacttcaaaaaaggtgacaatgtcagctctcttgtgattggtaatgtctctcctgataatggggcatttgctgaatactttgttgccaaacctcaagcaacaatcaagtatgatcacgatttggtatcctcactggaatctaaatcttctacaattgattcttttgaaggggctgcaagtgttaccgttggtttggttaccgttggaatttcatttgctcattccttgaacattgccaaaaataaggagaagggtgattcgattttgatctggggtggtgctactgctactggtattttggccatccaagttgccaaattggtttacaacttgaatgttatcgtcaccgcctctcctaagaatcatgagtatttgaaagacttgggtgctgaccatactttagattataatgacgccgatgtggttctgaaattacaactgcttggacatataaagtttggtttggacacaattagtaataaagatacctttcagaaactctatgatgcaactgcaggcacaccagaagttttcttggactcattgttgcttctcgatggcaagtcgatcaaaactgaccctgcaagaaatgttcattggggctacactttagggtaccttgttgttcaaaaggaaaaagtcttggggacccaaaagttggtacaaacaccagaattggtcaatgactttaatgcttggtgggaaaatgtcttgcctacaattatcaacaaagtcaagcatgccaatttgaagattttagatgaaggcttggcttctgctaatgaaggattgcaattgtcaagagacaacaaagtttctgggcagaagattgtgtttcgagcttaa

SEQ ID NO: 63287 - protein, 356 aa, Candida albicans SC5314
MKAAVVSNPVEPTKLTEVKEIPKPKIQDNEILIKAKAYAINPTDWKHIVFKMSKPGDVAGSDASGIVEEVGSQVTNFKKGDNVSSLVIGNVSPDNGAFAEYFVAKPQATIKYDHDLVSSSESKSSTIDSFEGAASVTVGLVTVGISFAHSLNIAKNKEKGDSILIWGGATATGILAIQVAKLVYNLNVIVTASPKNHEYLKDLGADHTLDYNDADVVSKLQSLGHIKFGLDTISNKDTFQKLYDATAGTPEVFLDSLLLLDGKSIKTDPARNVHWGYTLGYLVVQKEKVLGTQKLVQTPELVNDFNAWWENVLPTIINKVKHANLKILDEGLASANEGLQLSRDNKVSGQKIVFRA

SEQ ID NO: 63288 - DNA, 1086 bp, Candida albicans SC5314
  CDS (1)..(1086): transl_table=12
atgaaagcagctatcatttctggatctttcgaaccttatcaattagcggaaattaaagatattcctcaacaaaaaataaaagaaaatgaaatattaatcaaagcagtagcttttgcaataaacccaactgattggaagcacattgtttatcaattgggcagcccaggtgatgttgttggttgcgatgttagtgggatcattgaagaagtgggttctcaagtaactgggtttgcaaaaggtgacactgtaagtgcttttataactggtaatagatcacctcgcactggagcttttgcagaatatgtagctgttgatcctgctacttcgataaagtacaataagaattttgaacatttgactaatttacaagtatctgaaatccactcatttgaaggggcagcaagtattaatttaggtttggttaccgttgggctttcattttctcattacttacgaattgacaacaaaaagcaacctggggatagtattttgatttggggaggagcaactgcaactggagttctagccattcaggttgccaaactagtgtataatctcaaagtaatcaccacagcatcacccaaaaaccacaccctcttgaaacaattaggggcagattatgttttcgattatggagacgctgatgttgtcaataaaattaagaatattggccaaattaaatttgctcttgatacgattgcaacaccagaaacgtttcaaaaagtttacgactcaacagaggggtctcaagaagtatttattgattccttagcaggtttagactatcgatcaattgctgccaatgatgccagaggagatcaagtacattgggggcacaccattgcttgtttggcatctttaaaagagaaaactgtgtttaatgaaaattatgttcaaacacctgaattgttagatgattttactcagtggtggcaaaaggtggtccctcaaataattgatcgtattaaacatacaaatttaaagttattaaatgaaggattagactccgtaagtgaagggttagaattgtctagaaataataaactctctgctgaaaaggttgtatttagagttctggatctgtga

SEQ ID NO: 63289 - protein, 361 aa, Candida albicans SC5314
MKAAIISGSFEPYQLAEIKDIPQQKIKENEILIKAVAFAINPTDWKHIVYQLGSPGDVVGCDVSGIIEEVGSQVTGFAKGDTVSAFITGNRSPRTGAFAEYVAVDPATSIKYNKNFEHLTNLQVSEIHSFEGAASINLGLVTVGLSFSHYLRIDNKKQPGDSILIWGGATATGVLAIQVAKLVYNLKVITTASPKNHTLLKQLGADYVFDYGDADVVNKIKNIGQIKFALDTIATPETFQKVYDSTEGSQEVFIDSLAGLDYRSIAANDARGDQVHWGHTIACLASLKEKTVFNENYVQTPELLDDFTQWWQKVVPQIIDRIKHTNLKLLNEGLDSVSEGLELSRNNKLSAEKVVFRVSDS

SEQ ID NO: 63290 - DNA, 1086 bp, Candida albicans SC5314
  CDS (1)..(1086): transl_table=12
atgaaagcagctatcatttctggatccttcgaaccttatcaattagcggaaattaaagatattcctcaaccaaaattaaaagaaaatgaaatattaatcaaagcagtagcttttgcaataaacccaactgattggaaacacattgtttatcaattgggcagcccaggtgatgttgttggttgcgatgttagtgggaccattgaagaagtgggttctcaagtaactgggtttgcaaaaggtgacactgtaagtgcttttataactggtaatagatcacctcgcactggagcttttgcagaatatgtagctgttgatcctgctactttgataaagtacaataagaattttgaacatttgactaatttacaagtatctgaaatccactcatttgaaggggcagcaagtattaatttaggtttggttaccgttgggctttcattttctcattacttacgaattgacaacaaaaagcaacctggggatagtattttgatttggggaggagcaactgcaactggagttctagccattcaggttgccaaactagtgtataatctcaaagtaatcaccacagcatcacccaaaaaccacaccctcttgaaacaattaggggcagattatgttttcgattatggagacgctgatgttgtcaataaaattaagaatattggccaaattaaatttgctcttgatacgattgcaacaccagaaacgtttcaaaaagtttacgactcaacagaggggtctcaagaagtatttattgattccttagcaggtttagactatcgatcaattgctgccaatgatgccagaggagatcaagtacattgggggcacaccattgcttgtttggcatctttaaaagagaaaactgtgtttaatgaaaattatgttcaaacacctgaattgttagatgattttactcagtggtggcaaaaggtggtccctcaaataattgatcgtattaaacatacaaatttaaagttattaaatgaaggattagactccgtaagtgaagggttagaattgtctagaaataataaactctctgctgaaaaggttgtatttagagttctggatctgtga

SEQ ID NO: 63291 - protein, 361 aa, Candida albicans SC5314
MKAAIISGSFEPYQLAEIKDIPQPKLKENEILIKAVAFAINPTDWKHIVYQLGSPGDVVGCDVSGTIEEVGSQVTGFAKGDTVSAFITGNRSPRTGAFAEYVAVDPATLIKYNKNFEHLTNLQVSEIHSFEGAASINLGLVTVGLSFSHYLRIDNKKQPGDSILIWGGATATGVLAIQVAKLVYNLKVITTASPKNHTLLKQLGADYVFDYGDADVVNKIKNIGQIKFALDTIATPETFQKVYDSTEGSQEVFIDSLAGLDYRSIAANDARGDQVHWGHTIACLASLKEKTVFNENYVQTPELLDDFTQWWQKVVPQIIDRIKHTNLKLLNEGLDSVSEGLELSRNNKLSAEKVVFRVSDS

SEQ ID NO: 63292 - DNA, 1077 bp, Candida albicans SC5314
  CDS (1)..(1077): transl_table=12
atgaaagctgctgtcgttccagaatccgtcactgagaccaaattggccgaagtcaaagaaatccctaaaccaaccattggcgatgaccaaatcttaatcaaagcagaagctgctgctgtaaaccctactgattggaaacacatagtatttcaaatgagtaaacctggtgatgtcattggaagtgacgtcagtgggaccgttgaagaagttggatccaaagtcaccaatttcaaaaaaggtgatactgtcagttctttcattattgggaatatatcacctgatagtggggcttttggtgaatatgttattgcatatcctcaagccactatcaaatacgaccatagtttaagccattcctcagcaacaaattcatcaactatcaaatcttatgaaggtgctgctagtgtcactttgggtttatctactattggtatttcattttcccattacttaaacataggcaaacataagaaagaaggtgattctatattgatttggggtggtgctactgctactgggatcttggccattcaagttgcaaaattggtttataatttaaatgtcattactacagcatccccaaagaatcatgcctttttgaaagaattgggagctgatcatactttggattataatgatccaaatgtaattgaaaatttgaaagctcttggtcctattaaatttggtttagatactattgctaacactacaacttttcaagggctttacgatgcaactgctggaactccagaagtttatttggactctttattgggattggatggtaaatccattaaaactgatccatctagagaaaactctgttcattggggttatacattggcttatctctatgttattaaagagaaatcacttggacctaccaaatttgtccaaacccctgaattagtggatgattatctcaaatggtggaatgaagttttaccaacattcattggtaaaattaaacatgccaatttaaagatattgggagatggtttagcttctgctaatgaagctttgcaattatctagagacagtaaagtttctgctcaaaagattgttttcacagtttga

SEQ ID NO: 63293 - protein, 358 aa, Candida albicans SC5314
MKAAVVPESVTETKLAEVKEIPKPTIGDDQILIKAEAAAVNPTDWKHIVFQMSKPGDVIGSDVSGTVEEVGSKVTNFKKGDTVSSFIIGNISPDSGAFGEYVIAYPQATIKYDHSLSHSSATNSSTIKSYEGAASVTLGLSTIGISFSHYLNIGKHKKEGDSILIWGGATATGILAIQVAKLVYNLNVITTASPKNHAFLKELGADHTLDYNDPNVIENLKALGPIKFGLDTIANTTTFQGLYDATAGTPEVYLDSLLGLDGKSIKTDPSRENSVHWGYTLAYLYVIKEKSLGPTKFVQTPELVDDYLKWWNEVLPTFIGKIKHANLKILGDGLASANEALQLSRDSKVSAQKIVFTV

SEQ ID NO: 63294 - DNA, 1113 bp, Candida albicans SC5314
  CDS (1)..(1113): transl_table=12
atgaaagctgctgttgtcccagaatcggtaactgaaaccaaattagctgaaatcaaagaaatccctaaaccaaccattgatgacgatcaaatcttaatcaaagcagaagctggtgctattaatccaactgattggaaacatataattgtggcacgttccagtaaaccaggtgatattattggatgtgatgttagtgggattgttgaagaagttggttctaaagtaacaaattttaaaaaaggagatgctgttagtgcttatattacagggaatatttcttctattaatggtgcctttagtgaatatgttgctgcttatccccaagctacgattaaatatactaatggtttaattcattctactgctgttgcaaaagcatcgactataattaaaacttttgaaggtgcagcatgtatgactttaggattagctacagttgccatgtcattttctcatcatttaaatattagtaaacatcaacaaaagcagggtaatgatgcaattttgatttggggtggtgcaacggcaacagggattttagctattcaagttgctaaattagtttataatttaaccgtgattactaccgcatcacctaagaatcatgaatatttgaaacaattgggtgctgattatgttttagattataatgattcaagaattgttgaaaatattagaaaaatcggtaatggtaatattagatttggattagatactgtttctaatgctactactttccaatatctttatgatgctactgaaagtactacttctagttatgctaagaaggtttatttggattcgttattggcattagatggtaatactatcaaaactgatccaaaaagagacaaatcggttcattggggttatacatttgttgatcattctattattaaagtgaaaaaatttggtgataaagaatactatcaaactccagaattatttaataattattataaatggtggcaagaaattatgccaacaattattaataaaattaaacatgcaaatttgaaaattttagataatggattagaatctgttaatgaagcattacaattatctaaagatagtaaagtatctgccgaaaaaattgtcttcaccatttga

SEQ ID NO: 63295 - protein, 370 aa, Candida albicans SC5314
MKAAVVPESVTETKLAEIKEIPKPTIDDDQILIKAEAGAINPTDWKHIIVARSSKPGDIIGCDVSGIVEEVGSKVTNFKKGDAVSAYITGNISSINGAFSEYVAAYPQATIKYTNGLIHSTAVAKASTIIKTFEGAACMTLGLATVAMSFSHHLNISKHQQKQGNDAILIWGGATATGILAIQVAKLVYNLTVITTASPKNHEYLKQLGADYVLDYNDSRIVENIRKIGNGNIRFGLDTVSNATTFQYLYDATESTTSSYAKKVYLDSLLALDGNTIKTDPKRDKSVHWGYTFVDHSIIKVKKFGDKEYYQTPELFNNYYKWWQEIMPTIINKIKHANLKILDNGLESVNEALQLSKDSKVSAEKIVFTI

SEQ ID NO: 63296 - DNA, 1113 bp, Candida albicans SC5314
  CDS (1)..(1113): transl_table=12
atgaaagctgctgttgtcccagaatcggtaactgaaaccaaattagctgaaatcaaagaaatccctaaaccaaccattgatgacgatcaaatcttaatcaaagcagaagctggtgctattaatccaactgattggaaacatataattgtggcacgttccagtaaaccaggtgatattattggatgtgatgttagtgggattgttgaagaagttggttctaaagtaacaaattttaaaaaaggagatgctgttagtgcttatattacagggaatatttcttctattaatggtgcctttagtgaatatgttgctgcttatccccaagctacgattaaatatactaatggtttaattcattctactgctgttgcaaaagcatcgactataattaaaacttttgaaggtgcagcatgtatgactttaggattagctacagttgccatgtcattttctcatcatttaaatattagtaaacatcaacaaaagcagggtaatgatgcaattttgatttggggtggtgcaacggcaacagggattttagctattcaagttgctaaattagtttataatttaaccgtgattactaccgcatcacctaagaatcatgaatatttgaaacaattgggtgctgattatgttttagattataatgattcaagaattgttgaaaatattagaaaaatcggtaatggtaatattagatttggattagatacagtttctaatgctactactttccaatatctttatgatgctactgaaagtactacttctagttatgataagatggtttatttggattcattattggcattagatggtaatactatcaaaactgatccaaaaagagacaaatcggttcattggggttatacatttgttgatcattctattattaaagtgaaaaaatttggtaataaagaatattctcaaactccagaattatttaatgattattataaatggtggcaagaaattatgccaacaattattaataaaattaaacatgcaaatttgaaaattttagataatggattagaatctgttaatgaagcattacaattatctaaagatagtaaagtatctgccgaaaaaattgtcttcaccatttga

SEQ ID NO: 63297 - protein, 370 aa, Candida albicans SC5314
MKAAVVPESVTETKLAEIKEIPKPTIDDDQILIKAEAGAINPTDWKHIIVARSSKPGDIIGCDVSGIVEEVGSKVTNFKKGDAVSAYITGNISSINGAFSEYVAAYPQATIKYTNGLIHSTAVAKASTIIKTFEGAACMTLGLATVAMSFSHHLNISKHQQKQGNDAILIWGGATATGILAIQVAKLVYNLTVITTASPKNHEYLKQLGADYVLDYNDSRIVENIRKIGNGNIRFGLDTVSNATTFQYLYDATESTTSSYDKMVYLDSLLALDGNTIKTDPKRDKSVHWGYTFVDHSIIKVKKFGNKEYSQTPELFNDYYKWWQEIMPTIINKIKHANLKILDNGLESVNEALQLSKDSKVSAEKIVFTI

SEQ ID NO: 63298 - DNA, 1077 bp, Candida albicans SC5314
  CDS (1)..(1077): transl_table=12
atgaaggccgctgttgttccaatttccattaaggataactatttaactgaaattaaagatatcccaaaaccggaaatcaaagatgatcaaatcttaatcaaagctaaagcttgtgccatcaatccaattgattggaaacatatcgtttaccaaatgagtaaaccaggtgatgtagctggaagtgatgttagtggaattgttgaacaagttggggccaatgtgacaaattttaaaaagggggatttggtaagttcatttgtaatggggaatatgtcaccaatgagtggtgcatttgccgaatatgttgctgcatttcctcaagccactattaagtatgatcatgatttagataatccaccaaaggcgaaagcttccatgattgattcatttgaaggtgcagcgagtattactatgggattgacaactgttgctcaatcattttcacattctttgaatataccaaaacataagaaaccaggtgattccattttgatttggagtggtgctactgcaactggtattgtagcaatccaagttgccaaattagtttataatttaaaggtcatcactactgcctcgccaagaaatcatgaatatttgaaagaattaggggctgatttcacattggattataaagaccccaaaattgttgacaaattgaaactgcttggacacatcaaatttgggttggatacaattgctactccacagacatttcaaaaactttatgatgccacacaaggtactcctgaagtttatttggattccttattaggaatggatggtaattctatcaagacggatcccgcaagagaaactactgttcattgggggcatactatgggttatctttgtgttcttaaaacgaaaactttaggctcaactacatatgtccaatcaacagagttgttgaatgattataataaatggtgggaaaatgtcatgccaacgattattaataaaataaaacatgcaaatttaaagattttacccaatggattggaatcagccaatgaagggttacaaatgtcaagagagagtaaagtttctggagagaagattgtttttaaaatttaa

SEQ ID NO: 63299 - protein, 358 aa, Candida albicans SC5314
MKAAVVPISIKDNYLTEIKDIPKPEIKDDQILIKAKACAINPIDWKHIVYQMSKPGDVAGSDVSGIVEQVGANVTNFKKGDLVSSFVMGNMSPMSGAFAEYVAAFPQATIKYDHDLDNPPKAKASMIDSFEGAASITMGLTTVAQSFSHSLNIPKHKKPGDSILIWSGATATGIVAIQVAKLVYNLKVITTASPRNHEYLKELGADFTLDYKDPKIVDKLKSLGHIKFGLDTIATPQTFQKLYDATQGTPEVYLDSLLGMDGNSIKTDPARETTVHWGHTMGYLCVLKTKTLGSTTYVQSTELLNDYNKWWENVMPTIINKIKHANLKILPNGLESANEGLQMSRESKVSGEKIVFKI

SEQ ID NO: 63300 - DNA, 1092 bp, Ustilago maydis 521
  CDS (1)..(1092)
atgttcctgccatccaagatgaaagccttggttacgaccaaagacaaaaagaccgagatacaggaggtgccccttcctacgctcgacaaggacgaggttcttattcgtacgcttgcagtcaccatcaaccctaccgactggaagcatgtcgccctgatatctggccctggcaaacaggttggatgcgactttgtcggcattgtcgaagagcttggtcctcaagtcaagaacagctcgcttagcaaaggtgatcgcgtggctggtttcgtgcacggcggtttggatcctgatcgaggcagctttgccgagtttctcaaaaccaacagcgagattgttgctaccattccggacaatgtggacgacctgacagctgcctcgctggggatttccggagagactgcggttcaagcactattccacagactggcgatccccgtgccagatttgtccaatgctcccatcaaggtgacagatgattcgccagagatcctgatctggtccggaagcacaagtgtcggtcaatgggccattcaaattgctcatatttctggttacaaggtcatcaccaccgcaagtcccagaaatcacgagatgctcaaggagcttggtgcagacgatctgtacgactaccgcgacgaaacaacccctcagaagattgctgcaaagtatcccaacctaagcaaggcgctcgactgcatctcggagaacggcacacagcagctctgcgtcaaatccctcggtgcagaggacggtgacattgtcgtactcctcaagccagacaaggaggctatcaatttgcgcaaaggccaaattaacatcatccacactctcgtctataccgctcttggtcgtccattcagttacggaagagctgtctatgatcaagatcgtgtcacggccgactctgagctcatgaaggaatggctgaacggcaatcagggtcacttttatcatttattcaaacaaggcctcttgcgcggcaacaggatcaaggagatgcctggaggcctggaaggcattccagagggtctcaagtacgtacaggaaggcaaggcttccgccgagaagctggtgcacagaatcagctcgtga

SEQ ID NO: 63301 - protein, 363 aa, Ustilago maydis 521
MFLPSKMKALVTTKDKKTEIQEVPLPTLDKDEVLIRTLAVTINPTDWKHVALISGPGKQVGCDFVGIVEELGPQVKNSSLSKGDRVAGFVHGGLDPDRGSFAEFLKTNSEIVATIPDNVDDLTAASLGISGETAVQALFHRLAIPVPDLSNAPIKVTDDSPEILIWSGSTSVGQWAIQIAHISGYKVITTASPRNHEMLKELGADDLYDYRDETTPQKIAAKYPNLSKALDCISENGTQQLCVKSLGAEDGDIVVLLKPDKEAINLRKGQINIIHTLVYTALGRPFSYGRAVYDQDRVTADSELMKEWLNGNQGHFYHLFKQGLLRGNRIKEMPGGLEGIPEGLKYVQEGKASAEKLVHRISS

SEQ ID NO: 63302 - DNA, 999 bp, Methylococcus capsulatus str. Bath
  CDS (1)..(999): transl_table=11
atgaaagccatcgtcatgacccgccccggcgaagccgccgaggtgctggaactgcgtgacctgcccgaaccggcgttgacggcgccgacccagatcaaggtgcggctccgggcggcgggggtcaatcccatcgacaccaaggttcgccgccgcgggctgttctacgacgatgccctgccggcggttctcggctgcgatggggccggcgaggtggtcgaagccggggcggaggtggaccgctttcggatcggcgaccgggtctggttttgcaacggcggcctcggtgccgagcagggaaactatgccgaatataccgtgctggatcagcgctgggcagcgcccatgccggcatcgagcgcgttcgccagtgcggcggccggtccgctggtcctgatcacggcctggggtgccttgtacgatcggggacggctgcagcccggccagaccgtgctggtccatgcggccgccggcggcgtcggccatgtcgccgtgcagttggccaaactgcgcggggcgcgggtcatcgccaccgtgggttccgaagacaaggccgcgctggccaggggctggggcgccgatgagaccatcgactaccggactcaggatttcgtcgccgaggtcaacgctctgaccggcgggcgaggcgccgatctggtgctggatacggtcggtcccgaggtgtttcgccgcagcgtcgaatgcacagcccatttcggcgacctggtgaccctgctcgacaccggcgccacctccctggccgaagcgcggatgcgcaacttgaggatcggcttcgaactgatgctggtgccgatgctgcgcaagctggacgcagcgcgggaccatcacgtggaaatcctccgtgcctgtggtgaatggatcgatgacggcaagctcgaactgtacgtgagcggtgtccatccgctcgaggaggccgctcgggtacacgacatcatcgaagccggacataccaccggcaagcgggtgctctgcatcgattga

SEQ ID NO: 63303 - protein, 332 aa, Methylococcus capsulatus str. Bath
MKAIVMTRPGEAAEVLELRDLPEPALTAPTQIKVRLRAAGVNPIDTKVRRRGLFYDDALPAVLGCDGAGEVVEAGAEVDRFRIGDRVWFCNGGLGAEQGNYAEYTVLDQRWAAPMPASSAFASAAAGPLVLITAWGALYDRGRLQPGQTVLVHAAAGGVGHVAVQLAKLRGARVIATVGSEDKAALARGWGADETIDYRTQDFVAEVNALTGGRGADLVLDTVGPEVFRRSVECTAHFGDLVTLLDTGATSLAEARMRNLRIGFELMLVPMLRKLDAARDHHVEILRACGEWIDDGKLELYVSGVHPLEEAARVHDIIEAGHTTGKRVLCID

SEQ ID NO: 63304 - DNA, 1035 bp, Aspergillus niger
  CDS (1)..(1035)
atgcccaaagccctggtaatcactgcgcccggtagtcgcgacgtggtggatcgccctatccccactctgcccgacgactgtcttctggtcaagacagttagtgtcgctctcaaccctaccgactggaagagcgccgaccggaaacctcctggacaagtcattgggaatgattactccggtgttgtcgaagaggtcggcaagggcgtcaagaaagccttccgcaagggcgaccgtgtttgcggttgggtccaaggatgcaattctaacaatccggaaagtggagcctttgctgaatactgcatccccaaagctgatcttcagatcgctatccccgaccgtctcagctttgaggaggcttcaaccctcggcttggggacaatcacggtgggccagggcctgtatcagagtctgaagctcgcaccaccagatgccccactggcccagcctgagttggttctcatctacggtggctccacagccaccggtactctggccatccagtttgccaagttgtcggggtacactgtgttgacaacttgttcggcgcaaaactttgatctcgtgaagagtcttggtgcagacgcagtgttcgactataaagatgcgaatgcagtccaagccgtcaaggattacgctcaggataagctgtcgctagtctttgacactgttgctgttgagtctagcgctaagttctgtggcgaagtgatctctagcaagggcggcgattattctgccctgctgaaggtggccgttccccgagacgatgtccgtagtcttttcaccattggatacactgcctttggtgaagactttgattttggcggtggtataatcccagccaagccggaggatcgagagtttgcgggacagtttatgagcaaggcagccactttccttgcagagggaaaggtcaagcctcatcctgtcaagctggggccacggggactccaaggggtggtagagggtctgcaggatatgaaagatggcaaggtcagcggacagaagttggtgtataacgtggccgacaccccataa

SEQ ID NO: 63305 - protein, 344 aa, Aspergillus niger
MPKALVITAPGSRDVVDRPIPTLPDDCLLVKTVSVALNPTDWKSADRKPPGQVIGNDYSGVVEEVGKGVKKAFRKGDRVCGWVQGCNSNNPESGAFAEYCIPKADLQIAIPDRLSFEEASTLGLGTITVGQGLYQSLKLAPPDAPLAQPELVLIYGGSTATGTLAIQFAKLSGYTVLTTCSAQNFDLVKSLGADAVFDYKDANAVQAVKDYAQDKLSLVFDTVAVESSAKFCGEVISSKGGDYSALLKVAVPRDDVRSLFTIGYTAFGEDFDFGGGIIPAKPEDREFAGQFMSKAATFLAEGKVKPHPVKLGPRGLQGVVEGLQDMKDGKVSGQKLVYNVADTP

SEQ ID NO: 63306 - DNA, 1101 bp, Aspergillus niger
  CDS (1)..(1101)
atgccctctgccacacccgtgatcccatcccaacaaaccgctatcgtcgctgaaggcgccggccaactgagcatctatcacgatgccccagttcccgccctccagcccgatgtggctctcgtcaaaaccgccgccgtggccatcaatccagtcgatgcgaagatgctcgactacagccctgtcccgggggccatccacgggtatgacttcgcgggcaccatcgtcgccctggggagtgacaccccgccgcatctgaaggtcggcgaccgggtcgcaggcttcgtgcatggcatgaaccccctcctgcctgacgtgggcgcattcgccgaatacgttgccgcctctgccgacctggtcctcaagctcccagacacgatgagtttcgaggagggcgcctcgctggggctagggctgttcaccgcgggtctgggtctcttccaacatctccagatcccactttctctcactcgtgagccgagcccggaggctagctcacctacaaaggcagactttgtcctcgttgcgggtggcagtactgccacgggaacccgagcactgcaactgctgaaactagccggcctccgcccagtagccacctgctcccccgcccacttcgacctggcccgccgcttcggcgccgaagccgtcttcgactaccacgatcctgactgcgccgccgccatccgcgcctacacgaagaacaccctcgcctacgcgctcgactgcctcgccctggcggaaaccacccagctctgctacggtgctcttggccgcgcgggcgggcgctacgtcaccctcgagcccttccgggaggcgatcgccgcccaacgcccgcacaccgtcaccccgtcctggttgctggcgctgacgatcttcgggcgcaaagttgcgttggatggggagtatgggcgagaggcaaatccggaggaccgggagtttggggcgcggttgacggagcaggtgcaggggctgttggatgaggggaaggtggatgtgcatccggttagggttatgggtggggggtggcagggagtgttggagggagtggatttggtgaggcggcagacggtttcggggcacaagttggtttacgcagtttaa

SEQ ID NO: 63307 - protein, 366 aa, Aspergillus niger
MPSATPVIPSQQTAIVAEGAGQLSIYHDAPVPALQPDVALVKTAAVAINPVDAKMLDYSPVPGAIHGYDFAGTIVALGSDTPPHLKVGDRVAGFVHGMNPLLPDVGAFAEYVAASADLVLKLPDTMSFEEGASLGLGLFTAGLGLFQHLQIPLSLTREPSPEASSPTKADFVLVAGGSTATGTRALQLLKLAGLRPVATCSPAHFDLARRFGAEAVFDYHDPDCAAAIRAYTKNTLAYALDCLALAETTQLCYGALGRAGGRYVTLEPFREAIAAQRPHTVTPSWLLALTIFGRKVALDGEYGREANPEDREFGARLTEQVQGLLDEGKVDVHPVRVMGGGWQGVLEGVDLVRRQTVSGHKLVYAV

SEQ ID NO: 63308 - DNA, 1047 bp, Aspergillus niger
  CDS (1)..(1047)
atgtctactcagaaggccgtcatcgttaccgaacctaagactgcaggcttggtcagctcccgtgctattcccaagctccgcgacgattacgtcctcgtgaagactgtcagcgtggggttgaaccccactgactggaagcataccgactacctgtcgccgcccggtgtactgctaggatgtgattactctggcgttgttgaggccgttggcaaggacgtcaagctaccttggaagaagggtgaccgtatctgtggttccacccatggtggtaatgccatcgaacccgaggatggctctttcgccgagtacattgttgtcaagggtgatgtgcaattccgaatccccgaacatttgagcttccaggaagccgccacgcttggagttggtatccagactgtgggccaggctctgtatcagactttgggactggctccaccaacgcaacctatccaaaagacgactcctattcttatatatggcggttctacggctacaggtaccttagccatccagttcgctaagctctccgggtaccaggtgttcaccacctgctcgccgcacaacttcgatcttgtccgtgggcttggtgcggactttgtcttcgattataacgacccagagtccgccagccaaattcgcaagcagacaaacaacagcttgacactggtcatggactgtatatctcttccttctagtgttgatttcagcgaccaggcgctttcaacagagggtggcgcgcacctttcactcttgcctggaaaaattgaccgtggcaacgtcaacaatcactccatcctggtctacaccacccttggcgaggccttcaacttcggtgacatgtctcttcccgctaagccagaggatttcgagcacgccaagaagttcactcaggtggctcagacgcttttggatcagggcaagatcaaagttcatccgcccaaggttggaaaggatggtctaagtggtgtcttgggaggactagagttgctcaggaccggcaaagtcagtggcgcaaaactagtctacaacactggggagactccttag

SEQ ID NO: 63309 - protein, 348 aa, Aspergillus niger
MSTQKAVIVTEPKTAGLVSSRAIPKLRDDYVLVKTVSVGLNPTDWKHTDYLSPPGVLLGCDYSGVVEAVGKDVKLPWKKGDRICGSTHGGNAIEPEDGSFAEYIVVKGDVQFRIPEHLSFQEAATLGVGIQTVGQALYQTLGLAPPTQPIQKTTPILIYGGSTATGTLAIQFAKLSGYQVFTTCSPHNFDLVRGLGADFVFDYNDPESASQIRKQTNNSLTLVMDCISLPSSVDFSDQALSTEGGAHLSLLPGKIDRGNVNNHSILVYTTLGEAFNFGDMSLPAKPEDFEHAKKFTQVAQTLLDQGKIKVHPPKVGKDGLSGVLGGLELLRTGKVSGAKLVYNTGETP

SEQ ID NO: 63310 - DNA, 1050 bp, Aspergillus niger
  CDS (1)..(1050)
atgccccaaaaagccatcgccgtcaccgcccctaagaagggcgacctggtcaccgaccgccccatccccaagctccgcgacgactacatcctcatcaagaccgtcagcgtggccctgaaccccaccgactggaagcacatcgagttcctggctcctaccggcgtcctcgtcggctgcgactatgccggtatcgtggaggaagtcggtccggccgtcaagaagccgttcaagaagggtgaccgggtttgcggattcgtccacggcgccaacgccgtgcagcccgaagacggcacctttgccgaatacatcgtcgccaagggcgacatccagatgcacatcccggataacctcagcttccaggacgccgccacgctcggcgtgggtatcacgaccgtcggacaggccctgtaccagagtctgaagctggagctgcctaccgagcctgccaagggaggcaacgcaggcccgatcctcatctacggtggctcgacggcgacaggaaccctggcgatccagttcgccaagttgtctggatacaaggtgctgactacgtgctcgccgcggaacttcgacctggtgaagagtctgggtgccgatgaggtgtttgattacaatgcgccgaatgcggctgcggagatccggaaggctacggataacaagttgaagttggtgctggatacgatttccttggaggctagtgccaagttctgtgatgaggctatttctaccgagggtggtgagtacagtgcgcttttggctgtggggattgagcgtgccaatgtcaatgatcgctggaccctggcgtatactgctgtgggtgaggagttcatgtttggtgagacgccgttccccgcgaagcccgaggataaggagtttgctgcgaagttctgggatattgcgcagaagttgttggccgagggcaagatcaaggtgcatcggcctagcgtgcgtggggagggattgaagggtgtgttggaggggttgcagctgctcaaggctgataaggtcagtggtgagaaactggtctacaatgttgcggagactccttag

SEQ ID NO: 63311 - protein, 349 aa, Aspergillus niger
MPQKAIAVTAPKKGDLVTDRPIPKLRDDYILIKTVSVALNPTDWKHIEFLAPTGVLVGCDYAGIVEEVGPAVKKPFKKGDRVCGFVHGANAVQPEDGTFAEYIVAKGDIQMHIPDNLSFQDAATLGVGITTVGQALYQSLKLELPTEPAKGGNAGPILIYGGSTATGTLAIQFAKLSGYKVLTTCSPRNFDLVKSLGADEVFDYNAPNAAAEIRKATDNKLKLVLDTISLEASAKFCDEAISTEGGEYSALLAVGIERANVNDRWTLAYTAVGEEFMFGETPFPAKPEDKEFAAKFWDIAQKLLAEGKIKVHRPSVRGEGLKGVLEGLQLLKADKVSGEKLVYNVAETP

SEQ ID NO: 63312 - DNA, 1074 bp, Aspergillus niger
  CDS (1)..(1074)
atggttggaatatcacagggccaattggctgttgtcacacaaggtcctcgcaaggctgctttggtgaccaatcgatcaatccctaggctacgcgacgattacatcttggtcagaactgtaacagtggcccttaacccaaccgactggaggcatattgacttcgtcccaagcaatggatgtatcgtgggttgcgactttgccgggattgtcgaggagattggtcccaaggtgaccaaataccagaagggagatcgagttttgggactcacacacggatgcaacgctgttgagcccgaagatggcgcgtttgcccaatacattatggtcaagggaaatgggcaactcaagatcccggacgggatgagctgggaggatgcgtgcacggttggagtcggatacacaaccgtgggccagagtctgtatcaaaatcttggactcccagtgcctggaaagccacgaagtcctacgacaccaaagactgtcttgatccatggaggatctaccgcaactggcacactggccattcaatgcgctaaactgtctgggatggaagtaatcacgacgtgctcagccagcaatttcgagctggtcaaaggactcggggcggacgccgtgtttgactataccaagcccaatgcggcggcagcgattcggaagtatactagggataacttgaagctgtgctttgacaccgttgcaatggcgagctctgcccagttctgtgcggaagctctaaccagcagatctggggcccgataccacacgttgcaggaacttcggtgccctcggcgagatgttcggtcgacggtctcaatggcgtataccgtcgtgggggagccatacacaatgggtccccagaaggttcccgccaagcccatcgatatgaagcatcatctattatggcagtctgtctttcaggacttgttggatcagggtaagataaagacccaccctgtgtctaagcagccatatgggctcaagggagtgttgtccgggctggatctgttgcgcgagaataaagtacgaggacagaagttggtttaccgggtggatgagacaccgcatcagttctag

SEQ ID NO: 63313 - protein, 357 aa, Aspergillus niger
MVGISQGQLAVVTQGPRKAALVTNRSIPRLRDDYILVRTVTVALNPTDWRHIDFVPSNGCIVGCDFAGIVEEIGPKVTKYQKGDRVLGLTHGCNAVEPEDGAFAQYIMVKGNGQLKIPDGMSWEDACTVGVGYTTVGQSLYQNLGLPVPGKPRSPTTPKTVLIHGGSTATGTLAIQCAKLSGMEVITTCSASNFELVKGLGADAVFDYTKPNAAAAIRKYTRDNLKLCFDTVAMASSAQFCAEALTSRSGARYHTLQELRCPRRDVRSTVSMAYTVVGEPYTMGPQKVPAKPIDMKHHLLWQSVFQDLLDQGKIKTHPVSKQPYGLKGVLSGLDLLRENKVRGQKLVYRVDETPHQF

SEQ ID NO: 63314 - DNA, 1041 bp, Aspergillus oryzae
  CDS (1)..(1041)
atgaaagccatcgttttgaatggaacaaatgctacagtggtgtactcacagcctatccctaagctccgtgacgactaccttctcattaaaaccgtggccgttgccctaaatccgactgactgcaaggcgatcagccagggaaggggggccaaagatggcctagctggctgcgacttcgccggtattgtcgaagaaatcggaccagttgtcaccaagcgttggaataaaggcgaccgagtgtgtggctgcactcatggtgctaatagccgtaatccagatgacgggtcattcacggagtttatcgtcgtaaagggggatgtctgtatgagaatgctggatggcatgagcttcgaagaagcggctggtatcggcgtcagtgcgattacatgcggtcaaggcctatttcagaatctggggctgaatcttccccttaatcctgtccaaaagaaagagtacatcctgatttatggtggtagcacgtcagcgggaacccttgctatccaatatgcaaagctggccggctattctgtccttacaacttgctctccaaggaatgtagatctggtcagatcacgcggcgctgaagcagtctttgactataacgatccatcatgtggggagcagatccatcgttacacgaaaggggagctccagctggtctgggataccatcggctccgatcaaggagttcacgcctgcatggccgcgctgtcaacaaagccagggtgccgatacggtacgattcttctcaatgatatcccacgacaggatgtcgcttgtacgcggagcatcatgatgacgtttcggggcgagccattcgacttgtacggcaaacattttccgccaagtgctgaggactttgagtttgcgaagatgttcacccaattgacggaaacacttctcgctgaaaacaagctgaggcctcatccaatcagagtttgtgaaggaggtttgcaaggcgtactagatggtgtggggttggtgcaacaggggaatgtgagcggcgttaaactggtgtatcgagttgccgacacaccttga

SEQ ID NO: 63315 - protein, 346 aa, Aspergillus oryzae
MKAIVLNGTNATVVYSQPIPKLRDDYLLIKTVAVALNPTDCKAISQGRGAKDGLAGCDFAGIVEEIGPVVTKRWNKGDRVCGCTHGANSRNPDDGSFTEFIVVKGDVCMRMLDGMSFEEAAGIGVSAITCGQGLFQNLGLNLPLNPVQKKEYILIYGGSTSAGTLAIQYAKLAGYSVLTTCSPRNVDLVRSRGAEAVFDYNDPSCGEQIHRYTKGELQLVWDTIGSDQGVHACMAALSTKPGCRYGTILLNDIPRQDVACTRSIMMTFRGEPFDLYGKHFPPSAEDFEFAKMFTQLTETLLAENKLRPHPIRVCEGGLQGVLDGVGLVQQGNVSGVKLVYRVADTP

SEQ ID NO: 63316 - DNA, 1047 bp, Aspergillus oryzae
  CDS (1)..(1047)
atggcaacacagaaagcggtcgttattactacgccgaagcatgcccaggtggtgtgcgatagagccatcccgaagctgcgtgacgattctatcttagtcaagaccgtcagtgtcgcattgaaccctaccgactggaaacatattgacttcctggcccccgccggtgtcctcgtcgggtgcgactatgccgggattgtggaagcagtcggtaagggcgttaaaaaacctttcacaaagggagaccgaatctgtggatttgtccacgggtccaatgccgttcagcccgaggatggagccttcgcggaatacattatcgtcgacggagaccttcaatacaaaatacctgaaggcatggggtttgaagaggcagcaactttgggacttggggttaccaccgctgctcttgggctttaccaaagtcttaaactagcccttcccatcgctcctatcgagaccaaaataccaatcttgatttacgggggctcatcagctaccggaactttggcgattcagtttgccaagttatcaggttacgaagttctgacaacttgctctcctcgccatttcgaccaggtcaagaacctaggtgtcgacgctgttttcgattacaacgacccagcctccgccagcgcgattagagaacaaacgaaggacagtcttacgttagctttcgatacaatatcagtcgagagcagtgccacatactgtgatcatgcgctatccaccaagggtggcgattacagctcacttcttccgataaaaactgagcgtgagaatattcgggatcgatcgactatggcatatacggcgttcggtcggagcttcaagttcgggccaagggatattccagctcagccaggcgatagggcttttatggaacagttcactggcattttccaggacttgctggccagtggcaagatcaagacacattctcctagggtcagcaatgccgggctggacggtatcttggacgggcttcagctcttaaggaacggtaaggttcggggcgagaagcttgtttataatatcgtagatagttcctga

SEQ ID NO: 63317 - protein, 348 aa, Aspergillus oryzae
MATQKAVVITTPKHAQVVCDRAIPKLRDDSILVKTVSVALNPTDWKHIDFLAPAGVLVGCDYAGIVEAVGKGVKKPFTKGDRICGFVHGSNAVQPEDGAFAEYIIVDGDLQYKIPEGMGFEEAATLGLGVTTAALGLYQSLKLALPIAPIETKIPILIYGGSSATGTLAIQFAKLSGYEVLTTCSPRHFDQVKNLGVDAVFDYNDPASASAIREQTKDSLTLAFDTISVESSATYCDHALSTKGGDYSSLLPIKTERENIRDRSTMAYTAFGRSFKFGPRDIPAQPGDRAFMEQFTGIFQDLLASGKIKTHSPRVSNAGLDGILDGLQLLRNGKVRGEKLVYNIVDSS

SEQ ID NO: 63318 - DNA, 1101 bp, Aspergillus oryzae
  CDS (1)..(1101)
atgtctgctacaatcccagattcgatgcaagcactggtgggaaaccgactagccaccgcacgactggctaactacgccttggggaagccctgcggagacggagtgaaagtccaaacagttcccactccaaacatatcagacacggaaatcctcgttcgcgtcaaggcggtcgcgctgaatcccacagacttcaaacatgttgatttcctcgctccgaaaggcgccatcatcggctgcgacttcgccgggacggtggccaaggtgggatccaaagcacccggcaactggaaggtcggggaccgagcagcaggttgggtgcacggtggcttatactatgaccgtggttcgtttgccgagtttctcaaggtcccaggggacctggcttggaaggttccgtcctccgtgagcgacgaggcagcaagtacctatggggtatctgctgtcaccgcgatgctggctctcaatgctcgcctggacgttccttgggctgatggtggcccagaaggaggacaacgtgactcgcctgtgtttatttatgcgggtgcaacgagcgccggtctctacgccattcaagtggctaaactagccggcttgaaggtcgtaaccacggcctctccacggtcgcatgacttggttaagcaatacggggcggacgacgtgtttgactaccgatcgcccaccgcagcagacgagattatccgggcatacccacagataaaccgagccttggactgtttttccgaaggcgggtcaacggacttttgcattaaggttgtgcagaaagcgaagggcaaggtagtcactttgctagacagagggaagacaacagacgatggggtggaagtggactttctccttggttatggagcctttaatcttccataccagtggatgcctcctgtcggacctcgattttcggccaacccatccgacaacgcagctctccgtcggttttatgcatcattgcacgacatctgtgatcaactgcgaccacctcctcttaagagcatagagggcggtctgcataatctccctaaaggtctggatctccttcgcaagggacaggttgctggtaccaaactggtcgctcgtcttgaataa

SEQ ID NO: 63319 - protein, 366 aa, Aspergillus oryzae
MSATIPDSMQALVGNRLATARLANYALGKPCGDGVKVQTVPTPNISDTEILVRVKAVALNPTDFKHVDFLAPKGAIIGCDFAGTVAKVGSKAPGNWKVGDRAAGWVHGGLYYDRGSFAEFLKVPGDLAWKVPSSVSDEAASTYGVSAVTAMLALNARLDVPWADGGPEGGQRDSPVFIYAGATSAGLYAIQVAKLAGLKVVTTASPRSHDLVKQYGADDVFDYRSPTAADEIIRAYPQINRALDCFSEGGSTDFCIKVVQKAKGKVVTLLDRGKTTDDGVEVDFLLGYGAFNLPYQWMPPVGPRFSANPSDNAALRRFYASLHDICDQLRPPPLKSIEGGLHNLPKGLDLLRKGQVAGTKLVARLE

SEQ ID NO: 63320 - DNA, 1047 bp, Aspergillus oryzae
  CDS (1)..(1047)
atgtcccagaaagcagttgtttacacggctcccaaacaggtatccctcgtgtcggaccgtcctctacctaagcttcgcgatgactacatcctgattaaaacggtcagcgtagcattgaaccccaccgattggaagcatgttgagtgggatctcggggccactggatgtctcgccggatgtgactactccgggattgttgaggaagtaggcaaggacgtcaagaaatctttccgcaaaggtgatcgaatttgcggcgttacccatggcgcgaatgttttggagctggaggacggtgccttcgccgagtatatagttgcaaagggtgatctccagatgcacatacccgactcgctgagcttccaagaggctgccactttgggcgtcggcattaccacagttggccaaggactctatcaaagtctgaaattggccttaccaactgagcccatttcccagccggaaccggtcttgatttacggcggctctactgccaccggctctctggcgattcaatatgccaagctttcgggctacaatgtcattactacctgctcgcctcacaacttcgactttgtcaagaagctcggcgcagatgctgtatatgactaccgggatcccaattccgccgcggctatccgcgaggctaccaacgataatctgagactggcctttgacactatctctctggatgacagcgcgaagttttgcgacaatgctctttcaaccaagggtggagagtacagcaatttgctggacagcaagatcgaacgtgagaatgtcaacgatcgcgctaccctgggctataccgctgttggagagccacttcagttcggcgacctccagattcctgcgatacccgaagacagagagttcgccgagatgttctggaaactctccgagcccttgattgcacagggtaaggtcaaggtgcatccaattaaggtttgcgccgatggattgaagggcgtgctggagggaatgcaattgctgaaggaggacaaggttagtgggcagaaattggtgtataatgtggctgaaactccttga

SEQ ID NO: 63321 - protein, 348 aa, Aspergillus oryzae
MSQKAVVYTAPKQVSLVSDRPLPKLRDDYILIKTVSVALNPTDWKHVEWDLGATGCLAGCDYSGIVEEVGKDVKKSFRKGDRICGVTHGANVLELEDGAFAEYIVAKGDLQMHIPDSLSFQEAATLGVGITTVGQGLYQSLKLALPTEPISQPEPVLIYGGSTATGSLAIQYAKLSGYNVITTCSPHNFDFVKKLGADAVYDYRDPNSAAAIREATNDNLRLAFDTISLDDSAKFCDNALSTKGGEYSNLLDSKIERENVNDRATLGYTAVGEPLQFGDLQIPAIPEDREFAEMFWKLSEPLIAQGKVKVHPIKVCADGLKGVLEGMQLLKEDKVSGQKLVYNVAETP

SEQ ID NO: 63322 - DNA, 1047 bp, Aspergillus oryzae
  CDS (1)..(1047)
atgaccacccagaaagccattgtcgttacctccccgcaacaggagagcctggtaaccgatcgacccattcccgctctccgcgatgattacatcctggtcaagacggtcgccgtcgccctgaaccccaccgactggaagcacattgcattccttgccccgcccggcgcgttaatcggatgcgactacgccggcatcgtcgaagaggttggaaaagccgtcaaaaagcccttcaaaaagggtgatcgcgtgtgtggattcacgcacggaggaaacgccgtgcagcacgaagacggagcttttgccgagtacatcgtcgccaagggagatgttcagatccgcatccccgataacctcagcttccaggaagcggccacgctgggcgtgggtatctcgacggtggggcagggtctgtatcagagcttgaagcttgcgctgccgtcggagccgattaaggaaccggagccgattctcatttacggtggctcgacggctaccggtacgctggcgattcagtttgctaagctgtctggttatacggttttgactacttgttcaccgcataacttcgatctggttaaacggctcggcgcggatgcggtctttgattacaaagatcctaattcggcggcggagattcgcaagtacactaataacaacctgaagttggtttttgatacaatttcgctggaggctagctcaaagtactgcgagcaggctatttccactgagggtggtgattatggtgttctcctctctacatctatcgatcgtgagaatgtcactactcgttttacactcgcctacactattatcggcgaagagtttaaattcggcgataaggtcttccctgccagtgcggaggacaaggcatttgccgaaaaattctggactatttcagagaagctgttggctgatggcaaggtcaaggtccaccagccgaaggtgaaccccggaggtttgcagggtgtcttggaggggctgaagctcttgaaggaggacaaggtcagcggggaaaagctggtgtacaatgttgctgaaacgccctag

SEQ ID NO: 63323 - protein, 348 aa, Aspergillus oryzae
MTTQKAIVVTSPQQESLVTDRPIPALRDDYILVKTVAVALNPTDWKHIAFLAPPGALIGCDYAGIVEEVGKAVKKPFKKGDRVCGFTHGGNAVQHEDGAFAEYIVAKGDVQIRIPDNLSFQEAATLGVGISTVGQGLYQSLKLALPSEPIKEPEPILIYGGSTATGTLAIQFAKLSGYTVLTTCSPHNFDLVKRLGADAVFDYKDPNSAAEIRKYTNNNLKLVFDTISLEASSKYCEQAISTEGGDYGVLLSTSIDRENVTTRFTLAYTIIGEEFKFGDKVFPASAEDKAFAEKFWTISEKLLADGKVKVHQPKVNPGGLQGVLEGLKLLKEDKVSGEKLVYNVAETP

SEQ ID NO: 63324 - DNA, 1131 bp, Saccharomyces cerevisiae
  CDS (1)..(1131)
atgtccgcctcgattccagaaaccatgaaagccgttgtcattgaaaatggcaaggctgtagtcaaacaggacattccaattcctgaattagaagaaggatttgttctaattaagactgtcgccgttgccggtaaccctaccgattggaaacatattgatttcaagattggtcctcaaggtgccctcttaggctgtgatgcagccggccaaatcgtaaagttgggcccaaatgttgatgctgcacgctttgccattggtgattacatttatggggttattcacggtgcttcagtgaggttcccctcaaacggtgcctttgctgagtactctgccatttcatccgagactgcttataaaccagccagagagtttagattgtgcggtaaagacaagctaccagaaggccccgtaaaatctttagaaggggcagtatccctcccagtctcattgaccacggctggtatgatccttacacatagttttggcttggacatgacatggaagccctccaaagcgcaaagagatcaacccatcttattttggggtggtgccactgctgttggccagatgcttattcaattggcaaaaaaactaaacggtttcagcaagatcatcgtcgttgcttctcgtaaacatgaaaaattgttgaaagagtacggtgcagatgaactttttgactaccacgatgctgacgttatcgaacagataaaaaagaagtacaacaacattccttacttggtggactgtgtctccaacacagaaactattcaacaggtgtacaaatgtgccgctgatgacttagacgctacggtcgttcaattgaccgttttaaccgaaaaagatatcaaggaggaagacaggaggcaaaacgtcagtattgaaggaacccttctatatttgataggaggtaacgacgtcccatttggcacgtttactttgccagcagaccctgaatacaaggaagccgccataaaatttattaagttcatcaatccaaaaatcaatgatggtgaaatccaccacatcccagtgaaagtttacaagaacgggttagatgatatcccacagttacttgatgatattaagcacgggaggaattctggcgaaaagttggttgccgtcttgaaataa

SEQ ID NO: 63325 - protein, 376 aa, Saccharomyces cerevisiae
MSASIPETMKAVVIENGKAVVKQDIPIPELEEGFVLIKTVAVAGNPTDWKHIDFKIGPQGALLGCDAAGQIVKLGPNVDAARFAIGDYIYGVIHGASVRFPSNGAFAEYSAISSETAYKPAREFRLCGKDKLPEGPVKSLEGAVSLPVSLTTAGMILTHSFGLDMTWKPSKAQRDQPILFWGGATAVGQMLIQLAKKLNGFSKIIVVASRKHEKLLKEYGADELFDYHDADVIEQIKKKYNNIPYLVDCVSNTETIQQVYKCAADDLDATVVQLTVLTEKDIKEEDRRQNVSIEGTLLYLIGGNDVPFGTFTLPADPEYKEAAIKFIKFINPKINDGEIHHIPVKVYKNGLDDIPQLLDDIKHGRNSGEKLVAVLK

SEQ ID NO: 63326 - DNA, 1089 bp, Zea mays
  CDS (1)..(1089)
atgtccggcacaatgaaatctctcactgtacacccagataccaccaccaccatctcagatattccaattcccacgccaggaccacacgaagttctaatcaaagtcgtggtcgcagggtcgaatcccaaagactggaaacttcccctctggtggaacaaatccgcaaacactggcgatgatttctctggaatcgtcgaggatgtgggatctgaggtatatgaagttaagaagggggatagggttatcgcgtaccgtcattgggagaatccgtatggaagttacgcggaatatgcaattgcgttcgactttacagttgtgaagctgccagaaaaggttagctttgaagaggctgcaactatccctctcgcggcacttacggctgtcgtagctctttaccataccctgcgccttccacacccatgggttccagctactaaaccgactccattggttgtatatggcgccgccactgccgtgggtgcctttggtattaaactcgcccaactttccaatatccacccgatcattggcgtcgtcggtcgtggcaaggatttcgcagaaactctgattgaccgctcaaggggcgacgacttggtagattacagagacggtaatgaagctgttgttaagggtattaaagctgccttagcaaagaatgggttcgacagcgttgattacgtcttcgatgcggttagtgagcatgggagtgttcttgtctctgcagcggtgttgagtaagactgggtttattactggagtcttggatttggcactagatcctaaagcgaaggatttgagcaaagatgtcaagtgggttcggactagtgttgggtgggtatttcaaaataaatgggaagaaggaagtgaagaggcgaagcaaggtgttagtcctgcgacagcaggtagagagattgcgtttttgtttttgaggtggttcgtgagagggttggatgaagggtggtttaagggacatccttatgaagttgtgaaaggagggctgaatggagttagcggggcgctgctgactttgaaagaggggaagtcgagtgctgtgaagtttgtgtatcggattgcggataccgaatattag

SEQ ID NO: 63327 - protein, 362 aa, Zea mays
MSGTMKSLTVHPDTTTTISDIPIPTPGPHEVLIKVVVAGSNPKDWKLPLWWNKSANTGDDFSGIVEDVGSEVYEVKKGDRVIAYRHWENPYGSYAEYAIAFDFTVVKLPEKVSFEEAATIPLAALTAVVALYHTLRLPHPWVPATKPTPLVVYGAATAVGAFGIKLAQLSNIHPIIGVVGRGKDFAETLIDRSRGDDLVDYRDGNEAVVKGIKAALAKNGFDSVDYVFDAVSEHGSVLVSAAVLSKTGFITGVLDLALDPKAKDLSKDVKWVRTSVGWVFQNKWEEGSEEAKQGVSPATAGREIAFLFLRWFVRGLDEGWFKGHPYEVVKGGLNGVSGALLTLKEGKSSAVKFVYRIADTEY

SEQ ID NO: 63328 - DNA, 24 bp, Artificial sequence
  primer
atgaaggctgtcgtcattgaagac

SEQ ID NO: 63329 - DNA, 26 bp, Artificial sequence
  primer
ctagtttaatacggcaactagttttt

SEQ ID NO: 63330 - protein, 378 aa, Artificial sequence
  consensus sequence
  Variant (2)..(2): Xaa in position 2 is any amino acid
  Variant (4)..(10): Xaa in position 4 to 10 is any amino acid
  Variant (11)..(11): Xaa in position 11 is any or no amino acid
  Variant (13)..(20): Xaa in position 13 to 20 is any amino acid
  Variant (25)..(33): Xaa in position 25 to 33 is any amino acid
  Variant (34)..(38): Xaa in position 34 to 38 is any or no amino acid
  Variant (40)..(42): Xaa in position 40 to 42 is any amino acid
  Variant (44)..(44): Xaa in position 44 is any amino acid
  Variant (46)..(47): Xaa in position 46 to 47 is any amino acid
  Variant (49)..(53): Xaa in position 49 to 53 is any amino acid
  Variant (55)..(61): Xaa in position 55 to 61 is any amino acid
  Variant (62)..(64): Xaa in position 62 to 64 is any or no amino acid
  Variant (67)..(73): Xaa in position 67 to 73 is any amino acid
  Variant (75)..(78): Xaa in position 75 to 78 is any amino acid
  Variant (79)..(82): Xaa in position 79 to 82 is any or no amino acid
  Variant (84)..(84): Xaa in position 84 is any amino acid
  Variant (86)..(87): Xaa in position 86 to 87 is any amino acid
  Variant (89)..(105): Xaa in position 89 to 105 is any amino acid
  Variant (106)..(122): Xaa in position 106 to 122 is any or no amino acid
  Variant (124)..(124): Xaa in position 124 is any amino acid
  Variant (127)..(133): Xaa in position 127 to 133 is any amino acid
  Variant (135)..(137): Xaa in position 135 to 137 is any amino acid
  Variant (138)..(142): Xaa in position 138 to 142 is any or no amino acid
  Variant (144)..(151): Xaa in position 144 to 151 is any amino acid
  Variant (152)..(166): Xaa in position 152 to 166 is any or no amino acid
  Variant (168)..(169): Xaa in position 168 to 169 is any amino acid
  Variant (172)..(172): Xaa in position 172 is any amino acid
  Variant (174)..(175): Xaa in position 174 to 175 is any amino acid
  Variant (177)..(179): Xaa in position 177 to 179 is any amino acid
  Variant (182)..(182): Xaa in position 182 is any amino acid
  Variant (185)..(194): Xaa in position 185 to 194 is any amino acid
  Variant (195)..(198): Xaa in position 195 to 198 is any or no amino acid
  Variant (200)..(209): Xaa in position 200 to 209 is any amino acid
  Variant (213)..(215): Xaa in position 213 to 215 is any amino acid
  Variant (218)..(218): Xaa in position 218 is any amino acid
  Variant (220)..(236): Xaa in position 220 to 236 is any amino acid
  Variant (237)..(244): Xaa in position 237 to 244 is any or no amino acid
  Variant (246)..(266): Xaa in position 246 to 266 is any amino acid
  Variant (267)..(275): Xaa in position 267 to 275 is any or no amino acid
  Variant (277)..(338): Xaa in position 277 to 338 is any amino acid
  Variant (339)..(355): Xaa in position 339 to 355 is any or no amino acid
  Variant (358)..(375): Xaa in position 358 to 375 is any amino acid
  Variant (377)..(377): Xaa in position 377 is any amino acid
PXPXXXXXXXXLXXXXXXXXNPTDXXXXXXXXXXXXXXGXXXGXDXXGXXXXXGXXXXXXXXXXGDXXXXXXXGXXXXXXXXGXFXXYXXXXXXXXXXXXXXXXXXXXXXXXXXXXXXXXXXEXAAXXXXXXXTXXXXXXXXLXXXXXXXXXXXXXXXXXXXXXXXLXXGGXTXXGXXXIQXAKXXXXXXXXXXXXXXSXXXXXXXXXXGADXXXDYXDXXXXXXXXXXXXXXXXXXXXXXXXXDXXXXXXXXXXXXXXXXXXXXXXXXXXXXXXLXXXXXXXXXXXXXXXXXXXXXXXXXXXXXXXXXXXXXXXXXXXXXXXXXXXXXXXXXXXXXXXXXXXXXXXXXXXXXXXGLXXXXXXXXXXXXXXXXXXKXV

SEQ ID NO: 63331 - protein, 19 aa, Artificial sequence
  protein pattern
  Variant (2)..(2): Xaa in position 2 is Phe, Ile, Leu or Val
  Variant (3)..(3): Xaa in position 3 is any amino acid
  Variant (4)..(4): Xaa in position 4 is Gly or Ser
  Variant (6)..(7): Xaa in position 6 to 7 is any or no amino acid
  Variant (10)..(11): Xaa in position 10 to 11 is any or no amino acid
  Variant (13)..(14): Xaa in position 13 to 14 is any amino acid
  Variant (15)..(15): Xaa in position 15 is Ala, Gly or Leu
  Variant (16)..(16): Xaa in position 16 is any amino acid
  Variant (18)..(18): Xaa in position 18 is any amino acid
  Variant (19)..(19): Xaa in position 19 is Ala or Leu
LXXXGXXATXXGXXXXQXX

SEQ ID NO: 63332 - protein, 15 aa, Artificial sequence
  protein pattern
  Variant (2)..(2): Xaa in position 2 is Ile or Val
  Variant (3)..(3): Xaa in position 3 is Lys or Arg
  Variant (4)..(4): Xaa in position 4 is Ala, Asn, Thr or Val
  Variant (5)..(5): Xaa in position 5 is any amino acid
  Variant (6)..(6): Xaa in position 6 is Ala, Ser or Thr
  Variant (7)..(7): Xaa in position 7 is any amino acid
  Variant (8)..(8): Xaa in position 8 is Ala, Gly or Thr
  Variant (9)..(9): Xaa in position 9 is Ala, Gly, Ile, Leu or Val
  Variant (12)..(13): Xaa in position 12 to 13 is any or no amino acid
  Variant (15)..(15): Xaa in position 15 is Asp, Glu or Lys
LXXXXXXXXNPXXTX

SEQ ID NO: 63333 - protein, 19 aa, Artificial sequence
  protein pattern
  Variant (2)..(7): Xaa in position 2 to 7 is any amino acid
  Variant (8)..(8): Xaa in position 8 is Ala, Ile, Leu or Val
  Variant (9)..(9): Xaa in position 9 is Lys or Arg
  Variant (10)..(11): Xaa in position 10 to 11 is any amino acid
  Variant (15)..(17): Xaa in position 15 to 17 is any amino acid
SXXXXXXXXXXGADXXXDY

SEQ ID NO: 63334 - DNA, 987 bp, Saccharomyces cerevisiae
  CDS (1)..(987)
atgcctgcccctcaagatccaaggaatcttccaattagacaacaaatggaagctcttatccgtcgcaaacaagctgaaatcacgcaaggtttggaatccatcgatactgttaagttccacgctgatacttggacccgtggtaacgatggtggtggtggtacctctatggttatccaagacggtacaactttcgaaaaaggtggtgttaatgtctccgttgtttatggtcaattgagcccagcggccgtttcagccatgaaagctgatcataagaatctgcgtctaccagaagatccaaagactggtttgccagttaccgacggtgtcaagttcttcgcttgtggtttaagtatggtcattcatcccgttaacccacacgctccaaccacgcacttaaactaccgttacttcgaaacttggaaccaagatgggaccccacaaacttggtggtttggtggtggtgctgatttgacaccttcttacttatacgaagaagacggtcaattattccaccaactgcacaaggatgccttggacaagcacgacactgctttgtacccacgtttcaagaaatggtgtgatgagtacttctacattacccaccgtaaggaaacacgtggtattggtggtatattctttgacgattatgatgaacgtgacccacaagaaatattgaagatggttgaagactgtttcgatgctttcttgccatcctacttgactatcgtcaagagaagaaaagatatgccatatacaaaggaagaacaacaatggcaggccattagacgtggtagatacgttgaattcaacttaatctacgatagaggtacccaattcggtttgagaaccccaggctctagagttgagtcaattttgatgagtttgcctgaacatgcttcatggttatacaaccaccaccctgctcctggttccagagaagctaaattactagaagttaccaccaaaccaagagagtgggttaaataa

SEQ ID NO: 63335 - protein, 328 aa, Saccharomyces cerevisiae; identical to SEQ ID NO: 53440

SEQ ID NO: 63336 - DNA, 1806 bp, Glycine max
  CDS (244)..(1401)
ccatttgccattggatggcgctgctagaatttgtactggtgccaccagtttcctctcccttttgtcccaaataaataccaaggggcaaaaattaaatgaaaatgatatatatatatttttttatcagtaaattaagtagtgaattaattaattttaaactgcaagcgttgggagaaaggaaggaagaccttatcatctccgaatttcattttcagaagcctctttgggaatcaaatccgaagcatgatgcattgtgcgagcattgtctcggctccgtcctacgcgttcccttttctctctggctccgcttccactactccaactgcgatctcgctcactaagcgcagttggaagccacctccgagcatggcaaaaggcccagtcagagccaccgtttctatagagaaagagaccccggaggccaatcgtcccgaaacgtttctcagaggagtggacgaggcccagtcttccacttcggttcgggcccgcttcgagaagatgataagggaggcccaggacaccgtgtgcagtgccctcgaggccgctgatggtggggcccagttcaaggaggacgtttggtccaggcccggtggcggcggtggcattagcagggtccttcaagacggtgccgtttgggagaaggctggggttaatgtctctgttgtttacggtgtcatgccacctgacgcatatcgtgctgccaagggtgttcctaccgatcaaaaacctggtcctgtgcctttcttcgctgctggaatcagctccgttttacacccaaagaacccgtttgcccctaccctacatttcaactatcgctattttgaaaccgatgctcctaaagatgctcctggagcacctagacaatggtggtttggtgggggaactgacttgacaccagcttacatttttgaggaggatgttaagcacttccattcaattcaaaaacaagcctgtgacaagtttgaacctactttttacccccgattcaagaaatggtgtgatgattacttttatatcaagcatcgaggtgaaaggagagggcttggaggaatattttttgatgatcttaatgactatgatcaggagatgctcctttcctttgctactgaatgtgcaaattctgttattcctgcttatttacctatcatagagaaaaggaaggatttgcccttcaatgatcatcagaaagcatggcaacaattgcgaaggggacgatatgttgaattcaatttggtatatgataggggtacaacatttggactgaaaactggagggagaatagagagtatacttgtttctctcccactgactgctcggtgggaatacgatcataaaccggaagaaggaagcgaagaatggaaactcttggacgcatgcatcaaccccaaggaatggatctaattcatcagttgaccccccaatttgtcagctttttaatttaataataagggagcttgtttcttttttcggtgtatatcaagtgcttgttatgatgagtcagaatgttagcttgttgtactaggtggattgtaaatcacgtattttgctagagtcatccgcgtaaagcgtgaaaatgcagaaaattacaaatgtctaggctgcgtctgtagtatacctactgccaaccattgttctttctacaagtaactcctcaatcccatgtaagaaaacaaaaggcagcttctttaatgccagtattgcacaacacctcagactagtaaattggtaattctgttgaaggtgatataatacttttgactgaaaaaaaaaagaggggctgctatatgtaagatcctatagtttgcc

SEQ ID NO: 63337 - protein, 385 aa, Glycine max; identical to SEQ ID NO: 53446

SEQ ID NO: 63338 - DNA, 1772 bp, Zea mays
  CDS (302)..(1495)
ggttgagcttctcgaggaccgcgggcatgcctttggctgggtcctaatatggcgacagcgccgagaccgcacaaggctgttccttctccttttgcccttggagcaggcgagggtcagcatagcataacccgggagctcgctctcgctcccacctccccctccctccccttttgaccctccctcaccagctgcaaaaccgcgggccgcatcccgcccgcgccgcccaccggcggccacagccgcctacataaaccactaatcgaccactccccgaaccaaaccacccacccacccaaacccaatggcgtccaacctcctctccgccccgtcccgaaccctagctccgtcgccggcgccggcccccgcgggcctccgcgggcgtgtgccggtgcaggcgcacctcccgcgcggcggcctcggcctcgccccccgccgcagcagccgcgcgctccgcgtgcgcgcgtcggtggcgatcgagaaggagacgccggagagcgagccgcccccgacgttcctccgcgaggacgggcacgggtccgggtccgtgcgggcgcggttcgaggccatgatccggcgggtacagggggaggtctgcgccgcgctcgaggaggccgacggcggcggcgcgcgcttcgtcgaggacgtctggtcgcgccccggcgggggcggtggcatcagccgcgtcctgcaggacggccgcgtcttcgagaaggccggggtcaacgtctccgtcgtctacggggtcatgccgcccgacgcctaccgcgccgccaagggggaggccgccaagaacggggccgccgccgcggatggccacaagcctggccccgtgccattcttcgccgcggggattagttcggtgcttcaccccaagaacccatttgctccaacattgcattttaactaccgttactttgagacggatgcaccaaaagatgcacctggtgcaccaagacaatggtggttcggcggtggtactgacttgactccttcatacatcattgaagaggacgtgaagcatttccattctgttcaaaagcaagcatgtgataaatttgatccaagttttcacccaagattcaaaaaatggtgtgatgattatttctatattaagcaccgtaatgagcggcgtgggctaggtggaatattttttgatgaccttaatgattacgatcaagaaatgcttctcaactttgctacagaatgtgcggactctgtacttcctgcgtacataccgatcatagaacggcggaagaacactccgttcaatgaggagcacagggcatggcagcaattgcggagaggtcgttatgtggagttcaaccttgtctacgaccgtggtacaacatttggcctaaagactggaggaaggattgagagcatacttgtgtcccttccgcttacagcacgatggcagtatgatcataaaccggaagaaggaaccgaggaatggaaacttctggaagcctgcataaacccgaaggattggatctgattagccgttattcttgagatcttttgttagagttttcccttctgtagggctaagaccacgtgcagtttcattatatattttgcatctgtagaatcgtgaataaatatgatgtagtaatgctgtagctgtttgtatctatctgctgtttttcccccatgtgaatgagagaaccattggcttctgtatttacgaaggattcaggtttctgaacactatcatttgctactactatgggaaaaaaaaaaaaaaaaaactcgagactagttctctctcgtgc

SEQ ID NO: 63339 - protein, 397 aa, Zea mays; identical to SEQ ID NO: 53444

SEQ ID NO: 63340 - DNA, 1161 bp, Arabidopsis thaliana; identical to SEQ ID NO: 53191
  CDS (1)..(1161)
  misc_feature (1124)..(1124): w is a or t

SEQ ID NO: 63341 - protein, 386 aa, Arabidopsis thaliana; identical to SEQ ID NO: 53192
  misc_feature (375)..(375): The Xaa at location 375 stands for Gln, or Leu.

SEQ ID NO: 63342 - DNA, 1029 bp, Prochlorococcus marinus str. MIT 9301
  CDS (1)..(1029): transl_table=11
atgttgaaagaacctcctaaaaactcgagagaaaaaactaaaaatctcttattaactctacaagacaaaatttgttcaggccttgaaaatgtagatggcaaagggaaatttacagaggaatcctggctaagagacgaaggtggcggtggaagatcaagagtattgaaaaatggttctatttttgagcaagcaggtgttaacttctcggaagtacagggaaaagaattacctcaatctataatctctcaaagacccgaagcaaaaggtcatgaatggtttgccacaggaacttctatggttttgcatcctaagaatccctacattcctacagtgcatctgaattatcgatatttcgaagctggtcctgtttggtggtttgggggaggtgcagatttaacccctttttatccttatctttctgatgtaaggaattttcataatgaacataaaaaagcttgtgagaaagttgatcaagatttgcataaagttttcaaaccatggtgtgatgaatatttcttcttgaagcatagaaatgaatctagaggcataggaggtattttttatgattatcaagatggttcaggcaatatttatagaggaaataatcaaaaaggagaagcatcaaaagcttcacaaaatattggcagatctaatttaaattgggatgatttattttcattagcggaaaactgtgggcaggcattcctcccttcatatttgcctattattgaaaaaagagcttctcaagcatattcatcgaaggaaagagaattccagctatatcgaagaggtagatatgttgaattcaatttagtttgggatagagggacaatttttggactgcaaacaaatggcagaactgaatctatattaatgtccttaccgcctttagctagatgggaatatggatataaagctagaaagaattctcgagaggaatttcttacatcaatatttacaaaaccccaagattggttaaacgataaagagttagagaaattctgtatagagaataatatttttgattaa

SEQ ID NO: 63343 - protein, 342 aa, Prochlorococcus marinus str. MIT 9301
MLKEPPKNSREKTKNLLLTLQDKICSGLENVDGKGKFTEESWLRDEGGGGRSRVLKNGSIFEQAGVNFSEVQGKELPQSIISQRPEAKGHEWFATGTSMVLHPKNPYIPTVHLNYRYFEAGPVWWFGGGADLTPFYPYLSDVRNFHNEHKKACEKVDQDLHKVFKPWCDEYFFLKHRNESRGIGGIFYDYQDGSGNIYRGNNQKGEASKASQNIGRSNLNWDDLFSLAENCGQAFLPSYLPIIEKRASQAYSSKEREFQLYRRGRYVEFNLVWDRGTIFGLQTNGRTESILMSLPPLARWEYGYKARKNSREEFLTSIFTKPQDWLNDKELEKFCIENNIFD

SEQ ID NO: 63344 - DNA, 1176 bp, Bombyx mori; identical to SEQ ID NO: 53193
  CDS (1)..(1176)

SEQ ID NO: 63345 - protein, 391 aa, Bombyx mori; identical to SEQ ID NO: 53194

SEQ ID NO: 63346 - DNA, 933 bp, Oryza sativa (japonica cultivar-group); identical to SEQ ID NO: 53195
  CDS (1)..(933)

SEQ ID NO: 63347 - protein, 310 aa, Oryza sativa (japonica cultivar-group); identical to SEQ ID NO: 53196

SEQ ID NO: 63348 - DNA, 1089 bp, Arabidopsis thaliana; identical to SEQ ID NO: 53197
  CDS (1)..(1089)

SEQ ID NO: 63349 - protein, 362 aa, Arabidopsis thaliana; identical to SEQ ID NO: 53198

SEQ ID NO: 63350 - DNA, 1059 bp, Thermosynechococcus elongatus BP-1; identical to SEQ ID NO: 53203
  CDS (1)..(1059): transl_table=11

SEQ ID NO: 63351 - protein, 352 aa, Thermosynechococcus elongatus BP-1; identical to SEQ ID NO: 53204

SEQ ID NO: 63352 - DNA, 1167 bp, Synechococcus sp. WH 8102; identical to SEQ ID NO: 53205
  CDS (1)..(1167): transl_table=11

SEQ ID NO: 63353 - protein, 388 aa, Synechococcus sp. WH 8102; identical to SEQ ID NO: 53206

SEQ ID NO: 63354 - DNA, 1167 bp, Nasonia vitripennis; identical to SEQ ID NO: 53209
  CDS (1)..(1167)

SEQ ID NO: 63355 - protein, 388 aa, Nasonia vitripennis; identical to SEQ ID NO: 53210

SEQ ID NO: 63356 - DNA, 1257 bp, Magnaporthe grisea 70-15; identical to SEQ ID NO: 53211
  CDS (1)..(1257)

SEQ ID NO: 63357 - protein, 418 aa, Magnaporthe grisea 70-15; identical to SEQ ID NO: 53212

SEQ ID NO: 63358 - DNA, 1227 bp, Gibberella zeae PH-1; identical to SEQ ID NO: 53213
  CDS (1)..(1227)

SEQ ID NO: 63359 - protein, 408 aa, Gibberella zeae PH-1; identical to SEQ ID NO: 53214

SEQ ID NO: 63360 - DNA, 984 bp, Candida glabrata CBS 138; identical to SEQ ID NO: 53215
  CDS (1)..(984)

SEQ ID NO: 63361 - protein, 327 aa, Candida glabrata CBS 138; identical to SEQ ID NO: 53216

SEQ ID NO: 63362 - DNA, 1128 bp, Kluyveromyces lactis NRRL Y-1140; identical to SEQ ID NO: 53217
  CDS (1)..(1128)

SEQ ID NO: 63363 - protein, 375 aa, Kluyveromyces lactis NRRL Y-1140; identical to SEQ ID NO: 53218

SEQ ID NO: 63364 - DNA, 972 bp, Debaryomyces hansenii CBS767; identical to SEQ ID NO: 53219
  CDS (1)..(972)

SEQ ID NO: 63365 - protein, 323 aa, Debaryomyces hansenii CBS767; identical to SEQ ID NO: 53220

SEQ ID NO: 63366 - DNA, 1365 bp, Yarrowia lipolytica CLIB122; identical to SEQ ID NO: 53221
  CDS (1)..(1365)

SEQ ID NO: 63367 - protein, 454 aa, Yarrowia lipolytica CLIB122; identical to SEQ ID NO: 53222

SEQ ID NO: 63368 - DNA, 1071 bp, Apis mellifera; identical to SEQ ID NO: 53223
  CDS (1)..(1071)

SEQ ID NO: 63369 - protein, 356 aa, Apis mellifera; identical to SEQ ID NO: 53224

SEQ ID NO: 63370 - DNA, 1464 bp, Aspergillus nidulans FGSC A4; identical to SEQ ID NO: 53225
  CDS (1)..(1464)

SEQ ID NO: 63371 - protein, 487 aa, Aspergillus nidulans FGSC A4; identical to SEQ ID NO: 53226

SEQ ID NO: 63372 - DNA, 972 bp, Candida albicans SC5314; identical to SEQ ID NO: 53227
  CDS (1)..(972): transl_table=12

SEQ ID NO: 63373 - protein, 323 aa, Candida albicans SC5314; identical to SEQ ID NO: 53228

SEQ ID NO: 63374 - DNA, 1149 bp, Tribolium castaneum; identical to SEQ ID NO: 53231
  CDS (1)..(1149)

SEQ ID NO: 63375 - protein, 382 aa, Tribolium castaneum; identical to SEQ ID NO: 53232

SEQ ID NO: 63376 - DNA, 1029 bp, Prochlorococcus marinus str. AS9601
  CDS (1)..(1029): transl_table=11
atgttgaaagaacctcctaaaaactcgagagaaaaaactaaaaatctcttattaactctacaagacaaaatttgttcaggacttgaaaatgtagatggaaaaggaaaatttacagaggaatcctggctaagagacgaaggtggcggtggaagatctagagtattgaaaaatggttctatttttgagcaagcaggcgtaaatttctcggaagtacaaggaaaagaattacctcaatctataatctctcaaaggcccgaagcaaaaggtcatgaatggtttgctacgggaacttctatggttttgcatcctaagaatccctatattcccacagttcatctgaattatcgatatttcgaagctggtcctgtttggtggtttggaggaggtgcagacttaacccctttttatccttatctttctgatgtaaggaattttcataatgagcataaaaaagcttgtgagaaagttgatcaagatttgcataaagttttcaaaccatggtgtgatgaatatttcttcttgaaacatagaaatgaatctagaggtataggaggtattttttatgattatcaagatggttcaggaaatatttatagaggaaataataaaaatggagaagcatcaaaagcttcacaaaatgttggcagatctaatttaaattgggataatttattttctttagcagaaaactgtgggcaggcattcctaccttcatatttgcccattattgaaaaaagagcttctcaaaaatattcaccgaaagaaagagaattccagctatatcgaagaggtagatatgtcgaattcaatttagtttgggatagagggacgatttttgggctacaaacaaatggcagaactgaatctatattaatgtccttaccgcctttagctagatgggaatatggatataaagctaaaaatggctctcgagaggaatttctcacatcaatttttacaaaaccccaagattggtttaatgataaagagttagaaaaattctgtatggagaataatatttttgattaa

SEQ ID NO: 63377 - protein, 342 aa, Prochlorococcus marinus str. AS9601
MLKEPPKNSREKTKNLLLTLQDKICSGLENVDGKGKFTEESWLRDEGGGGRSRVLKNGSIFEQAGVNFSEVQGKELPQSIISQRPEAKGHEWFATGTSMVLHPKNPYIPTVHLNYRYFEAGPVWWFGGGADLTPFYPYLSDVRNFHNEHKKACEKVDQDLHKVFKPWCDEYFFLKHRNESRGIGGIFYDYQDGSGNIYRGNNKNGEASKASQNVGRSNLNWDNLFSLAENCGQAFLPSYLPIIEKRASQKYSPKEREFQLYRRGRYVEFNLVWDRGTIFGLQTNGRTESILMSLPPLARWEYGYKAKNGSREEFLTSIFTKPQDWFNDKELEKFCMENNIFD

SEQ ID NO: 63378 - DNA, 1029 bp, Prochlorococcus marinus str. MIT 9515
  CDS (1)..(1029): transl_table=11
atgtctaaagaaccccctaataattcaagagaaaagactaagaatctcttactaaaattacaagataatatttgcaaaaacctggaaaatattgatgggaaagcaaaattcactgaggaatcttggcttagagaagaaggtggaggagggagatctagagttttaaaaaatggctcgatttttgagcaggctggagtcaatttctcagaggtatatggtaaagagcttcctcagtcaatcatctcacaaagaccagaagctaaaggtcacgaatggtttgccaccggcacatcaatggtattgcatcctaaaaatcctttcatacccacagttcatcttaattatcgttatttcgaggcaggaccagtttggtggtttggtggaggtgccgatctgactccatattacccttatttatctgatgtgagacattttcataaagagcatagtaatgcctgtgaaaaagttaataaaaaacttcacctggtattcaagccatggtgtgatgaatatttctttttgaaacacagaaatgaatcaagaggaattggaggtatcttttatgactatcaagatggttccggtaatatctataaaggcagcaacaaagatggcaatgcctacaaagaatctaataatattggcgagttaaacttaaattggaataatttatttgcattagcagaaaattgtggagaagcatttttaagttcatatcaaccgataattgaaaaaagagtcagccaaaactacacaaaagaagagagagaatttcaactttatagaagaggacgatacgttgaatttaatttagtttgggacagaggaacaatttttggattacaaacaaatggtagaactgaatctatattaatgtcattgccacccctagctagatgggaatatggttataaagccaagcaaggatctagagaagatttactcactaaaatttttacaaggcctcaagattggcaaaatgataaggttttagaagaattttgtttagaaaataatatttttgattaa

SEQ ID NO: 63379 - protein, 342 aa, Prochlorococcus marinus str. MIT 9515
MSKEPPNNSREKTKNLLLKLQDNICKNLENIDGKAKFTEESWLREEGGGGRSRVLKNGSIFEQAGVNFSEVYGKELPQSIISQRPEAKGHEWFATGTSMVLHPKNPFIPTVHLNYRYFEAGPVWWFGGGADLTPYYPYLSDVRHFHKEHSNACEKVNKKLHLVFKPWCDEYFFLKHRNESRGIGGIFYDYQDGSGNIYKGSNKDGNAYKESNNIGELNLNWNNLFALAENCGEAFLSSYQPIIEKRVSQNYTKEEREFQLYRRGRYVEFNLVWDRGTIFGLQTNGRTESILMSLPPLARWEYGYKAKQGSREDLLTKIFTRPQDWQNDKVLEEFCLENNIFD

SEQ ID NO: 63380 - DNA, 1047 bp, Prochlorococcus marinus str. NATL1A; identical to SEQ ID NO: 53233
  CDS (1)..(1047): transl_table=11

SEQ ID NO: 63381 - protein, 348 aa, Prochlorococcus marinus str. NATL1A; identical to SEQ ID NO: 53234

SEQ ID NO: 63382 - DNA, 1074 bp, Prochlorococcus marinus str. MIT 9303; identical to SEQ ID NO: 53235
  CDS (1)..(1074): transl_table=11

SEQ ID NO: 63383 - protein, 357 aa, Prochlorococcus marinus str. MIT 9303; identical to SEQ ID NO: 53236

SEQ ID NO: 63384 - DNA, 981 bp, Acinetobacter sp. ADP1; identical to SEQ ID NO: 53237
  CDS (1)..(981): transl_table=11

SEQ ID NO: 63385 - protein, 326 aa, Acinetobacter sp. ADP1; identical to SEQ ID NO: 53238

SEQ ID NO: 63386 - DNA, 951 bp, Legionella pneumophila subsp. pneumophila str. Philadelphia 1; identical to SEQ ID NO: 53239
  CDS (1)..(951): transl_table=11

SEQ ID NO: 63387 - protein, 316 aa, Legionella pneumophila subsp. pneumophila str. Philadelphia 1; identical to SEQ ID NO: 53240

SEQ ID NO: 63388 - DNA, 915 bp, Pseudomonas syringae pv. syringae B728a
  CDS (1)..(915): transl_table=11
atgagtacccgtaccgaggccgtaaaagcctacctgctcgacctgcaagaccgtatctgcactgcgcttgaacaggaagatggcagcgcacacttcatggaagatgcctggacgcgtccggcgggcggcggtggtcgcacgcgggtgatcgagaatggcacggtcatcgagaaaggcggtgtcaatttttcccatgttttcggcagcaatctgccgccgtctgccagcgctcatcggcctgaactggccgggcgtggtttcgaggcgctgggcgtttcgctggtgatccatccgcacaacccgcatgtgccgacgtcccacgccaacgtgcgcttcttcattgccgagaaagaaggtgaagaggccgtctggtggttcggtggcggtttcgacctgacgccctattacggcgtcgaggaagactgcgtgcactggcaccgggttgccgagcgcgcctgtgcgcccttcggtgaggatgtctacccgcgctacaaggcctggtgcgacagttacttccacctcaagcatcgcgatgaaccgcgcggcatcggtggtctgtttttcgatgacgtgaaccagtgggatttcgacaccagcttcgccttcatccgcgccatcggtgatgcgttcatcaatgcctatctgccgatcgtgcggcggcgcaaggcggcggcctataccgtgcagcagcgtgagtttcaggaattccgtcgtggtcgctacgtcgagttcaacctggtgtatgaccgcggcacgttgttcggtctgcaatcgggtgggcgtaccgaatcgatcctcatgtcgctgccgccgcaagtgcgctggggttatgactggaaggccgcgccgggcagcgaagaagcgcgtctgaccgaatacttcctgaccgaccgcgactggctggcggaaaactga

SEQ ID NO: 63389 - protein, 304 aa, Pseudomonas syringae pv. syringae B728a
MSTRTEAVKAYLLDLQDRICTALEQEDGSAHFMEDAWTRPAGGGGRTRVIENGTVIEKGGVNFSHVFGSNLPPSASAHRPELAGRGFEALGVSLVIHPHNPHVPTSHANVRFFIAEKEGEEAVWWFGGGFDLTPYYGVEEDCVHWHRVAERACAPFGEDVYPRYKAWCDSYFHLKHRDEPRGIGGLFFDDVNQWDFDTSFAFIRAIGDAFINAYLPIVRRRKAAAYTVQQREFQEFRRGRYVEFNLVYDRGTLFGLQSGGRTESILMSLPPQVRWGYDWKAAPGSEEARLTEYFLTDRDWLAEN

SEQ ID NO: 63390 - DNA, 1011 bp, Psychrobacter arcticus 273-4; identical to SEQ ID NO: 53247
  CDS (1)..(1011): transl_table=11

SEQ ID NO: 63391 - protein, 336 aa, Psychrobacter arcticus 273-4; identical to SEQ ID NO: 53248

SEQ ID NO: 63392 - DNA, 939 bp, Colwellia psychrerythraea 34H; identical to SEQ ID NO: 53249
  CDS (1)..(939): transl_table=11

SEQ ID NO: 63393 - protein, 312 aa, Colwellia psychrerythraea 34H; identical to SEQ ID NO: 53250

SEQ ID NO: 63394 - DNA, 915 bp, Pseudomonas syringae pv. phaseolicola 1448A; identical to SEQ ID NO: 53251
  CDS (1)..(915): transl_table=11

SEQ ID NO: 63395 - protein, 304 aa, Pseudomonas syringae pv. phaseolicola 1448A; identical to SEQ ID NO: 53252

SEQ ID NO: 63396 - DNA, 1047 bp, Prochlorococcus marinus str. NATL2A; identical to SEQ ID NO: 53255
  CDS (1)..(1047): transl_table=11

SEQ ID NO: 63397 - protein, 348 aa, Prochlorococcus marinus str. NATL2A; identical to SEQ ID NO: 53256

SEQ ID NO: 63398 - DNA, 912 bp, Thiobacillus denitrificans ATCC 25259; identical to SEQ ID NO: 53259
  CDS (1)..(912): transl_table=11

SEQ ID NO: 63399 - protein, 303 aa, Thiobacillus denitrificans ATCC 25259; identical to SEQ ID NO: 53260

SEQ ID NO: 63400 - DNA, 1044 bp, Anabaena variabilis ATCC 29413; identical to SEQ ID NO: 53261
  CDS (1)..(1044): transl_table=11

SEQ ID NO: 63401 - protein, 347 aa, Anabaena variabilis ATCC 29413; identical to SEQ ID NO: 53262

SEQ ID NO: 63402 - DNA, 1044 bp, Anabaena variabilis ATCC 29413; identical to SEQ ID NO: 53263
  CDS (1)..(1044): transl_table=11

SEQ ID NO: 63403 - protein, 347 aa, Anabaena variabilis ATCC 29413; identical to SEQ ID NO: 53264

SEQ ID NO: 63404 - DNA, 876 bp, Rhodobacter sphaeroides 2.4.1; identical to SEQ ID NO: 53267
  CDS (1)..(876): transl_table=11

SEQ ID NO: 63405 - protein, 291 aa, Rhodobacter sphaeroides 2.4.1; identical to SEQ ID NO: 53268

SEQ ID NO: 63406 - DNA, 924 bp, Burkholderia sp. 383; identical to SEQ ID NO: 53269
  CDS (1)..(924): transl_table=11

SEQ ID NO: 63407 - protein, 307 aa, Burkholderia sp. 383; identical to SEQ ID NO: 53270

SEQ ID NO: 63408 - DNA, 1089 bp, Synechococcus sp. CC9605
  CDS (1)..(1089): transl_table=11
atggtccgctccctgattcgccgcgtcctcggacgccaggacgtgggtgtcagcaacgctccccttgagctgcccccaagcgattccagagagcgggctcgggcgatggtgatggggctgcaggatcaaatctgtgcaggcctggaagccctcgacggtgaaggtcgcttcgttgaggagagttgggtgcggcatgaagggggtggggggcgctcccgggtgatgcgtgagggccgcgtctttgaacagggcggcgtgaatttctccgaagttcaaggcgaagaactgcccccgtcgatcctcaagcagcgtccagaggcgaaggggcatccctggttcgccaccggaacctcgatggttctgcatccgcgcaacccctacatcccgacggttcacctcaactaccgctacttcgaggctggcccggtgtggtggttcggcggcggtgccgacctgacgccgtactacccgtttctcgacgacgcccgtcatttccatcgcacccatcaggcggcctgtgattcggttcacccggatctgcacaaggtgttcaagccctggtgcgatgaatacttctatttgaagcaccgcggtgaaacccgcggcgtcggcggcatcttctacgactaccaagatgccaacggcaccctctacaagggtcaggatccctccggtcctgcggctcaggtgtccgccagcttgggagctcggccgctgagttgggagcagctgttctccttggggcaggccaacggcagagccttccttcccgcctacgcccccatcgtggagaagcgtcatccgatggcctatggcgatcgcgagagggattttcaactctatcgacggggccgatatgtggagttcaacctggtctgggaccgcggcacgatcttcggtctgcagaccaatggacgcacggaatcgatcctgatgtctctgcccccgctggtgcgttgggagtacggctacaccgcagaggccggatcacgggaagccctgctgaccgaactgttcaccaagcctcaggactggctgggtgatgcctcgctggatgagcgctgccgaccccatggagcgatcaattaa

SEQ ID NO: 63409 - protein, 362 aa, Synechococcus sp. CC9605
MVRSLIRRVLGRQDVGVSNAPLELPPSDSRERARAMVMGLQDQICAGLEALDGEGRFVEESWVRHEGGGGRSRVMREGRVFEQGGVNFSEVQGEELPPSILKQRPEAKGHPWFATGTSMVLHPRNPYIPTVHLNYRYFEAGPVWWFGGGADLTPYYPFLDDARHFHRTHQAACDSVHPDLHKVFKPWCDEYFYLKHRGETRGVGGIFYDYQDANGTLYKGQDPSGPAAQVSASLGARPLSWEQLFSLGQANGRAFLPAYAPIVEKRHPMAYGDRERDFQLYRRGRYVEFNLVWDRGTIFGLQTNGRTESILMSLPPLVRWEYGYTAEAGSREALLTELFTKPQDWLGDASLDERCRPHGAIN

SEQ ID NO: 63410 - DNA, 1029 bp, Prochlorococcus marinus str. MIT 9312; identical to SEQ ID NO: 53271
  CDS (1)..(1029): transl_table=11

SEQ ID NO: 63411 - protein, 342 aa, Prochlorococcus marinus str. MIT 9312; identical to SEQ ID NO: 53272

SEQ ID NO: 63412 - DNA, 954 bp, Synechococcus elongatus PCC 7942; identical to SEQ ID NO: 53273
  CDS (1)..(954): transl_table=11

SEQ ID NO: 63413 - protein, 317 aa, Synechococcus elongatus PCC 7942; identical to SEQ ID NO: 53274

SEQ ID NO: 63414 - DNA, 927 bp, Francisella tularensis subsp. holarctica; identical to SEQ ID NO: 53281
  CDS (1)..(927): transl_table=11

SEQ ID NO: 63415 - protein, 308 aa, Francisella tularensis subsp. holarctica; identical to SEQ ID NO: 53282

SEQ ID NO: 63416 - DNA, 912 bp, Saccharophagus degradans 2-40; identical to SEQ ID NO: 53283
  CDS (1)..(912): transl_table=11

SEQ ID NO: 63417 - protein, 303 aa, Saccharophagus degradans 2-40; identical to SEQ ID NO: 53284

SEQ ID NO: 63418 - DNA, 909 bp, Methylobacillus flagellatus KT; identical to SEQ ID NO: 53285
  CDS (1)..(909): transl_table=11

SEQ ID NO: 63419 - protein, 302 aa, Methylobacillus flagellatus KT; identical to SEQ ID NO: 53286

SEQ ID NO: 63420 - DNA, 906 bp, Myxococcus xanthus DK 1622; identical to SEQ ID NO: 53291
  CDS (1)..(906): transl_table=11

SEQ ID NO: 63421 - protein, 301 aa, Myxococcus xanthus DK 1622; identical to SEQ ID NO: 53292

SEQ ID NO: 63422 - DNA, 915 bp, Mesorhizobium sp. BNC1; identical to SEQ ID NO: 53293
  CDS (1)..(915): transl_table=11

SEQ ID NO: 63423 - protein, 304 aa, Mesorhizobium sp. BNC1; identical to SEQ ID NO: 53294

SEQ ID NO: 63424 - DNA, 1032 bp, Trichodesmium erythraeum IMS101; identical to SEQ ID NO: 53297
  CDS (1)..(1032): transl_table=11

SEQ ID NO: 63425 - protein, 343 aa, Trichodesmium erythraeum IMS101; identical to SEQ ID NO: 53298

SEQ ID NO: 63426 - DNA, 1047 bp, Synechococcus sp. CC9311
  CDS (1)..(1047): transl_table=11
ttgctctcctcggatgccacgggggagcgaccgccgtccgattcccgcacgcgagcccgggcgctcgtgcagggcctccaaaatgaaatttgcgctggtctggagcaactggatggcagcgcccatttccaggaagaaagctgggatcgtccggaaggcggtggtgggcgctcgagggtgatgaccgaagggcgagtgtttgagcagggaggggtgaatttttctgaggttcacggcaaagaactgcccccttcgatccttaagcagcgtcctgacgccaaaggacatccttggttcgcaacgggaacgtcgatggtcttgcatccgcgcaatcccttcatcccgactgttcatttgaactatcgctacttcgaggcaggccctgtttggtggtttggaggtggtgctgatctcacgcccttctatccgtttctcgaggatgctcgacacttccatcgtgagcacaagcgggcctgtgattccattgatcccaagctttacaccgtgtttaaaccttggtgcgatgaatattttttcctgaagcaccgcaaggagacaaggggcatcggtgggattttctacgattatcaagacggcagtggtcgcttgtatcgggggcaggatccagagggtcctgccgcacgtcaagccgctgatattgggtcgtttcgcctcggttgggatcagctacacgatctcgcacgcgcttgtggacaagccttcctgcctgcctacacaccgattgttgagaagcgcaatccgcttccctatggagagagagagcgtcaatttcagctctaccgacgtggccgctacgtggaattcaatttggtctgggatcggggcacgatttttggactgcagaccaatggtcgtaccgaatcgatcttgatgtctcttcctccgatggcacgctggcagtacggctatcgagccccagaaggatcccgagaagaattgctcacagatctatttacccgtccgcaggattggtttggggatccgaccctggaggaccgttgccgcccccatcaggcgatcgattga

SEQ ID NO: 63427 - protein, 348 aa, Synechococcus sp. CC9311
MLSSDATGERPPSDSRTRARALVQGLQNEICAGLEQLDGSAHFQEESWDRPEGGGGRSRVMTEGRVFEQGGVNFSEVHGKELPPSILKQRPDAKGHPWFATGTSMVLHPRNPFIPTVHLNYRYFEAGPVWWFGGGADLTPFYPFLEDARHFHREHKRACDSIDPKLYTVFKPWCDEYFFLKHRKETRGIGGIFYDYQDGSGRLYRGQDPEGPAARQAADIGSFRLGWDQLHDLARACGQAFLPAYTPIVEKRNPLPYGERERQFQLYRRGRYVEFNLVWDRGTIFGLQTNGRTESILMSLPPMARWQYGYRAPEGSREELLTDLFTRPQDWFGDPTLEDRCRPHQAID

SEQ ID NO: 63428 - DNA, 909 bp, Shewanella sp. MR-4; identical to SEQ ID NO: 53299
  CDS (1)..(909): transl_table=11

SEQ ID NO: 63429 - protein, 302 aa, Shewanella sp. MR-4; identical to SEQ ID NO: 53300

SEQ ID NO: 63430 - DNA, 909 bp, Shewanella sp. ANA-3; identical to SEQ ID NO: 53307
  CDS (1)..(909): transl_table=11

SEQ ID NO: 63431 - protein, 302 aa, Shewanella sp. ANA-3; identical to SEQ ID NO: 53308

SEQ ID NO: 63432 - DNA, 915 bp, Azoarcus sp. BH72; identical to SEQ ID NO: 53309
  CDS (1)..(915): transl_table=11

SEQ ID NO: 63433 - protein, 304 aa, Azoarcus sp. BH72; identical to SEQ ID NO: 53310

SEQ ID NO: 63434 - DNA, 981 bp, Burkholderia vietnamiensis G4; identical to SEQ ID NO: 53313
  CDS (1)..(981): transl_table=11

SEQ ID NO: 63435 - protein, 326 aa, Burkholderia vietnamiensis G4; identical to SEQ ID NO: 53314

SEQ ID NO: 63436 - DNA, 1032 bp, Crocosphaera watsonii WH 8501; identical to SEQ ID NO: 53315
  CDS (1)..(1032): transl_table=11

SEQ ID NO: 63437 - protein, 343 aa, Crocosphaera watsonii WH 8501; identical to SEQ ID NO: 53316

SEQ ID NO: 63438 - DNA, 903 bp, Croceibacter atlanticus HTCC2559; identical to SEQ ID NO: 53319
  CDS (1)..(903): transl_table=11

SEQ ID NO: 63439 - protein, 300 aa, Croceibacter atlanticus HTCC2559; identical to SEQ ID NO: 53320

SEQ ID NO: 63440 - DNA, 1128 bp, Prochlorococcus marinus str. MIT 9211; identical to SEQ ID NO: 53327
  CDS (1)..(1128): transl_table=11

SEQ ID NO: 63441 - protein, 375 aa, Prochlorococcus marinus str. MIT 9211; identical to SEQ ID NO: 53328

SEQ ID NO: 63442 - DNA, 1056 bp, Synechococcus sp. RS9917; identical to SEQ ID NO: 53331
  CDS (1)..(1056): transl_table=11

SEQ ID NO: 63443 - protein, 351 aa, Synechococcus sp. RS9917; identical to SEQ ID NO: 53332

SEQ ID NO: 63444 - DNA, 1086 bp, Synechococcus sp. WH 5701; identical to SEQ ID NO: 53333
  CDS (1)..(1086): transl_table=11

SEQ ID NO: 63445 - protein, 361 aa, Synechococcus sp. WH 5701; identical to SEQ ID NO: 53334

SEQ ID NO: 63446 - DNA, 1104 bp, Synechococcus sp. WH 7805
  CDS (1)..(1104): transl_table=11
atgattcgttccctgttcaagcgttggaaggggcagccaccggaggacagtctggtgtcaagcacctctgagatgcccggggaacgccctccagccgactcgcgtgagcgggcgcgggcgcttgtaatggctcttcaggatgagatctgtgctggcctggagcagatcgatgggtctggccgcttcaaagaggagagctgggagcggccagaaggtggtggcggtcgttccagggtgatgcgtgaaggacggatctttgagcagggcggggtgaatttctccgaggttcagggtgaggagctccctccatccatcctcaaacagcggcctgaggccaaggggcatccgtggttcgccactggaacatccatggttttgcatccccggaacccctttgttccaacggttcatctcaactaccgctatttcgaggccggtccggtgtggtggttcggaggcggtgccgatctcacccccttctatcccttcttggaggatgcccgtcacttccaccgcactcatcaagaggcgtgcgattccgtggatgatcgtctctatcaggtgttcaagccctggtgtgatgagtacttcttccttaagcaccgtcaggaaacacggggaatcggagggattttctacgactaccaggatggttccggacgtctttaccggggacaggatcctgagggtcctgcagcgcgcaaggcttcggagatcggcgcggtgcccttgagctgggaacagctttttgcactggctggtgccaacggacgggcgtttctgcctgcttatgcgcccatcatcgagagacggaatgggttgtcctatggagaccgtgagcgccagttccagctgtatcgccggggtcgatacgtggaattcaatctggtctgggatcgcggcacgatctttggattgcagacgaacggacgcaccgaatccatcctgatgtcgcttccgccactggcccggtgggagtacgcctaccagcctgagccgggatccagagaagctttgctcaccgatctcttcacccgtcctcaggactggttcggtgatccttccctcgaggatcgctgccgcccccaccaagctgtgaactga

SEQ ID NO: 63447 - protein, 367 aa, Synechococcus sp. WH 7805
MIRSLFKRWKGQPPEDSLVSSTSEMPGERPPADSRERARALVMALQDEICAGLEQIDGSGRFKEESWERPEGGGGRSRVMREGRIFEQGGVNFSEVQGEELPPSILKQRPEAKGHPWFATGTSMVLHPRNPFVPTVHLNYRYFEAGPVWWFGGGADLTPFYPFLEDARHFHRTHQEACDSVDDRLYQVFKPWCDEYFFLKHRQETRGIGGIFYDYQDGSGRLYRGQDPEGPAARKASEIGAVPLSWEQLFALAGANGRAFLPAYAPIIERRNGLSYGDRERQFQLYRRGRYVEFNLVWDRGTIFGLQTNGRTESILMSLPPLARWEYAYQPEPGSREALLTDLFTRPQDWFGDPSLEDRCRPHQAVN

SEQ ID NO: 63448 - DNA, 912 bp, Pseudoalteromonas tunicata D2; identical to SEQ ID NO: 53335
  CDS (1)..(912): transl_table=11

SEQ ID NO: 63449 - protein, 303 aa, Pseudoalteromonas tunicata D2; identical to SEQ ID NO: 53336

SEQ ID NO: 63450 - DNA, 906 bp, Flavobacteria bacterium BBFL7; identical to SEQ ID NO: 53343
  CDS (1)..(906): transl_table=11

SEQ ID NO: 63451 - protein, 301 aa, Flavobacteria bacterium BBFL7; identical to SEQ ID NO: 53344

SEQ ID NO: 63452 - DNA, 918 bp, marine gamma proteobacterium HTCC2207; identical to SEQ ID NO: 53345
  CDS (1)..(918): transl_table=11

SEQ ID NO: 63453 - protein, 305 aa, marine gamma proteobacterium HTCC2207; identical to SEQ ID NO: 53346

SEQ ID NO: 63454 - DNA, 978 bp, Synechococcus sp. RS9916; identical to SEQ ID NO: 53351
  CDS (1)..(978): transl_table=11

SEQ ID NO: 63455 - protein, 325 aa, Synechococcus sp. RS9916; identical to SEQ ID NO: 53352

SEQ ID NO: 63456 - DNA, 909 bp, marine gamma proteobacterium HTCC2143
  CDS (1)..(909): transl_table=11
atgagtgaaataccggtagatcaagttaaagcctatctcttaaaccttcagaacacgatttgtgatcaattagagcaagaagacggcggcgctacgtttttacaggatgaatggttacggccagaaggtggcggcggtcgctcgcgtgttctaaccgacggggctgtgattgaaaaaggtggcgttaacttctcccatgtatttggcaagggcttgcctccttctgcgacgcaagccagacctgagctggcgggaagaagctttcaggctatgggtgtgtctttggtcatacatcctaaaaatccttatgttcccacgagtcacgctaatgttcgcttgtttattgctgaaaaagagggtgaagaccccgtctggtggttcggaggcggatacgatttaaccccatattacgccgacgaagatgattgtatcgcctggcatcggactgctaaagaagcctgtgagccttttggtgagaaggtttaccaggattataaacaatggtgcgatgactacttttttcttccgcaccgaaatgaacctcgcggtattggcggtctatttttcgatgatcttaatgaaggtgggtttgagcgctgttttggtttgatgcaggctattggtaattcctatgttgaggcgtatcgtcccatcatggctaagaaaaaagagatgccctttggtgcacgcgagcgtgattttcagttgtaccgccgtggtcgctacgttgaattcaatcttgtgcaagatcgtggcaccatctttggcttgcaatccaatggtcgaacagaatcaatcttaatgtctctgccgccactggtgagctgggtatacgactggacaccggaggaaggcagtgcagaagctgcgttaaccgagaaatttctaatagccaaagactgggtgtaa

SEQ ID NO: 63457 - protein, 302 aa, marine gamma proteobacterium HTCC2143
MSEIPVDQVKAYLLNLQNTICDQLEQEDGGATFLQDEWLRPEGGGGRSRVLTDGAVIEKGGVNFSHVFGKGLPPSATQARPELAGRSFQAMGVSLVIHPKNPYVPTSHANVRLFIAEKEGEDPVWWFGGGYDLTPYYADEDDCIAWHRTAKEACEPFGEKVYQDYKQWCDDYFFLPHRNEPRGIGGLFFDDLNEGGFERCFGLMQAIGNSYVEAYRPIMAKKKEMPFGARERDFQLYRRGRYVEFNLVQDRGTIFGLQSNGRTESILMSLPPLVSWVYDWTPEEGSAEAALTEKFLIAKDWV

SEQ ID NO: 63458 - DNA, 927 bp, marine gamma proteobacterium HTCC2080; identical to SEQ ID NO: 53355
  CDS (1)..(927): transl_table=11

SEQ ID NO: 63459 - protein, 308 aa, marine gamma proteobacterium HTCC2080; identical to SEQ ID NO: 53356

SEQ ID NO: 63460 - DNA, 912 bp, Pseudomonas putida GB-1
  CDS (1)..(912): transl_table=11
atgactagccgcaccgaggccgtgaaagcctacctgctcgacctgcaagaccgcatctgctctgccctcgaaacagaagacggcggcgcccgcttcgtcgaggatgcctgggtgcgcgaagccggtggcgggggccgcacgcgggtgatcggcgacggcaaggtgatcgagaaaggcggggtcaacttctcccatgtgtttggtgccggcctgccgccctcggccagtgcccaccgccctgaactggctggccgtggcttcgaggccctgggtgtgtcgctggtgattcacccgcacaacccgcatgtgcccacttctcatgccaatgtgcggttcttcatcgccgagaaggaaggtgaagaagccgtgtggtggtttggcggcggcttcgacctgacgccgtactacggcaatgaagaagattgcatccactggcaccgtgtggccgagcaggcctgcgcgcccttcggcgccgacgtgtacccacgctacaaagcctggtgcgaccgctacttccacctcaagcaccgtggcgagccacgcggtatcggcggcctgttcttcgatgacctgaacgagtgggacttcgacacctgcttcgccttcatccgcgccattggcgatgcctacgtcaacgcctacctgccgatcgtccagcgccgcaaggacacgccttacaccccgcagcagcgcgagttccaggaataccgtcgcggccgttacgtggagttcaacctggtgtacgaccgtggcaccctgttcggcctgcagtccggtggccgcaccgagtccatcctcatgtcgctgccgcctcaggtgcgttggggctacgactggaaggctgcgcccggcagcgaagaagcgcgcctgaccgagtacttcctgcaggaccgcgactggctcggccagtaa

SEQ ID NO: 63461 - protein, 303 aa, Pseudomonas putida GB-1
MTSRTEAVKAYLLDLQDRICSALETEDGGARFVEDAWVREAGGGGRTRVIGDGKVIEKGGVNFSHVFGAGLPPSASAHRPELAGRGFEALGVSLVIHPHNPHVPTSHANVRFFIAEKEGEEAVWWFGGGFDLTPYYGNEEDCIHWHRVAEQACAPFGADVYPRYKAWCDRYFHLKHRGEPRGIGGLFFDDLNEWDFDTCFAFIRAIGDAYVNAYLPIVQRRKDTPYTPQQREFQEYRRGRYVEFNLVYDRGTLFGLQSGGRTESILMSLPPQVRWGYDWKAAPGSEEARLTEYFLQDRDWLGQ

SEQ ID NO: 63462 - DNA, 1323 bp, Aspergillus niger; identical to SEQ ID NO: 53357
  CDS (1)..(1323)

SEQ ID NO: 63463 - protein, 440 aa, Aspergillus niger; identical to SEQ ID NO: 53358

SEQ ID NO: 63464 - DNA, 1200 bp, Oryza sativa; identical to SEQ ID NO: 53359
  CDS (1)..(1200)

SEQ ID NO: 63465 - protein, 399 aa, Oryza sativa; identical to SEQ ID NO: 53360

SEQ ID NO: 63466 - DNA, 1444 bp, Zea mays; identical to SEQ ID NO: 53361
  CDS (4)..(1266)

SEQ ID NO: 63467 - protein, 420 aa, Zea mays; identical to SEQ ID NO: 53362

SEQ ID NO: 63468 - DNA, 1645 bp, Zea mays; identical to SEQ ID NO: 53363
  CDS (232)..(1434)

SEQ ID NO: 63469 - protein, 400 aa, Zea mays; identical to SEQ ID NO: 53364

SEQ ID NO: 63470 - DNA, 1314 bp, Aspergillus oryzae; identical to SEQ ID NO: 53365
  CDS (1)..(1314)

SEQ ID NO: 63471 - protein, 437 aa, Aspergillus oryzae; identical to SEQ ID NO: 53366

SEQ ID NO: 63472 - DNA, 1606 bp, Chlamydomonas reinhardtii
  CDS (194)..(1243)
ttcaactgtagatctattgttgtgtttttaatgtgaggacaatacccacataattttcatctacaaattctgcttctggtccagttcaaccaagcagcttcacatttgctgcattcgcttcgcatttcacccccgaccttacgcttaatcgcacatccttgaactcggaggagatctgctagcactagacgccatgctgaggaagcagattggtggatctggccagcagcgggcgggcctccgacgggtgaaccaaggacctgcgcgtcggcggttggcaccctgccgcgtggcggcccccgtgcaaacctcgtcctccgtcgccacattcaatggcttcgtggactacattcacggactccagaagaacattctgagcactgctgaggatctggagaacggcgagcggaagtttgttgttgaccgctgggagcgcgacgccagcaaccccaacgccgggtatggcattacgtgcgtgcttgaggacgggaaggtgctggagaaggccgcagccaatatctcagtggtgcgcgggacgctgtcggcgcagcgcgcagtggccatgagctcccgcggccgcagcagcatcgaccccaagggcgggcagccctacgccgcggccgccatgagcctagtgttccacagcgcgcacccgctcatccccacgctgcgcgcagacgtgcggttgttccaggtgggcgatgaggcgtggtacggcggtggctgtgacctgacgcccaactacctagacgtggaggactcgcagtccttccaccgctactggaaggacgtgtgcggcaagtacaagccgggcctgtacaccgagctcaaggagtggtgcgacaggtacttctacatcccggcccgcaaagagcaccgtggcattggcggcctgttctttgatgacatggccactgcggaggcgggctgcgatgtggaggcgtttgtgcgggaagtgggagatggcatcctgccctgctggctgcccatcgtggcgcggcaccgtggccagcccttcacggagcagcagcggcaatggcagctgctgcgccgcggtcgctacatcgagttcaacctgctgtacgaccgcggcatcaagttcggtctggacggcggccgcatcgagagcatcatggtgtcggcgccgccgctgatcgcgtggaagtacaacgtggtgccacagccgggcagccccgaggaggagatgctgaaggtgcttcagcagccccgcgagtgggcctgagccttgcaaacgcaacgcttgtcttgtgcgcggagtgttgaggcggacggggtttgattgtttgctgtacggtttgttggtctggggattgggggagaggtgtgagtggcgcaagcagaatgctgtcgtgttgtctgtgaccctgcgccgccggcaggaaggaagacgtttggttgcctttggcaggaggccttggcattgtgcgttgcgtgttgtatggtatccaaatagagtcgggtccaacttcaaagccataggacggccagggttgtgactgcggtacgcacgcctgctacgagcagggcgtgcaaaagacggcaatattgtaacgactggatgagcgaaaaaaaaaaaaaaaaaaaa

SEQ ID NO: 63473 - protein, 349 aa, Chlamydomonas reinhardtii
MLRKQIGGSGQQRAGLRRVNQGPARRRLAPCRVAAPVQTSSSVATFNGFVDYIHGLQKNILSTAEDLENGERKFVVDRWERDASNPNAGYGITCVLEDGKVLEKAAANISVVRGTLSAQRAVAMSSRGRSSIDPKGGQPYAAAAMSLVFHSAHPLIPTLRADVRLFQVGDEAWYGGGCDLTPNYLDVEDSQSFHRYWKDVCGKYKPGLYTELKEWCDRYFYIPARKEHRGIGGLFFDDMATAEAGCDVEAFVREVGDGILPCWLPIVARHRGQPFTEQQRQWQLLRRGRYIEFNLLYDRGIKFGLDGGRIESIMVSAPPLIAWKYNVVPQPGSPEEEMLKVLQQPREWA

SEQ ID NO: 63474 - DNA, 1011 bp, Cryptococcus neoformans; identical to SEQ ID NO: 53367
  CDS (1)..(1011)

SEQ ID NO: 63475 - protein, 336 aa, Cryptococcus neoformans; identical to SEQ ID NO: 53368

SEQ ID NO: 63476 - DNA, 1809 bp, Ostreococcus tauri; identical to SEQ ID NO: 53369
  CDS (1)..(1149)

SEQ ID NO: 63477 - protein, 382 aa, Ostreococcus tauri; identical to SEQ ID NO: 53370

SEQ ID NO: 63478 - DNA, 1173 bp, Aplysia californica; identical to SEQ ID NO: 53371
  CDS (1)..(1173)

SEQ ID NO: 63479 - protein, 390 aa, Aplysia californica; identical to SEQ ID NO: 53372

SEQ ID NO: 63480 - DNA, 2028 bp, Chlamydomonas reinhardtii; identical to SEQ ID NO: 53373
  CDS (160)..(1257)

SEQ ID NO: 63481 - protein, 365 aa, Chlamydomonas reinhardtii; identical to SEQ ID NO: 53374

SEQ ID NO: 63482 - DNA, 912 bp, Agrobacterium tumefaciens; identical to SEQ ID NO: 53375
  CDS (1)..(912): transl_table=11

SEQ ID NO: 63483 - protein, 303 aa, Agrobacterium tumefaciens; identical to SEQ ID NO: 53376

SEQ ID NO: 63484 - DNA, 1161 bp, Arabidopsis thaliana; identical to SEQ ID NO: 53377
  CDS (1)..(1161)

SEQ ID NO: 63485 - protein, 386 aa, Arabidopsis thaliana; identical to SEQ ID NO: 53378

SEQ ID NO: 63486 - DNA, 912 bp, Bordetella bronchiseptica; identical to SEQ ID NO: 53379
  CDS (1)..(912): transl_table=11

SEQ ID NO: 63487 - protein, 303 aa, Bordetella bronchiseptica; identical to SEQ ID NO: 53380

SEQ ID NO: 63488 - DNA, 912 bp, Bordetella pertussis
  CDS (1)..(912): transl_table=11
atgaccgccgtagccattcccgccgtacgcgactacctcaccgacctgcaaggccgcatcgtcgccgcgctcgaacaggccggcggcgaggcgtttcgcaccgatgcctggcaacgcgccgagggcggcggcggcgtgtcgcgcctgctcgagggcggccaactgttcgaacgcgccggcgtgctgttcagccatgtcaagggcacgcgcctgccgccatcggccagcgcccaccgccccgagctggccggccgcggctgggaagccatgggcgtctccatggtcctgcacccgcgcaacccctatgtgcccaccacgcacatgaacgtgcgcatgttcgtggccgccgcgcgccccgggcatgccgaatccgacgtgttctggttcggcggcgggctcgacctcaccccgtactacccgttcgaggacgacgcgcgccatttccaccgcgcctgccgcgacgcgctggacccgcacggcgccgattactacccgcgctacaagcagtggtgcgacgaatacttcttcctcaagcaccgcaacgaaacccgcggcatcggcggcatcttcttcgacgatctgaacgaacccggcttcgacgcctcgttcgcgctcacgtgctcggtcggcgacagcttcctgcccgcctacctgcccatcgtccaggcccgccgcgacatgccctacggcgaacgcgaacgcgacttccaggcctaccggcgcggccgctacgtcgaattcaacctggtgttcgaccgcggcaccctgttcggcctgcaatcgggcggccgcaccgaatccatcctgctgtccatgccgccgctggcgcaatggcgctacgattggcagccgcaggccggcacgcccgaagccgccctggccgagttcctgcgaccccgggaatgggtgtga

SEQ ID NO: 63489 - protein, 303 aa, Bordetella pertussis
MTAVAIPAVRDYLTDLQGRIVAALEQAGGEAFRTDAWQRAEGGGGVSRLLEGGQLFERAGVLFSHVKGTRLPPSASAHRPELAGRGWEAMGVSMVLHPRNPYVPTTHMNVRMFVAAARPGHAESDVFWFGGGLDLTPYYPFEDDARHFHRACRDALDPHGADYYPRYKQWCDEYFFLKHRNETRGIGGIFFDDLNEPGFDASFALTCSVGDSFLPAYLPIVQARRDMPYGERERDFQAYRRGRYVEFNLVFDRGTLFGLQSGGRTESILLSMPPLAQWRYDWQPQAGTPEAALAEFLRPREWV

SEQ ID NO: 63490 - DNA, 951 bp, Bradyrhizobium japonicum; identical to SEQ ID NO: 53381
  CDS (1)..(951): transl_table=11

SEQ ID NO: 63491 - protein, 316 aa, Bradyrhizobium japonicum; identical to SEQ ID NO: 53382

SEQ ID NO: 63492 - DNA, 909 bp, Chromobacterium violaceum; identical to SEQ ID NO: 53383
  CDS (1)..(909): transl_table=11

SEQ ID NO: 63493 - protein, 302 aa, Chromobacterium violaceum; identical to SEQ ID NO: 53384

SEQ ID NO: 63494 - DNA, 1173 bp, Drosophila melanogaster; identical to SEQ ID NO: 53387
  CDS (1)..(1173)

SEQ ID NO: 63495 - protein, 390 aa, Drosophila melanogaster; identical to SEQ ID NO: 53388

SEQ ID NO: 63496 - DNA, 900 bp, Escherichia coli; identical to SEQ ID NO: 53391
  CDS (1)..(900): transl_table=11

SEQ ID NO: 63497 - protein, 299 aa, Escherichia coli [sequence omitted]

SEQ ID NO: 63498 - DNA, 870 bp, Gloeobacter violaceus; identical to SEQ ID NO: 53393
  CDS (1)..(870): transl_table=11

SEQ ID NO: 63499 - protein, 289 aa, Gloeobacter violaceus; identical to SEQ ID NO: 53394

SEQ ID NO: 63500 - DNA, 1456 bp, Hordeum vulgare; identical to SEQ ID NO: 53395
  CDS (59)..(1234)

SEQ ID NO: 63501 - protein, 391 aa, Hordeum vulgare; identical to SEQ ID NO: 53396

SEQ ID NO: 63502 - DNA, 915 bp, Idiomarina loihiensis; identical to SEQ ID NO: 53397
  CDS (1)..(915): transl_table=11

SEQ ID NO: 63503 - protein, 304 aa, Idiomarina loihiensis; identical to SEQ ID NO: 53398

SEQ ID NO: 63504 - DNA, 915 bp, Methylococcus capsulatus; identical to SEQ ID NO: 53399
  CDS (1)..(915): transl_table=11

SEQ ID NO: 63505 - protein, 304 aa, Methylococcus capsulatus; identical to SEQ ID NO: 53400

SEQ ID NO: 63506 - DNA, 906 bp, Nitrosomonas europaea; identical to SEQ ID NO: 53401
  CDS (1)..(906): transl_table=11

SEQ ID NO: 63507 - protein, 301 aa, Nitrosomonas europaea; identical to SEQ ID NO: 53402

SEQ ID NO: 63508 - DNA, 906 bp, Photobacterium profundum; identical to SEQ ID NO: 53403
  CDS (1)..(906): transl_table=11

SEQ ID NO: 63509 - protein, 301 aa, Photobacterium profundum; identical to SEQ ID NO: 53404

SEQ ID NO: 63510 - DNA, 1032 bp, Prochlorococcus marinus; identical to SEQ ID NO: 53405
  CDS (1)..(1032): transl_table=11

SEQ ID NO: 63511 - protein, 343 aa, Prochlorococcus marinus; identical to SEQ ID NO: 53406

SEQ ID NO: 63512 - DNA, 1050 bp, Prochlorococcus marinus; identical to SEQ ID NO: 53407
  CDS (1)..(1050): transl_table=11

SEQ ID NO: 63513 - protein, 349 aa, Prochlorococcus marinus; identical to SEQ ID NO: 53408

SEQ ID NO: 63514 - DNA, 912 bp, Pseudomonas putida; identical to SEQ ID NO: 53409
  CDS (1)..(912): transl_table=11

SEQ ID NO: 63515 - protein, 303 aa, Pseudomonas putida; identical to SEQ ID NO: 53410

SEQ ID NO: 63516 - DNA, 909 bp, Ralstonia solanacearum; identical to SEQ ID NO: 53411
  CDS (1)..(909): transl_table=11

SEQ ID NO: 63517 - protein, 302 aa, Ralstonia solanacearum; identical to SEQ ID NO: 53412

SEQ ID NO: 63518 - DNA, 912 bp, Rhizobium meliloti; identical to SEQ ID NO: 53413
  CDS (1)..(912): transl_table=11

SEQ ID NO: 63519 - protein, 303 aa, Rhizobium meliloti; identical to SEQ ID NO: 53414

SEQ ID NO: 63520 - DNA, 840 bp, Rickettsia felis; identical to SEQ ID NO: 53415
  CDS (1)..(840): transl_table=11

SEQ ID NO: 63521 - protein, 279 aa, Rickettsia felis; identical to SEQ ID NO: 53416

SEQ ID NO: 63522 - DNA, 939 bp, Schizosaccharomyces pombe; identical to SEQ ID NO: 53421
  CDS (1)..(939)

SEQ ID NO: 63523 - protein, 312 aa, Schizosaccharomyces pombe; identical to SEQ ID NO: 53422

SEQ ID NO: 63524 - DNA, 909 bp, Shewanella oneidensis; identical to SEQ ID NO: 53423
  CDS (1)..(909): transl_table=11

SEQ ID NO: 63525 - protein, 302 aa, Shewanella oneidensis; identical to SEQ ID NO: 53424

SEQ ID NO: 63526 - DNA, 900 bp, Shigella flexneri; identical to SEQ ID NO: 53425
  CDS (1)..(900): transl_table=11

SEQ ID NO: 63527 - protein, 299 aa, Shigella flexneri; identical to SEQ ID NO: 53426

SEQ ID NO: 63528 - DNA, 1158 bp, Glycine max; identical to SEQ ID NO: 53427
  CDS (1)..(1158)

SEQ ID NO: 63529 - protein, 385 aa, Glycine max; identical to SEQ ID NO: 53428

SEQ ID NO: 63530 - DNA, 1534 bp, Nicotiana tabacum; identical to SEQ ID NO: 53429
  CDS (19)..(1212)

SEQ ID NO: 63531 - protein, 397 aa, Nicotiana tabacum; identical to SEQ ID NO: 53430

SEQ ID NO: 63532 - DNA, 918 bp, Xylella fastidiosa; identical to SEQ ID NO: 53437
  CDS (1)..(918): transl_table=11

SEQ ID NO: 63533 - protein, 305 aa, Xylella fastidiosa; identical to SEQ ID NO: 53438

SEQ ID NO: 63534 - DNA, 930 bp, Yersinia pestis; identical to SEQ ID NO: 53441
  CDS (1)..(930): transl_table=11

SEQ ID NO: 63535 - protein, 309 aa, Yersinia pestis; identical to SEQ ID NO: 53442

SEQ ID NO: 63536 - DNA, 22 bp, Artificial sequence
  primer
atgcctgcccctcaagatccaa

SEQ ID NO: 63537 - DNA, 25 bp, Artificial sequence
  primer
ttatttaacccactctcttggtttg

SEQ ID NO: 63538 - protein, 373 aa, Artificial sequence
  consensus sequence
  Variant (2)..(3): Xaa in position 2 to 3 is any amino acid
  Variant (5)..(7): Xaa in position 5 to 7 is any amino acid
  Variant (10)..(13): Xaa in position 10 to 13 is any amino acid
  Variant (14)..(27): Xaa in position 14 to 27 is any or no amino acid
  Variant (29)..(32): Xaa in position 29 to 32 is any amino acid
  Variant (34)..(34): Xaa in position 34 is any amino acid
  Variant (36)..(38): Xaa in position 36 to 38 is any amino acid
  Variant (39)..(44): Xaa in position 39 to 44 is any or no amino acid
  Variant (48)..(50): Xaa in position 48 to 50 is any amino acid
  Variant (52)..(54): Xaa in position 52 to 54 is any amino acid
  Variant (56)..(58): Xaa in position 56 to 58 is any amino acid
  Variant (60)..(61): Xaa in position 60 to 61 is any amino acid
  Variant (65)..(65): Xaa in position 65 is any amino acid
  Variant (67)..(67): Xaa in position 67 is any amino acid
  Variant (69)..(69): Xaa in position 69 is any amino acid
  Variant (71)..(73): Xaa in position 71 to 73 is any amino acid
  Variant (75)..(88): Xaa in position 75 to 88 is any amino acid
  Variant (89)..(106): Xaa in position 89 to 106 is any or no amino acid
  Variant (108)..(108): Xaa in position 108 is any amino acid
  Variant (110)..(110): Xaa in position 110 is any amino acid
  Variant (112)..(112): Xaa in position 112 is any amino acid
  Variant (114)..(114): Xaa in position 114 is any amino acid
  Variant (117)..(117): Xaa in position 117 is any amino acid
  Variant (120)..(121): Xaa in position 120 to 121 is any amino acid
  Variant (124)..(124): Xaa in position 124 is any amino acid
  Variant (126)..(126): Xaa in position 126 is any amino acid
  Variant (128)..(128): Xaa in position 128 is any amino acid
  Variant (130)..(130): Xaa in position 130 is any amino acid
  Variant (132)..(135): Xaa in position 132 to 135 is any amino acid
  Variant (136)..(145): Xaa in position 136 to 145 is any or no amino acid
  Variant (152)..(152): Xaa in position 152 is any amino acid
  Variant (157)..(157): Xaa in position 157 is any amino acid
  Variant (159)..(162): Xaa in position 159 to 162 is any amino acid
  Variant (163)..(167): Xaa in position 163 to 167 is any or no amino acid
  Variant (169)..(172): Xaa in position 169 to 172 is any amino acid
  Variant (174)..(179): Xaa in position 174 to 179 is any amino acid
  Variant (181)..(187): Xaa in position 181 to 187 is any amino acid
  Variant (188)..(188): Xaa in position 188 is any or no amino acid
  Variant (190)..(192): Xaa in position 190 to 192 is any amino acid
  Variant (194)..(194): Xaa in position 194 is any amino acid
  Variant (198)..(198): Xaa in position 198 is any amino acid
  Variant (201)..(203): Xaa in position 201 to 203 is any amino acid
  Variant (206)..(206): Xaa in position 206 is any amino acid
  Variant (208)..(208): Xaa in position 208 is any amino acid
  Variant (211)..(211): Xaa in position 211 is any amino acid
  Variant (214)..(214): Xaa in position 214 is any amino acid
  Variant (216)..(216): Xaa in position 216 is any amino acid
  Variant (218)..(240): Xaa in position 218 to 240 is any amino acid
  Variant (241)..(268): Xaa in position 241 to 268 is any or no amino acid
  Variant (270)..(270): Xaa in position 270 is any amino acid
  Variant (273)..(275): Xaa in position 273 to 275 is any amino acid
  Variant (277)..(288): Xaa in position 277 to 288 is any amino acid
  Variant (290)..(291): Xaa in position 290 to 291 is any amino acid
  Variant (303)..(303): Xaa in position 303 is any amino acid
  Variant (308)..(308): Xaa in position 308 is any amino acid
  Variant (312)..(313): Xaa in position 312 to 313 is any amino acid
  Variant (314)..(315): Xaa in position 314 to 315 is any or no amino acid
  Variant (318)..(318): Xaa in position 318 is any amino acid
  Variant (323)..(323): Xaa in position 323 is any amino acid
  Variant (325)..(325): Xaa in position 325 is any amino acid
  Variant (327)..(330): Xaa in position 327 to 330 is any amino acid
  Variant (332)..(332): Xaa in position 332 is any amino acid
  Variant (334)..(341): Xaa in position 334 to 341 is any amino acid
  Variant (342)..(359): Xaa in position 342 to 359 is any or no amino acid
  Variant (361)..(362): Xaa in position 361 to 362 is any amino acid
  Variant (364)..(371): Xaa in position 364 to 371 is any amino acid
  Variant (372)..(372): Xaa in position 372 is any or no amino acid
QXXIXXXLEXXXXXXXXXXXXXXXXXXFXXXXWXRXXXXXXXXXGGGXXXVXXXGXXXEXXGVNXSXVXGXXXPXXXXXXXXXXXXXXXXXXXXXXXXXXXXXXXXAXGXSXVXHPXNPXXPTXHXNXRXFXXXXXXXXXXXXXXWWFGGGXDLTPXYXXXXXXXXXDXXXXHXXXXXXCXXXXXXXXYXXXKXWCDXYFXXXHRXEXRGXGGXFXDXXXXXXXXXXXXXXXXXXXXXXXXXXXXXXXXXXXXXXXXXXXXXXXXXXXYXPIXXXRXXXXXXXXXXXXQXXRRGRYVEFNLVXDRGTXFGLXXXXGRXESILXSXPXXXXWXYXXXXXXXXXXXXXXXXXXXXXXXXXXEXXLXXXXXXXXXW

SEQ ID NO: 63539 - protein, 28 aa, Artificial sequence
  protein pattern
  Variant (2)..(2): Xaa in position 2 is any amino acid
  Variant (6)..(6): Xaa in position 6 is Asp, Glu, Lys or Arg
  Variant (9)..(9): Xaa in position 9 is any amino acid
  Variant (10)..(10): Xaa in position 10 is Ile, Leu or Val
  Variant (11)..(11): Xaa in position 11 is any amino acid
  Variant (14)..(14): Xaa in position 14 is any amino acid
  Variant (16)..(16): Xaa in position 16 is any amino acid
  Variant (19)..(19): Xaa in position 19 is Ile, Leu or Val
  Variant (22)..(22): Xaa in position 22 is Ile, Leu or Val
  Variant (24)..(24): Xaa in position 24 is Phe or Tyr
  Variant (26)..(27): Xaa in position 26 to 27 is any or no amino acid
KXWCDXYFXXXHRXEXRGXGGXFXDXXD

SEQ ID NO: 63540 - protein, 27 aa, Artificial sequence
  protein pattern
  Variant (2)..(2): Xaa in position 2 is any or no amino acid
  Variant (4)..(4): Xaa in position 4 is any amino acid
  Variant (6)..(6): Xaa in position 6 is any amino acid
  Variant (8)..(8): Xaa in position 8 is any amino acid
  Variant (10)..(10): Xaa in position 10 is Ile, Leu, Met or Val
  Variant (13)..(13): Xaa in position 13 is any amino acid
  Variant (16)..(17): Xaa in position 16 to 17 is any amino acid
  Variant (20)..(20): Xaa in position 20 is any amino acid
  Variant (22)..(22): Xaa in position 22 is any amino acid
  Variant (24)..(24): Xaa in position 24 is any amino acid
  Variant (26)..(26): Xaa in position 26 is any amino acid
  Variant (27)..(27): Xaa in position 27 is Phe, Ile or Leu
FXAXGXSXVXHPXNPXXPTXHXNXRXX

SEQ ID NO: 63541 - protein, 17 aa, Artificial sequence
  protein pattern
  Variant (6)..(6): Xaa in position 6 is any amino acid
  Variant (11)..(11): Xaa in position 11 is any amino acid
  Variant (13)..(13): Xaa in position 13 is Gly, Ile, Leu or Pro
  Variant (14)..(15): Xaa in position 14 to 15 is any amino acid
  Variant (16)..(16): Xaa in position 16 is Ala, Asp, Glu, Gln or Ser
WFGGGXDLTPXYXXXXD

SEQ ID NO: 63542 - protein, 27 aa, Artificial sequence
  protein pattern
  Variant (5)..(11): Xaa in position 5 to 11 is any or no amino acid
  Variant (13)..(14): Xaa in position 13 to 14 is any amino acid
  Variant (15)..(15): Xaa in position 15 is Phe, Ile or Leu
  Variant (17)..(17): Xaa in position 17 is any amino acid
  Variant (18)..(18): Xaa in position 18 is Ala, Gly or Val
  Variant (20)..(20): Xaa in position 20 is Ile or Val
  Variant (21)..(22): Xaa in position 21 to 22 is any amino acid
  Variant (24)..(24): Xaa in position 24 is any amino acid
  Variant (26)..(26): Xaa in position 26 is any amino acid
GGGGXXXXXXXGXXXEXXGXXXSXVXG

SEQ ID NO: 63543 - protein, 19 aa, Artificial sequence
  protein pattern
  Variant (2)..(2): Xaa in position 2 is any or no amino acid
  Variant (4)..(4): Xaa in position 4 is any amino acid
  Variant (9)..(9): Xaa in position 9 is Leu, Met or Val
  Variant (11)..(11): Xaa in position 11 is Leu or Met
  Variant (13)..(14): Xaa in position 13 to 14 is any amino acid
  Variant (15)..(15): Xaa in position 15 is Ala or Val
  Variant (16)..(16): Xaa in position 16 is any amino acid
  Variant (18)..(18): Xaa in position 18 is any amino acid
GXRXESILXSXPXXXXWXY

SEQ ID NO: 63544 - DNA, 1815 bp, Saccharomyces cerevisiae
  CDS (1)..(1815)
atgtcagatcctatagtaacgtcttccaaaatggaaaaaagtgcagagtttgaagtaacagactctgctttatataataacttcaatacattaacaacagcttcactaactccggagattaaggaacattctgaggaatctcgcaatgggttagttcacagattcgtcgactcattcagaagagccgaaagccaacgtttagaagaagacaatgacttggaggatggtaccaaatcgatgaaatctaataaccacttaaaaaagtcaatgaaatctagacatgttgtaatgatgtctttaggtacagggataggaacaggtcttctagttgccaacgccaaaggtttgagtcttgcaggcccggggtctttagtcatcggttacgttatggtgtccttcgtcacgtattttatggtccaagcggctggtgagatgggtgtcacttatccgacgcttccaggtaacttcaatgcatacaattcaatctttatttcaaagtcgtttgggttcgcgaccacttggttattttgcattcagtggttaactgtgctaccgttggaattgattacttcttccatgaccgtcaagtactggaatgacacaattaatgctgatgtattcattgtcattttctatgtgtttttattgtttatccacttttttggtgttaaggcatacggtgaaacggaatttatcttcaattcctgtaagatattgatggttgcaggattcattattttatcagtcgtcatcaattgtgggggagccggtgtggacggctatattggcggcaaatattggcgcgaccctggttcatttgcagaaggcagcggtgccactcgtttcaaagggatatgttatattctagtatctgcatatttctccttcggtggtattgaattatttgttctttccatcaatgagcagtctaaccctagaaaatccactcctgtagccgcgaagagaagtgtatatcgtattttgatcatttatttgctgacaatgattctaattgggttcaatgttcctcacaataacgatcaattgatgggttccggtggctccgcaacgcacgcttcaccatatgtcttggcagcctctattcacaaggttagggtcatcccccatatcattaatgctgttattttgatatcagtcatctctgttgcgaactctgccctttatgccgcaccgagattaatgtgttccttggctcaacagggctatgctccaaaatttttgaactatattgatagggagggaagacctttaagggccttggtagtgtgctctcttgttggtgtcgttggcttcgtcgcctgttctccacaggaagagcaagcatttacatggttggcagccattgcaggtttgagtgaacttttcacatggtcaggcattatgctttcacacattcgattcagaaaagcgatgaaagtccaaggaagatcacttgatgaagtcggctataaggccaataccggtatatggggttcatactatggggtttttttcaatatgcttgtctttatggcccaattttgggtcgcactgtctccaataggaaatggcggaaagtgtgatgctcaggcattcttcgagagttatctggctgccccgctatggatattcatgtatgttggatacatggtttacaaaagagattttacctttttaaacccactggacaagatcgacttggactttcatagaagagtttacgaccctgaaataatgaggcaggaggacgaagaaaataaagaaaggttaaagaactcttcaatattcgtcagagtctacaaattttggtgttag

SEQ ID NO: 63545 - protein, 604 aa, Saccharomyces cerevisiae
MSDPIVTSSKMEKSAEFEVTDSALYNNFNTLTTASLTPEIKEHSEESRNGLVHRFVDSFRRAESQRLEEDNDLEDGTKSMKSNNHLKKSMKSRHVVMMSLGTGIGTGLLVANAKGLSLAGPGSLVIGYVMVSFVTYFMVQAAGEMGVTYPTLPGNFNAYNSIFISKSFGFATTWLFCIQWLTVLPLELITSSMTVKYWNDTINADVFIVIFYVFLLFIHFFGVKAYGETEFIFNSCKILMVAGFIILSVVINCGGAGVDGYIGGKYWRDPGSFAEGSGATRFKGICYILVSAYFSFGGIELFVLSINEQSNPRKSTPVAAKRSVYRILIIYLLTMILIGFNVPHNNDQLMGSGGSATHASPYVLAASIHKVRVIPHIINAVILISVISVANSALYAAPRLMCSLAQQGYAPKFLNYIDREGRPLRALVVCSLVGVVGFVACSPQEEQAFTWLAAIAGLSELFTWSGIMLSHIRFRKAMKVQGRSLDEVGYKANTGIWGSYYGVFFNMLVFMAQFWVALSPIGNGGKCDAQAFFESYLAAPLWIFMYVGYMVYKRDFTFLNPLDKIDLDFHRRVYDPEIMRQEDEENKERLKNSSIFVRVYKFWC

SEQ ID NO: 63546 - DNA, 1902 bp, Saccharomyces cerevisiae
  CDS (1)..(1902)
atgtcgtcgtcgaagtctctatacgaactgaaagacttgaaaaatagctccacagaaatacatgccacggggcaggataatgaaattgaatatttcgaaacaggctccaatgaccgtccatcctcacaacctcatttaggttacgaacagcataacacttctgccgtgcgtaggtttttcgactcctttaaaagagcggatcagggtccacaggatgaagtagaagcaacacaaatgaacgatcttacgtcggctatctcaccttcttctagacaggctcaagaactagaaaaaaatgaaagttcggacaacataggcgctaatacaggtcataagtcggactcgctgaagaaaaccattcagcctagacatgttctgatgattgcgttgggtacgggtatcggtactgggttattggtcggtaacggtaccgcgttggttcatgcgggtccagctggactacttattggttacgctattatgggttctatcttgtactgtattattcaagcatgtggtgaaatggcgctagtgtatagtaacttgactggtggctacaatgcataccccagtttccttgtggatgatggttttgggtttgcagtcgcttgggtttattgtttgcaatggctgtgtgtgtgtcctctggaattggtgaccgcatccatgactatcaaatattggacgacatctgtgaacccggatgtgttcgtcattattttctatgttttggtgattactattaatattttcggtgctcgtggttatgcagaagctgagttcttcttcaactgttgcaaaattttgatgatgactgggttcttcattcttggtattatcatcgatgttggtggcgctggtaatgatggttttattggtggtaaatactggcacgatccgggcgctttcaatggtaaacatgccattgacagatttaaaggtgttgctgcaacattagtgactgctgcttttgcctttggtggttcagagtttattgccatcaccactgcagaacaatctaatccaagaaaggccattccaggtgcggccaaacaaatgatctacagaatcttattcctattcttggctaccattattctactgggtttcttggtgccatacaattccgatcaattattgggttctaccggtggtggtactaaagcctcgccatatgtcattgctgttgcatcccacggtgtccgtgtcgtcccacacttcattaacgccgttattctactttccgtgctgtccatggctaactcctccttctactccagtgctcgtttatttttaactctatccgagcaaggttacgctcctaaggttttctcctacatcgacagagccggtagaccattgattgccatgggtgtttctgcattgtttgccgttattgccttctgtgctgcatctcccaaggaagaacaagttttcacttggttattggccatttctggtttgtctcagcttttcacatggactgccatttgtttatcccatcttagatttagaagagccatgaaagtccaagggagatctcttggagaattgggtttcaaatctcaaactggtgtttggggatctgcctacgcttgcattatgatgattttaattcttattgcccaattttgggtcgctatcgcccccattggtgaaggtaagctggatgcacaagcctttttcgaaaactacttggctatgccaatcttgattgcactttatgtcggctacaaggtctggcacaaggattggaaactgttcatcagggcagacaagatcgacctagattctcatagacaaatctttgatgaagaattaatcaagcaagaagacgaagaatatagggaacgtttgaggaacggaccttattggaaaagggtcgttgccttctggtgttaa

SEQ ID NO: 63547 - protein, 633 aa, Saccharomyces cerevisiae
MSSSKSLYELKDLKNSSTEIHATGQDNEIEYFETGSNDRPSSQPHLGYEQHNTSAVRRFFDSFKRADQGPQDEVEATQMNDLTSAISPSSRQAQELEKNESSDNIGANTGHKSDSLKKTIQPRHVLMIALGTGIGTGLLVGNGTALVHAGPAGLLIGYAIMGSILYCIIQACGEMALVYSNLTGGYNAYPSFLVDDGFGFAVAWVYCLQWLCVCPLELVTASMTIKYWTTSVNPDVFVIIFYVLVITINIFGARGYAEAEFFFNCCKILMMTGFFILGIIIDVGGAGNDGFIGGKYWHDPGAFNGKHAIDRFKGVAATLVTAAFAFGGSEFIAITTAEQSNPRKAIPGAAKQMIYRILFLFLATIILLGFLVPYNSDQLLGSTGGGTKASPYVIAVASHGVRVVPHFINAVILLSVLSMANSSFYSSARLFLTLSEQGYAPKVFSYIDRAGRPLIAMGVSALFAVIAFCAASPKEEQVFTWLLAISGLSQLFTWTAICLSHLRFRRAMKVQGRSLGELGFKSQTGVWGSAYACIMMILILIAQFWVAIAPIGEGKLDAQAFFENYLAMPILIALYVGYKVWHKDWKLFIRADKIDLDSHRQIFDEELIKQEDEEYRERLRNGPYWKRVVAFWC

SEQ ID NO: 63548 - DNA, 1521 bp, Lactococcus lactis subsp. lactis Il1403
  CDS (1)..(1521): transl_table=11
ttgagtctgagtcaaacaagtcggtgtagaataaattttattagggagagaattttggaaaattcttcaaactcaactactgagacgcaagtaaaacgcggcttaaaatcacgtcatgtttccatgattgcccttggcggaacaatcggaactggattgtttctgacttcaggcgatgtcattcacacggcaggaccatttggtgcactgactgcctatgttcttatcggagcaatggtttacttcctcatgacatcacttggtgaaatggccacttatttacccacttctggttctttttcagactatggaacacgttatgttgacccagcttttggttttgctctaggttggaattactggttaaactgggcaattaccgtagcggttgatttaacagccgttgccctttgtatcaaattctggttaccagatgttccaagttggattttttcactgattgccttaattattgtctttgcaatcaatgccttatcagttaaaacttttggcgaaactgaatattggttgtcagccattaaaattactgttgttgttttattcttgattattggtttcttatctatttttggaattatgggcggtcatattgacgtcgctaaaaatctttcagttggtaatcatggttttgtcggaggacttggtagtttcactaccggcggagggattctcggcgtactcttagtcgctggtttctctttccaaggaacagaattgctcggaattacagctggcgaagctgaaaatcctgaaaaatcaattcctaaagctatgaactctatcttctggcgtattcttgtcttttatatcttatctatcttcgtgatggcggctatcattccatttaccgacccacacttagttggaggaaattcagctgctcaaagccctttcacaattgtatttgaacgtgttggtctctctattgcagcttctatcatgaacgccgttgttttaacttctgtcgtttcagcagcaaattctggaatgtatgcctctactcggatgctttattcactagctaaagatggtggcgcaccaaagattttctcaaaaacttcaaaaaacgggatccctttcattgctttattagctacaactgctattgctttactcacattcttgacatcaatttacggagttagcttctttacattcctcgtctcagcctctggtttaacaggatttattgcttggattgggattgcaattagccacttccgcttccgccgcgcctatgttgctcaaggaaaagatgttaaaaaattaccttatcatgcaaaactattcccatttggtccaatcttagccttaattatgaccgttttagtcacactcggccaagacccaatgcttctttttggtaaaacttgggtgcaaggtgtcatcatgtatgccgcaattccactcttcttcatcctttacttgggttataaatttaaaaacaaaacgaaacttatcccccttaaagaggttgatttaagtcgtcataaagattaa

SEQ ID NO: 63549 - protein, 506 aa, Lactococcus lactis subsp. lactis Il1403
MSLSQTSRCRINFIRERILENSSNSTTETQVKRGLKSRHVSMIALGGTIGTGLFLTSGDVIHTAGPFGALTAYVLIGAMVYFLMTSLGEMATYLPTSGSFSDYGTRYVDPAFGFALGWNYWLNWAITVAVDLTAVALCIKFWLPDVPSWIFSLIALIIVFAINALSVKTFGETEYWLSAIKITVVVLFLIIGFLSIFGIMGGHIDVAKNLSVGNHGFVGGLGSFTTGGGILGVLLVAGFSFQGTELLGITAGEAENPEKSIPKAMNSIFWRILVFYILSIFVMAAIIPFTDPHLVGGNSAAQSPFTIVFERVGLSIAASIMNAVVLTSVVSAANSGMYASTRMLYSLAKDGGAPKIFSKTSKNGIPFIALLATTAIALLTFLTSIYGVSFFTFLVSASGLTGFIAWIGIAISHFRFRRAYVAQGKDVKKLPYHAKLFPFGPILALIMTVLVTLGQDPMLLFGKTWVQGVIMYAAIPLFFILYLGYKFKNKTKLIPLKEVDLSRHKD

SEQ ID NO: 63550 - DNA, 1476 bp, Clostridium acetobutylicum ATCC 824
  CDS (1)..(1476): transl_table=11
atgacgtctaaaaaagaacaaaagaatgagcttaagagaacactgacggcaaggcatatgaatatgatcgcaataggaggctctgttggaactggacttttttttgcaagtggaagtgcaataagcacagcaggaccaggaggagcgcttcttgcatatataatcacgggaattctagtttatgtactaatgatgtcactaggagaaatgtcaacactattacctatttcgggttcttttgaaacctatgctactagatttgtagatccagcacttggatttactcttggctggaactactggttttcttggtccatatgtgtggcatcggaattagttgcaggatcacttatagtgaagttttggtttcctcatactaatacaaccatttggagcataggatttttacttgtaatttttatactaaatattctttctgctaaagcttatggagaaagcgaatattggttttcaagtattaaggtagttactataatcatatttatcatagttggagtacttatgatatttggaattatgggaaatgattcacctggttttaaaaattgggttatatcgggaaatggttcgagagcaccgtttgtaggtggaatagcagcaattataaatgtttttttagttgcaggcttttcgttttcaggtacagaaatagttggacttgcagctggagaaacagaaaatcctgaggaaaacgtcccaaaggcaattaaatctgttttttggcgtatactactattttatatttgtgcaattataataataggctttctagttccttttaatgacaagaatctattaaaaagtggagttaataatatagcatatagtccatttacaatggtatttgcaaagtgtggaatagcttttgcggcaagtgctatgaatgctgtaattttaacctcagtactttcttgcggaaactcaggactttatgtatcatcacgtatgctatattctcttgcaaaagaaggaaaagcacctaagtttttagcaaaggtaaacaagcaaggtgtacctatgaatgcgttatatgcaacaactttagttgcatcctctgcatttttgtcatcacttattggtgaaggaaagatatactatgttttatacaatgcatctggaataacagcattgtttgcatggcttggtataggaatctgtcattacaggtttagaaaagcttatgtagcgcaaggaagagatttaaaggacttgaagtttaaggctaagttttatccttatggtcctattatggcaatagtgttatgcgtagtaataatatttggagctaacatatggatatttcaggctccaaagttcagttggtttgattttataagtaattacatttgtattcctatatttatagcactatatatagcatataaatacattaagaaaactaagctagttccgcttgaggaatgcgattttgaatataacggaaaagataaataa

SEQ ID NO: 63551 - protein, 491 aa, Clostridium acetobutylicum ATCC 824
MTSKKEQKNELKRTLTARHMNMIAIGGSVGTGLFFASGSAISTAGPGGALLAYIITGILVYVLMMSLGEMSTLLPISGSFETYATRFVDPALGFTLGWNYWFSWSICVASELVAGSLIVKFWFPHTNTTIWSIGFLLVIFILNILSAKAYGESEYWFSSIKVVTIIIFIIVGVLMIFGIMGNDSPGFKNWVISGNGSRAPFVGGIAAIINVFLVAGFSFSGTEIVGLAAGETENPEENVPKAIKSVFWRILLFYICAIIIIGFLVPFNDKNLLKSGVNNIAYSPFTMVFAKCGIAFAASAMNAVILTSVLSCGNSGLYVSSRMLYSLAKEGKAPKFLAKVNKQGVPMNALYATTLVASSAFLSSLIGEGKIYYVLYNASGITALFAWLGIGICHYRFRKAYVAQGRDLKDLKFKAKFYPYGPIMAIVLCVVIIFGANIWIFQAPKFSWFDFISNYICIPIFIALYIAYKYIKKTKLVPLEECDFEYNGKDK

SEQ ID NO: 63552 - DNA, 1461 bp, Listeria monocytogenes EGD-e
  CDS (1)..(1461): transl_table=11
gtgaaaaaagaaacacatggcgagattcgtcgtgacttaaaaacaaggcatttgtccatgattgccattggtggttcgatcgggacgggattatttttagcaagtggtaatgcgattcatactgccggacctggtggcgcgttggttgcttatgttgcaatcgggattatggtgtactttttaatgacaagtttaggcgaaatggctacttacatgcctgtatctggttcatttagtacgtatgctagtcgatttgttgacccagctttcgggtttgcacttggttggaattattggtttaactgggcaattacgctagcagtcgatatttccaccgcggcgattattgttcaattttggctaccgaatactcctgcttggctatggagcgcgattttcttaattttgatttttggcttaaatgcgctttcggtaaaagcttacggagaatcagaatattggttttcgattattaaagtggccacggttattattttccttatcgtcggcgtgctaactattgttggaattcttggcggcgaagttattggcttttctaactttacagctggcgatgctccgtttaaaggtggtttttttgccatcttaggtaccttcttaattgctggattttctttccaagggactgaaatggttggtattgcggcaggtgaaagtgctactccagaaaccagtgtgccaaaagcgattaaacaagtgttctggcggattttgttattttatatttttgcgattttcattattgggatgattattccttatactaacccgaacttacttagtgccgaggcaactgatgtggcaattagcccatttacactcgtatttgaaaaagctggtcttgcatttgcggcttcagtgatgaatgcggttatcctgacttctgttctatctgctggtaattcaggtctttacgcttccaccagaatgctttgggcgatggctcgcgataaaaaagcacctaaattcttgggaaaagtaaaccgtcgtggtattccgatggcagcattaatcgttacgacgattgttggtgccatgacattcattacaacgctaacagaaaatggcacagtaatttatacgtggttactttctgcctctggtttaactggatttatcgcttgggtcggcatcgctatcagtcattaccgtttccgaaaagcatttatcaaacaagggcatgacttaagtgaactaaaatataaagcgaaatttttcccattcggacctattttagcacttgttttatgtattttagtcattgtcggtcaagattacgcggcatttttaaaaccagaatttacgaatccggcttggtggcaaaaaatcggcatttcgtatatcggtcttcccattttcctagttttttggctatcttttaaatttacaaataaaactaaagttattccactggaagactgcaaatttgatcaaaaataa

SEQ ID NO: 63553 - protein, 486 aa, Listeria monocytogenes EGD-e
MKKETHGEIRRDLKTRHLSMIAIGGSIGTGLFLASGNAIHTAGPGGALVAYVAIGIMVYFLMTSLGEMATYMPVSGSFSTYASRFVDPAFGFALGWNYWFNWAITLAVDISTAAIIVQFWLPNTPAWLWSAIFLILIFGLNALSVKAYGESEYWFSIIKVATVIIFLIVGVLTIVGILGGEVIGFSNFTAGDAPFKGGFFAILGTFLIAGFSFQGTEMVGIAAGESATPETSVPKAIKQVFWRILLFYIFAIFIIGMIIPYTNPNLLSAEATDVAISPFTLVFEKAGLAFAASVMNAVILTSVLSAGNSGLYASTRMLWAMARDKKAPKFLGKVNRRGIPMAALIVTTIVGAMTFITTLTENGTVIYTWLLSASGLTGFIAWVGIAISHYRFRKAFIKQGHDLSELKYKAKFFPFGPILALVLCILVIVGQDYAAFLKPEFTNPAWWQKIGISYIGLPIFLVFWLSFKFTNKTKVIPLEDCKFDQK

SEQ ID NO: 63554 - DNA, 1452 bp, Lactobacillus plantarum WCFS1
  CDS (1)..(1452): transl_table=11
atggcagaaaaacaacatcaggaagtgcatcgttccttacagacgcggcatttatccatgattgcattaggtggtagtatcgggaccgggctgtttgtcgcgtccggttcggcaatttcaacggctgggccagggggagcattactggcctacgttggtattggagtgatggtttactttttaatgactagtctgggcgaaatggcaacttatttgcccgtttcaggttcgttttccacgtatgccacgaagtttgttgacccggcacttgggtttgcgatgggctggaattactggttcaactgggcaatcacgttagcggtcgatattagtacggcggcgattgtcatgcagttctggttgccatccgtgccggggtgggtttttagtctgattgcgctcgttttgatttttacgatcaacgcgctgtcagtccggtcgtttggagaaactgagtactggctttcgctaattaaagtggtgaccgtgctcgtattcttggttatcggtgtcttgacgatcgtgggaatcatgggcggtcatgccactggcctcagtaactttacctataaaaaggcaccatttgtcggtggaattccaacgattttgagtgtcttcgtggtcgctggtttttcgtttcaaggaaccgaattaattgggatcacggccggggagtcagcaacaccggagaaaagtattccggcggctattaaacaagttttctggcgtattttgttattttacattttagccattttcgtgattgcggcgattattccttatacgtcgaaagatcttctagggtcatcagcgagcgatattgccatcagtccgttcacgttagtctttaaacgggctgggttggcggctgcggccagtgtgatgaacgcagtgatcttgacgtccgtattgtcagctgctaattcggggatgtacgcctcgacacggatgttatattctttgtcattacagggttatgcccccaagacatttggtcgggtcaatcgtcgtgggattccaatcatggcattattaggaacgacggtgattggattactcacgttcttgtcgagtctattcggtgaacggatttatattttcctcgtttcggccagtgggttaacgggttttatcgcttggctaggaatcgctatttcgcatctgcgtttccgtcgcgcgtttgttaagcaggggcatcaattgagtgaattgcggtaccatgccaagtggttcccatttggcccgtggttcgcctttatcttgtgtgtcgtggtcattattggtcaagacttacattcatttgcaacgcttgattggcaggctattggggtgacctatatgagcatcccgttattcatcatcttgtatgtctattataagattcgctatcatactaagatgattccgctagacaaggttgatttgacacgcaaacgacaccatcaagattaa

SEQ ID NO: 63555 - protein, 483 aa, Lactobacillus plantarum WCFS1
MAEKQHQEVHRSLQTRHLSMIALGGSIGTGLFVASGSAISTAGPGGALLAYVGIGVMVYFLMTSLGEMATYLPVSGSFSTYATKFVDPALGFAMGWNYWFNWAITLAVDISTAAIVMQFWLPSVPGWVFSLIALVLIFTINALSVRSFGETEYWLSLIKVVTVLVFLVIGVLTIVGIMGGHATGLSNFTYKKAPFVGGIPTILSVFVVAGFSFQGTELIGITAGESATPEKSIPAAIKQVFWRILLFYILAIFVIAAIIPYTSKDLLGSSASDIAISPFTLVFKRAGLAAAASVMNAVILTSVLSAANSGMYASTRMLYSLSLQGYAPKTFGRVNRRGIPIMALLGTTVIGLLTFLSSLFGERIYIFLVSASGLTGFIAWLGIAISHLRFRRAFVKQGHQLSELRYHAKWFPFGPWFAFILCVVVIIGQDLHSFATLDWQAIGVTYMSIPLFIILYVYYKIRYHTKMIPLDKVDLTRKRHHQD

SEQ ID NO: 63556 - DNA, 1527 bp, Chromobacterium violaceum ATCC 12472
  CDS (1)..(1527): transl_table=11
atgagcaagaaacaagacgcgccggagctgcggcgctcgctgcaggctcgacacctgtcgatgatcgccatcggcggctcgatcggcaccggcctgttcctggcgtccggcgccaccatctcgggcgcgggcgccggcggcgcgctgctggcctacgcgctggtcggcctgatggtgtacttcctgatgaccagcctgggcgaaatggccgccttcatgccggtgtccggctccttccaggcctacggctcgcgtttcgtcgatccggccttcggcttcgcgcagggctggaactactggtacaactgggcgatcaccgtcgcggtggaactggccgcggccgccatcatcatgaactactggtatcccgggataccgggcgtggtgtggagcgggggcttcctggccatcatcttcgcgctcaactatttctcggtgaagggcttcggcgaggccgagttctggtgctcgatgctgaaggtggccaccatcatcgccttcatcgtcatcggcttcctgatgattctgggcatcatgaccgagccgaacccgagccgcatcgcgccgggtctgcaagtgatgatgcagggcgaggggcccttcgtcggcggcctggcggccttcgtcggcgtggccatggtggtgggcttctccttccagggcaccgagctgatcggcgtcgccgcgggcgagtcggccaaccccggccgcaccattccgcgcgccgtgcgccagatcttctggcgcatcctgatgttctacatgctgtccatcctgatcatcggtctgatcctgccgcacaacgatccgtcgctgctgaagaacgacatgaaggatgtcggcgccagcccgttcacgctggtgttcaaccgcgccggcctcgctttcgccgccagtctgatgaacgcggtgatcctgtccgccatcctgtcggccggcaactccggcatgtacgcgtccacccgcatgctgtacgcgatggccaagaacggcatggcgcccaaggttttcggcaagctgaccgacaacggcgtgccgcgcaacgcgctgtacgccaccacgctggtggcctgcctgtgcttcctgacgtcgttgttccagagcaacgctgtctacatgtggctgttgaactcgtccggcatgaccggcttcatcgcctggctgggcgtggcgatcagccattaccgcttccgccgcgcctacgtgaagcagggctacagcctggacgacctgccgtacaaggccaaatggttcccgctgggcccgctgttcgccttcgcgctgtgcctgctgatcatgctgggccagaactacaccgccttcaccgccgccaaggtggattggaacggcgtcatcgccacctatctgggcattccgctgttcctggcgctgtggtggggctaccgcgtcaagcacaatacccgcatggtgcccttggaaaaggtggaactggcggaggcgcatcgcaacgccttgatgcagcgagaggaaaatcgcggcggcaagcccgccgccgcccaggcctga

SEQ ID NO: 63557 - protein, 508 aa, Chromobacterium violaceum ATCC 12472
MSKKQDAPELRRSLQARHLSMIAIGGSIGTGLFLASGATISGAGAGGALLAYALVGLMVYFLMTSLGEMAAFMPVSGSFQAYGSRFVDPAFGFAQGWNYWYNWAITVAVELAAAAIIMNYWYPGIPGVVWSGGFLAIIFALNYFSVKGFGEAEFWCSMLKVATIIAFIVIGFLMILGIMTEPNPSRIAPGLQVMMQGEGPFVGGLAAFVGVAMVVGFSFQGTELIGVAAGESANPGRTIPRAVRQIFWRILMFYMLSILIIGLILPHNDPSLLKNDMKDVGASPFTLVFNRAGLAFAASLMNAVILSAILSAGNSGMYASTRMLYAMAKNGMAPKVFGKLTDNGVPRNALYATTLVACLCFLTSLFQSNAVYMWLLNSSGMTGFIAWLGVAISHYRFRRAYVKQGYSLDDLPYKAKWFPLGPLFAFALCLLIMLGQNYTAFTAAKVDWNGVIATYLGIPLFLALWWGYRVKHNTRMVPLEKVELAEAHRNALMQREENRGGKPAAAQA

SEQ ID NO: 63558 - DNA, 1542 bp, Bacillus cereus ATCC 10987
  CDS (1)..(1542): transl_table=11
ttgacttttctttttaattatctgaaaattataacaagatttcacatcacggaatatattccacaatacggaaaaacatcaaactttattctatcaactacgaaagtgaggaaaacaatggcgcaagtaaataatacaaacaatgaattaaaacgtacgatgaaaagtagacacttattcatgattgcactcggtggtgtgattggaacggggttatttaacggatctggctttattataagtcaagctggacctggtggatccgtacttgcctttatggccggtggattattaatgtatttcgttatgctatgtcttggtgagctcgctgtagccatgcctgtttcaggctctttccaggaatatgccactaagtttattaatcctgcaactggctttacaatcggatggttgtattggttaagctgggcaaatacaaccggccttgaatttacaactgccggcattacaatgcagcgctggtttcctgatattcctgtttgggtttggtgtttaatatttggcgttacaatcttcacaattaacgcattatctgctcgtagttatgcagaaacagaattttggttttcaagtataaaagtatctgccattatcgcttttattattcttggcggcgccgctatgttcggttttatcgatttaaaaggcgacgaaccagcaccgctattatcaaatttcgtgaatcatggtggtttatttccaaatggacttgcagctatcctattaacaatggttacagtcaattattccttccaaggtacagaacttgtcggaatcgcagcaggtgaaagtgaagatccagcaaaaactttacctcgttctattagaaatattatatggcgcacgatgtttttcttcgtcttagcaatctttgttctcgttgctttaattccttgggaagaagcaggattaacaaaaagtccgttcgttgctgtatttgataatatcggtattccatatgccgctgatattatgaactttgttattcttactgctgttctttcggtcgccaattcaggattgtacgcagcaactcgcatgctttggtcattatccaaaaatgaaatggctccagcctttttaaagaaattatcatcacgaggaatacctttgaatgctttaattatgacaattgctatttctgctttttctcttttaacaagcgttgtagctgctgaaacggtttacttatggctcatttccatttctggcgtcataacaatcattgtttggatgtcaatttgtgtctctcaattctttttccgtaaacattatttagcagacggcggaaaattagaggacttaaagttcaaaactccactttatccacttgtaccaatacttggttttggattgtacggcattatattaatcagtctaatctttatcccagaacaacgacttggaatctattgcactgtaccatttattatcttttgctacacttattatcacttaaaagttaagaaaagaatttctactaacactaatagtgagactaaaattagcgagacgatgtaa

SEQ ID NO: 63559 - protein, 513 aa, Bacillus cereus ATCC 10987
MTFLFNYLKIITRFHITEYIPQYGKTSNFILSTTKVRKTMAQVNNTNNELKRTMKSRHLFMIALGGVIGTGLFNGSGFIISQAGPGGSVLAFMAGGLLMYFVMLCLGELAVAMPVSGSFQEYATKFINPATGFTIGWLYWLSWANTTGLEFTTAGITMQRWFPDIPVWVWCLIFGVTIFTINALSARSYAETEFWFSSIKVSAIIAFIILGGAAMFGFIDLKGDEPAPLLSNFVNHGGLFPNGLAAILLTMVTVNYSFQGTELVGIAAGESEDPAKTLPRSIRNIIWRTMFFFVLAIFVLVALIPWEEAGLTKSPFVAVFDNIGIPYAADIMNFVILTAVLSVANSGLYAATRMLWSLSKNEMAPAFLKKLSSRGIPLNALIMTIAISAFSLLTSVVAAETVYLWLISISGVITIIVWMSICVSQFFFRKHYLADGGKLEDLKFKTPLYPLVPILGFGLYGIILISLIFIPEQRLGIYCTVPFIIFCYTYYHLKVKKRISTNTNSETKISETM

SEQ ID NO: 63560 - DNA, 1872 bp, Candida glabrata CBS 138
  CDS (1)..(1872)
atgtctgattttaaagataattccgctgattttaatgataaagtcagtgataaagaggttgagtatatgtcacctcgtgaagtctctgtgactccggagacctctgctacaccaaatactccagccccatcccaatttagaagatttgttgactcattcaagagagctgaacaacaaaataactctgaaatcacctctgccgcttcttgtgatggtagttctgaaaacttggacaaagatggtaaagaagttgccgatcttgaagtacaagaaaatcaagttctcactgaaaagagtaatcaaaagaacaaagaattgaaacaaacaatcaaacctagacatgtcattcttatctctttgggtacaggtattggtacaggtttattggttggtaacgctaaggccctgcacaatgctggtcctgctggtcttctaattggttactctattatgggtacttgtctgtactgtattattcaagctgctggtgaattggctgtctcatacagttctctaagtggtggttttaatgtttatccttcattcttggttgaccctgcatttggtttctctgttgcttgggtatactgtatccaatggttatgtgtctgtcctttagaactggttaccgcctcgatgactattaagtattggactaccactgttaatgctgatatttttgttggtattttctacgtcttgatcattgtcattaatacttttggtgctcgtggttacgctgaagctgaattcttcttcaattgctgcaaaattctaatgatgattggcttctttatcctgggtattgtaatcaacactggtggtgctggtaatgatggctacattggtgacaggtactggcatacaccaggtgcctttgctggtgaccgtccaattgatcatttcaagggtatcatggctaccatggttactgccgcctttgcttttggtgccactgaattcatcgccttgactgctgccgagcaatcaaatccaagaaaggctattccatctgctgccaaaaaggttctttatagaattttgttcattttcttaggttcaatcactttggtcggtttcttggttccatatgactctgatcagttaatgggttctgggggttctgccacaaaggcctctccatatgttctggctgtttctacacatggtgtaaaagtcgttccacatttcattaatgctgtgatcctattgtcagttctatcggttggtaactctgctttctattccagttctcgtcttttgtactccttggcacaacaaggtaatgctccaaagttctttgactatgttgacagggaaggtagaccattcagagctatggtttgtgctggtgtatttgcaattatttccttctgtgctgcttctccaaaggaagaacaagttttcacctggttgttagctatttcaggtttatctcaagtatttacttggttcgccatttgcctatcccatattagattcagaaaggccatgtttgtacaaaagaggtctttgggagagattggtttcaaggctcagactggtgtttggggttcttactatgtctgtttcatgctggtcatgattttgattgctcagttctgggttgccattgcaccaattggtgaaggtaagttagacgcccaaggtttctttgagaattacttagctatgccaattttgattttattctacgttggttacaaaatttggaagaaggactggagcttgttcattagagcgaacaatattgacttggataagcacagacaaatttttgatgaagaattgttaaagcaagaagacgaagagtatagagagaagctaaagaatggtggctacctcaagagaatagctgccttctggtgttga

SEQ ID NO: 63561 - protein, 623 aa, Candida glabrata CBS 138
MSDFKDNSADFNDKVSDKEVEYMSPREVSVTPETSATPNTPAPSQFRRFVDSFKRAEQQNNSEITSAASCDGSSENLDKDGKEVADLEVQENQVLTEKSNQKNKELKQTIKPRHVILISLGTGIGTGLLVGNAKALHNAGPAGLLIGYSIMGTCLYCIIQAAGELAVSYSSLSGGFNVYPSFLVDPAFGFSVAWVYCIQWLCVCPLELVTASMTIKYWTTTVNADIFVGIFYVLIIVINTFGARGYAEAEFFFNCCKILMMIGFFILGIVINTGGAGNDGYIGDRYWHTPGAFAGDRPIDHFKGIMATMVTAAFAFGATEFIALTAAEQSNPRKAIPSAAKKVLYRILFIFLGSITLVGFLVPYDSDQLMGSGGSATKASPYVLAVSTHGVKVVPHFINAVILLSVLSVGNSAFYSSSRLLYSLAQQGNAPKFFDYVDREGRPFRAMVCAGVFAIISFCAASPKEEQVFTWLLAISGLSQVFTWFAICLSHIRFRKAMFVQKRSLGEIGFKAQTGVWGSYYVCFMLVMILIAQFWVAIAPIGEGKLDAQGFFENYLAMPILILFYVGYKIWKKDWSLFIRANNIDLDKHRQIFDEELLKQEDEEYREKLKNGGYLKRIAAFWC

SEQ ID NO: 63562 - DNA, 1839 bp, Candida glabrata CBS 138
  CDS (1)..(1839)
atgaactctaacgatctattgtccgaggttaaagtgtcttcttcggaagactctcaaatcctctccaagagtaacgactatgtacacgaacagaaccatatcatagaaggtgactacgatgatgacgataagtcgtcgtcatcgcataacctgaggtctaggttcgatgttcaagtcaagaacagacacttacagggattcatcgattctttcaagagggccgacgactctccagaccacaatgacctcgagaagaccaccaccgcacaccaggagcagaagaagaccatgaagtccaggcacgtcatcatgatgtccctgggtaccggtatcggtacgggtctgttggtctccaacggtaaaggtctgtccctggctggtcccgcctctttggtcatcgcatatggtctcgtctccttcgtcacttacttcatgatccaggcagccggtgagatggctgttacttacccaactctgcccggttccttcaacgcttacacttccttcttcatctcaaagcccttcggtttcgctacaacttggctgttctgcatccagtggctcaccgtgctgcctttggaattgatcacagcagctatgaccatcaagtactggaacacctccatcgacccagacgtcttcgtcattatcttctacgtgttcctgatgttcatccacttcttcggtgtgcaggcctatggtgaaacagaattcatcttcaacgcttgcaaaatcctcatgatcggtggcttcatcatcttcgctatcgtcgtcaactgcggtggtgccggtaaggacggctacatcggtggcaagtactggcacgacccaggtgccttcgcatcctcaaacggcgcatccagattcaaaggtatctgctacaacttggtcaacgcatacttctcctacggtggtaacgaactgttcgtcttgtccgtgaatgaccagaagaacccaagaaagtccaccccagcagcagccaagagtaacgtctaccgtatcgtggtcatctacttactaacaatgatcttgatcggtttcgttgtcccacacaacagctctgaactgctaggtgccagcggcggtaacggcttgcacgcatccccatacgtcttggcagcctccattcacggtatcaaagtcgtcccacatatcatcaacgcagtcatcttgatcgcattgatctcagtggccaactcctccttatacgccggccctagattactgagctccttggctcaacagggctacgccccaaggttcttgagttacgtcgacagaagaggcagacctttgaccgctttgctactttccgctttggtcggtgtcatcggtttcgcagctacctccccaagagaagaagaagtctttacgtggctcgctgccatctcaggtttaagtgaactgttcacatggacctccattatgttctcacacattagattcagaagagcaatgaagttgcaaaacaaatcgctagacacattgggatacaaagctaacactggcctgtggggttcttacttcggtgtaggtttcaatatccttgtgtttgctgctcaattctgggtcgccctatctccaccaaactccggtggtaaatgtgatgccaactccttcttcgcaagttacctagccatgccaatttggttggtgttctatttcggctacatgtgctggtacaaggacttcactgtcttgactgatttgaatcaagtggacttggataaccacagaaaagtttatgacccagaattcttgagacaggaagacctggaaaacaaagaaagattgagaaactcatcgttcttggtgaaaatctatgagttctggtgttaa

SEQ ID NO: 63563 - protein, 612 aa, Candida glabrata CBS 138
MNSNDLLSEVKVSSSEDSQILSKSNDYVHEQNHIIEGDYDDDDKSSSSHNLRSRFDVQVKNRHLQGFIDSFKRADDSPDHNDLEKTTTAHQEQKKTMKSRHVIMMSLGTGIGTGLLVSNGKGLSLAGPASLVIAYGLVSFVTYFMIQAAGEMAVTYPTLPGSFNAYTSFFISKPFGFATTWLFCIQWLTVLPLELITAAMTIKYWNTSIDPDVFVIIFYVFLMFIHFFGVQAYGETEFIFNACKILMIGGFIIFAIVVNCGGAGKDGYIGGKYWHDPGAFASSNGASRFKGICYNLVNAYFSYGGNELFVLSVNDQKNPRKSTPAAAKSNVYRIVVIYLLTMILIGFVVPHNSSELLGASGGNGLHASPYVLAASIHGIKVVPHIINAVILIALISVANSSLYAGPRLLSSLAQQGYAPRFLSYVDRRGRPLTALLLSALVGVIGFAATSPREEEVFTWLAAISGLSELFTWTSIMFSHIRFRRAMKLQNKSLDTLGYKANTGLWGSYFGVGFNILVFAAQFWVALSPPNSGGKCDANSFFASYLAMPIWLVFYFGYMCWYKDFTVLTDLNQVDLDNHRKVYDPEFLRQEDLENKERLRNSSFLVKIYEFWC

SEQ ID NO: 63564 - DNA, 1983 bp, Candida glabrata CBS 138
  CDS (1)..(1983)
atggtgtttggtggtagacgtcggaatgagaggtctcaatcaccggactcagaggaagccgatgtgagtaactatgagttgcacaacattgatgacagcaagaaaggatatgataacttaggtagtggtagcagaggtgctactacttctgccgttgaatattttgacaaagaaaatgttgatggcgtaaatatcgatgagaaattgcaatccactaccgaatttggcggtgatgagatgcctcgcggtaatatccgtcggttcatcgactctttcaaacgtgccgaacaacaacctaatcaacaacataatttggctgaggatttagaaaatgacttgaccactgcaatttccatgaactctttggatcgcgttcaaaataagccaaccggtaatggtcagatgaaattcgaggaagaagctttgaagaaatctattaagcctagacacgtcgtcatgatttccctaggtacaggtatcggtactggtctactggttggtaacgctaaagccctacataacgctggtccagctggtttagtcatcggttacgctattatgggttcttgtatctactgtattattcaagcagccggtgaaatggctgtcgtttactctaatttgctgggtggtttcaatacttacccatccatgttggttgaccctggttttggtttcgctgtcgcatgggtgtattgtctgcaatggttgtgtgtttgtcccttggaattggttactacttcgttgactatcaaatactggactacaacggtaaatccagacgcctttgtggtgatattttacgtggttattattttcattcaaatatttggtgccagaggttacgctgaagccgagttctttttcaactgttgtaagattcttatgattatcggtttctatatcttgggtattatcattaacgccggtggtgccggtaacgacggatacttgggtgctaagtactggcatgatccaggtgccttcagaggtacaaacggtattcaacgtttcaagggtattatggcgacttttgttagtgctgcttttgcttttggtgcaactgaatttattgcattgactgcagctgaacaatccaacccaagaaaggctatcccatctgcagctaagaaggtcctttaccgtgttatttgtatctttgttggtactatcgctttgctaggtttcttggtcccatgggattctgatcaattaatgggtgctggtggtagtgccactaaggcttctccttatgtcttagccatttctattcatggtgttagagttgttccacatttcattaacgctgttatcttaatctctgttttctctgtcgcaaattctgccttttactcaagttctcgtctattattgggtctagctcagcaaggctatgctccaaagtttttcgattacgttgacaggcaaggtagacctttcagagccatgtgttgtgctgctctttttggtgtcattgctttctgtgccgcatcaccaaaggaagaccaagtctttacttggttgctagccatttctggtttgtctcaattgtttacttggattgccatctgtgtttctcatattagatttagaagagctatgactgtccaaggtagatcattgggtgagattggtttcaaggcacaacttggtgtctatggttcatactacgccaccattatgatggtgctggctttgattgctcaattctgggttgccattgctccaattggtaacaacggtgacctggacgcagaaggtttctttgaaaactatttggctatgccaattttgattgcgttctactttggttacaaactttggaagagggactggcgtctgtttattagagcaaaggatattgatctagactcttacagacaggtatttgacgaagaactattgaaacaagaagatgaagaatacaaagagaaattaaagaatggccctatgtggaagagagtggtcgatttctggtgttag

SEQ ID NO: 63565 - protein, 660 aa, Candida glabrata CBS 138
MVFGGRRRNERSQSPDSEEADVSNYELHNIDDSKKGYDNLGSGSRGATTSAVEYFDKENVDGVNIDEKLQSTTEFGGDEMPRGNIRRFIDSFKRAEQQPNQQHNLAEDLENDLTTAISMNSLDRVQNKPTGNGQMKFEEEALKKSIKPRHVVMISLGTGIGTGLLVGNAKALHNAGPAGLVIGYAIMGSCIYCIIQAAGEMAVVYSNLLGGFNTYPSMLVDPGFGFAVAWVYCLQWLCVCPLELVTTSLTIKYWTTTVNPDAFVVIFYVVIIFIQIFGARGYAEAEFFFNCCKILMIIGFYILGIIINAGGAGNDGYLGAKYWHDPGAFRGTNGIQRFKGIMATFVSAAFAFGATEFIALTAAEQSNPRKAIPSAAKKVLYRVICIFVGTIALLGFLVPWDSDQLMGAGGSATKASPYVLAISIHGVRVVPHFINAVILISVFSVANSAFYSSSRLLLGLAQQGYAPKFFDYVDRQGRPFRAMCCAALFGVIAFCAASPKEDQVFTWLLAISGLSQLFTWIAICVSHIRFRRAMTVQGRSLGEIGFKAQLGVYGSYYATIMMVLALIAQFWVAIAPIGNNGDLDAEGFFENYLAMPILIAFYFGYKLWKRDWRLFIRAKDIDLDSYRQVFDEELLKQEDEEYKEKLKNGPMWKRVVDFWC

SEQ ID NO: 63566 - DNA, 1794 bp, Candida glabrata CBS 138
  CDS (1)..(1794)
atgagttccttggaaaagactgacttgccgaagaacgagttgcaaatcgactcggagttcctaagggaagaacccctggagataagtaacttcgaagagtcttcctcttcacaaggcccacagccaagtggttcacgttggaggaagtttaaagattctttcaaacccttggatgaagccgttgtcactgacgacatgagcgatatcgaaaagattgctcacagaaccgcgcatgcaccactgaagcatcatttaaagaacagacacttgcagatgatcgccatcggtggtgccattggtactggtctgtttgtcggttccggtaccgcgctaagaacagctggcccagctggtattctaattggttggggtctaacgggtaccatgatttactgtatggttatggccatgggtgaactatctgtggtcttcccaatctcaggtggtttcactacctatgccacgagattcattgacgaatcgtttggttttgccaacaacttcaactatatgttgcaatggctatgtgttctaccgttggaaatcgttgctgcttccattacagtcaactattggggtacggatcctaaatacagagatggttttgttgcattattctgggtggtcattgtcattatcaacttgttcggtgtgaaaggttacggtgaagccgagtttgtattttcaatcattaaagttttaacagtcattggtttcatcatcatgggtattgtgctaaactgtggtggtggcccagaaggtggctacatcggtggtaagtacttccacgaccccggtgcttttgtaggtgacactgcaggtgcgagattccaaggtgtttgttccgttttcgtcactgctgcattctcatttgctggtagtgaattgattggtattgccgctgctgaatctgctgagccaagaaagtctgttccaaaggccgcaaagcaagttttctggagaattactctattttacatgctgtcattgctaatggttggtcttttggttccatacactgatgaaagactgattggtgcttcctctgttgacgctgctgcatcacctttcgtcattgctatcacctctcatggtattagaggtttgccaagtgttgttaatgttgttattctaattgccgtcttatctgtcggaaactcagctgtctacggttgttccagaacgctatgtgctttggcccaacaaaacttccttccaaagattttcggttacattgacagatcaggtagacctctattcggtattgctttcacatccgcatttggtctagtcgcatttgtcgctcaaagtaagaaagaaggtgaagtgtttgcttggttgttagcgttgtctggtctatcctctttgttcacatggggtggtatctgtttctgtcacatccgtttccgtgcagcattgactgctcaaggcaggtccacggatgaacttccattcaaagcaccagctggtatctacggttccatgtggggcttgttcatgattgtcctaatgttcatggcacagttctacgtcgcactgttcccacctggaggcaagccgagcgccgaggtgttcttccagtcgtacttgtcattcccagttgtcctggcgttctacttcggtcacaaactgtacgctagaaactggaagttgttgatcccattgtcgaagctggacatcgacactggccgcagagagatggacctggatgtcctacgccaagagattgcggaagaaaaacagatgatgtctacaaggccatggtggtaccgttggtacagcttctggtgctaa

SEQ ID NO: 63567 - protein, 597 aa, Candida glabrata CBS 138
MSSLEKTDLPKNELQIDSEFLREEPLEISNFEESSSSQGPQPSGSRWRKFKDSFKPLDEAVVTDDMSDIEKIAHRTAHAPLKHHLKNRHLQMIAIGGAIGTGLFVGSGTALRTAGPAGILIGWGLTGTMIYCMVMAMGELSVVFPISGGFTTYATRFIDESFGFANNFNYMLQWLCVLPLEIVAASITVNYWGTDPKYRDGFVALFWVVIVIINLFGVKGYGEAEFVFSIIKVLTVIGFIIMGIVLNCGGGPEGGYIGGKYFHDPGAFVGDTAGARFQGVCSVFVTAAFSFAGSELIGIAAAESAEPRKSVPKAAKQVFWRITLFYMLSLLMVGLLVPYTDERLIGASSVDAAASPFVIAITSHGIRGLPSVVNVVILIAVLSVGNSAVYGCSRTLCALAQQNFLPKIFGYIDRSGRPLFGIAFTSAFGLVAFVAQSKKEGEVFAWLLALSGLSSLFTWGGICFCHIRFRAALTAQGRSTDELPFKAPAGIYGSMWGLFMIVLMFMAQFYVALFPPGGKPSAEVFFQSYLSFPVVLAFYFGHKLYARNWKLLIPLSKLDIDTGRREMDLDVLRQEIAEEKQMMSTRPWWYRWYSFWC

SEQ ID NO: 63568 - DNA, 1905 bp, Candida glabrata CBS 138
  CDS (1)..(1905)
atgttttccaaggtgaagaattatgggtcttcatctaagaaggaatccacagcggaggagttcaccataccggagtactccagggatgacggcgagaagtacgctggaaatagtaatgactacagccagcgcgacagcgataatacatctatagagtcagaaccaagaactaagcttgtacataggtttgtcgactctttcaagagagcacaggatgtgcccacaggccgtaagagcaaagaaatcggcaacaatggcggatccaagactaaaggtggctttgaagaggattctcttgacctagaaggttctgaccatgactccataataactaacacacatttgaagaaagcgatgaagtccagacatgttatgatgatgtctttaggtacgggtatcggtactggtctgttggtcgctaacgctaagggtctgcacttcggtgggcccgctgcgttggtcatcggttatgttctagtttcctttgtcacatatttcatgattcaagcagcaggtgaaatggctgtcacatacccaactcttcctggtaatttcaatgcatacagttccatttttgtctcaaatgcgttcggttttgccacagtctggattttctgtatccaatggttaactgtcctaccgctagaattgattactgcctccttgactataaagtattggaacgacaaaataaacgctgatgttttcatcgtgattttctatgtcttcctgttgtgtatccatctattcggtggtgttatcgcctacggtgaaactgaattcctgttcaacctatgtaaaattctcatggtcattggttttattatcatgtccattgttattaacgcaggtggtgcaggtaacagggagtacatcggtggcaaattctggcacgatccaggtgcttttgccggtaaaactgcaggttcaaggttcaaaggtatttgttacgttttggtcagtggttacttctcttacggtggtactgaactgtttgccctatctgtcaatgaacaatcaaatccaagaagatctactccacaagcttctaagagtagtttataccgtattttgattatttacttattgacaatgattttgatcggcttcaatgtgccttatgacagtgacgaattgatgggttcaggtggctctgctactcacgcttctccatatgtcttggctgcatcattgaatggagttaaaattgctcctcattttatcaatgccgtcatcttgatctccgttatttctgttgccaattcatctctatacgctgcaccaagattgatgtgttctttggctcagcaaggttacgctcctaaatttttggattatgtggacagacaaggtagacctttgcttgcgttgatcgcttgtttgcttgttggtgtcattggtttcgttgccgcctctcctaaggaagaagaagtctttacttggttggctgccattgcaggtttaagtgaacttttcacctggtcatccatcatgttgtctcatgttagatttagaatggcaatgaagttacagaacagaagtttggaagaattaggatataaagccactactggtatctatggttccatatatggtgtttgcttcaacttgttagtcttcgcagcccagttttggaccgctctgttcccatttggtggcgatggtaaagctaatgctaactctttctttgctaactatctagctatgccaatctggctagtcttttacttcggttacatgctgtggacacgtgatttccaattattaaaaccacttgataaaatagatcttgactttcatagaagaatttatgatccagaactaatgagacaagaggatgaagaatctaaggaaagactaaggaatggctcttttatgatgagaatgtatcatttctggtgttaa

SEQ ID NO: 63569 - protein, 634 aa, Candida glabrata CBS 138
MFSKVKNYGSSSKKESTAEEFTIPEYSRDDGEKYAGNSNDYSQRDSDNTSIESEPRTKLVHRFVDSFKRAQDVPTGRKSKEIGNNGGSKTKGGFEEDSLDLEGSDHDSIITNTHLKKAMKSRHVMMMSLGTGIGTGLLVANAKGLHFGGPAALVIGYVLVSFVTYFMIQAAGEMAVTYPTLPGNFNAYSSIFVSNAFGFATVWIFCIQWLTVLPLELITASLTIKYWNDKINADVFIVIFYVFLLCIHLFGGVIAYGETEFLFNLCKILMVIGFIIMSIVINAGGAGNREYIGGKFWHDPGAFAGKTAGSRFKGICYVLVSGYFSYGGTELFALSVNEQSNPRRSTPQASKSSLYRILIIYLLTMILIGFNVPYDSDELMGSGGSATHASPYVLAASLNGVKIAPHFINAVILISVISVANSSLYAAPRLMCSLAQQGYAPKFLDYVDRQGRPLLALIACLLVGVIGFVAASPKEEEVFTWLAAIAGLSELFTWSSIMLSHVRFRMAMKLQNRSLEELGYKATTGIYGSIYGVCFNLLVFAAQFWTALFPFGGDGKANANSFFANYLAMPIWLVFYFGYMLWTRDFQLLKPLDKIDLDFHRRIYDPELMRQEDEESKERLRNGSFMMRMYHFWC

SEQ ID NO: 63570 - DNA, 1764 bp, Kluyveromyces lactis NRRL Y-1140
  CDS (1)..(1764)
atgagtcaagagaagaagttagattactccattgaccaggagactcaactggaatctggtgaattccacgaacaaaacagctatgtttcgcaatctgatgcttctccagtcgagggtaccaggtgggaacggttcagggactcgttcaagcgagctgatactcaggatttggatcctaatttaacggacgccgagaaaatggccattcttacagctaatgcgcctttgaaaagaactttgaaatcaagacatttgcagatgattgccatcggtggtgctattggtaccggtcttttcgttggttctggtaaggcattggctactgccggtcctgcaggtatcttgatcggttgggctcttaccggtactatgatttactgtatggttatggccatgggtgagttagctgtcactttccctatcgctggtgggttcaccacttatgcatccagatttgtcgatgaatccttcggtttcgcttttaacactatttatatgttgcaatggttagttgtgcttcccttggaaattgttgctgcttctattacggtgaattactggggtactccagataaatatagagatgggtttgttgcgttgttttatgtggtgattgtcgctatcaatttctttggtgttaagggttacggtgaagctgaatttatcttttccttcatcaaagttatcactgtcattggatatatcattcttggtgtcattcttgtatgtggtggtggcccacaaggtggttacatcggtggtaggctatggcataacccaggtgcctttgctaatgggttcaagggtgtctgttccgtgttcgttactgctgcattctcctttgctggttctgaattggtcggtttggccgcagccgaaactgcaaacccaagaaagtccttaccaagtgccgctaagcaagtgttctggagaattactcttttctatatccttgccttgttgatggtcggtctattggtcccatacaccagtgatagattgattggacaaagttctgtcgatgctgctgcatccccattcgttatttccattcaaaatgccggtattaaaggtttaccttctgtgatcaacgttgttatcttgattgctgttctatctgttggtaactctgctgtttttgcttgctcaagatccatggctgcattggctaaccaaggttctttaccaaagatttttggttacattgacagaaccggtagaccattggtcggtattattgtcacttgtgtctttggtttgttatccttcattgctgcatctccaaaggaaggtgaagtattcgactggttattggcgttgtctggtttgtcctctttgtttacatggggtggtatcatgctttgtcacatcagagttagaagagctttggccgcacaaaacagaaccactgctgaactcagtttcaccgcaccaactggtgtatggggttccgtatacggtttcgtattgattattttgatcttgatggcccaattctggatcgctttgttcccaattggtgataaaccaagtgcatctgccttcttcgaagcttacctatcgttcccaatcttgattgcgttctacatcggtcacaagatctggaagaaaaactggaagttgtttatcagagccaagaatattgatatcgatactggtagaagagaaactgacatcgaagctttgaaacaagaaattgccgaagaaaaggcttttatcgcttccaaaccattctactacagaatgtacaagttctggtgttga

SEQ ID NO: 63571 - protein, 587 aa, Kluyveromyces lactis NRRL Y-1140
MSQEKKLDYSIDQETQLESGEFHEQNSYVSQSDASPVEGTRWERFRDSFKRADTQDLDPNLTDAEKMAILTANAPLKRTLKSRHLQMIAIGGAIGTGLFVGSGKALATAGPAGILIGWALTGTMIYCMVMAMGELAVTFPIAGGFTTYASRFVDESFGFAFNTIYMLQWLVVLPLEIVAASITVNYWGTPDKYRDGFVALFYVVIVAINFFGVKGYGEAEFIFSFIKVITVIGYIILGVILVCGGGPQGGYIGGRLWHNPGAFANGFKGVCSVFVTAAFSFAGSELVGLAAAETANPRKSLPSAAKQVFWRITLFYILALLMVGLLVPYTSDRLIGQSSVDAAASPFVISIQNAGIKGLPSVINVVILIAVLSVGNSAVFACSRSMAALANQGSLPKIFGYIDRTGRPLVGIIVTCVFGLLSFIAASPKEGEVFDWLLALSGLSSLFTWGGIMLCHIRVRRALAAQNRTTAELSFTAPTGVWGSVYGFVLIILILMAQFWIALFPIGDKPSASAFFEAYLSFPILIAFYIGHKIWKKNWKLFIRAKNIDIDTGRRETDIEALKQEIAEEKAFIASKPFYYRMYKFWC

SEQ ID NO: 63572 - DNA, 1764 bp, Kluyveromyces lactis NRRL Y-1140
  CDS (1)..(1764)
atgactgaagagaaaaaattggattactccattgttcaagaaactcaattggaacctggcgagttcgatgaactaaacagctatgtttcgcaatccgatacttcccgagtcgggggtaccagatgggaacggttcaaagattctttcagggaagctgaaaccgtggacttggatccaagtctaacacctgctgagaagatggccattcttacagctaatgcccctttgaaaagaactttgaaatcaagacatttgcaaatgattggtataggtggtgccattggtaccggtcttttcgttggttctggtaagtccttggctactgctggtcctgcaggtatcttgatcggttgggctcttaccggtactatgatttactgtatggttatggccatgggtgagttagctgttaccttccctgttgcaggtgggtatacaacttatgcatcgagatttgtcgatgaatcttttggttttgcgtttaacactgtatacgcaatgggttggttaattacactacctctagaaatagtggctgcttctattacggtgaattactggggcactccagctaaatatagggatgcgttcgtcgccttgttttatgtggtgattgtcggtatcaatttatttggtgtcaagggttacggtgaagctgaatttatcttttcctttatcaaagttattgccgtcatcgggttcattatccttggtgtcatccttgtctgcggtggcggtccacaaggtggttacatcggtggtaggctatggcataacccaggtgcctttgccaatgggttcaagggtgtctgttccgtgttcgttactgctgcattctcctttgctggttctgaattggtcggtttggccgctgctgaaactgcaaacccaagaaaatccataccaagcgccgctaagcaagtgttctggagaattactcttttctatatccttgccttgttgatggtcggcctattggttccatacaccagtgatagattgattggacaaagttctgtcgatgctgctgcatccccattcgttatttccattcaaaatgccggtattaaaggtttaccttctgtgatcaacgttgttatcttgattgctgttctatctgttggtaattgcgctgtctttggttgttcaagatcaatggctgcattggctaaccaaggttctttaccaaagatttttggttacattgacagaaccggtagaccattggtcggtattgtggtgacttgcgtctttggtttgctatccttcattgctgcatctccaaaggaaggtgaagtattcgactggttattggcgttgtctggtttgtcctctttgtttacatggggtggtattttgctttgtcacatcagagttagaagagctttggctgcacaaaacagaaccactgctgaactcagtttcactgcaccaactgatgtatggggttccgtgtacagcttgatcctaattatattaattttaatagcccaattctggatcgctttgttcccaattggtggtaaaccgagtgctgcagcattcttcgaagcttacttatctttcccaatttacatcgtattctacatcggtcataagatctggaagaaaaactggaagttgttcatcaaagcttcggatattgatattgattctggtagaagagaaactgacatcgaagctttgaagcaagaaattgccgaagaaaaggcttttatcgcttccaaaccattctactacagaatgtacaagttctggtgttga

SEQ ID NO: 63573 - protein, 587 aa, Kluyveromyces lactis NRRL Y-1140
MTEEKKLDYSIVQETQLEPGEFDELNSYVSQSDTSRVGGTRWERFKDSFREAETVDLDPSLTPAEKMAILTANAPLKRTLKSRHLQMIGIGGAIGTGLFVGSGKSLATAGPAGILIGWALTGTMIYCMVMAMGELAVTFPVAGGYTTYASRFVDESFGFAFNTVYAMGWLITLPLEIVAASITVNYWGTPAKYRDAFVALFYVVIVGINLFGVKGYGEAEFIFSFIKVIAVIGFIILGVILVCGGGPQGGYIGGRLWHNPGAFANGFKGVCSVFVTAAFSFAGSELVGLAAAETANPRKSIPSAAKQVFWRITLFYILALLMVGLLVPYTSDRLIGQSSVDAAASPFVISIQNAGIKGLPSVINVVILIAVLSVGNCAVFGCSRSMAALANQGSLPKIFGYIDRTGRPLVGIVVTCVFGLLSFIAASPKEGEVFDWLLALSGLSSLFTWGGILLCHIRVRRALAAQNRTTAELSFTAPTDVWGSVYSLILIILILIAQFWIALFPIGGKPSAAAFFEAYLSFPIYIVFYIGHKIWKKNWKLFIKASDIDIDSGRRETDIEALKQEIAEEKAFIASKPFYYRMYKFWC

SEQ ID NO: 63574 - DNA, 1863 bp, Kluyveromyces lactis NRRL Y-1140
  CDS (1)..(1863)
atgactggtgctactggatcttctaattcagactttataagtcctgttggcagtgacgttaaacataatgataaatcagatactataatacaatcagaagggttcccaagtattgaaggtgaagctgaatactatgagaaaacgttctctcaatcggacgaggagtacgctgcaaaatcaagtgtttggcataggtttaaggattccttcaagagagccgatcatattaatacgaatatacatggaaatgcggaattggaattgaatccatcacagagtctcttacctgagaagggtgctagcttaaagcgagatattaaaccaaggcatgttgttatgatgtctttagctacaggtatcggtactggtctacttgttggtaacggtaaggcattggctaccggtggaccggctggtttgaccattggttatgctattatgggttcttgcttgtacagtattattcaagctgctggtgaactagcagttgcatacccaactttaactggtaatttcaataactatccttcctttttggtggaccctgctatgtgtttcgctaccgctgccctttactgtattcaatggttatgtgtgttcccattagaagtgatttctgcggccattaccatcaaatattggaataccagcataaatcctaatgtttggtgtgttatattttacgttatgatcatcggaattaacatgtgtggttccgctggttatgctgaagccgatttctttttcaacacttgtaaaattttaatgtttgcaggtttcttcatcttgggtatcatcatcaactgtggtggtgcaggtgactcagtttatatcggtggtaaatattggaacgaccctggtgccttcaacggtgacactggtattagtagattcaaggctattgtttctactttggttactgctgcatttgcttttggtgcatcagaagccgttgctttaactgccagtgaacaagctaacccaagaaaagctattccaagtgctgctaagcaagtgttgtacagaattattgccatctacttggctagtatcattctagttgggtttttagttccttataactcccctgaattgatgggttcaggtagttcttctgtccattcttctccttatgtgattgctgttgcatcgcatggtgtcaaagttgtcccatcattcatcaatgcagtcatcttaatctcagtgttatctgtaggtaacttttctttctactcaagttcccgtattcttctatgtttatccgaaatcggttatgctccaaagtttttccaatacgttgatagacaaggtagaccactatatgccatgattgtgggtgctcttgttggttgtatttgctttgttagtgcttcatccgcagaagaaagtgtctttacatggttgatggccgtttccggtttgtcccaattgttcacatggactaacatttgtatttctcatgtcagattcagaaaagccatgcaagttcaaaatagatccataggtgaattaggtttcaggtcccaagttggtgtatggggttcttactatggtatcttcatgatgatattggttttcatcggtcaattctgggtcgcacttttcccagtaggaggtaccgatggtgccgatgccgaaaatttctttgctaattatcttgcaatgccagtcttccttgcactatacttcggtttcaagatatggaagaaggattggagactatatattccagcatctgaaatcgatctcatttctcacagaaagattttcgatgaagaaatactaaaacaagaagatgaggaatataagataaaaatgaaacatgcttccatatgggtaaaattatccaacttctggtgttaa

SEQ ID NO: 63575 - protein, 620 aa, Kluyveromyces lactis NRRL Y-1140
MTGATGSSNSDFISPVGSDVKHNDKSDTIIQSEGFPSIEGEAEYYEKTFSQSDEEYAAKSSVWHRFKDSFKRADHINTNIHGNAELELNPSQSLLPEKGASLKRDIKPRHVVMMSLATGIGTGLLVGNGKALATGGPAGLTIGYAIMGSCLYSIIQAAGELAVAYPTLTGNFNNYPSFLVDPAMCFATAALYCIQWLCVFPLEVISAAITIKYWNTSINPNVWCVIFYVMIIGINMCGSAGYAEADFFFNTCKILMFAGFFILGIIINCGGAGDSVYIGGKYWNDPGAFNGDTGISRFKAIVSTLVTAAFAFGASEAVALTASEQANPRKAIPSAAKQVLYRIIAIYLASIILVGFLVPYNSPELMGSGSSSVHSSPYVIAVASHGVKVVPSFINAVILISVLSVGNFSFYSSSRILLCLSEIGYAPKFFQYVDRQGRPLYAMIVGALVGCICFVSASSAEESVFTWLMAVSGLSQLFTWTNICISHVRFRKAMQVQNRSIGELGFRSQVGVWGSYYGIFMMILVFIGQFWVALFPVGGTDGADAENFFANYLAMPVFLALYFGFKIWKKDWRLYIPASEIDLISHRKIFDEEILKQEDEEYKIKMKHASIWVKLSNFWC

SEQ ID NO: 63576 - DNA, 1719 bp, Debaryomyces hansenii CBS767
  CDS (1)..(1719)
atggtactaggcagtgaaaagaaattgaagccagtgatttcagaaaccagaagaggttcttctgcatcggggtcagagtgtgataatattccaagcgtcggcgttactaagtgggatagatttgtcgatagtttcagaaggcaacacgtacagcacggggacgaagggaagagtttacagaagggtattagttcaagacatttaatccttatggcccttgtgaccgggatgggtacggggcttttcgttggtacaggaaatattctaagtacagcaggtccattatttttgattgttggttatattatagttggatcattcttgtatccaactttgcaagctgccggggagttggcagttaactatagtgagctttcaggtggatataacaactatcccctgaaattcattgatgaatcagttgcatttgcagtaacttggatttactgtatcgagtggttatcgacgttcgcattagaactagtcactgcctccataaccatcagatattgggatggtgatcagaaaattaatccagatgtttgggtcactatcatattcgtgatagtagttctgcttcattttgtcggctccaaagcttacggtgaaggagaatttgttattggatgccttaaagttcttatggtcactggatttcttattatgtccattgttgttaatgttggtggcggtcctgaaggaaaatttattgggggacaatactggcatgatcctggatattatactaacttcaaaggtttatgtacggtatttgtcactggtgcgtttgctttcagtcaatctgaattcgttgcattatcggcggctgaacaaccaaaccccagaagggccattcctactgcgtgtaaattggtattctggagaatattgatattatttttgggttctttgattatggtcggtcttttggttccaatgaattcccctgaattgatgggtgcatctggtggtggttcaaatgcttctccatttgttcttgctgcaactttacatggggttaccgtagtaccacatataatcaatgctgttatcttgctttctgtttgctccgttgcttcatcatcattatatgcatcatctagaactttgcaatcgttagctgatcaaggatacgcaccaaaatatttcaattatattgacagatcaggtagacccttgcgctcattaattgcgtgttctattgttggattattttcttatattgcagcctatgaaaaacaagaaacagtctttaattggttgttatccatctctggattggcgcaactttttacatgggatgttatttgcatttcgcatattagatttagacaagcacttaaatacaatgggatttcaacagactccttaggatatacttcttcaactggtatctggggttcggtatatgccattgtaatacactggttgattttaattgctctgttttatactgccttgtttccggttggatctagtactccagatgcacaaagcttctttcaaaactatctcggcgcaatcgtcttagtattcttttatgtttgtcataaactttggtcgagaaattggaagttctatgtcaatatatgtgatattgacattaatactgatagaactatatttgatgaagaaatattgaacttagaaaaacaagaatttcaagagaaatataataatgatccttggtataagaaacttacgactatactcctttaa

SEQ ID NO: 63577 - protein, 572 aa, Debaryomyces hansenii CBS767
MVLGSEKKLKPVISETRRGSSASGSECDNIPSVGVTKWDRFVDSFRRQHVQHGDEGKSLQKGISSRHLILMALVTGMGTGLFVGTGNILSTAGPLFLIVGYIIVGSFLYPTLQAAGELAVNYSELSGGYNNYPLKFIDESVAFAVTWIYCIEWLSTFALELVTASITIRYWDGDQKINPDVWVTIIFVIVVLLHFVGSKAYGEGEFVIGCLKVLMVTGFLIMSIVVNVGGGPEGKFIGGQYWHDPGYYTNFKGLCTVFVTGAFAFSQSEFVALSAAEQPNPRRAIPTACKLVFWRILILFLGSLIMVGLLVPMNSPELMGASGGGSNASPFVLAATLHGVTVVPHIINAVILLSVCSVASSSLYASSRTLQSLADQGYAPKYFNYIDRSGRPLRSLIACSIVGLFSYIAAYEKQETVFNWLLSISGLAQLFTWDVICISHIRFRQALKYNGISTDSLGYTSSTGIWGSVYAIVIHWLILIALFYTALFPVGSSTPDAQSFFQNYLGAIVLVFFYVCHKLWSRNWKFYVNICDIDINTDRTIFDEEILNLEKQEFQEKYNNDPWYKKLTTILL

SEQ ID NO: 63578 - DNA, 1758 bp, Debaryomyces hansenii CBS767
  CDS (1)..(1758)
atggaacctaaagaagttgaatctacaaacagcgagagcatccctctctctaatggggtatcaagtcgatcatcaacttttgatgataaaaaagagcacacgaaatggcaatcttttaaagactcatttaagagatacgaaggatacgaagaagaagaagaagttgacttagaaaagttggatgacattcagaaaggtaacataaggaccgcaaaatctccattaaaaagaaaattgaaatcgagacatttgcaaatgattgctattgggtcttcgattggaacaggacttttcattgggtcaggatccgctttaaacacaggtggtcctttgggtattttgattgcttgggctttgacaggttcagctattttctgtacgattcaggcgatgggcgagttagcggtaactttcccaatttctggttcgtttaacgtttatgcgagtagattcattgatccatctgttggttttgcagttgcatggaactatttttttcaattcttggttttattacctttagaattagtcgctggttctattacaatgacatactggatcacatcggtcaatcctgatgtctgggtacttattttttacctcgttgttatatctataaatttctttggcgtaaaagcttacggtgaggcagaatttgtattttcatcaattaaagttcttgcagttgttggattcataatagtttctattgttattgctgcaggaggagctccaaatggacattacgtaggagacagatattggcatgatccaggtttgtttgcgaatggatttaagggtgttagttcagtatttgtcacatctgcattctcttttggaggtactgagttagttggtttgacagcagctgagactgataacccaagggtgacattaccaagggcaacaaaacaagtgttctggagaatattgatgttttatatgatatctttaactttgatttgtttcttagtgccttataattctgacagcttgttgggtgccagttcggtcgatgtcaccgcatctccatttgtcattgccatcaacaacgggggtatcggtggcttaccatctgttatgaatgccgttattttgatttccgttatttcggtaggatcttcctcggtatatgcaacatcaaggacattgacggctttagctgaacaaggattggcaccaaaaatctgtggatatattgacagagcaggtagaccactagttgcgatcataattacaaacattttcggtttattgagttttatcgcagcaagtggtaaacaagaagaagtatttaactggttactactgattagtggtttaagttccatcttcacttggtggtctatttgtgtagcccacataagatttagaagggccttatatgtcaaaggaagatcaagcgacgagttgagcttcaaatcccaaactggtgtaattgggtcgatttatggggccaccttaaacactttagtattaattgcagaattttgggtttctttatttccgttaggagaatcacccagcgctgaaggatttttccaaaactatttggggtttgttgttttacttgtattctacgtaggccataaaatatggaagaataattggattctttgcattagagccaagaacattgatgttgacgttggacgtagagaaacagacttagaagcattgaaacaagagttagaggaggaaagagcaatactacgtaccaagccattgtattatagagtttaccgtttctggtgttag

SEQ ID NO: 63579 - protein, 585 aa, Debaryomyces hansenii CBS767
MEPKEVESTNSESIPLSNGVSSRSSTFDDKKEHTKWQSFKDSFKRYEGYEEEEEVDLEKLDDIQKGNIRTAKSPLKRKLKSRHLQMIAIGSSIGTGLFIGSGSALNTGGPLGILIAWALTGSAIFCTIQAMGELAVTFPISGSFNVYASRFIDPSVGFAVAWNYFFQFLVLLPLELVAGSITMTYWITSVNPDVWVLIFYLVVISINFFGVKAYGEAEFVFSSIKVLAVVGFIIVSIVIAAGGAPNGHYVGDRYWHDPGLFANGFKGVSSVFVTSAFSFGGTELVGLTAAETDNPRVTLPRATKQVFWRILMFYMISLTLICFLVPYNSDSLLGASSVDVTASPFVIAINNGGIGGLPSVMNAVILISVISVGSSSVYATSRTLTALAEQGLAPKICGYIDRAGRPLVAIIITNIFGLLSFIAASGKQEEVFNWLLLISGLSSIFTWWSICVAHIRFRRALYVKGRSSDELSFKSQTGVIGSIYGATLNTLVLIAEFWVSLFPLGESPSAEGFFQNYLGFVVLLVFYVGHKIWKNNWILCIRAKNIDVDVGRRETDLEALKQELEEERAILRTKPLYYRVYRFWC

SEQ ID NO: 63580 - DNA, 1764 bp, Debaryomyces hansenii CBS767
  CDS (1)..(1764)
atgcctgaaaaagaacttaattatataaggtcagcagatgctgctacgtccaacgagaaggatggtggagtttttgtcgatgcttttgaagccagtgataacaaggcccctatgggcaaatttgagaaattccgtgactcttttaggagattcgacgatactgaattaggaattgaccctaacttatcggaagtggaaagagctgctatcatcactgctaactccccattgtcgaggtctttgaagaacagacacttacagatgatcgccattggcgggtccattggtacaggtctttttgtgggttctggtactactttgagaaccgggggtccagcagggattttgattgcttatattatcattggggttatgatttattgtactgtccaggcgttaggagaattggctgtgacattcccggtttctggtgctttcgttacttacaatactcgttttatttgtccatcatgggggtttgctatggcttggaactatgctttgcaatggttggttgtgtttccgttagaattggtggcggcgtctattactattgagtattggaacctgtcaattaattcggcggcgtttgtggctattttctatgttttgattgttagtattaatttttttggtgtcaaaggttacggtgaagcagaatttattttctccctcattaaagtcaccgcagtaatgggctttattatattaggtataattattgccgcaggaggtgtaggtcctcaaggttaccttggtggtagatactggcaacatccaggtgcctttgctaatggattcaaaggtgtctgtactgttttcgtcaccgctgcttttgcttttgctggtactgaattagtagggttagcttctgcagaatctgctaatccaagaaagtctttaccaaaggcgaccaagcaagttttctggagaattgttttattttatgttatctctttaaccttggttggtttattggttagatacgatgacgagagattactttctgactcttctgtggacgctaaagcctctcctttcgttattgctatcaaaaatgctgagattagtggattaccatcggtcatgaatgttgtcattatgatttctgttttatctgtcggtaattcgtctgtttttgcttcttcaagaactctagccgcattagcagctgcaagacaagcgccaaagatttttggctatattgataaaaagggtcgtccattagttggtattatcgtccaatgcacctttgggttactttgttttgtctctgcgtctgataagcaaggtgaggttttcaattggttgatggccttgtccggtctttcttccatctttacctggggttcgattaacttctgtcatattagattcagaagggctttgaaagtacaaggaagagatacctccgagattgcatacacttctcaggtcggccttattggctcatatattggtatgactttaaacatcttggtcttaattgcccaattctgggtcgcattgtttccattgggcagttctccagatccaagtgcattcttccaaagttatcttggtttcccagttgttttattcttctatatctgtcacaagctttatagaaggaactggagactctatattagggccaaagatattgatattgatactggtagaagagacttagatttggatttattaaggcaagaacttgccgaagaacgagcatttattgccgcaaaacctttctacgctagggtttggaacttctggtgttaa

SEQ ID NO: 63581 - protein, 587 aa, Debaryomyces hansenii CBS767
MPEKELNYIRSADAATSNEKDGGVFVDAFEASDNKAPMGKFEKFRDSFRRFDDTELGIDPNLSEVERAAIITANSPLSRSLKNRHLQMIAIGGSIGTGLFVGSGTTLRTGGPAGILIAYIIIGVMIYCTVQALGELAVTFPVSGAFVTYNTRFICPSWGFAMAWNYALQWLVVFPLELVAASITIEYWNLSINSAAFVAIFYVLIVSINFFGVKGYGEAEFIFSLIKVTAVMGFIILGIIIAAGGVGPQGYLGGRYWQHPGAFANGFKGVCTVFVTAAFAFAGTELVGLASAESANPRKSLPKATKQVFWRIVLFYVISLTLVGLLVRYDDERLLSDSSVDAKASPFVIAIKNAEISGLPSVMNVVIMISVLSVGNSSVFASSRTLAALAAARQAPKIFGYIDKKGRPLVGIIVQCTFGLLCFVSASDKQGEVFNWLMALSGLSSIFTWGSINFCHIRFRRALKVQGRDTSEIAYTSQVGLIGSYIGMTLNILVLIAQFWVALFPLGSSPDPSAFFQSYLGFPVVLFFYICHKLYRRNWRLYIRAKDIDIDTGRRDLDLDLLRQELAEERAFIAAKPFYARVWNFWC

SEQ ID NO: 63582 - DNA, 1719 bp, Debaryomyces hansenii CBS767
  CDS (1)..(1719)
atgtcagcaaaagatttagaaatgaagccagtggtttctgagctcagaggagatttttccggttcagtatcggactccgaaacacctgctaacaataatgacatgggtaaatgggatcgctttaaagattcgtttaagagacaagaagtttcgcatggtgatgaaggtaaaaaattgcaaaaagggatcagtaagagacacttaacacttatggcccttgttactggtgttggtaccgggttgcttgtgggttcaggtaaggtattgcatgtttctggtccattatttttgatagttggttacgccatcgttgggtcgttcttatatcctactttacaagcggccggggagttggctgtgaattacagtagtctttctggtgggtacaataactatcctcgtaagttcctcgatgaatccattgcatttgcggttacttggaattactgtattcaatggttgtcagttattgctgtggaattagtcactgctgccatgaccattcagtactgggatcagaacacaaaatacaaccctgatatctgggtgtcaattttctttgtggtcattttactcatcaactttgttggttccaagggatatggtgaaggtgagttcgttttcggaagtatcaagttatgtatgatttgtggtttcattctcatggctattatcgtcaattgtggtggtgggcctgttggttttattggtggtagatattggcacaatcctgggtactataccaacttcaaggggttgtgtaatgttttcgtgactggtgccttttcgttgggtcaatctgaattcgttgctttatctgcggctgaacagcctaaccctagaaaggctatccctgctgcctgtaagttaattttctggagaattttaatcttattcttgggttcgttaacaatggttggtcttatggttccatacacttcagacaaattaatgggttctgctggtggtgctaaccatgcttctccatttgtacttgctgctgaattacacagtgttaaagttgctccagatattattaatgccgtcattttgttgtccgtcacttctgttgcatcatccgctttgtactcgtcctcaagaactttacagtccttagctgaacaaggttttgcgccaagttatttcaactatattgacaaggctggtagacctttaagagcattagttgtttgttctattgttggtttattctcattcatagctgcctacaaaaaagaagaagaagttttcacctggttgttatctatctctggtttatcgcaaatcttcacttggaatatcattgttgtatcccatgttagatttagacaagtcttgaagcataacggtatctcacttgattcgttaggttatgttgcgtctacgggtgtatggggttcggtttacgcaattgtatggcattggttgattttaattgcgcaattctacattgcgttgttccctgttggatctagtaccccagacgcccaaaacttcttcgagaattatcttggtgcttgtgttttaatctttttctatgttggtcataaactttggactagaaattggaagttgtacattaagaccagcgacgtcgatattaatgccgatagagttatatttgatgaagaagtattgaacttggaaaagcaagaatatcaagatcaattgaaaagaggtcctttctatgcgagagttatagatttccttttcaaataa

SEQ ID NO: 63583 - protein, 572 aa, Debaryomyces hansenii CBS767
MSAKDLEMKPVVSELRGDFSGSVSDSETPANNNDMGKWDRFKDSFKRQEVSHGDEGKKLQKGISKRHLTLMALVTGVGTGLLVGSGKVLHVSGPLFLIVGYAIVGSFLYPTLQAAGELAVNYSSLSGGYNNYPRKFLDESIAFAVTWNYCIQWLSVIAVELVTAAMTIQYWDQNTKYNPDIWVSIFFVVILLINFVGSKGYGEGEFVFGSIKLCMICGFILMAIIVNCGGGPVGFIGGRYWHNPGYYTNFKGLCNVFVTGAFSLGQSEFVALSAAEQPNPRKAIPAACKLIFWRILILFLGSLTMVGLMVPYTSDKLMGSAGGANHASPFVLAAELHSVKVAPDIINAVILLSVTSVASSALYSSSRTLQSLAEQGFAPSYFNYIDKAGRPLRALVVCSIVGLFSFIAAYKKEEEVFTWLLSISGLSQIFTWNIIVVSHVRFRQVLKHNGISLDSLGYVASTGVWGSVYAIVWHWLILIAQFYIALFPVGSSTPDAQNFFENYLGACVLIFFYVGHKLWTRNWKLYIKTSDVDINADRVIFDEEVLNLEKQEYQDQLKRGPFYARVIDFLFK

SEQ ID NO: 63584 - DNA, 1770 bp, Debaryomyces hansenii CBS767
  CDS (1)..(1770)
atgagcgttaacagcaaagtatctcgtgagaagtcacatagtttctccgaggttgatcatattagaagtggatcactcgaaagcacaggcaatggaggaatatggcagtcattcaagaactcgttcaaaccagctgaacaatctcgtaccttgacactgaaagacatctcggaagaagaggaagcgaaacttactaatgtggagagagcagctttgagatcggctaattcccaattatctcgttctttaaaatccagacacttgcaaatgatcgcgattgggtcttcaattggaacaggtttattcgtaggatctggaggtgctctcagagacggtggtccagccgggttaattattgcatggactgtcatttctacaggtgtgtttgctactgttcaaggtttaggtgagttatcagttgcgttacctgtaagtggtggttttaacatttatgctactagatttatcgaaccagctgttggatttgctattggatggaattatttcatgcaattttttgtgctattgcctttggagttagtagcggcctcgataacaattaaatattggaactcagatttaaattcagatatttttgtggcaatattttgggtgtctgtagtgtttatcacaatgttaggtgtcaaaggatacggtgaggctgaattcgtgttttcattggttaaagtagttgcaattattgggttcataatattaagtattgtcttgatatgtggtggtggcccaactcatgaatttgtcggaggcagtaattggagagagcctggtccatttgccaatggattcaaaggtgtttgttccgttttcgtaactgctgcctttagttttggtggaactgagatgattggcttaactgcagctgaaacagcaaatccaagaaaaacattgccaaaggctattaaacaggtcttctggagaatttgtttgttttacttgttatcattgactatgataggtacgttagtttcatataaggatgaaagcttaattggggcttcagatgtcgacgcgacagcatctccatttgttattgcaattcgtaatggtggtattggcggtttacctagcgttatcaatgctgttattttaatcgccgttttgtcagttggaaattcttcagtatatgctacatcgcgttcattgaattcattggccgaacaaggtatggctcctaaatggacgggttatgtcgatagagctggtagaccacttgttgctattttaattactaatgtgtttggtctttttgcattcattgctgcatctgacaaacaagttgaagctttcgattggttattagcattatcaggtttaagttctattttcacatggatctcaattaatgtagctcatattcgtttcagaagggccatgtcatatcaaggtagaaccactgctgaattaccatacgtatcacaatgtggtgtctggggatcatattatgcgttattactcaattgtttagtattgattgctcaattttggattgcattatttcctcttggaggtagtccaaatgcttatgattttttcctttcctacttaggattaccagtgatccttatgtcctggttgggttataaactttggaagaaggattggacattattcattagagctaaaaatttggacattgacaccggtagaattaacattgatatcgatgttcttcagcaagaaattgctgaggagaaagcacaacttgctgagaagccattctttgtaagattttacaagttctggtgttaa

SEQ ID NO: 63585 - protein, 589 aa, Debaryomyces hansenii CBS767
MSVNSKVSREKSHSFSEVDHIRSGSLESTGNGGIWQSFKNSFKPAEQSRTLTLKDISEEEEAKLTNVERAALRSANSQLSRSLKSRHLQMIAIGSSIGTGLFVGSGGALRDGGPAGLIIAWTVISTGVFATVQGLGELSVALPVSGGFNIYATRFIEPAVGFAIGWNYFMQFFVLLPLELVAASITIKYWNSDLNSDIFVAIFWVSVVFITMLGVKGYGEAEFVFSLVKVVAIIGFIILSIVLICGGGPTHEFVGGSNWREPGPFANGFKGVCSVFVTAAFSFGGTEMIGLTAAETANPRKTLPKAIKQVFWRICLFYLLSLTMIGTLVSYKDESLIGASDVDATASPFVIAIRNGGIGGLPSVINAVILIAVLSVGNSSVYATSRSLNSLAEQGMAPKWTGYVDRAGRPLVAILITNVFGLFAFIAASDKQVEAFDWLLALSGLSSIFTWISINVAHIRFRRAMSYQGRTTAELPYVSQCGVWGSYYALLLNCLVLIAQFWIALFPLGGSPNAYDFFLSYLGLPVILMSWLGYKLWKKDWTLFIRAKNLDIDTGRINIDIDVLQQEIAEEKAQLAEKPFFVRFYKFWC

SEQ ID NO: 63586 - DNA, 1707 bp, Debaryomyces hansenii CBS767
  CDS (1)..(1707)
atgtctaagttgagaacagagaaatcaaataaattagaggcggtggtctcggagatcgaaccgtactactctgattcatcaagagaaggaagtcgttgggcgaacttcaaggattcgttcaaaaggcaagtaccctccgatgaggccaacggatccagtggaattcaaatgcagaagtccattagcaaaaggcatttaagattaatggcattatcgactggtctcggtactgggttattggtggcagcgggagcaaaattagctacagccggtccgttatttcttcttgttggatacgctgtggtgggttatttaatgttaattccctgtataaatgcggttggagagttgtcggtcgcttataacaatttaccaggtggatttcagtcatactatagaaagtttatggacgaaagtattgcattcgcggtcggttggaattattgtttccagtgggctacagtcatctcgttggaacttgtgactgccggaatgaccataaggttttggaccacatctattaatcccgacattttcgtgttgatattcctcatagtggttgtgctcattaacttggccggagccaaaggttacggggaagcggaattctacatgaatagcgtcaagttgctcatgttgggaggtttcattatctttggtattatcattgattgtggtggtggacctgcagggtacattgggggtagatactggcataatccgggtgcatacaccagttttaaaggattatgtagtgttttcgtcacctctgcattctcattaggtgggaccgaattcatctcgttgtcagctgcagaacaggaaaacccaagacaatctattcctgctgcttgtaaattggtttttttcagaatcaccgttttcttccttggttcgttggcattggttgggttgctagttccatataactccgacaagttaatgggttctggtgaatctggtacatctccatatgtaattgcagcccaaatgcacggagtcaaagttattcctcatatcttcaatgcggttatattggtgtcggtcacgtctgtggccactgccgcaatgtattcgtccacgcggttgttacaatcgttggccgagcaaggttacgctccccaatacctcaactacatcgatcgtgccggtagaccattgagatgttggattgtcactatcttgtcatctttttttgcatttattgctacctacaaggaccaagaatccgtcttcacctggttgttgtcgatctcagccttgagtttcattttcacctgggccagtattgatatatgtcacattagattcagagccgctttgaagtacaacaacataccgttgagctcattaggttacgtatctagtaccggtaccatcggctcctacatttccttcatcctcaacattttaattcttatttgtcagttctgggtctcgttgttccccattgggggcgacgggtctcctaacgctctctcattctttcaaaattacttgggtgctgttgttttggtaatcttctacgttggtcacaagctttacactagaaactggagcttatatatcaaggtgcaagatattgatatcgacgccgataggaccatctacgatcccgaaattttggaattggaaaatcttgaaagcaaacagcgctttaacaaggcgcccttctggaagaagatcttgatttactgcttcgattag

SEQ ID NO: 63587 - protein, 568 aa, Debaryomyces hansenii CBS767
MSKLRTEKSNKLEAVVSEIEPYYSDSSREGSRWANFKDSFKRQVPSDEANGSSGIQMQKSISKRHLRLMALSTGLGTGLLVAAGAKLATAGPLFLLVGYAVVGYLMLIPCINAVGELSVAYNNLPGGFQSYYRKFMDESIAFAVGWNYCFQWATVISLELVTAGMTIRFWTTSINPDIFVLIFLIVVVLINLAGAKGYGEAEFYMNSVKLLMLGGFIIFGIIIDCGGGPAGYIGGRYWHNPGAYTSFKGLCSVFVTSAFSLGGTEFISLSAAEQENPRQSIPAACKLVFFRITVFFLGSLALVGLLVPYNSDKLMGSGESGTSPYVIAAQMHGVKVIPHIFNAVILVSVTSVATAAMYSSTRLLQSLAEQGYAPQYLNYIDRAGRPLRCWIVTILSSFFAFIATYKDQESVFTWLLSISALSFIFTWASIDICHIRFRAALKYNNIPLSSLGYVSSTGTIGSYISFILNILILICQFWVSLFPIGGDGSPNALSFFQNYLGAVVLVIFYVGHKLYTRNWSLYIKVQDIDIDADRTIYDPEILELENLESKQRFNKAPFWKKILIYCFD

SEQ ID NO: 63588 - DNA, 1734 bp, Yarrowia lipolytica CLIB122
  CDS (1)..(1734)
atggaaaaaaacgaagtggtatcaaccaactctccccacgaggagggatctgtcactgaggccaacaacggacgatgggccaacttcaaggactccttccgacgagccgatctgagcgaatacgacaccgagggtctttctgatctcgaaaaggccgctctggcaaccgctaactcccctctcagtcgatccctcaagggacgacatctccagatgattgccatcggaggatccattggaactggtctgtttgttggcagtggaaccaccctggccactggaggaccggcagccattctcatcgcctactccatcattggaactatgttgttttgcaccatgcactctctgggagaactgtgtgcttgcttccccgtctccggcgcgtttgcctcttactctactcgattcatcgaccccgcctggggcttcgccatgggatggaactacactctcaactggtttattgtgttccccctggagctcgtagccgcaagtctgacggtcaactactggaatgaagctaacggaaccaactacaatgctggctgctgggtcgctatcttctgggtgctaattgtctccatcaattttttcggagtcaagggctacggagaagccgagttttacttttcgcttattaaagtcattgctgtggtcggattcatcattctcgctattgttctgacctgtggaggaggacccaaccacgactacatcggaggccgatactggcacaaccccggcgctttctctgctggtgccaagggagtctgtgccgtcttcgtgtctgctgcctttgctttcaacggaactgagctggctggcctggctgctgccgagaccgccaatccccgaaagtccatccccactgctaccaagcaagtcttctggcgaattaccctcttctatattgtgtctttgactctggtcggcttccttgttccctgggaccacccccagctgctcaacaagagctcttctgctgacgcttccgcctctccgttcgtcattgccatcaaggctgccggcatcaagggccttccatctgtcatgaacgtcgtcattatgatttccgttctgtccgtcggcaactcctctatctttggtttctctcgaactatcgctgctctcgcccagcaaggtcaggctccttccttcttcgcttacattgatcgaaagggacgacctctgtttggcatcatcacagtctcgctctttggactgtttgcattcatctgtgccggtcctatcgaaacccagaacaccgtcttctactggctcatggccatctgtggcctctcctccatcttcacatggggctccatcaacctgtgccacttccgattccgaatggccatgaaggtccagggtcgatctctccgagaaatgcctttcttgtctcacgtcggaactatcggatccatgtacggcttcctgctcaacgtaaccgtgcttggattgcagttctggatcgctctcttccccgtgggaggtgccaagcctaaggctgacgtcttcttccaggcctacctggctgtacctgttgtcctggccttctatatctttttcaagctgtggaaacggcccagcttcgtggctctaaaggacatggacctcgacactggacgacgagaaactgacttcgagctgctcatgcatgagatggacgaagaggctgcctacattgcctccaagcccttctactaccgagtttacaagttctggtgctaa

SEQ ID NO: 63589 - protein, 577 aa, Yarrowia lipolytica CLIB122
MEKNEVVSTNSPHEEGSVTEANNGRWANFKDSFRRADLSEYDTEGLSDLEKAALATANSPLSRSLKGRHLQMIAIGGSIGTGLFVGSGTTLATGGPAAILIAYSIIGTMLFCTMHSLGELCACFPVSGAFASYSTRFIDPAWGFAMGWNYTLNWFIVFPLELVAASLTVNYWNEANGTNYNAGCWVAIFWVLIVSINFFGVKGYGEAEFYFSLIKVIAVVGFIILAIVLTCGGGPNHDYIGGRYWHNPGAFSAGAKGVCAVFVSAAFAFNGTELAGLAAAETANPRKSIPTATKQVFWRITLFYIVSLTLVGFLVPWDHPQLLNKSSSADASASPFVIAIKAAGIKGLPSVMNVVIMISVLSVGNSSIFGFSRTIAALAQQGQAPSFFAYIDRKGRPLFGIITVSLFGLFAFICAGPIETQNTVFYWLMAICGLSSIFTWGSINLCHFRFRMAMKVQGRSLREMPFLSHVGTIGSMYGFLLNVTVLGLQFWIALFPVGGAKPKADVFFQAYLAVPVVLAFYIFFKLWKRPSFVALKDMDLDTGRRETDFELLMHEMDEEAAYIASKPFYYRVYKFWC

SEQ ID NO: 63590 - DNA, 1881 bp, Yarrowia lipolytica CLIB122
  CDS (1)..(1881)
atgcaaatgctcaaccgaacaaggaagggatccgggctgcacggctctgatcggtggcttgtatataagtcgaagctgggggaccgttgtgggcagtcactgcgtcttcattactccatcagcatggaaaaagactattcagatacgccagaaagtgccgagttcaccgagactcataccgggcaggtggagacggcccatatgagcaaatggcagcggttcaagtacggatttggccctgcggacatcagccatattgacaccgagggtctgactccgatggagatcacagctctcaagacagccaactctcctcttcaacggggactcaagggcagacatctccagatgattgctattggcgggtctattggcacgggtttgtttgttggttcgggcagcacacttgccaacggtggtcctgccgctcttctcattgcctacggcattatcggaatcatgttgctgctgaccatgcacgctctaggagagctggcggtgtgtttccccgtgtcgggagggttctgcacctactttacgcggttcatcgacacggcgtggggctttgccatggcgtggaactacgtcatgaactggtttgtggtgctacctctggagctggtggctgcgtcaatgacggtcaacttctggaacgagatgaacggcacccacatcaacgccgccgcctgggtctccgtgttttgggccgtcatcacctgcattaatctgtttggagtcaagggctatggagaggccgagttcgtcttctccatcatcaaggtggtggctatcgtgggctttgtcattttcggaatcgtcatggcctgtggaggaggacctgaacgcggagacttccatcattacatgggcggaaccctatggcaacaccccggtgcctttgcccacggatttaaaggcgtttgtgccgtgtttgtcactgctgcctttgcttttgccggcaccgaactgtgcggtctggcggcggcggagaccgaaaacccccggaaaatgctgccccgagccaccaaacaggtcttctggcgaatctgtctcttctacattgtgtctctgaccattgtgggtctgttggtgccgtggaacaacgaccagctgctcaacggctcttcttctgccgacgccgccgcctcgccatttgtcattgccattcggctggccggagtcaagggtctgccgtcggtgatgaacgtggtaatcatgatttcggtcctgtcggtcggaaacgcctccgtctacggcttttcgcgaaccatggccgccatgggcgagtccggacaggcccccaagatcttcgcttacattgaccgcgagggccggcccatcttcggtattctggtggtcctggcgttcggactcttctccttcattgccgccgccggcgccgaaaccagaaacgaggtcttcaactggctgctggcgctctcgggtctctcctccgtgtttgtgtggggctccatctgtctcgcccacatccggttccgcttggccctcaaataccggggccgaggaaccgacgaactcaccttccgcgcagcgtttggagtctggggaagcgtgttgggcctgattctcaactgtctagtgctcatggcccagttttggatcgccctgtatcccctgggagcaaagacccccaacgcgtccgacttcttccaggcctacctggcagcgccggtggtcattgccttctggatcttctggaaggtgtggaagcgcgacggctttctgggtctcaaggacctggacattgacaccggccggcgcgaaatggatctcgacaaggtgcgagccgaaatggccatcgaggacgaggagctgtcccgacgctccttcctttatcgaacatacaatttctggtgttag

SEQ ID NO: 63591 - protein, 626 aa, Yarrowia lipolytica CLIB122
MQMLNRTRKGSGLHGSDRWLVYKSKLGDRCGQSLRLHYSISMEKDYSDTPESAEFTETHTGQVETAHMSKWQRFKYGFGPADISHIDTEGLTPMEITALKTANSPLQRGLKGRHLQMIAIGGSIGTGLFVGSGSTLANGGPAALLIAYGIIGIMLLLTMHALGELAVCFPVSGGFCTYFTRFIDTAWGFAMAWNYVMNWFVVLPLELVAASMTVNFWNEMNGTHINAAAWVSVFWAVITCINLFGVKGYGEAEFVFSIIKVVAIVGFVIFGIVMACGGGPERGDFHHYMGGTLWQHPGAFAHGFKGVCAVFVTAAFAFAGTELCGLAAAETENPRKMLPRATKQVFWRICLFYIVSLTIVGLLVPWNNDQLLNGSSSADAAASPFVIAIRLAGVKGLPSVMNVVIMISVLSVGNASVYGFSRTMAAMGESGQAPKIFAYIDREGRPIFGILVVLAFGLFSFIAAAGAETRNEVFNWLLALSGLSSVFVWGSICLAHIRFRLALKYRGRGTDELTFRAAFGVWGSVLGLILNCLVLMAQFWIALYPLGAKTPNASDFFQAYLAAPVVIAFWIFWKVWKRDGFLGLKDLDIDTGRREMDLDKVRAEMAIEDEELSRRSFLYRTYNFWC

SEQ ID NO: 63592 - DNA, 1758 bp, Aspergillus nidulans FGSC A4
  CDS (1)..(1758)
atggacaaagactttttgaagggcaaccctgaacgctcaacatcatctgactctaccccagtctatggcgagtctacatccagacgcgcaagcctgggacagcgggttttaggaagctttcaaagagacccaaatgcccatgtcactgctttcgcgtcattttcggatggcaaaacatatgacatcgaaaatgcgacagaaaaggcagccaactctccgctacatcgtagcctaagaggtcgccatctgcagatgattgctatcggaggctccatcggtaccggcctgttcgtcagctcggggagggtccttgctacgggaggcccggcttcgctcctcatcgcatatgcattgattggatgcatgctctactgtgctgtacatgcccttggggagatggccgtgatattccccgtggctggttcgttcgcccactactcgactcgctttattgatccggcctggggtttcgctatgggttggaactatgctctccaatggctagcaattttacccttagagatcgtggcggctgcaatcaccgttgattactgggaatcgaacatatccagcgccgtatgggttgccctattctgggcggcgattgtctccatcaatctctttggcgtaaaaggttatggtgaagcagagtttgtgttctcctccatcaaagttatagctgtgattgctttcataatactcggcgttatcttgaactgtgccggaggtcaaaatgggagttacataggtgtcaaatactggcatgatcctggggcattccaccatggcttcaaagggctgtgtgatgtatttgttaatgctgggtttgcatttgcgggaaccgagttggttggccttgctgcagccgaaactgccaaccctcgcaagtctttaccgacggccatcaaacaggttttctggcggattacgctcttttacattgtttccctcacgctagtggggcttttgattccctataccgaaccccgacttatcaacggaacctccactgtcgacaccaaggcatccccatttgtgatcgccatcaaaaatgctgggatcgaagtgctagattccgtgatgaacgttgtcatcatgattgccgttttgtctgtcgggaactcagctgtgtatggctcttctcggactcttgctgcgcttgcagagcagcagcaagcccctcggttcctaggctatattgaccgtaagggccgacctttgtgggccatctgtattgcctcggcgatgggcttgctgggctttttagccgccactgacaagcaagaggtcgcttttgagtggatgatcgcgatatctggcctttcgtctatatttacctggggttccatttgtctagcccacatacgctttcgtcgcgcatggaaggtacagggcaacagcctgcatgacctggcgttccgctcccaacccggaattataggctcgtggataggctttgcttttaactgccttgttctggttgcccaattctgggtcggatttgcgccgatcgactatgaaaccatgtcggcgagtatgcttgcccgcaatttcttttcaaaatacctggcggcaccagttgttcttctcttctatataccatacaaactgcggttcaaaaccaagatcctccgggcgaaagacatggatttgcgaacgggtcggcgggagttgaacatccagtggcttatgaaagaggagcgagcgcaacaagctgcatggcctgcttggaagaaaatctataaattcttttgctga

SEQ ID NO: 63593 - protein, 585 aa, Aspergillus nidulans FGSC A4
MDKDFLKGNPERSTSSDSTPVYGESTSRRASLGQRVLGSFQRDPNAHVTAFASFSDGKTYDIENATEKAANSPLHRSLRGRHLQMIAIGGSIGTGLFVSSGRVLATGGPASLLIAYALIGCMLYCAVHALGEMAVIFPVAGSFAHYSTRFIDPAWGFAMGWNYALQWLAILPLEIVAAAITVDYWESNISSAVWVALFWAAIVSINLFGVKGYGEAEFVFSSIKVIAVIAFIILGVILNCAGGQNGSYIGVKYWHDPGAFHHGFKGLCDVFVNAGFAFAGTELVGLAAAETANPRKSLPTAIKQVFWRITLFYIVSLTLVGLLIPYTEPRLINGTSTVDTKASPFVIAIKNAGIEVLDSVMNVVIMIAVLSVGNSAVYGSSRTLAALAEQQQAPRFLGYIDRKGRPLWAICIASAMGLLGFLAATDKQEVAFEWMIAISGLSSIFTWGSICLAHIRFRRAWKVQGNSLHDLAFRSQPGIIGSWIGFAFNCLVLVAQFWVGFAPIDYETMSASMLARNFFSKYLAAPVVLLFYIPYKLRFKTKILRAKDMDLRTGRRELNIQWLMKEERAQQAAWPAWKKIYKFFC

SEQ ID NO: 63594 - DNA, 1947 bp, Candida albicans SC5314
  CDS (1)..(1947): transl_table=12
atgtcaaatcctgaaaaattacagtctcttcagatgatatctatagataacgcaaacactgggagaagatctactttatcatccaccatttcctcgtttgatgcagataggtcattgtacaattcaacaacatcaagtactgggtctaccagctcttctccatatcccagatcttatcatccacgagacctcctcaacagttttatagattcatttaaagaattcgattactcaactttaccaccagtttataacaatatcaccgaccaggaaagtcaacttcaactcaatcctgctaatccaaatttcgactattctcatttcacacaattagaaagagatgcattgattactgcaagctcaccgttgtccaaacgattgaaaacaagacatttgacatggatatcattaggtgcatcaattggaagcggtctacttatatcttctggtagctcattggcccatgctggacccttgggtttattgattgtatggatttttgttgggtcggttatatttgcaaccatgtctagtttggcagaactagccactgcattcccagtgagtggttcatttacaacatatgttactttattcgttgataaatcaataagttttgccatagcatggaattacgcactacagtggctagtaacatttccgttacaattagttgctgcttctcttgccattgagtattggacaatcaaaattcacccagcaatatttgtcaccatcttttatgtctgtattgtttttatcaatttatttggagtctacggctatgcagaaattgaaatggtagtcagtattataaaagtaattgctgtgattggattcaatattttggcaatcataattgttactggtggcgtccctggacaaccatatattggtgccaaaaattggcagggtccacaagggggactattcaatacaattgaaccattcaaacaaatgtgtcatatagtatccaatgttgcgtttgcctatggtggtgtggaattgttcggattggcagctgtggaaacggcatcgcctaaaaaatcaatcaatcgtgccagaaaacaaattttttatcgactcatggtgttttatattttgtccattgttatgattggatttgctgtatcttataaaacccctgaattacaagatagtggtgcttttggtactgatatcaatgcttcaccttttgttattgccatcaagcaagcgaaaataaaggcattgccgtcaataatgaatggggcagttattcttacagtgctttctgtcggaaatgcctctgtatatgcatctacaagagtcctttgcgctattggggcattacaacagggcccaaagtttttgagctttatcgatagaagtggacgtccaatggggtgtttgatagttcaatttgtcttcggattattagcttacttgatttgtataccaggcaaaaatgttccagcacagatttttgattggctattgagtttgtctggcttaagtgctttattcacttatatatcaatgaatgtttgtcaattgcgattcaattgtgctttgaaacatcgagcaaggatacccaaagacgaattgttgtacgtgtcaccattatggtgctcgtggtatggaatattcgccataatagcaatattggcattacaattctgggccgctttgtttccacctggcgcaggaaaagctgacgtcgaaagctttttcaagatatatcttggtggtcctatattattcttgtgctggttaggtcataaattgtactcttattggtatttgaatgtgcctttaaccaagttctggttgaccgttgacgagatagacattgatactggtagaagacaaatcgatttggaaactataaaacaagaaatcgcagaagaaaaaatcgtcatggaaagcaaaccgtggtggtatagattatataaaactttttgttag

SEQ ID NO: 63595 - protein, 648 aa, Candida albicans SC5314
MSNPEKLQSLQMISIDNANTGRRSTLSSTISSFDADRSLYNSTTSSTGSTSSSPYPRSYHPRDLLNSFIDSFKEFDYSTLPPVYNNITDQESQLQLNPANPNFDYSHFTQLERDALITASSPLSKRLKTRHLTWISLGASIGSGLLISSGSSLAHAGPLGLLIVWIFVGSVIFATMSSLAELATAFPVSGSFTTYVTLFVDKSISFAIAWNYALQWLVTFPLQLVAASLAIEYWTIKIHPAIFVTIFYVCIVFINLFGVYGYAEIEMVVSIIKVIAVIGFNILAIIIVTGGVPGQPYIGAKNWQGPQGGLFNTIEPFKQMCHIVSNVAFAYGGVELFGLAAVETASPKKSINRARKQIFYRLMVFYILSIVMIGFAVSYKTPELQDSGAFGTDINASPFVIAIKQAKIKALPSIMNGAVILTVLSVGNASVYASTRVLCAIGALQQGPKFLSFIDRSGRPMGCLIVQFVFGLLAYLICIPGKNVPAQIFDWLLSLSGLSALFTYISMNVCQLRFNCALKHRARIPKDELLYVSPLWCSWYGIFAIIAILALQFWAALFPPGAGKADVESFFKIYLGGPILFLCWLGHKLYSYWYLNVPLTKFWLTVDEIDIDTGRRQIDLETIKQEIAEEKIVMESKPWWYRLYKTFC

SEQ ID NO: 63596 - DNA, 1731 bp, Candida albicans SC5314
  CDS (1)..(1731): transl_table=12
atgagtaggaagtcttctattgatatgcctaaagaggcatctagccccgagtgctacacaacatcgacatccagtaatgaaataagtgaaaaaccaggcatgtggcgaaacttcaaagattcattcaaacctcctgtgcccatcgatgatattgagaatggatcgatatcttcaactcaattaaaaggtggacagaatgttccattacaacaaagtttgaaaaaaagacaactacagatgattgcattaggtggatgtgtgggatcagggttattagtggcgtccggagctgctttgcgtaacggtccagcaagtttgttaattgcttggttcatcgtttctacatttttgtattgtacgatgcaatgtttagccgaattatcgagtactttccctgtgtcgggatcctttgcagtctattctataaagtttattgatccaagttggggtactgccatgggttataattatgcattattttgggttgttgtcatgccattggagttggttgcaagttcaatgactataaagttctggccatcaaatataaatacatctgtttgggtggcagtcttctatgttttgattattggtacaaatttgtttggaggaacaagagcttttggtgagacagagtttgttgcatctgttataaagttgttaggaattgttggtttcaacattttggcaattgttttgatttgtggtggtggtgaccaaggctatattggaggtaaaaactggcatcctccattcaccactggtgtcaaaggtgtgatatccgttttattgacagcaacgtattctttagctggtacagagttggtggggttgacatctgctgaagccgctggtgatgctcgaaaagttttaccaaaggcaatcaaacaagtattgtggagaattttgattttttacttgttgactttgacattagttgggtttttagttccggcctcagacccacaattaattggtggtggtagcggggcatctgcttctccatttgttattgcaattagagaaggtggaatcaaagggttgccttctgtatttaatgttgtcgtcttggtagctttattggctattgctaactctgcggtttacggattttcaagaaccattttggctttggctgaacaaggtgttgcccctagtatatttaaatacgttgacagacagggaagaccacttgctggtatagccacttctgccattgttgggttgttgtcttttgtttctgcctccaaacagcaagaacaagttttcgactggttagtcgctttgtctggtttgtctaccttcttcacctggggaagtattaatgctgcacatattagattcagaattgcaatgaaagttcaaggaagatcattagatgaattgccatacaaggcaaacacaggtgtattgggagcttactacggtttaatcatgaacgttgctgtattggcattacaattttggctcgcagtgtggccaattggaggtaaaccagatgccacatacttttttaaacaatatttggctgctgtcttggtgcttgccgtttacgtaattcacaaagttgctaccagaaactggaaatttatggtcgattacaaggatatggatcttgactccggaagaagtgatatagatattgatatacttaaacaagagctcgaagaagaaagagaagcttataagagacagccatggtattacaagttttatcaattctggtgttaa

SEQ ID NO: 63597 - protein, 576 aa, Candida albicans SC5314
MSRKSSIDMPKEASSPECYTTSTSSNEISEKPGMWRNFKDSFKPPVPIDDIENGSISSTQLKGGQNVPLQQSLKKRQLQMIALGGCVGSGLLVASGAALRNGPASLLIAWFIVSTFLYCTMQCLAELSSTFPVSGSFAVYSIKFIDPSWGTAMGYNYALFWVVVMPLELVASSMTIKFWPSNINTSVWVAVFYVLIIGTNLFGGTRAFGETEFVASVIKLLGIVGFNILAIVLICGGGDQGYIGGKNWHPPFTTGVKGVISVLLTATYSLAGTELVGLTSAEAAGDARKVLPKAIKQVLWRILIFYLLTLTLVGFLVPASDPQLIGGGSGASASPFVIAIREGGIKGLPSVFNVVVLVALLAIANSAVYGFSRTILALAEQGVAPSIFKYVDRQGRPLAGIATSAIVGLLSFVSASKQQEQVFDWLVALSGLSTFFTWGSINAAHIRFRIAMKVQGRSLDELPYKANTGVLGAYYGLIMNVAVLALQFWLAVWPIGGKPDATYFFKQYLAAVLVLAVYVIHKVATRNWKFMVDYKDMDLDSGRSDIDIDILKQELEEEREAYKRQPWYYKFYQFWC

SEQ ID NO: 63598 - DNA, 1857 bp, Candida albicans SC5314
  CDS (1)..(1857): transl_table=12
atgtcaaagaaatatagtgaggaaaatacctcaagtataccattgacagatttaacatctccaagtacaggagaaactagttcacagcaacaacgacaacgagcatcacaacagcaaccaccacaacaaccagaatcaaatactgcaaccggatcaagatggctgaattttgtcgattctttcaaaccagcaattgaaaatgaaaaacttgccatgcgttatcgtgatgccaatgcagatgtcgaagaagatgctggtggatattataattccactgaccaattaaccgagattcaacgtatcaatataaatagttccaaatcaaatttgaaacgaaaattgaaaaatagacatttacaaatgattgctattgcatcatcgatcgggagtggtcttttaattggtactggtggtgcattagccactggtggacccggtgggatattaattgcctggatattgagtgggatatctattttatgtacaattcaagccatggctgagttagcagtgactttcccagttagcggaggatttaatgtgttattcagtagatttattgatccaagtgtgggatttagtgttgcctggaattatgttttacaatatttggtgttactcccattagaattggttgctgcttctatgactatacaatattggaacactgatattaatcctgatgtatgggtgattattttttatgtcacggttacatcaattaatttctttggtgtacgtttatatggagaagttgaatttattcttagttctttaaaagttattgctgttgtcgggttcattattctttcaattgtgttagctgcaggtggtgcacccaatggtgttcatcatggaactaaatattggcatgatccaggtgcatttgcaaatggtttcaaaggggtaagtagtacgtttatcaccgctgcatttagttttgctggtactgaattgaccggattaaccctggctgaagctgaaaaccctcgtaaggcattacctaaagcatgtaaacaagtattttggagaatcttgctattttacgttgttagtattatattgattacatttttggtcccatatgataatccaagacttttaggggcatctgatgtttcagcatctccgtttgttattgctatacaagatggtggtattagtggtcttgcctcagttatgaattctgtcattttaatttcagtgatatccgtggggtcgtcatcggtatatgcaacttcaagaacccttgtatcacttgctgaacaaaatcttgcacctaaaatatgtggatacgttgatcgtgctggtcgtccattagtcgctattcttataactaatgtatttggattattgagttttattgctgccagtggtaaagaagatgaagttttcacttggttattgtcaatttctgggttatcaagtattttcacttggttatgtatctgtatttctcatattagattcagacgtgccttgcacgttcaagggagaaatactgatgaattaacatttgtatcacaaactggggtcattggttcttggtttgggattttattgaatgtgttggttttagtagctgaattttggttagcaattttccccttgggtgaaaaatctaatgctaaaagtttttttgaaacgtatcttggatttgtaattttgattatattttattttggtcataaattatggagaaataattggatcttgtttattagaagtcgtgatattgatattgatagtggtagaagagaaactgatcttgaagcattgaaaagagaattacaagaagaaagagaagttttaaggaataaaccattttggtatagagcttatcatttctggtgttaa

SEQ ID NO: 63599 - protein, 618 aa, Candida albicans SC5314
MSKKYSEENTSSIPLTDLTSPSTGETSSQQQRQRASQQQPPQQPESNTATGSRWSNFVDSFKPAIENEKLAMRYRDANADVEEDAGGYYNSTDQLTEIQRININSSKSNLKRKLKNRHLQMIAIASSIGSGLLIGTGGALATGGPGGILIAWILSGISILCTIQAMAELAVTFPVSGGFNVLFSRFIDPSVGFSVAWNYVLQYLVLLPLELVAASMTIQYWNTDINPDVWVIIFYVTVTSINFFGVRLYGEVEFILSSLKVIAVVGFIILSIVLAAGGAPNGVHHGTKYWHDPGAFANGFKGVSSTFITAAFSFAGTELTGLTSAEAENPRKALPKACKQVFWRILLFYVVSIILITFLVPYDNPRLLGASDVSASPFVIAIQDGGISGLASVMNSVILISVISVGSSSVYATSRTLVSLAEQNLAPKICGYVDRAGRPLVAILITNVFGLLSFIAASGKEDEVFTWLLSISGLSSIFTWLCICISHIRFRRALHVQGRNTDELTFVSQTGVIGSWFGILLNVLVLVAEFWLAIFPLGEKSNAKSFFETYLGFVILIIFYFGHKLWRNNWILFIRSRDIDIDSGRRETDLEALKRELQEEREVLRNKPFWYRAYHFWC

SEQ ID NO: 63600 - DNA, 1740 bp, Candida albicans SC5314
  CDS (1)..(1740): transl_table=12
atgtttaaaaaggaagaccaggctgtttccaaagaggttcggccagaggagttgggaagctttaccggctccgaagaaaaatattctagcaatgaatttctaaataccgaaagtaaaactgggttccagaactttattgattctttcagaagaaaacaagctactgaagatgaaagtgcaggacagcaattggcaaaaggtattagtaagcgtcatttgattttaatgtctttggttactggtataggtactggtcttttggttggtaccggtcaggttttgcgtaaatcagggccattgtttcttgttgttggttatgctattgccgggtcgtttgtgtaccctacattgcaagctgctggtgaaatggccgttaattattctgaattgtcgggtggttataattcatatacaagaatgtttgttgaggatagtattaattttgccatttcatggaattattgtatccaatggttgagtgttattagtattgagcttgttaccgctgccatcaccattgaatattggatcagtgaaacgcgagtgaaccccgatgcatgggttgctattttctatgtcgtcattgttgttattcattttatcggttccaaggcctatggtgaatttgagtttatcattggactgattaaagtttgtttacttgttggtttcattatcatgggtattgttgttgatactggtggtggtccaactggtgaatttattggtggtagatattggagagacccaggtccaactaagaatgggttcaaggggttctgttcagttttcgtcactgcagcattttcatatggtcagtctgagtttgttgctttatctgctgctgaacaaccaaacccacgcaaggccattccaactgcatgcagacttatcttctggcgtatcattgtcttgttccttgggtcccttaccattgttggtttgcttgtgccatcgaactcggaccatttgatgagtgaaggtggtggctcaaacacctctccatttgttctttcggctgcccttcatggtgttaaagcagttccttccattatcaatgccgttattcttatgtctgttacatcggttgcttcttcgtctttgtattctgcttcaagaactttgcaatcattggccgaacaagggtttgcaccaacttggttcaattatattgacagagccggtagaccaacgagagcattattggtttcagctatcattggtttgtttgcatttattgctgcatacaaaaagcaagttactgtctttaattggcttttggctatttctgggttgtcacaagtgtttacctggagtggtatctgtctttctcatgttagatttagacaagcattgaagtataataacatctcgactgatgcattgggttacaaggctagtaccggtgtttggggctcctactatgccttggtttggtatgctttggttttaatttctcaattctggattgcattgtttccaattggtgcttccaaaccagatgctaataactttttccaaagttaccttggtgctattgttttggttgtgttttacattggacacaaattgtacactcgtaaatggagattgttgatcccaataagcgaaatcgatatcaataacgaaagaactatttttgatgaagaaattttgaacctagaaagacaagaggaacaagacaaatgggacagagctccatggcataaaaaaataatgatatttgcttttagtcattga

SEQ ID NO: 63601 - protein, 579 aa, Candida albicans SC5314
MFKKEDQAVSKEVRPEELGSFTGSEEKYSSNEFLNTESKTGFQNFIDSFRRKQATEDESAGQQLAKGISKRHLILMSLVTGIGTGLLVGTGQVLRKSGPLFLVVGYAIAGSFVYPTLQAAGEMAVNYSELSGGYNSYTRMFVEDSINFAISWNYCIQWLSVISIELVTAAITIEYWISETRVNPDAWVAIFYVVIVVIHFIGSKAYGEFEFIIGSIKVCLLVGFIIMGIVVDTGGGPTGEFIGGRYWRDPGPTKNGFKGFCSVFVTAAFSYGQSEFVALSAAEQPNPRKAIPTACRLIFWRIIVLFLGSLTIVGLLVPSNSDHLMSEGGGSNTSPFVLSAALHGVKAVPSIINAVILMSVTSVASSSLYSASRTLQSLAEQGFAPTWFNYIDRAGRPTRALLVSAIIGLFAFIAAYKKQVTVFNWLLAISGLSQVFTWSGICLSHVRFRQALKYNNISTDALGYKASTGVWGSYYALVWYALVLISQFWIALFPIGASKPDANNFFQSYLGAIVLVVFYIGHKLYTRKWRLLIPISEIDINNERTIFDEEILNLERQEEQDKWDRAPWHKKIMIFAFSH

SEQ ID NO: 63602 - DNA, 1767 bp, Candida albicans SC5314
  CDS (1)..(1767): transl_table=12
atgccagaaaaggaattagattacattaggtccacagatgctgctggatccaccgaaaaagacggtggaatttatattgatgcctttgacaaacaagataacgccccaccaaagaaagggtttgccaaattcattgatggtttcagacgtgctgatgctgaagaattaggtattgatcctaacttgtcagaagcagaaaaaattgccattatgactgcaaactccccattgactcgttcattgaaaaatagacatttacaaatgattgctattggtggtagtattggtactggtcttttcgttggttcgggttcttctttacatactgggggtccagctgggcttttgattgcttatatacttattggaactatgatttattgtacagttatgtcccttggggaattggctgttactttccctgtatctggtgcttttgttacttataatagtcgttttattgatccaagttgggggtttgccatggcttggaattatgctatgcaatggctagtggtgttgcccttggaattggttgctgcagcaatgacggtgaaatattgggatgccaaaacaaacctggcggcgttcgtggttattttctatgttttgattgttgctattaacttttttggtgtccgtggttacggtgaagctgaatttatatttagtgccgttaaagttttggctgttttgggtttcattattttgggtattgtattgtgtgctggtggtggtccacaaggtggttatattggaggtaaaaactggtatattgaaggtgctccattccctaatggtgctaaaggtgtcataacggtgtttgtgaatgctgcctttgctttcgctggtactgaattgtgtggattggctgctgctgaaaccgaaaacccaagaaaatcattaccaaaagcttgtaagcaagttttctggagaatcactttattctatgtcatctgtttgactttagttgggttattggttccatggaatgatgaaagattattgggtagttcttctgctgatgcttctgcttctccattcgtcatttcaattagaaatgctggtattaaaggtttaccatcagttatgaatgttgttattatgattgctgtcttatctgttggtaactcctctgtctatggttcctcaagaactttggctgctttggctgcttccaaccaagctccaaaaatatttggttacattgataaacaaggtagaccgttagttggtattattgcccaattgcttgttggtttattatgtttccttgctgcatccgataaacaaggtgaagttttcaattggttgttggccttgtctggtttgtcttctattttcacttggggatcaattaatgtttgtttgattagattcagaagagcattggctgctcaaggtagagacactggtgaattggttttcacttctcaagttggtgttattggtgctatttggggtgcttttttgaacactgttgttctttgtttacaattctggattgctgtgtggccattgcattcttccccaagtgctgaagctttcttcagtgcttacttgactgttcctgttgttattgttttctacgttggtcataaactctggaccaagaattggcaagtctacatttgtgccaaggatattgatatcgatactggtagaagagaattggacttggacttggtcaaacaagaagttgccgaagaaaaggcttacattgcttctttgccattctacagaagagtctacaatgcttggtgttga

SEQ ID NO: 63603 - protein, 588 aa, Candida albicans SC5314
MPEKELDYIRSTDAAGSTEKDGGIYIDAFDKQDNAPPKKGFAKFIDGFRRADAEELGIDPNLSEAEKIAIMTANSPLTRSLKNRHLQMIAIGGSIGTGLFVGSGSSLHTGGPAGLLIAYILIGTMIYCTVMSLGELAVTFPVSGAFVTYNSRFIDPSWGFAMAWNYAMQWLVVLPLELVAAAMTVKYWDAKTNSAAFVVIFYVLIVAINFFGVRGYGEAEFIFSAVKVLAVLGFIILGIVLCAGGGPQGGYIGGKNWYIEGAPFPNGAKGVITVFVNAAFAFAGTELCGLAAAETENPRKSLPKACKQVFWRITLFYVICLTLVGLLVPWNDERLLGSSSADASASPFVISIRNAGIKGLPSVMNVVIMIAVLSVGNSSVYGSSRTLAALAASNQAPKIFGYIDKQGRPLVGIIAQLLVGLLCFLAASDKQGEVFNWLLALSGLSSIFTWGSINVCLIRFRRALAAQGRDTGELVFTSQVGVIGAIWGAFLNTVVLCLQFWIAVWPLHSSPSAEAFFSAYLTVPVVIVFYVGHKLWTKNWQVYICAKDIDIDTGRRELDLDLVKQEVAEEKAYIASLPFYRRVYNAWC

SEQ ID NO: 63604 - DNA, 1800 bp, Candida albicans SC5314
  CDS (1)..(1800): transl_table=12
atgactactaaagagaaagatgaattcaacattggcctgcttcagaatagtcctgaatcatcaactaatatgtcaccagatgttatcaccacacctatttcaaaatggcaagcattcaaagattcatttaaaccaccagaacaaaaaccactagcgtcgtcatcatcgtcaacgtcatcattatcagcttcatccccacatcacaatgatgttgctaataactacgatatagaaaaactgcttagaccagatcaacaaggagaattaaaacgtgaattgaaaaatcgacatgtacaaatgattgccttaggaggatcagtagggaccgggttattgataggtagtggaggtgctttacatcaaggtggtcctgctgctttattaattgcttgggggataacggggaccatggtattttgtattattcattcattaggtgaattatgtgttgcattcccggttaatggtgccttttctacttatgctaatatgtttgttgattcttcttgggcgtttgccgtgggatggaattatgctattatgtggttaattgttttaccattggaattagttgcagcagccatgtgtattacatattggaacgatgaaatcaaccctgcaagttgggtggcgatattttatgtgttgattgttgtcattaatatctttggtgtcaaatattatggtgacgctgaaatgtatcttacaatttttaaaataattgccattgttgggttcataatattgggagtggtattagtatgtggaggtggccccactcatgaatttattggtaataagtattggaaacaagatggtgcttttgctaatgggtttaaaggagtagcaaccacatttgttaccgcttcttattctatggccggatcagaaatggtggggttagccagtgctgaagttgctaatcctcaaaaatctttacctaaagccattagacaggttttctggagaatttttcttttctatttcttatcattaacttttattggattattagttccttctaattcccctcaacttttaggagcaagtggaacaagtgcatctccatttgtcattgccattaaaaatggaggtatttatgcattaccatcaatcttcaacgcttgtatattattatcggttttatccgtggggaacctggcagtatatggttgttcaagaactattcaaagtttaggtgctcaaggtttaggtcccaagatatttgcctatgttgatagaaaaggtcgtccattaggtggtttggtaatatcagccatatttggtttgttatgtttcctttctgcttatcatgacgaagcaactatctttaattggttattgagtgttgctggtcttgctaccattttctcatggtttaacattggattatgtcacgtccgattcaggctagctttaagaaaacaaggtcgttccttacaagaattgacttttacagcattaactggagtttggggatcagtttattctatgatatttttatgtgtggttttggtgattcaattttggacagcattgttccccttgggtagtaaaggtaaagccaatgccgaaaactttttccaaaattatttgggagcagttgtcattttaatcttttatgttggccataaattatacactcgaaattggaaattatgtgtcaaattggaagatatcgatttagatagtggcagaagatcctttgatttggatcttataagagctgaaattgaagaagaaaaagccgctaataaagctaaaccattgtacaaacggttatggaattattggtgttaa

SEQ ID NO: 63605 - protein, 599 aa, Candida albicans SC5314
MTTKEKDEFNIGSLQNSPESSTNMSPDVITTPISKWQAFKDSFKPPEQKPLASSSSSTSSLSASSPHHNDVANNYDIEKSLRPDQQGELKRELKNRHVQMIALGGSVGTGLLIGSGGALHQGGPAALLIAWGITGTMVFCIIHSLGELCVAFPVNGAFSTYANMFVDSSWAFAVGWNYAIMWLIVLPLELVAAAMCITYWNDEINPASWVAIFYVLIVVINIFGVKYYGDAEMYLTIFKIIAIVGFIILGVVLVCGGGPTHEFIGNKYWKQDGAFANGFKGVATTFVTASYSMAGSEMVGLASAEVANPQKSLPKAIRQVFWRIFLFYFLSLTFIGLLVPSNSPQLLGASGTSASPFVIAIKNGGIYALPSIFNACILLSVLSVGNSAVYGCSRTIQSLGAQGLGPKIFAYVDRKGRPLGGLVISAIFGLLCFLSAYHDEATIFNWLLSVAGLATIFSWFNIGLCHVRFRLALRKQGRSLQELTFTALTGVWGSVYSMIFLCVVLVIQFWTALFPLGSKGKANAENFFQNYLGAVVILIFYVGHKLYTRNWKLCVKLEDIDLDSGRRSFDLDLIRAEIEEEKAANKAKPLYKRLWNYWC

SEQ ID NO: 63606 - DNA, 1698 bp, Candida albicans SC5314
  CDS (1)..(1698): transl_table=12
atggagaaaagtaataatcaaatagtcacaagtgaaaaagctcaagataatatttcatgttcagctgtaacaacaaactccaaacaacatcttgggtttgttgatagttttattgattcatttagaagagcaccagaatcaaatacttctgctgagaataaacgacaaacaatttctaaaaatgagttaagattaatggccatttccactgggttgggtaccggtttgcttgtggccacgggtggtagacttagagcagctggtcctgctggaatggttatcgcttatgccatcactggtcttgtcatgttggcaccaacagtcaactcagtagctgaattagcaattgcctaccctggattaccaggtgggttccagtcatactatgggaaatttattgatgaaagtcttggattcgctttagggtggaattatggtttccaatggatgtgtattttggcattagagtttgttactgtatctatgacttttaaattttggactacatctgtacacgctgatgtatttgttgcaatttttttcattattgttactttggtcaacttgggcggagctaaagtgtatgcagtcactgaagctgcattgaattcaattaaaattgtgtttttggtagggtttattatttttggaattattattgatgttggtggtggtccaaatggattcattggtgggaaatattatcacagcccaggtgccttcacttcttttaaaggtttggcttcagtgtttgtttccggggctttcagtttaggtggatctgaattcattagtttatctgcaagtgaaaccaaacaccctaaaactgcaattagagctgcttccaaattggtgtatttcagagtaattgttcttttccttggatcattgaccttggttggattattggtgcctcgtgattctgataacttgatgcatggtagtggctccagtgtgtcaccttatgttcttgctgccaaattgaatggagttaaagttataccccacattataaacactgtcattttactttctgttacttcagttgcatgtgctgctatgtacagttcccctagattgatccaatcattagctgaacaagggttaggacctaaatggttagattatattgataagaagggaagacctacaagagcctggtttatcacaatactagctggtgcctttggatttattgctgctttcaaagatcacgaaactgtgtttatgtggttgttgtcgatatctggtatttcgtttgttatgtgttggttgttcatttgcgtttgccatttacgtttccgttctgctttgaagcttaatggaattgatgttaagactttagaatatgtttctcctactggtatctggggttcatatatttccatcattatcaatagtcttattcttgttgcccaattctggatttctttgtggccattgggtggtgatggcaaaccaaatgctctttcgtttttcgaaaactttttaggtggaccagttttccttatttgttacattggtcacaaactctggactaaaaattggaaattatacaaaaaagtagaagatattgatgtaaacaaagatagagttgtcaaggataccgaaatattacatttagaaaacttggaagataaagagagatacgaaaaggcaccattgtggaaaaaaatattgattatttgtttcgattaa

SEQ ID NO: 63607 - protein, 565 aa, Candida albicans SC5314
MEKSNNQIVTSEKAQDNISCSAVTTNSKQHLGFVDSFIDSFRRAPESNTSAENKRQTISKNELRLMAISTGLGTGLLVATGGRLRAAGPAGMVIAYAITGLVMLAPTVNSVAELAIAYPGLPGGFQSYYGKFIDESLGFALGWNYGFQWMCILALEFVTVSMTFKFWTTSVHADVFVAIFFIIVTLVNLGGAKVYAVTEAALNSIKIVFLVGFIIFGIIIDVGGGPNGFIGGKYYHSPGAFTSFKGLASVFVSGAFSLGGSEFISLSASETKHPKTAIRAASKLVYFRVIVLFLGSLTLVGLLVPRDSDNLMHGSGSSVSPYVLAAKLNGVKVIPHIINTVILLSVTSVACAAMYSSPRLIQSLAEQGLGPKWLDYIDKKGRPTRAWFITILAGAFGFIAAFKDHETVFMWLLSISGISFVMCWLFICVCHLRFRSALKLNGIDVKTLEYVSPTGIWGSYISIIINSLILVAQFWISLWPLGGDGKPNALSFFENFLGGPVFLICYIGHKLWTKNWKLYKKVEDIDVNKDRVVKDTEILHLENLEDKERYEKAPLWKKILIICFD

SEQ ID NO: 63608 - DNA, 1716 bp, Candida albicans SC5314
  CDS (1)..(1716): transl_table=12
atgtcttcatcatcaacggcatcagaagttcacaaggccccagtggtcaaaaatattgaaaagcaggacatggacatgtactcagcatcaagttcatcagcaccaaaaacaacatggaataattttattgattctttccatagagcagacggtaagacttctgctgaaagtaaagaccagcgtatatccaagactgaattgcgtattatgtcattatctactgggttaggtactggtttacttgttgcatccggtagtaaacttagagctgctggtcctgccggtgttcttgttgcttattttatcaccggtatttgtatgttggcgccgaccattaattctgtttctgaattggccattgcttatccgggtttgcctggtgggttccaatcttattatgccaagtttattgatgaaagtcttgggtttgccttgggttggaattatgctttccaatggatgtgtgttttggctttggaattggtcacaagctcaatgataatcaaattttggacaaccacagttaatccagatgtgtttgttgccatattctttgtttttgtcactttgatcaatatgggtggggccaaagtgtatgccgttttcgaagcaagttttaactgttgtaaaattctacttttagttgggtttgttatttttgggttaatcatcgacgttggtggtggtccacaaggttttattggtggtagatattatcatgaccctggtgccttcacatctttcaaaggtttagcttcagtgtttgtcactggtgccttcagtttgggtgggtcagagtttattagtttatcggccagtgaaacaagacatccacgtgcttctatccgtgctgcttcaaaattggtttatttcaaagtcattgttcttttccttggttctttgacttttgttgggttattagttgcttataacaatgatcgtttgatgggaagtggtgatgcagcaagtcatgcttcaccatacgttcttgccgctgaaatgaacggtatcagagtcttgcctcatattatcaatgctgttattttgatttcagttgtttcagttgccactgctgccatgtatagttctccaagattggttcaatcgttggctgaacaaggattgggtcctaaatggttagactacattgacaaaaagggaagaccaaccagagcttggtttattaccgttttggctggattgtttggtttcattgctgcttatgaaaaacaagaaactgttttcgtctggttattgtcgatttcaggtatttcattcatcatgtgttggttatttatttgtgtgagtcacattcgtttcagagctgctttgaaatacagaggtatcacattggaccaattggcttacgtttcaccaactggtgtttggggttcatatctttcagttcttattaattctcttattcttattgctcaattctggatctcattgtggccattaggaggtgacggcaaaccaaacgctaattcattttttgaaaattacttgggtgctcctgtgttcttggtttgttacattggtcataagctctggactagaaattggaaattgttcaagaaagttgaagatattgatattgatacccatagaatgatttgcgatccagaacttttggctttggaagatttggaagacaaagaaagatatcaaaaagctccaatttggaaaaagattttgatcaaatgttttgattag

SEQ ID NO: 63609 - protein, 571 aa, Candida albicans SC5314
MSSSSTASEVHKAPVVKNIEKQDMDMYSASSSSAPKTTWNNFIDSFHRADGKTSAESKDQRISKTELRIMSLSTGLGTGLLVASGSKLRAAGPAGVLVAYFITGICMLAPTINSVSELAIAYPGLPGGFQSYYAKFIDESLGFALGWNYAFQWMCVLALELVTSSMIIKFWTTTVNPDVFVAIFFVFVTLINMGGAKVYAVFEASFNCCKILLLVGFVIFGLIIDVGGGPQGFIGGRYYHDPGAFTSFKGLASVFVTGAFSLGGSEFISLSASETRHPRASIRAASKLVYFKVIVLFLGSLTFVGLLVAYNNDRLMGSGDAASHASPYVLAAEMNGIRVLPHIINAVILISVVSVATAAMYSSPRLVQSLAEQGLGPKWLDYIDKKGRPTRAWFITVLAGLFGFIAAYEKQETVFVWLLSISGISFIMCWLFICVSHIRFRAALKYRGITLDQLAYVSPTGVWGSYLSVLINSLILIAQFWISLWPLGGDGKPNANSFFENYLGAPVFLVCYIGHKLWTRNWKLFKKVEDIDIDTHRMICDPELLALEDLEDKERYQKAPIWKKILIKCFD

SEQ ID NO: 63610 - DNA, 1680 bp, Candida albicans SC5314
  CDS (1)..(1680): transl_table=12
atgtcatatccaacccccaaaaaggagcaagactctatactaagtgaatcataccaaagtttttcaactgcatcgaccaaaaacccaatcaaaaatttcatttactcgttcagggttaacagagatttacaagttacttctgatgagataactactccggatgacttattgaaaggatatcaagttaaactaattgctctatcgtcatgcattggtagtgggttattcatatcgagtgcatccatgatatcgtctgcaggtcccggtggtactgttattggatattttattgttgctatattgatgtttttcattgtgcaagcattaggagaattgacaagttcgtatcctgttagaggtaacttccttgtctacaatactcgttttattgatgaatcgtgggggtttgccatgaattggaattattgtttacaatggattgtcaatattcctttatctttggttgctgcttcattaactattcaatattggactgacaaaatcgaccctgcagtatgggtggcaatattttgggttgttattgtgggaatcagtatatttggtgtcaaaggttatggttacggagaaagtttgttttcagtaatcaaagtagtcgccatagctggattttgtattctaggagttatactagcagctggaggcggggaacaaggatacattggaggtcgtaactggcaccctccattcgtcaacgggtttcatggtatttgtaatactttggttaacctggctttcagttattccggaactgaattagcagcaattgccgccgcagaaacatcaaatccacgtaaatctttaaataaaaccatcaagcaaatattttggagaatcttaattttttacatgcttgttattgtgatagtatgtttcttgattagacacgacgatcccaaattaatgggtaactcaagttggcctgtgtcaccttttgttattgcaatttccaacggtggaatcaaagtcttgccttctattttcaatgctgtcattttgtctgcattattatcagtggctaatgctagtgtttttgctacatacaagccattagttgccttagcagaagcgggccatggaccaaagtttttggcttatgtggatcaaaagggaagaccaatatattcaattatcatagctcttgccttcggtcttattggatttgttggttcatcaagtagtcaagctgttgtgtttaattggttattggcgttaagtggtttatcatgtatatttatttggttttcaatttcattggcccaaataagagtgaactatgcttgtaaagtgcaaggtatcgattccaaaaacgttccattcaaagctattggtggagattatggagcttatttttccatgcttataaatgttttaattttaatggcgcagttttatgttgggttatatcctattaatggtaaatcgttaaatgcatccacgtttttccaagcttatcttgctgttcctattgtgttggttttctatgttgggcacaagctttggaccaaaaattggtcatggtatatcaaggcaaaagatatagatatcactacaggaagaaatattgttgatagtgattttgaattgcaagcaatggaatttgaaaaggagatggaaccaaagaaatcaattatgcacagatttgtcaatttctggtgctga

SEQ ID NO: 63611 - protein, 559 aa, Candida albicans SC5314
MSYPTPKKEQDSILSESYQSFSTASTKNPIKNFIYSFRVNRDLQVTSDEITTPDDLLKGYQVKLIALSSCIGSGLFISSASMISSAGPGGTVIGYFIVAILMFFIVQALGELTSSYPVRGNFLVYNTRFIDESWGFAMNWNYCLQWIVNIPLSLVAASLTIQYWTDKIDPAVWVAIFWVVIVGISIFGVKGYGYGESLFSVIKVVAIAGFCILGVILAAGGGEQGYIGGRNWHPPFVNGFHGICNTLVNSAFSYSGTELAAIAAAETSNPRKSLNKTIKQIFWRILIFYMLVIVIVCFLIRHDDPKLMGNSSWPVSPFVIAISNGGIKVLPSIFNAVILSALLSVANASVFATYKPLVALAEAGHGPKFLAYVDQKGRPIYSIIIALAFGLIGFVGSSSSQAVVFNWLLALSGLSCIFIWFSISLAQIRVNYACKVQGIDSKNVPFKAIGGDYGAYFSMLINVLILMAQFYVGLYPINGKSLNASTFFQAYLAVPIVLVFYVGHKLWTKNWSWYIKAKDIDITTGRNIVDSDFELQAMEFEKEMEPKKSIMHRFVNFWC

SEQ ID NO: 63612 - DNA, 1452 bp, Pediococcus pentosaceus ATCC 25745
  CDS (1)..(1452): transl_table=11
atggcagaacaaggtggtagtcaggttaagcgtgccttaaagacgcgacatatttcaatgatttcactgggtggaagtattggtacaggactattcgtagccagtggatcggcaatctccactgcaggtcccggtggtgcattattagcttacgttgggatgggggtcatggtctatttcctcatgactagtttaggagaaatggcgacttatatgccggtttcgggttcgttttcaacgtacgcaactaaatacgttgatccagcctttggctttgcaatgggatggaattactggtttaactgggctattacggttgcagttgatattagtaccattgccttgattatgaaattctggtttcctcacgctccggggtggatctggagcctgttggcactagtgctagttttcttggtaaatgctttgacggttaaagcttttggtgagactgaatattggattgctttaattaagttagtcacggttattatatttttggtcgtaggagttttaaccattgttggaattatgggaggtaaagccacatatttagaaaactttgtgtatcataaagccccgtttgtgggtgggatccctgctattcttagtgttttcgttgtggctggtttctcgtttcaaggtacagaattgattggaattacagctggcgaatctgaaacacctgaaactagtgttccgaaggccattagccaagtattttggcgaattttactattttacatcttagcaatttttgtgattgcttgtatcatcccttatacaagccctaatttattaggatcatcagcccgtgatgtttccattagtccatttacccttgtgttccgtcgggcaggactagcaggagcagctggggtaatgaatgcggttattttgacctcagtactatcctcagctaattcggggatgtatgcctcgactagaatgttatattcgctttcgaaacaaggatttgctgccaaaatttttggtaaaacttcgaagcgaggaatcccatacctggccttacttggtacaactatcgtaggattgctaacctttatttccagtattatgggacctaaaatttatatatggttagttgctgccagtggactgactggctttgtggcttgggtcggtattgcgattgctcattggcggttccgtcgggcttttattaaacaaggacatgacgtgtcagaacttagatatcgtgcaaaatggttcccatttggaccactctttgcctttgttctcagtattattgtgattgcgggacaagatattcattccattgctaatttcgattggcaagcaattgggattacgtacatggcaattccgctattcattgtgttgtatacctattataaaattagatataaaacgaagttaataccgctggaagaaatcgatttatcgcgtccagatatcacgaaagaataa

SEQ ID NO: 63613 - protein, 483 aa, Pediococcus pentosaceus ATCC 25745
MAEQGGSQVKRALKTRHISMISLGGSIGTGLFVASGSAISTAGPGGALLAYVGMGVMVYFLMTSLGEMATYMPVSGSFSTYATKYVDPAFGFAMGWNYWFNWAITVAVDISTIALIMKFWFPHAPGWIWSLLALVLVFLVNALTVKAFGETEYWIALIKLVTVIIFLVVGVLTIVGIMGGKATYLENFVYHKAPFVGGIPAILSVFVVAGFSFQGTELIGITAGESETPETSVPKAISQVFWRILLFYILAIFVIACIIPYTSPNLLGSSARDVSISPFTLVFRRAGLAGAAGVMNAVILTSVLSSANSGMYASTRMLYSLSKQGFAAKIFGKTSKRGIPYLALLGTTIVGLLTFISSIMGPKIYIWLVAASGLTGFVAWVGIAIAHWRFRRAFIKQGHDVSELRYRAKWFPFGPLFAFVLSIIVIAGQDIHSIANFDWQAIGITYMAIPLFIVLYTYYKIRYKTKLIPLEEIDLSRPDITKE

SEQ ID NO: 63614 - DNA, 1758 bp, Aspergillus niger
  CDS (1)..(1758)
atggagaaggatttcattgaacccaagtcggagccctcgttcggcgacgctcctcctctctacggcgaatctgaatcgaccaaaggcagcgttggccagcggatctgggatagtttcaagagagaccccaatgctcgtgcctcggcgcatcatgaacctggtcatgatgggaagaccttcgacatcgaaaatgccgctcagaatactgctagctcaccactggcacgcaaactcaaaggtcgccatcttcagatgatcgcgattggtggttcaattggtactggtctttttgtcggatctggatcggtcctggcggccggtggtccagcctcggtcctgatcgcatatgccttgatcggctgcatgctttactgcacagtgcacgcgctgggtgaaatggccgttctcttccctgtcgctggttcgttttcgcattattccactcggttcatcgatcccgcttggggtttcgccatgggttggaattatctgctgcagtggctcgtgaccctccccaccgaaattgttgccgcctcgttgactgtcgactactgggattcgggcgtctcgaatgctgcctgggtcgctattttctggacggtaattgtgtgcatcaacatgttcggtgttaagggttatggtgaagcagagtttgtgttttccatcgtcaaggtcaccgccgtagttggcttcatcattctcggtatcatcctgacttgtggcggtgggccccatggtggatacatcggtggaagatactggcacgacccaggtgccttccacaacggcttcaagggtctttgcagtgtttttgtgaacgctgcatttgcgtttgctggtactgagctggttggccttgccgctgcagagaccgctaatcccagaaaatcgctcccgaccgccgtcaagcaggtgttctggcgtatcaccctcttctacattgtgtctctgaccttggtcggcctccttgttccctacaccgattctcgactcctcgatggatcgtctagcgccgatgccaaagcatccccattcgtcatctccattgtgcacgcgggaatctctggactgccgtctgtgatgaacgttgtcatcatgattgctgtgctctccgtgggcaatgcagctgtctacggctcttctagaaccctggcggccctggctgagcaacagcaggccccgaaattcttcgcctacatcgatcgcaaaggccgtcctcttccggctctcatcgttgcttcggcgtttggtttgcttggattcctggccgcttccgataaagagggtgaagccttcacatggatgatggccatctcgggtctctcctccatcttcacctggggatcaatctgcctgtgccacattcgcttccgtcgcgcttggaaattgcaagggcatagcctcgatgagctggctttcaagtcccagcctggtgtgattggttcctggattgggctcattttcaactgcctcgttctgattgctcagttctgggtcggctttgcgcccagcggatatgctgacatgtcagcctctgaattggtatccaacttcttctccgcctaccttgctgcgccagtcgtgttggccttctacatcccctacaagctttggttcaagacccccttcgtccgggccaaggacatggatcttcaaaccggtcgtcgcgatctcgacatccaagcgctcatcgaagaggagaaggcggaacaggcggcctggcctgcgtggaagaaggtgtggaaattcttctgctaa

SEQ ID NO: 63615 - protein, 585 aa, Aspergillus niger
MEKDFIEPKSEPSFGDAPPLYGESESTKGSVGQRIWDSFKRDPNARASAHHEPGHDGKTFDIENAAQNTASSPLARKLKGRHLQMIAIGGSIGTGLFVGSGSVLAAGGPASVLIAYALIGCMLYCTVHALGEMAVLFPVAGSFSHYSTRFIDPAWGFAMGWNYLLQWLVTLPTEIVAASLTVDYWDSGVSNAAWVAIFWTVIVCINMFGVKGYGEAEFVFSIVKVTAVVGFIILGIILTCGGGPHGGYIGGRYWHDPGAFHNGFKGLCSVFVNAAFAFAGTELVGLAAAETANPRKSLPTAVKQVFWRITLFYIVSLTLVGLLVPYTDSRLLDGSSSADAKASPFVISIVHAGISGLPSVMNVVIMIAVLSVGNAAVYGSSRTLAALAEQQQAPKFFAYIDRKGRPLPALIVASAFGLLGFLAASDKEGEAFTWMMAISGLSSIFTWGSICLCHIRFRRAWKLQGHSLDELAFKSQPGVIGSWIGLIFNCLVLIAQFWVGFAPSGYADMSASELVSNFFSAYLAAPVVLAFYIPYKLWFKTPFVRAKDMDLQTGRRDLDIQALIEEEKAEQAAWPAWKKVWKFFC

SEQ ID NO: 63616 - DNA, 1653 bp, Aspergillus oryzae
  CDS (1)..(1653)
atggctagctttgatcaagaggccaaagaaggcaatgatgctaagaatccaacgaacactcccgatgccctggccggggatgttgaggaagcaaatggcaatacacttaagagggccctcgaaggccgacacattcagatgatcgcgatgggcggagcaattggcgcaggtctgtttgtcggctcaggtgaagcgcttgcaaacggtggccctgcttctgtcctgataggttatcttattgtgggagttctgctgctgtgcacaattatgtctctcggggaactagccattatgtatccgattaatggagctttctatcaatatagcactcggttcatagatccttgttggggctttgcgatcggttgggcgtattccctcggctggcttgtcactttaccctttgaaattactgcagccagtttaacaatcgaatactggaactcggacttgaatcccgcaatattcgttagtatcttcctaattgtgctggtcataattcaagtctttggagtgcgcggttacggcgaggtggaatttgtactttccataatcaaggtgatagcatgtatagggctgatcattctggggatcattatcaataccggtggcgtccctggcagtcctcaaggatatattggtggaaaatattggcgtgatccgggcgcctttgcaaacgggttcaaagggttctgcgcggtatttgtgaatgcggcagtagcttttagtggtacagaactcgtcggtctcgcagcggcagagacaaagaatccccagaaaacccttcccacggccacgaagcaggtcctgtggcgcgtgaccatattctacattgtgaacctcctcatcgtcggtctcaacgttccacacaatagcccccagctgctcggctcaggtgacgcagcgagttccgctggagtcagcgcaaatgccagtccctttgtcctggccattcaagatgctggcatccacgtcctgccgtcaattatcaacgcagtcgtcctgatttccagtctgagtgtggccaattcttcaacattcgcctctacaagaacgctacaagccctagccgccgatggaggcgccccgtcatttttcgcctatatcgataaggccggtcgccctctggccccaatcgctctccaggtgctcttcggcttcctagcatacctccagttcgcgtcttccggtctaactatattcaactggctgctttctattgctggcgtgtcaactgtaatgatgaacctgagtatcaacatggcccacatccggtttcgtctggctctaaaggcccagaatcgcagcacggacgaaattccatggaagtccaccctgggaaccgtgggaagctctattggagcttttctttccgctattgctcttgttgcgatgttttattccgcgctttatgcaccgggtggggaccccccaagcgcattcaatttcttccagcaatatctcgctggatttatgggcctcgttctaatgatcttctggaaagtgtggaatcggcagtggtggcttggagtccccctccggcagattgatctagacactggcaggcgatttatggaaatggagcaggttactccagatgaaacgggagaaagccttccctggtggaagagagcgaaacagacaatctgctga

SEQ ID NO: 63617 - protein, 550 aa, Aspergillus oryzae
MASFDQEAKEGNDAKNPTNTPDALAGDVEEANGNTLKRALEGRHIQMIAMGGAIGAGLFVGSGEALANGGPASVLIGYLIVGVLLLCTIMSLGELAIMYPINGAFYQYSTRFIDPCWGFAIGWAYSLGWLVTLPFEITAASLTIEYWNSDLNPAIFVSIFLIVLVIIQVFGVRGYGEVEFVLSIIKVIACIGLIILGIIINTGGVPGSPQGYIGGKYWRDPGAFANGFKGFCAVFVNAAVAFSGTELVGLAAAETKNPQKTLPTATKQVLWRVTIFYIVNLLIVGLNVPHNSPQLLGSGDAASSAGVSANASPFVLAIQDAGIHVLPSIINAVVLISSLSVANSSTFASTRTLQALAADGGAPSFFAYIDKAGRPLAPIALQVLFGFLAYLQFASSGLTIFNWLLSIAGVSTVMMNLSINMAHIRFRLALKAQNRSTDEIPWKSTLGTVGSSIGAFLSAIALVAMFYSALYAPGGDPPSAFNFFQQYLAGFMGLVLMIFWKVWNRQWWLGVPLRQIDLDTGRRFMEMEQVTPDETGESLPWWKRAKQTIC

SEQ ID NO: 63618 - DNA, 1770 bp, Aspergillus oryzae
  CDS (1)..(1770)
atggagaaggacgaaatcgaggccaaggccgagccccgaggagcggccttcgagtccccgccacctctgtacggagatagcgagccaacacaggcaggtcttggtcgcagaatatgggacagtttcaaaagggacccgaatgcccatgtcacgggcggccatggttcctccggtgcagatggaaagtcctttgatatcgaaaacgccgcgcagaagacggctagttcacctttacaacgtagtctcaagggccgtcatctgcagatgattgccatcggtggttctatcggtactggtctttttgtcggatccggaaaagtcttggccacaggtggcccagcgtcggttctcattgcttatgctttgattggttgcatgctttactgcaccgtacacgcacttggtgaaatggctgttcttttccccgttgctggttcatttgcgcactactcgactcgattcattgatccggcatggggtttcgctatgggttggaactatgcattgcaatggctcgtagtgttgccgctggaaattgtagctgcgtcgatcactgtcgactactggcagtccgatatctctaacgccgcatgggtcgcaatcttttgggtattgatcgtctcaatcaacttgttcggcgtcagaggctacggtgaggctgagtttgtcttctcactcattaaggttgttgctgtgattggctttatcatcctcggcattgtcctgaactgcggcggaggtccccagggtggatatatcggtggaaagtattggagcgatcctggtgctttccataatgggttcaaaggtctttgcagtgtcttcgtcaacgccgcgtttgcctttgctggaaccgagctcgtcggtttggctgcagctgagaccgctaaccctcggaaatcgctcccaacagctgtcaagcaagtgttctggcgtatttgtctcttctacattgtatcactcaccctggtcggccttcttgttccctggaatgacgaacgacttcttgatgggagctccagtgctgacgctaaagcctctccatttgtgatcgccatcaagaatgctggtatctccgtgctagactctatcatgaacgtcgttatcatgattgcggtcttatccgtgggtaactcgtcagtttatggctcctctcgtacccttgcagcccttgccgagcagggacaggcccccaaattcctgtcatatattgatcgcaagggtcgccctctctgggcaattctaattgcttctgccctcggtttgcttagtttcttggccgcatcagacaaacaagaagtggctttcgagtggatgatggccatatccggtctctcgtccatcttcacttggggttcggtttgtttggcgcacattcgcttccgtcgtggctggaaggctcagggccacagtctcaatgaactcgccttccaatcacaaccgggagtgatcggctcttggatcgggttcttgttcaactgtctcgttcttgtcgcacagttctgggttggatttgcgccaatcggttatgcgacgaagaccgctggtgagcttgttgaggcctggttttccgtatacctagctgctccagttgtcctgctcttttatatcccttacaagctctggttcaagacgccatttatccgggccaaggacatggacctgcaaaccggtcgtcgcgatctcgatcttcagtacttgatcgagcaggaacgagctgaacaggcagaatggcctgcatggaagaaggtgtataagttcttctgttag

SEQ ID NO: 63619 - protein, 589 aa, Aspergillus oryzae
MEKDEIEAKAEPRGAAFESPPPLYGDSEPTQAGLGRRIWDSFKRDPNAHVTGGHGSSGADGKSFDIENAAQKTASSPLQRSLKGRHLQMIAIGGSIGTGLFVGSGKVLATGGPASVLIAYALIGCMLYCTVHALGEMAVLFPVAGSFAHYSTRFIDPAWGFAMGWNYALQWLVVLPLEIVAASITVDYWQSDISNAAWVAIFWVLIVSINLFGVRGYGEAEFVFSLIKVVAVIGFIILGIVLNCGGGPQGGYIGGKYWSDPGAFHNGFKGLCSVFVNAAFAFAGTELVGLAAAETANPRKSLPTAVKQVFWRICLFYIVSLTLVGLLVPWNDERLLDGSSSADAKASPFVIAIKNAGISVLDSIMNVVIMIAVLSVGNSSVYGSSRTLAALAEQGQAPKFLSYIDRKGRPLWAILIASALGLLSFLAASDKQEVAFEWMMAISGLSSIFTWGSVCLAHIRFRRGWKAQGHSLNELAFQSQPGVIGSWIGFLFNCLVLVAQFWVGFAPIGYATKTAGELVEAWFSVYLAAPVVLLFYIPYKLWFKTPFIRAKDMDLQTGRRDLDLQYLIEQERAEQAEWPAWKKVYKFFC

SEQ ID NO: 63620 - DNA, 2659 bp, Saccharomyces uvarum
  CDS (830)..(2659)
gctcgttctcttcctcttcgtcatatagtttcacccgacttccaccgccctcgcgtacaataatatacttaattttttttctttatgtaataactataatatagtcggaaagagcaattagcataatataattaaatgtttacgcgtacttggccaaccttttcttgcgtagttgtccttgatccaccttcaatgcagagtttcacgtgagtgattacttactcatctgatatatgtcaaaaaagccctacggcactgcggcaggttaacccgcagaaaaagaaacggaccgcttccgccaagaaaagaaacgacggcacggcgtagaaatgacagaaaaaccatgccgcgcctcggctgcggcaaaaggccctttttcgatccaagaactgatactgccgtacgccgcatggtatcccttctgctaagatttatactgagtaggtccggaaccgggcccacaaagtgtggacgctgggctgttatagtcagttctccgcagagagactaccatacaagggcctttgccggcgggtgcgcccgtagcgaagacacatctttcttcgccggcaagattactgtgggatgggctcaaaactgaaaagaaaactgtaaccgctggaatatgactcttcgatgagaaaaagaaaaaaaaacagggtgaaggcgcccatatctactgcacacacacacatatatatatatgtatgctattgtagtttggcttgtgttatgtttgattagaaggcctcttttttggataatggtaaaacgactcatttttagaggtttttaccaattaagagaataatacaactcatattttcaaatgccattatcagaagactttggatcttctggtaagaaagaggcttcgccagattccatttcaatacgctcctttagtgctgtgaacaaccttcagtcatcgtcaagtgaaaaaaattattctggacaaacaacccggaacaacaaacttatacataggttcgtggactcattcaaaagagcagaaggtagcactacacataccaagcaaataaatgagaatacatcagatttagaaggtgatgttaattccttcacgtcggactccaagctgaaaaagtccatgaaatcccgtcacgtcgtcatgatgactctggggacaggtatcggtacgggtcttttggttgccaatgctaagggtcttcattacggtgggcccgccgcattggttatcggttatttcttggtttcgtttgtcacatatttcatgattcaagcagctggtgaaatggccgtcacttatccgactttaccagcaaattttaacgcatactcctccatattcatctccaagccgtttgggtttgccacagtatgggtttactgtttccaatggctaactgttttacccctagagttgatcaccgctgccatgactattaaattttggaatgatacgataaatcccgatattttcattcttatcttctttgttttcttacttttcattcatttctttggtgtgaaaggttatggtgaaacagagtttatcttcaactgctgtaaaattttaatgatagcgggcttcatcattctttccgttgtcattaactgtggtggtgccggaaacgatggttacattggtggcaaatattggcgcaacccaggtgcatttgctggtgacacttcggcgggcaggttcaaaaacgtttgctatattttagttaccgcttacttttcttttggtggtatggaattatttgctttaagtgttcaagaacaggcgaatccaagaaagacaacccctgtggctgctaagagaagtatatatcgtatcctcgttatctacctactaactatgattttaattggattcaacgttccatataatgacgatcaattgatgggtgctggtgggtccgccacacatgcatctccttatgtgctagcggcctccatccatggcgtcaaagtggttccacatatcatcaatgctgttattttgatatctgttatctccgtcgcgaactcctccctatatgcgggcccaagattgatgtgctctttggcccagcaaggttacggacccaaattcttggattacgtcgacagagagggtagaccattaatagctctaattgtgtgtagtgttttcggtgtcatagggtttgttgcagcctcgtccaaggaagaggtcgtgtttgcatggctagctgccatcgcaggtttgagtgaactattcacctggacttccattatgttatcccatttacgttttagacaagcaatgaaagtacaaggaagatctctggatgagttaggatataaagctacaaccggtatttggggttccgcatacggggtcttcttcaatatcttggtgttcattgcccaattctgggtggccttggctcccctgaataatggtggtaaatgcagtgcggagtccttttttcaaagctatctggcttttccaatctggatagctttctacctcgggtatatgatctacaaccgcgacttcacctttttgaatcccctcgataagatcgatctagacttccacagacatatttacgatccagaactgatgagacaagaagacttggaaaatgaagaaaggaaaagagacatgtcgctgatgagaaagacttaccttttctggtgttga

SEQ ID NO: 63621 - protein, 609 aa, Saccharomyces uvarum
MPLSEDFGSSGKKEASPDSISIRSFSAVNNLQSSSSEKNYSGQTTRNNKLIHRFVDSFKRAEGSTTHTKQINENTSDLEGDVNSFTSDSKLKKSMKSRHVVMMTLGTGIGTGLLVANAKGLHYGGPAALVIGYFLVSFVTYFMIQAAGEMAVTYPTLPANFNAYSSIFISKPFGFATVWVYCFQWLTVLPLELITAAMTIKFWNDTINPDIFILIFFVFLLFIHFFGVKGYGETEFIFNCCKILMIAGFIILSVVINCGGAGNDGYIGGKYWRNPGAFAGDTSAGRFKNVCYILVTAYFSFGGMELFALSVQEQANPRKTTPVAAKRSIYRILVIYLLTMILIGFNVPYNDDQLMGAGGSATHASPYVLAASIHGVKVVPHIINAVILISVISVANSSLYAGPRLMCSLAQQGYGPKFLDYVDREGRPLIALIVCSVFGVIGFVAASSKEEVVFAWLAAIAGLSELFTWTSIMLSHLRFRQAMKVQGRSLDELGYKATTGIWGSAYGVFFNILVFIAQFWVALAPLNNGGKCSAESFFQSYLAFPIWIAFYLGYMIYNRDFTFLNPLDKIDLDFHRHIYDPELMRQEDLENEERKRDMSLMRKTYLFWC

SEQ ID NO: 63622 - DNA, 1746 bp, Penicillium chrysogenum
  CDS (1)..(1746)
atggaggagaagaagtttgaggccgtccaaactggcgcggaggcccccccagcttatggcgactcatctccaacgcggggaggcataggccaacgaatctttgacagtttcaagagagaccccaatcatacagtcaccggtcatgttggagctgatggctctggattcgacgctgagactgccgcccataacactgctcactccccgttgcagcgtcgcttgaagggtcgtcatctgcagatgattgctatcggtggttctatcggtactggtcttttcgttggttccggatctgttttggccaccggtggtccagcctcagtattgattgcctatatcttgatcggatgcatgctttattgtacagttcatgcattgggtgaaatggcagttctcttccccgttgccggttctttcgcccattattcaactcgtttcgtcgatcctgcttggggttttgccatgggctggaactacgctcttcagtggcttatcgtcttacccttggagatcgtcgctgcttctatcacggtcgattattggaacccaggggtttcaaatgccgcctgggtaactattttctgggttatgattgtctcaatcaacttattcggtgtgcgaggatatggtgaagctgaatttgtcttctccctcattaaggtcattgccgttattggtttcattatacttggaatcatcctcaactgcggtggtggaccccaaggtggatacatcggcgccaggtactggtacgacccaggtgcatttaggaacggtttcaagggtctctgcagtgtctttgtcaatgccgcatttgcctttgctggaaccgaacttgttggtcttgctgccgccgaaaccaccaatcctcgcaagtcccttccgacagccgttaagcaagtcttctggcgtattgctctcttctacatagtttcccttacccttgtcggcctcctagtgagatatgacgacgagagacttatcagcggtagctcttccgccgatgccaaggcctctcccttcgtcattgctattgagaacgcaggaattaaggctttgccttcgatcatgaatgtcgtgattatgattgcggtcctgtctgtcggcaattcctccgtctatggatcctcacgtactcttgctgcccttgccgagcagggccaagcccccaagttcctagcatacattgaccgcaagggacgtcctctacccgccattatcattgcatctatattgggtctgctttcctacctcgccgcctctgacgtgcagactaccgccttcgaatggatgatggccatctcgggtctgtcatctattttcaccggggttccgtgtgtccgtgcccacatcctcttccgtcgcgcatggaaaaaacagggccacagcctggacgaactggctttccgttcccaacccggcgtcattggctcgtgggtcggtttcattttcaactgtctcgtgctggttgcccagttctgggttgggttcgcccccattggttacgcagacatgacctctcaggagattgcctacaaattcttctctgtctacttggccgcccccgtggttctgatttgctacatcggttataagatcatgtacaagaccaagtttgttcgcacgtccgaggtggatttggtcaccggtcgtcgcgaccttgatatccagcatttaattgagcaggagatggccgagcaaagagaatggcccaagtggaagaaggtttataagttcttctgttaa

SEQ ID NO: 63623 - protein, 581 aa, Penicillium chrysogenum
MEEKKFEAVQTGAEAPPAYGDSSPTRGGIGQRIFDSFKRDPNHTVTGHVGADGSGFDAETAAHNTAHSPLQRRLKGRHLQMIAIGGSIGTGLFVGSGSVLATGGPASVLIAYILIGCMLYCTVHALGEMAVLFPVAGSFAHYSTRFVDPAWGFAMGWNYALQWLIVLPLEIVAASITVDYWNPGVSNAAWVTIFWVMIVSINLFGVRGYGEAEFVFSLIKVIAVIGFIILGIILNCGGGPQGGYIGARYWYDPGAFRNGFKGLCSVFVNAAFAFAGTELVGLAAAETTNPRKSLPTAVKQVFWRIALFYIVSLTLVGLLVRYDDERLISGSSSADAKASPFVIAIENAGIKALPSIMNVVIMIAVLSVGNSSVYGSSRTLAALAEQGQAPKFLAYIDRKGRPLPAIIIASILGLLSYLAASDVQTTAFEWMMAISGLSSIFTGVPCVRAHILFRRAWKKQGHSLDELAFRSQPGVIGSWVGFIFNCLVLVAQFWVGFAPIGYADMTSQEIAYKFFSVYLAAPVVLICYIGYKIMYKTKFVRTSEVDLVTGRRDLDIQHLIEQEMAEQREWPKWKKVYKFFC

SEQ ID NO: 63624 - DNA, 2652 bp, Saccharomyces pastorianus
  CDS (789)..(2618)
actagtttttttctttcttatgaatatctataacatagccggaaagggcaatttgcataatatataactaaaattttaacgcctacttaatcgaacttctcttgcacagtctcccctgaccaaaatgcattgcatacctgtttcagaaccaccttcaatgcagagtttcacgtgagtggttgcttactcatctgatatatgtcaaaaagccttactgacacccgccaaaaaagaaaaggtcctgctccgccaagaaaagaaacgacggcacggcgtagaaatgacagaaaaaccatgccgcgcctcggctgaggcaaaaggccctttttcgatctaagaattgatactgccgtacgccgcatagtatcccttctgctatggctctatactgtgtgggtccggaaccgggctcacgaagtattacgccaggctgttatctccagttccccgcagaaagaccgccataaaagggcctttgccggcgggtgcgccggtagcaaggacagatccgcttgagtttctgcgccggttatgatggtcattatgcgatgggctcaacactgaaatgaaaaccataactgctagaaaatgattcttcgatgagaaaaagaaaaaaaaaacagggtgaaggtgcccatatcttctgtacatatatatacatatactatttgtagtttagtctggcttgtgttttgtttgatggaaaagtatctactggataatggtgaaaaggtttcatttttgaatttttttattaactgagagaatagtacaattcatatttttgaatgccattatcagaagactttggatcttctggtaagaaagaaacctcgccggattccatttcggtacgttcctttagtgctgggaacaaccttcagtcattgacaagtgaaaaaagttattccagagactcaaccgggaacgacaaacttatacatagatttgtggactcatttaagagggcagaaagtagcactacaaagaccaagcaaataaacaagaacacttcagatttagaagaggatgttcattcctttacgtcggactccgacttgaaaaagtccatgaaatcccgtcacgtcgtcatgatgtcgctggggacaggtatcggtacgggtcttttggttgctaatgctaagggtcttcattacggtgggccagccgcattggttatcggctatgttttagtttcctttgtcacatatttcatgattcaagctgctggtgagatggctgtcacttatccgactctaccagcaaatttcaatgcatactcctccatattcgtctccaagccgtttgggttcgccacagtatggctttactgtttccaatggctaaccgttttacccctagagttaatcaccgcatccatgacagttcaattttggaacgataaaatcaatgctgatattttcattctaatcttctttgttttcttacttttcgtccatttctttggtgtgaaagcatacggtgagacagagtttattttcaactgttgtaaaattttaatgatagcgggcttcatcattctttccgttgtcattaactgtggtggtgccggaaatgatggttacattggtggcaaatattggcgtaacccaggtgcatttgctggtgactcttcggcttccaggttcaaaaacatttgctatattttagttaccgcctatttttcgtttggtggtatggaattatttgcattaagtgttcaagaacaggagaatccaagaaagtcgacccctgtggcagctaagagaagcatataccgtatcctcattatctaccttttaactatgattttgattgggttcaatgttccgtataatgatgatcaattgatgggatctggcgggtccgctacacacgcatctccctatgtgttggcagcctccatccatggtgtcaaagttgttccacatattatcaatgctgttattttaatttctgtcatttcagtgtccaactcctccctatatgcgggcccaagattaatgtgctctttggcccagcaaggctacgcacccaaattcttagattacatcgacagagagggtagaccattaagagctttaattgtgtgtagtatttttggcaccgttgcgtttgtcgcagcctcgtccaaggaagaggtcgtgtttacatggctagcagccatcgcaggtttgagtgaactattcacctggacttccatcatgttatctcactttcgttttagacaagcaatgaaagtacaaggaagatctttagatgagttaggatataaagctacatccggtatttggggttccgcatacggagtcttcttcaatatcttggtgttcattgctcaattctgggtggccttggcccccttgggtaatggtggtaaatgtagtgtggagtcctttttcgagagctatctggctgctccaatttggctagctttctacctcgggtatatgatctacaaccgcgatttcacctttttgaaccccctcgacaagatcgatctagacttccacagacgtgtttacgatccagagctgatgagacaagaagatttggaaaataaagaaaaaaaaaaacacatgccgctaatgaaaaaggcttaccttttctggtgttgaacttcatttacatcactaaagttcggacactagt

SEQ ID NO: 63625 - protein, 609 aa, Saccharomyces pastorianus
MPLSEDFGSSGKKETSPDSISVRSFSAGNNLQSLTSEKSYSRDSTGNDKLIHRFVDSFKRAESSTTKTKQINKNTSDLEEDVHSFTSDSDLKKSMKSRHVVMMSLGTGIGTGLLVANAKGLHYGGPAALVIGYVLVSFVTYFMIQAAGEMAVTYPTLPANFNAYSSIFVSKPFGFATVWLYCFQWLTVLPLELITASMTVQFWNDKINADIFILIFFVFLLFVHFFGVKAYGETEFIFNCCKILMIAGFIILSVVINCGGAGNDGYIGGKYWRNPGAFAGDSSASRFKNICYILVTAYFSFGGMELFALSVQEQENPRKSTPVAAKRSIYRILIIYLLTMILIGFNVPYNDDQLMGSGGSATHASPYVLAASIHGVKVVPHIINAVILISVISVSNSSLYAGPRLMCSLAQQGYAPKFLDYIDREGRPLRALIVCSIFGTVAFVAASSKEEVVFTWLAAIAGLSELFTWTSIMLSHFRFRQAMKVQGRSLDELGYKATSGIWGSAYGVFFNILVFIAQFWVALAPLGNGGKCSVESFFESYLAAPIWLAFYLGYMIYNRDFTFLNPLDKIDLDFHRRVYDPELMRQEDLENKEKKKHMPLMKKAYLFWC

SEQ ID NO: 63626 - DNA, 1806 bp, Saccharomyces kluyveri
  CDS (1)..(1806)
atgtcaaaaaaatccctagagaacttaagcaacgaaaagttgccggccacagaatgtggttcttctaactcaaatcttcgagaaagcatttcttctaacgacctcagtgacggagatcgtggtttcgtgaaccgcaagcttcacaacttttgtaattcctttaagagagctaatagtgacacttttgacgcatcacaagatctggaaggcgcatccataaattcggtacgatcaaactcaaaatttaaacagagcatgaagtccaggcacgtcgtcatgatgtctctaggtaccggtattggtaccggtttgttggtcgccaacggtaaatctttgcattttggtgggcctgctggtctattgattgggtactcgttggtgtctgttgttgcctatattatgatgcaagcagctggtgaaatggccgtcgcttatccaacccttcccgggaacttcaatgtgtactcttcaatctttatctccaaatcattcgggtttgctaccgtatggctttattgcttacagtggttgactgttctaccattggagttgattaccgcatcgttaacgataaaatactggaatagttcaatcaaccctgacgcctttatcgccattttttacgcagttatcgttttcattcatttcttcggtgcagccggttacggtgaagccgaatttatctttagtacttgcaaagtgtcgatgattgccggatttattatcctgagtattgtgattaactgtggtggtgcgggtactggcggctacattggcggtgaatattggcgcaaccctggtgcctttgctggtggctctccaattggtcatttcaaaggtattgcctacgttctggtgaccgcctacttttcgtacggtggtatggaattgttcgctctaacagtcaatgaacaggccaaccctagaaaagccgtgccatcagctaccaagaagtgtatctaccgtattctgataatttacatgttgacaatgatcttaattgggtttttggtgccatacaacagtgacgaattgatgggttcttctggtaaatctgcgacacacgcgtcgccttatgtcattgccgttgcatcacacggtgtcaaagttgttccacacatcatcaatgctgttattttaatctctgtcgtttctgtcggtaattctgccatgtattctgctcctagactgctcaattctttagccgagcagggctacgctccaaaaattttcagctatgtggatagagcaggtagaccattggttgcattggttggctgttccattttcggccttttgtcctttgttgctgcttccgataaggaagaacaagtcttcacttggttggctgccattgcaggtttaagcgaacttttcacctggtctgctatctgtctatctcacgtcagattcagagatgctatgaagtatcaagggtactccttgagtgaattggggtacaagtctaagactggctactgggggtccatatacgcaatcttcttcaacataattgtcttcgttgctcaattctgggttgccttggcacccattggtaatggtgggaaggcagacgctgaagcctttttccagagttacctggccttccctatctggatatcctgttatgttggttacaaaatctacagtaaagagtggaaactgcttgttccccttgatgaaattgatctaaacagccatagacacatttttgataaacacattttgcagcaagaagacgatgaacataaggaaaaattgaaaaactccggatggtgggtcaaaatggctaatttttggtgctaa

SEQ ID NO: 63627 - protein, 601 aa, Saccharomyces kluyveri
MSKKSLENLSNEKLPATECGSSNSNLRESISSNDLSDGDRGFVNRKLHNFCNSFKRANSDTFDASQDLEGASINSVRSNSKFKQSMKSRHVVMMSLGTGIGTGLLVANGKSLHFGGPAGLLIGYSLVSVVAYIMMQAAGEMAVAYPTLPGNFNVYSSIFISKSFGFATVWLYCLQWLTVLPLELITASLTIKYWNSSINPDAFIAIFYAVIVFIHFFGAAGYGEAEFIFSTCKVSMIAGFIILSIVINCGGAGTGGYIGGEYWRNPGAFAGGSPIGHFKGIAYVLVTAYFSYGGMELFALTVNEQANPRKAVPSATKKCIYRILIIYMLTMILIGFLVPYNSDELMGSSGKSATHASPYVIAVASHGVKVVPHIINAVILISVVSVGNSAMYSAPRLLNSLAEQGYAPKIFSYVDRAGRPLVALVGCSIFGLLSFVAASDKEEQVFTWLAAIAGLSELFTWSAICLSHVRFRDAMKYQGYSLSELGYKSKTGYWGSIYAIFFNIIVFVAQFWVALAPIGNGGKADAEAFFQSYLAFPIWISCYVGYKIYSKEWKLLVPLDEIDLNSHRHIFDKHILQQEDDEHKEKLKNSGWWVKMANFWC

SEQ ID NO: 63628 - DNA, 1752 bp, Saccharomyces kluyveri
  CDS (1)..(1752)
atgagctcggatatgtccaccgcaaattccaaaaaagaagaggagtctacgtatgcgattattcaaacatcctcaccttgctctaaaaagtattcctatatttccggacaggttaacaggtttattaattcttttagaagaaaaggtgagagtgaagatgttaaggaattgaaaggagagaatgaggaatgtggggctgccaccaaaatgaaaaaaagcatcaaatctcgtcatttattgatgatatcactaggtaccggtattggcacaggtttgcttgttggaaatggtaaggcactggccaaagctggacctgcaggtttagttatagggtatgcagttgcctcgattatgctatactgtattatccaggccgctggtgagttgggtatttgttattctgggatggctggtaactacacggcgtattcgtcactgttggtagaccccgctttaggtttttcagtttcctgggtctactgtgtgcaatggatgacagttttacctctacaattggttaccgctgcaatgactgttagatactggacaaatgccaacccggacatatttgtcgctgtatttttcgttgtaataatggtgattaatatgtttggtgctaaaggttatgctgaagcagagttcctgttcaacatatgcaaagtattgatgattgctgggtttgttatcttgggtattgctataaattgtggcggtgccggtaccagtggatatattggtgctaagtattggcattcgccaggttcatttgctgctggttttaaaggtgtttgttacgtgttctgttacgcagcttttagctacggtggtattgaagtcatggtattgacagctagtgagcaagaaaatccaaggaaatctatcccaaatgcttgtaagaaagtcatttaccgtatactgatgatttacatgctgactacaatcattgtatgtttcctagttccatacaacagcagcgagttgatgggttcttccggcgagtctgcatcacatgcctccccacttgtcattgctgttgcatcgcatggtgttaagatcgtcccacatattataaatgccgtcatattaatctcggtcatttctgttggcaactcctcaatgtattctgctcctagactattactatctctgtctgagcaaggttacgctccaaaatttttaaattacgtggatagacaaggtagaccattgatttgttttgccattaccttgctagttgcgttaattgcatttgtcgccgcgtccgacgccgaagaggatatatttgcttggctattggcgatctcagggttatcccaaatcttcatctggacttccatatgcctttcccatgttagattcagagatgcgatgcacgcacaaggtctttctttgggacaaatcggttacaaatcacaaacaggttattggggttcgtggtttgccatagttataagtgttttggtgttaattgcccagttctgggttgcaattgcaccaattggtgaagaaggtagattaaatgcagaaacatttttccagaattacttggctttcccaattttgttgggtgcttactttggctataaagtttatcacaaagactggagattatgcattccagcaagtgaggtagatttgtcctcccacagaaatatatctgatgaagagatattgagacaagaagattacgaatggaatgagaagatgtccaattcttccatttgggttaggctgtgccatttttggtgctga

SEQ ID NO: 63629 - protein, 583 aa, Saccharomyces kluyveri
MSSDMSTANSKKEEESTYAIIQTSSPCSKKYSYISGQVNRFINSFRRKGESEDVKELKGENEECGAATKMKKSIKSRHLLMISLGTGIGTGLLVGNGKALAKAGPAGLVIGYAVASIMLYCIIQAAGELGICYSGMAGNYTAYSSLLVDPALGFSVSWVYCVQWMTVLPLQLVTAAMTVRYWTNANPDIFVAVFFVVIMVINMFGAKGYAEAEFLFNICKVLMIAGFVILGIAINCGGAGTSGYIGAKYWHSPGSFAAGFKGVCYVFCYAAFSYGGIEVMVLTASEQENPRKSIPNACKKVIYRILMIYMLTTIIVCFLVPYNSSELMGSSGESASHASPLVIAVASHGVKIVPHIINAVILISVISVGNSSMYSAPRLLLSLSEQGYAPKFLNYVDRQGRPLICFAITLLVALIAFVAASDAEEDIFAWLLAISGLSQIFIWTSICLSHVRFRDAMHAQGLSLGQIGYKSQTGYWGSWFAIVISVLVLIAQFWVAIAPIGEEGRLNAETFFQNYLAFPILLGAYFGYKVYHKDWRLCIPASEVDLSSHRNISDEEILRQEDYEWNEKMSNSSIWVRLCHFWC

SEQ ID NO: 63630 - DNA, 1788 bp, Saccharomyces castellii
  CDS (1)..(1788)
atggaaagttctaagaagaatgaaacttctccggaagtgaatagtataacctcttccactttgaagactccaaacgttacagagaaattcgaaccatatccagacactacagctgtcaagcacagaacacatttcaacagattcgttgactcattcaagagagctgaagtaaaccataatggtatagatcttgaagatggtaccaactcaatacaatccgatgataatttaaagaaggccatgaagtccagacacgtcattatgatgtctctagggacgggtatcggtaccgggttgttggtcgccaacgctaagggtctttatttggctggtcctgcatctttagtcattgggtactttatggtctccttcattacatatttcgtcattcaagccgcaggtgaaatggccgtcacatatccaactttaccaggtgggtttaataattacgcttccattttcgtttctaaaccattcggtttcgctaccgtgtggcttttctgtattcaatggttgaccgtcttacctttggaattgattaccgcatccatgactattaaatattggaatgataagattaatgcagatgtcttcgtcgtcatactctacgtgtttttattattcattcatttctttggtgtcagagcatacggtgaggctgaatttattttcaattcatgtaagattctcatgattggagggttcgtcatcctaagtatcgtcgttaattgtggtggagctggtgttgatggatacattggtggcaaatattggcgtgatccaggtgcatttgcatcagataacgcagcttccagatttaaaggtgtggcatttgtccttgtcactgcttatttctcatatggtggtgtcgaattattcgcattgtctgttaatgaacaagaaaatccaagaagatccacccctgctgctgccaagcaaagtatctaccgtatccttatcatttatttgttaaccatgatcttaatcggtttcaacgtcccacataacagtgatcaattgatgggtgctggtggatctgccactcatgcatccccctacgtgttggctgtctccatccacggtgttaaagtggttcctcatatcatcaacgcagtcatcttaatttcagtgacttctgtggctaattccgcattgtatgcatctccaagattactaagatcattagctgaacaagggtacgcacctaaatacttcaattatgtcgatagagaaggtagaccattacgtgcgctaatcttatgtagtatctttggtgtcattgcattctgtgcctgttccgatcaagaagaagtcatcttcacatggttagctgccattgcagggttaagtgaattatttacatggtcctccatccttctatcacatgttcgtttcagattggccatgaaagcccagggcaagtccttgaacgaattagggtatatatcaattactggtatttgggggtccctttacggttgtttcttcaacgttttggtgtttattgcccaattctgggtcgcgctaagtcctcctggtagtaaaggtgtctacagcgcggaagcttttttcgaaagttatttggcattccccgtttggttgttcttctatttaggatacatgctttacagtagagatttcacattcttgaccgatttgaaaaagattgatctagacaaccatagacgcctctacgatcctgaactattgagacaagaagatgaagaaaccaaggagagaataaggaatggtggctggacgcagaagctgttaaatttctggtgttag

SEQ ID NO: 63631 - protein, 595 aa, Saccharomyces castellii
MESSKKNETSPEVNSITSSTLKTPNVTEKFEPYPDTTAVKHRTHFNRFVDSFKRAEVNHNGIDLEDGTNSIQSDDNLKKAMKSRHVIMMSLGTGIGTGLLVANAKGLYLAGPASLVIGYFMVSFITYFVIQAAGEMAVTYPTLPGGFNNYASIFVSKPFGFATVWLFCIQWLTVLPLELITASMTIKYWNDKINADVFVVILYVFLLFIHFFGVRAYGEAEFIFNSCKILMIGGFVILSIVVNCGGAGVDGYIGGKYWRDPGAFASDNAASRFKGVAFVLVTAYFSYGGVELFALSVNEQENPRRSTPAAAKQSIYRILIIYLLTMILIGFNVPHNSDQLMGAGGSATHASPYVLAVSIHGVKVVPHIINAVILISVTSVANSALYASPRLLRSLAEQGYAPKYFNYVDREGRPLRALILCSIFGVIAFCACSDQEEVIFTWLAAIAGLSELFTWSSILLSHVRFRLAMKAQGKSLNELGYISITGIWGSLYGCFFNVLVFIAQFWVALSPPGSKGVYSAEAFFESYLAFPVWLFFYLGYMLYSRDFTFLTDLKKIDLDNHRRLYDPELLRQEDEETKERIRNGGWTQKLLNFWC

SEQ ID NO: 63632 - DNA, 1782 bp, Saccharomyces castellii
  CDS (1)..(1782)
atgccaagaaacgttatacaaccgaacaaggaaaagactgtggactattcgtcgacagaatatcttccaaacgagttagaatctccatcattcaacctcgatgcaactgaggaatctagatctggtctagttcacagattcgtcgactcattcaagagggctcaagattctacagaaaatgatctcgaagatgggacgaaaccattaggtgatgcttcacatttaaagaaggccatgaagtcaagacatgtcatcatgatgtgtgttggtaccggtatcggtacgggtcttctagtggctaatgcttcagggctatcctacggggggcccggttcattagttattggttatgtattggtttcctttgttacttatttcatgattcaagccgcaggtgaaatggccgtcgcataccctacattaccgggaaatttcaattcttatacatcaatgttcatttctaaaccattcggtttcgctacagtatggttatttttcatccaatggttaactgtgttcccattagaattgatcaccgcatcattaactatcaaatactggaatgataaaatcaatgctgatgtattcattgtcatcttctacgtgttcttattatttattcatttctttggtgtcaaagcttacggtgaagctgaatttatcttcaattcatgtaaagttctgatgattgctgggtttatcatattatcaatcgtaatcaactgtggtggtgcaggtaaagatggttatattggtgcaaaatattggagagatccaggttcttttgctgaaggtgattccgtggaaaaatttaaaggtatttgttacatcttagtcaccgcatatttctcctatggtggtgctgaattattctcattatctgtcaatgaacaagagaatccaagaaaatctacccctcaagctgccaaacaaagtatataccgtatcttaatcatttatttgttgacaatgattttaattgggtttaacgtccctcataataacgatcaactaatggggtcgggtggatccgcaacacatgcatccccatacgtcctggccgcatcaattcatggtgttaaagtggttcctcattttatcaatgctgtcattttgatctctgttatttctgtcgcaaattcagctctttatgcatctccaagattgatgtgttcccttgctgaacaaggttatgctccaaaattcttagattatgttgacagagaaggtagaccattacgtgctctaatactttgtgctgtttttggtgtcattgggtttgtctctgcatcatccaaggaggaagaagtcttcacttggttagctgccattgcagggttaagtgaacttttcacttggtcaggaattatgctttctcacgtccgttttagacaatgtatgaaactacatggtagatccgaggaagaaattggtttcagagctgttactggtatctgggggtcaatgtacgggatctcctttaacatgctggtgttcattgcccaattttgggtcgctcttgccccaccaagtcttcatggtaaagtagatgctgagtcattcttccaaagttacttagctgcaccaatttggctattcttttacttcggctacatgctttataagagagatttcacatttttagtcccactggataaaattgacctaaatttccacagaagaatctatgatcctgaactgataagacaggaagatgaagaaaataaggaaaaaatcaaaaattcctctgtgtgggttagaatgttccatttctggtgctaa

SEQ ID NO: 63633 - protein, 593 aa, Saccharomyces castellii
MPRNVIQPNKEKTVDYSSTEYLPNELESPSFNLDATEESRSGLVHRFVDSFKRAQDSTENDLEDGTKPLGDASHLKKAMKSRHVIMMCVGTGIGTGLLVANASGLSYGGPGSLVIGYVLVSFVTYFMIQAAGEMAVAYPTLPGNFNSYTSMFISKPFGFATVWLFFIQWLTVFPLELITASLTIKYWNDKINADVFIVIFYVFLLFIHFFGVKAYGEAEFIFNSCKVLMIAGFIILSIVINCGGAGKDGYIGAKYWRDPGSFAEGDSVEKFKGICYILVTAYFSYGGAELFSLSVNEQENPRKSTPQAAKQSIYRILIIYLLTMILIGFNVPHNNDQLMGSGGSATHASPYVLAASIHGVKVVPHFINAVILISVISVANSALYASPRLMCSLAEQGYAPKFLDYVDREGRPLRALILCAVFGVIGFVSASSKEEEVFTWLAAIAGLSELFTWSGIMLSHVRFRQCMKLHGRSEEEIGFRAVTGIWGSMYGISFNMLVFIAQFWVALAPPSLHGKVDAESFFQSYLAAPIWLFFYFGYMLYKRDFTFLVPLDKIDLNFHRRIYDPELIRQEDEENKEKIKNSSVWVRMFHFWC

SEQ ID NO: 63634 - DNA, 1857 bp, Saccharomyces bayanus
  CDS (1)..(1857)
atgaacgacagcgacagtctctttgtcgacgaggccaatccagctccatgtacacatggtctgcacgagagagggcacgcggaaaaggagaagaaggacttcacagtgactgaaaaccaagatgaaggactacaacagcaagcgaagcgccaagggacgagtgggaaattcaaactacaaaacgaatgcaaaaaattcttcgactcgttcaaaagacagctgccagcggatcaaaattccgaactagagtcacaagaaaggaacaatttgacaaggtccatcaaatcacgccatttgatcatgatcagtctcggcaccggtatcggtacggggctgctggtcgggaatggccaagttctcggaacggcaggacccgccgggttggtgcttggttatggtatcgcctctatcatgctttactgtatcatccaagccgccggtgaactgggtctttgttatgccgggttaaccggtaattacaccaggtactcttccattttggtcgacccttcattggggtttgccgtttccgtggtttataccatccaatggttgaccgttcttcctttgcagttggtcacggcagcgatgactatcaaatattggaccaatgtgaacgcagacatctttgttgccgcagttttcatttttgtcatcatcatcaacttgtttgggtccaaaggctatgccgaagctgaattcatgtttaatatctgtaaaattctgatggtaatcggattcgtgatcctggccattgtcatcaattgcggtggtgcaggtgataggaaattcatcggtactaaatactggcacaatcctggtccatttgctcacggtttcaaaggtgtctgtactgttttttgttatgccgccttcagttacggtggtatcgaagtcctgcttctatcagcagccgagcaagagaacccaacaaaatccattccaaacgcttgcaaaaaagttgtgtatcgtatcttgttcatttacatgttgacgaccattttgatttgcttcctggtaccatacaacagtgacgaattattaggctctggtagctcttccgggtcacatgcatctccatttgtcattgctgttgcgtcccacggtgtcaaagtcgtgcctcacttcatcaatgctgtgattttgatttctgttatttctgtggctaattcttcgttatattctgcaccaaggctactactatcgttggcagaacaagggtttttacctaaatgtctggcgtatgttgacagaaacggcagacctttgctttgttttcttgtttctattatctttgggtgcatcggctttgttgccacgagtgacgctgaagaacaggttttcacatggttattagccatttccagtctttcccaattgtttatttggatgtcgatgtctctgtcacatattagattcagagacgccatggccaagcaaggccgttcaatggacgaggtgggatacaaagcacaaacaggctactggggatcttggcttgcggttttgattgcgttatttttcctagtttgccagttttgggtcgccatcgcacccgttagcaaacatggtaaattggatgctaatgttttcttccagaattatttggcaatgcccattgtcttgtttgcctatttcggccacaagatctacaccaaatcgtggaagttttggattccagccgaaaaaatcgatttggactcacacagaaccatatacgtcccaccaatactcatggggactaacaagattgatgacgatgatcttaaagaatatgaaacttcagagtcatcggaaaacccgaacggctcaggctcaagaaagtttttcaagagaatggctaatttctggtgttaa

SEQ ID NO: 63635 - protein, 618 aa, Saccharomyces bayanus
MNDSDSLFVDEANPAPCTHGLHERGHAEKEKKDFTVTENQDEGLQQQAKRQGTSGKFKLQNECKKFFDSFKRQLPADQNSELESQERNNLTRSIKSRHLIMISLGTGIGTGLLVGNGQVLGTAGPAGLVLGYGIASIMLYCIIQAAGELGLCYAGLTGNYTRYSSILVDPSLGFAVSVVYTIQWLTVLPLQLVTAAMTIKYWTNVNADIFVAAVFIFVIIINLFGSKGYAEAEFMFNICKILMVIGFVILAIVINCGGAGDRKFIGTKYWHNPGPFAHGFKGVCTVFCYAAFSYGGIEVLLLSAAEQENPTKSIPNACKKVVYRILFIYMLTTILICFLVPYNSDELLGSGSSSGSHASPFVIAVASHGVKVVPHFINAVILISVISVANSSLYSAPRLLLSLAEQGFLPKCLAYVDRNGRPLLCFLVSIIFGCIGFVATSDAEEQVFTWLLAISSLSQLFIWMSMSLSHIRFRDAMAKQGRSMDEVGYKAQTGYWGSWLAVLIALFFLVCQFWVAIAPVSKHGKLDANVFFQNYLAMPIVLFAYFGHKIYTKSWKFWIPAEKIDLDSHRTIYVPPILMGTNKIDDDDLKEYETSESSENPNGSGSRKFFKRMANFWC

SEQ ID NO: 63636 - DNA, 1902 bp, Saccharomyces bayanus
  CDS (1)..(1902)
atgtcctcgtcgacgtcgccatacgaactgaaggacttgaaaaatagctccactgaagtacatgccgcggagcaggagaacgaaatcgagtatttcgaaacagactccaatgaccgtccctcgcagcagcctcatctggactacgagcaacacaacacctctgccgtgcgtcggttcctcgactccttcaagagggccgaccaggatcaagagcaggaggcagaagtggcacagatgaacgacctcacgtccgccatttcgccctcgtccagacaggctcacgagctggagaaggacgagactactgacaagatagctcctcacacgggccacaaatccgactcgctgaagaagaccatccagcccagacacgtgcttatgattgcgctcggtaccgggatcggtaccgggctactggtgggtaatggtacagcgctggtgcatgcgggccccgctgggctgctcatcggttacgccatcatgggttccattctgtactgcatcatccaggcctgtggtgagatggccctcgtgtacagcaacctgaccggtgggtacaatgcatacccgagtttcctggtggatgacgggttcgggtttgccgtcgcctgggtttactgtctgcaatggttatgtgtgtgtcccctggagctggtcacggcgtccatgaccatcaagtactggaccacgtccgtcaacccggacgtgttcgtcatcatcttctatgtcctggtcatcaccattaacattttcggcgctcgtggttacgcagaggcggaattcttcttcaactgctgcaaaatcctcatgatgaccgggttcttcattctcgggatcatcatcgatgtcggtggggccggaaacgacggctacattggtggcaagtactggcacgaacccggtgcgttcaacggtgtgcacgccattgacagattcaaaggtgtcgtcgccactttggtcaccgctgccttcgcgtttggtgggtccgaattcattgccatcaccactgccgaacagtccaacccaagaaaggccattccaggtgccgccaagcagatgatctacagaatcctgttcctgttcctggccaccatcatcattgtgggtttcctcgtgccatacaactccgaccaactgttgggttccagcggtggcggtaccaaggcctccccatacgttattgccatcgcatcccacggtgttcgtgtggccccacatttcgtcaacgccgttatcctactgtcggtcctatccatggccaactcctctttctactccagtgcccgtttgttcctaactttatccgagcaaggttacgcccccaagatcttttcctacattgacagagccggcagacctttgattgccatgtgcgtctccgcattgtttgccgtcattgccttctgtgctgcatcccccaaggaggaccaagtgttcacttggttgttggccatttccggtctatcccaacttttcacgtggaccgccatttgtctttctcatatcagattcagaagagccatgaaagtccaaggcagatcccttggtgaattgggtttcaaatctcaaaccggtgtttggggctctatctactcctgtatcatgatgatcctgattcttattggccaattctgggtcgccatcgcccccattggcgaaggtaagctggacgctcaagccttcttcgagaactacctggccatgccgatcctgattgtactgtacgtgggttacaaaatgtggaacaaggattggaaactgttcattagagccgataagatcgatttgacctctcacagacaaatcttcgacgaagaattaatcaagcaagaagatgacgaatacagagaacgtttgagaaccggcccttattggagaagggtcttggccttctggtgttga

SEQ ID NO: 63637 - protein, 633 aa, Saccharomyces bayanus
MSSSTSPYELKDLKNSSTEVHAAEQENEIEYFETDSNDRPSQQPHLDYEQHNTSAVRRFLDSFKRADQDQEQEAEVAQMNDLTSAISPSSRQAHELEKDETTDKIAPHTGHKSDSLKKTIQPRHVLMIALGTGIGTGLLVGNGTALVHAGPAGLLIGYAIMGSILYCIIQACGEMALVYSNLTGGYNAYPSFLVDDGFGFAVAWVYCLQWLCVCPLELVTASMTIKYWTTSVNPDVFVIIFYVLVITINIFGARGYAEAEFFFNCCKILMMTGFFILGIIIDVGGAGNDGYIGGKYWHEPGAFNGVHAIDRFKGVVATLVTAAFAFGGSEFIAITTAEQSNPRKAIPGAAKQMIYRILFLFLATIIIVGFLVPYNSDQLLGSSGGGTKASPYVIAIASHGVRVAPHFVNAVILLSVLSMANSSFYSSARLFLTLSEQGYAPKIFSYIDRAGRPLIAMCVSALFAVIAFCAASPKEDQVFTWLLAISGLSQLFTWTAICLSHIRFRRAMKVQGRSLGELGFKSQTGVWGSIYSCIMMILILIGQFWVAIAPIGEGKLDAQAFFENYLAMPILIVLYVGYKMWNKDWKLFIRADKIDLTSHRQIFDEELIKQEDDEYRERLRTGPYWRRVLAFWC

SEQ ID NO: 63638 - DNA, 1830 bp, Saccharomyces bayanus
  CDS (1)..(1830)
atgccattatcagaagactttggatcttctggtaagaaagaggcttcgccagattccatttcaatacgctcctttagtgctgtgaacaaccttcagtcatcgtcaagtgaaaaaaattattctggacaaacaacccggaacaacaaacttatacataggttcgtggactcattcaaaagagcagaaggtagcactacacataccaagcaaataaatgagaatacatcagatttagaaggtgatgttaattccttcacgtcggactccaagctgaaaaagtccatgaaatcccgtcacgtcgtcatgatgactctggggacaggtatcggtacgggtcttttggttgccaatgctaagggtcttcattacggtgggcccgccgcattggttatcggttatttcttggtttcgtttgtcacatatttcatgattcaagcagctggtgaaatggccgtcacttatccgactttaccagcaaattttaacgcatactcctccatattcatctccaagccgtttgggtttgccacagtatgggtttactgtttccaatggctaactgttttacccctagagttgatcaccgctgccatgactattaaattttggaatgatacgataaatcccgatattttcattcttatcttctttgttttcttacttttcattcatttctttggtgtgaaaggttatggtgaaacagagtttatcttcaactgctgtaaaattttaatgatagcgggcttcatcattctttccgttgtcattaactgtggtggtgccggaaacgatggttacattggtggcaaatattggcgcaacccaggtgcatttgctggtgacacttcggcgggcaggttcaaaaacgtttgctatattttagttaccgcttacttttcttttggtggtatggaattatttgctttaagtgttcaagaacaggcgaatccaagaaagacaacccctgtggctgctaagagaagtatatatcgtatcctcgttatctacctactaactatgattttaattggattcaacgttccatataatgacgatcaattgatgggtgctggtgggtccgccacacatgcatctccttatgtgctagcggcctccatccatggcgtcaaagtggttccacatatcatcaatgctgttattttgatatctgttatctccgtcgcgaactcctccctatatgcgggcccaagattgatgtgctctttggcccagcaaggttacggacccaaattcttggattacgtcgacagagagggtagaccattaatagctctaattgtgtgtagtgttttcggtgtcatagggtttgttgcagcctcgtccaaggaagaggtcgtgtttgcatggctagctgccatcgcaggtttgagtgaactattcacctggacttccattatgttatcccatttacgttttagacaagcaatgaaagtacaaggaagatctctggatgagttaggatataaagctacaaccggtatttggggttccgcatacggggtcttcttcaatatcttggtgttcattgcccaattctgggtggccttggctcccctgaataatggtggtaaatgcagtgcggagtccttttttcaaagctatctggcttttccaatctggatagctttctacctcgggtatatgatctacaaccgcgacttcacctttttgaatcccctcgataagatcgatctagacttccacagacatatttacgatccagaactgatgagacaagaagacttggaaaatgaagaaaggaaaagagacatgtcgctgatgagaaagacttaccatttctggtgttga

SEQ ID NO: 63639 - protein, 609 aa, Saccharomyces bayanus
MPLSEDFGSSGKKEASPDSISIRSFSAVNNLQSSSSEKNYSGQTTRNNKLIHRFVDSFKRAEGSTTHTKQINENTSDLEGDVNSFTSDSKLKKSMKSRHVVMMTLGTGIGTGLLVANAKGLHYGGPAALVIGYFLVSFVTYFMIQAAGEMAVTYPTLPANFNAYSSIFISKPFGFATVWVYCFQWLTVLPLELITAAMTIKFWNDTINPDIFILIFFVFLLFIHFFGVKGYGETEFIFNCCKILMIAGFIILSVVINCGGAGNDGYIGGKYWRNPGAFAGDTSAGRFKNVCYILVTAYFSFGGMELFALSVQEQANPRKTTPVAAKRSIYRILVIYLLTMILIGFNVPYNDDQLMGAGGSATHASPYVLAASIHGVKVVPHIINAVILISVISVANSSLYAGPRLMCSLAQQGYGPKFLDYVDREGRPLIALIVCSVFGVIGFVAASSKEEVVFAWLAAIAGLSELFTWTSIMLSHLRFRQAMKVQGRSLDELGYKATTGIWGSAYGVFFNILVFIAQFWVALAPLNNGGKCSAESFFQSYLAFPIWIAFYLGYMIYNRDFTFLNPLDKIDLDFHRHIYDPELMRQEDLENEERKRDMSLMRKTYHFWC

SEQ ID NO: 63640 - DNA, 1788 bp, Saccharomyces cerevisiae
  CDS (1)..(1788)
atgtcgtcgtcgaagtctctatacgaactgaaagacttgaaaaatagctccacagaaatacatgccacggggcaggataatgaaattgaatatttcgaaacaggctccaatgaccgtccatcctcacaacctcatttaggttacgaacagcataacacttctgccgtgcgtaggtttttcgactcctttaaaagagcggatcagggtccacaggatgaagtagaagcaacacaaatgaacgatcttacgtcggctatctcaccttcttctagacaggctcaagaactagaaaaaaatgaaagttcggacaacataggcgctaatacaggtcataagtcggactcgctgaagaaaaccattcagcctagacatgttctgatgattgcgttgggtacgggtatcggtactgggttattggtcggtaacggtaccgcgttggttcatgcgggtccagctggactacttattggttacgctattatgggttctatcttgtactgtattattcaagcatgtggtgaaatggcgctagtgtatagtaacttgactggtggctacaatgcataccccagtttccttgtggatgatggttttgggtttgcagtcgcttgggtttattgtttgcaatggctgtgtgtgtgtcctctggaattggtgaccgcatccatgactatcaaatattggacgacatctgtgaacccggatgtgttcgtcattattttctatgttttggtgattactattaatattttcggtgctcgtggttatgcagaagctgagttcttcttcaactgttgcaaaattttgatgatgactgggttcttcattcttggtattatcatcgatgttggtggcgctggtaatgatggttttattggtggtaaatactggcacgatccgggcgctttcaatggtaaacatgccattgacagatttaaaggtgttgctgcaacattagtgactgctgcttttgcctttggtggttcagagtttattgccatcaccactgcagaacaatctaatccaagaaaggccattccaggtgcggccaaacaaatgatctacagaatcttattcctattcttggctaccattattctactgggtttcttggtgccatacaattccgatcaattattgggttctaccggtggtggtactaaagcctcgccatatgtcattgctgttgcatcccacggtgtccgtgtcgtcccacacttcattaacgccgttattctactttccgtgctgtccatggctaactcctccttctactccagtgctcgtttatttttaactctatccgagcaaggttacgctcctaaggttttctcctacatcgacagagccggtagaccattgattgccatgggtgtttctgcattgtttgccgttattgccttctgtgctgcatctcccaaggaagaacaagttttcacttggttattggccatttctggtttgtctcagcttttcacatggactgccatttgtttatcccatcttagatttagaagagccatgaaagtccaagggagatctcttggagaattgggtttcaaatctcaaactggtgtttggggatctgcctacgcttgcattatgatgattttaattcttattgcccaattttgggtcgctatcgcccccattggtgaaggtaagctggatgcacaagcctttttcgaaaactacttggctatgccaatcttgattgcactttatgtcggctacaaggtctggcacaaggattggaaactgttcatcagggagacaagatcgacctag

SEQ ID NO: 63641 - protein, 595 aa, Saccharomyces cerevisiae
MSSSKSLYELKDLKNSSTEIHATGQDNEIEYFETGSNDRPSSQPHLGYEQHNTSAVRRFFDSFKRADQGPQDEVEATQMNDLTSAISPSSRQAQELEKNESSDNIGANTGHKSDSLKKTIQPRHVLMIALGTGIGTGLLVGNGTALVHAGPAGLLIGYAIMGSILYCIIQACGEMALVYSNLTGGYNAYPSFLVDDGFGFAVAWVYCLQWLCVCPLELVTASMTIKYWTTSVNPDVFVIIFYVLVITINIFGARGYAEAEFFFNCCKILMMTGFFILGIIIDVGGAGNDGFIGGKYWHDPGAFNGKHAIDRFKGVAATLVTAAFAFGGSEFIAITTAEQSNPRKAIPGAAKQMIYRILFLFLATIILLGFLVPYNSDQLLGSTGGGTKASPYVIAVASHGVRVVPHFINAVILLSVLSMANSSFYSSARLFLTLSEQGYAPKVFSYIDRAGRPLIAMGVSALFAVIAFCAASPKEEQVFTWLLAISGLSQLFTWTAICLSHLRFRRAMKVQGRSLGELGFKSQTGVWGSAYACIMMILILIAQFWVAIAPIGEGKLDAQAFFENYLAMPILIALYVGYKVWHKDWKLFIRETRST

SEQ ID NO: 63642 - DNA, 1830 bp, Saccharomyces cerevisiae
  CDS (1)..(1830)
atgctatcttcagaagattttggatcttctgggaaaaaggaaacttctcctgattcgatatcgatacgttcctttagtgccgggaataatttccaatcatcatcaagtgagaaaacttattctaagcaaaaatccgggagtgacaaacttatacatagatttgcggattcattcaaaagagccgagggtagcactacaagaactaagcaaataaatgaaaatacgtctgatttagaggatggcgttgagtctatcacgtcggattccaagttgaaaaagtccatgaagtcgcgccatgttgtcatgatgtctttagggacaggtattgggactggtcttttggtagctaatgcaaaaggtctacattacggtggtcctgctgcgctaataattggttacatcttggtttctttcgagacgtacttcatgatccaagctgcaggtgagatggcggtaacctatccgactttaccagcaaatttcaacgcatactcctccatattcatttccaaatcatttggattcgccacagtatggctttactgtttccaatggctaacggttttgcctttagagttaataaccgcgtctatgactattcaatttgggaatgataaaataaatccggacatttatattcttattttctatgttttcttagtattcattcatttcttcggtgtaaaagcctatggtgaaacggaattcatcttcaattgctgtaaaattttaatgattgcaggtttcattattctttctattgttatcaactgtggtggggccggaaatgacggttatatcggggccacttattggcataatccaggtgcttttgcaggtgacacatcgattggtaggttcaaaaacgtttgctatattttagttactgcttacttctcctttggtggtatggaattatttgcactaagtgttcaggaacagtctaaccctagaaaatctactccggtggcagccaagagaagcatttatcgtatcgttgtgatttatcttttgactatgatcctcattggattcaatgttccatataatgatgaccaactaatgggcgcaggcggatccgctacacatgcatctccctatgtcttagccgcttctattcacggtgtgaaaattgttccacatattatcaacgctgttattttgatttctgtggtttcagtggcaaattcctctttgtatgctggtccaagactgatttgctctttggcccaacaaggctacgcacccaagtttttagattacgttgacagagagggcaggcccttgagagctcttattgtgtgttgcgttttcggcgtcattgcttttgttgcagcttcatcaaaggaagagatcgtgtttacatggttagcagctatcgcaggcttgagtgaattattcacatggacttccataatgttgtcccatctgcgattcagacaagcaatgaaagtacagggaaggtctctagacgagttgggatacaaggccacaacagggatttggggttccatatacggtgtcttttttaatattttagtctttgttgcccaattttgggtagcattggcccccttaggtaatgggggcaaatgcgatgcggaatccttctttcaaaattatttagcttttccaatatggttggccttttacttcggatatatggtttacaaccgagattttacgctattaaatcccctcgacaagattgaccttgacttccacagacgcatttatgatccagagctaatgagacaagaggacgaagaaaataaagaaaaactaaggaatatgtctttgatgagaaaagcttatcatttctggtgttaa

SEQ ID NO: 63643 - protein, 609 aa, Saccharomyces cerevisiae
MLSSEDFGSSGKKETSPDSISIRSFSAGNNFQSSSSEKTYSKQKSGSDKLIHRFADSFKRAEGSTTRTKQINENTSDLEDGVESITSDSKLKKSMKSRHVVMMSLGTGIGTGLLVANAKGLHYGGPAALIIGYILVSFETYFMIQAAGEMAVTYPTLPANFNAYSSIFISKSFGFATVWLYCFQWLTVLPLELITASMTIQFGNDKINPDIYILIFYVFLVFIHFFGVKAYGETEFIFNCCKILMIAGFIILSIVINCGGAGNDGYIGATYWHNPGAFAGDTSIGRFKNVCYILVTAYFSFGGMELFALSVQEQSNPRKSTPVAAKRSIYRIVVIYLLTMILIGFNVPYNDDQLMGAGGSATHASPYVLAASIHGVKIVPHIINAVILISVVSVANSSLYAGPRLICSLAQQGYAPKFLDYVDREGRPLRALIVCCVFGVIAFVAASSKEEIVFTWLAAIAGLSELFTWTSIMLSHLRFRQAMKVQGRSLDELGYKATTGIWGSIYGVFFNILVFVAQFWVALAPLGNGGKCDAESFFQNYLAFPIWLAFYFGYMVYNRDFTLLNPLDKIDLDFHRRIYDPELMRQEDEENKEKLRNMSLMRKAYHFWC

SEQ ID NO: 63644 - DNA, 1809 bp, Saccharomyces cerevisiae
  CDS (1)..(1809)
atgagtaatacttcttcgtacgagaagaataatccagataatctgaaacacaatggtattaccatagattctgagtttctaactcaggagccaataaccattccctcaaatggctccgctgtttctattgacgaaacaggttcagggtccaaatggcaagactttaaagattctttcaaaagggtaaaacctattgaagttgatcctaatctttcagaagctgaaaaagtggctatcatcactgcccaaactccattgaagcaccacttgaagaatagacatttgcaaatgattgccatcggtggtgccatcggtactggtctgctggttgggtcaggtactgcactaagaacaggtggtcccgcttcgctactgattggatgggggtctacaggtaccatgatttacgctatggttatggctctgggtgagttggctgttatcttccctatttcgggtgggttcaccacgtacgctaccagatttattgatgagtcctttggttacgctaataatttcaattatatgttacaatggttggttgtgctaccattggaaattgtctctgcatctattactgtaaatttctggggtacagatccaaagtatagagatgggtttgttgcgttgttttggcttgcaattgttatcatcaatatgtttggtgtcaaaggttatggtgaagcagaattcgtcttttcatttatcaaggtcatcactgttgttgggttcatcatcttaggtatcattctaaactgtggtggtggtccaacaggtggttacattgggggcaagtactggcatgatcctggtgcctttgctggtgacactccaggtgctaaattcaaaggtgtttgttctgtcttcgtcaccgctgccttttcttttgccggttcagaattggttggtcttgctgccagtgaatccgtagagcctagaaagtccgttcctaaggctgctaaacaagttttctggagaatcaccctattttatattctgtcgctattaatgattggtcttttagtcccatacaacgataaaagtttgattggtgcctcctctgtggatgctgctgcttcacccttcgtcattgccattaagactcacggtatcaagggtttgccaagtgttgtcaacgtcgttatcttgattgccgtgttatctgtcggtaactctgccatttatgcatgttccagaacaatggttgccctagctgaacagagatttctgccagaaatcttttcctacgttgaccgtaagggtagaccattggtgggaattgctgtcacatctgcattcggtcttattgcgtttgttgccgcctccaaaaaggaaggtgaagttttcaactggttactagccttgtctgggttgtcatctctattcacatggggtggtatctgtatttgtcacattcgtttcagaaaggcattggccgcccaaggaagaggcttggatgaattgtctttcaagtctcctaccggtgtttggggttcctactgggggttatttatggttattattatgttcattgcccaattctacgttgctgtattccccgtgggagattctccaagtgcggaaggtttcttcgaagcttatctatccttcccacttgttatggttatgtacatcggacacaagatctataagaggaattggaagcttttcatcccagcagaaaagatggacattgatacgggtagaagagaagtcgatttagatttgttgaaacaagaaattgcagaagaaaaggcaattatggccacaaagccaagatggtatagaatctggaatttctggtgttaa

SEQ ID NO: 63645 - protein, 602 aa, Saccharomyces cerevisiae
MSNTSSYEKNNPDNLKHNGITIDSEFLTQEPITIPSNGSAVSIDETGSGSKWQDFKDSFKRVKPIEVDPNLSEAEKVAIITAQTPLKHHLKNRHLQMIAIGGAIGTGLLVGSGTALRTGGPASLLIGWGSTGTMIYAMVMALGELAVIFPISGGFTTYATRFIDESFGYANNFNYMLQWLVVLPLEIVSASITVNFWGTDPKYRDGFVALFWLAIVIINMFGVKGYGEAEFVFSFIKVITVVGFIILGIILNCGGGPTGGYIGGKYWHDPGAFAGDTPGAKFKGVCSVFVTAAFSFAGSELVGLAASESVEPRKSVPKAAKQVFWRITLFYILSLLMIGLLVPYNDKSLIGASSVDAAASPFVIAIKTHGIKGLPSVVNVVILIAVLSVGNSAIYACSRTMVALAEQRFLPEIFSYVDRKGRPLVGIAVTSAFGLIAFVAASKKEGEVFNWLLALSGLSSLFTWGGICICHIRFRKALAAQGRGLDELSFKSPTGVWGSYWGLFMVIIMFIAQFYVAVFPVGDSPSAEGFFEAYLSFPLVMVMYIGHKIYKRNWKLFIPAEKMDIDTGRREVDLDLLKQEIAEEKAIMATKPRWYRIWNFWC

SEQ ID NO: 63646 - DNA, 1812 bp, Saccharomyces cerevisiae
  CDS (1)..(1812)
atgcctagaaacccattgaaaaaggaatattgggcagatgtagttgacggattcaagccggctacttctccagccttcgagaatgaaaaagaatctactacatttgttaccgaactaacttccaaaaccgattctgcatttccattaagtagcaaggattcacctggcataaaccaaaccacaaacgatattacctcttcagatcgcttccgtcgtaatgaagacacagagcaggaagacatcaacaacaccaacctgagtaaagatctatccgtgagacatcttttaactctagctgtcgggggtgcaataggtactggtttatatgtgaatacgggtgctgctttatctacaggtggtccggccagtttagttattgattgggttattatcagtacatgtctttttactgtgattaactctcttggtgagctgtccgctgcttttcccgttgttggtgggttcaatgtttacagtatgcgttttattgagccttcatttgcattcgcagtgaacttaaactatttagcacaatggctagttcttctacccttggaattagtggccgcatctattactataaaatactggaatgataaaattaattccgacgcctgggttgctatcttttatgccaccattgcactggctaatatgttggatgttaagtcatttggtgagaccgaatttgtattgtccatgattaaaatcctctccatcattggctttactatcttaggtattgttttgtcctgtggtggtgggcctcacggcggttacattggtggtaaatactggcatgacccaggcgcttttgtagggcacagctcgggaactcagtttaaaggtttatgttcagtttttgttaccgctgccttttcttattccggtattgaaatgactgctgtctccgctgctgaaagtaaaaatccaagagaaaccattcccaaggcagcaaagagaactttttggctgattaccgcctcttatgtgactatattgactttgattggttgcttggttccatccaatgaccctaggttactaaacggttcaagttcagtggacgctgcctcatctcctctggttatcgcaattgaaaacgggggtattaaaggtctaccatcattaatgaacgccattattttgattgctgttgtttccgtggctaacagtgctgtttatgcatgttcaaggtgtatggtcgccatggctcatattggtaatttaccaaaatttttgaaccgtgttgacaaaaggggtagaccaatgaatgctatcttgttaactttgttttttggtttgctttcctttgtggcagcaagtgataagcaagctgaagtctttacatggttgagtgccttatctggtttatcgacaattttctgctggatggccattaatctttcccatattagatttcgccaagccatgaaagttcaagaaaggtctttagacgaattacccttcatttctcaaactggcgtcaagggatcctggtatggttttatcgttttatttctggttcttatagcatcgttttggacttctctgttcccattaggcggttcaggagccagcgcagaatcattctttgaaggatacttatcctttccaattttgattgtctgttacgttggacataaactgtatactagaaattggactttgatggtgaaactagaagatatggatcttgataccggcagaaaacaagtagatttgactcttcgtagggaagaaatgaggattgagcgagaaacattagcaaaaagatccttcgtaacaagatttttacatttctggtgttga

SEQ ID NO: 63647 - protein, 603 aa, Saccharomyces cerevisiae
MPRNPLKKEYWADVVDGFKPATSPAFENEKESTTFVTELTSKTDSAFPLSSKDSPGINQTTNDITSSDRFRRNEDTEQEDINNTNLSKDLSVRHLLTLAVGGAIGTGLYVNTGAALSTGGPASLVIDWVIISTCLFTVINSLGELSAAFPVVGGFNVYSMRFIEPSFAFAVNLNYLAQWLVLLPLELVAASITIKYWNDKINSDAWVAIFYATIALANMLDVKSFGETEFVLSMIKILSIIGFTILGIVLSCGGGPHGGYIGGKYWHDPGAFVGHSSGTQFKGLCSVFVTAAFSYSGIEMTAVSAAESKNPRETIPKAAKRTFWLITASYVTILTLIGCLVPSNDPRLLNGSSSVDAASSPLVIAIENGGIKGLPSLMNAIILIAVVSVANSAVYACSRCMVAMAHIGNLPKFLNRVDKRGRPMNAILLTLFFGLLSFVAASDKQAEVFTWLSALSGLSTIFCWMAINLSHIRFRQAMKVQERSLDELPFISQTGVKGSWYGFIVLFLVLIASFWTSLFPLGGSGASAESFFEGYLSFPILIVCYVGHKLYTRNWTLMVKLEDMDLDTGRKQVDLTLRREEMRIERETLAKRSFVTRFLHFWC

SEQ ID NO: 63648 - DNA, 1752 bp, Saccharomyces cerevisiae
  CDS (1)..(1752)
atggatgaatttgaatctaccaaactttcgaaggttcagttttccactagcgtgttaagtacgccttcgaatgaaggaaataatctaatacacagattcaagaactctttcaagcgaaatgattcaccagcgatccaagaaggtttgctgtattcggagctttcagaggaagaaaaaatacaatgggacttagccaaccagccgtataaaaaggtcctagatcaaagacacctgaccatgatagccattggaggtactctagggacgggtcttttcattggtttaggggaatcactagcgtccggacctgcttctttgctaattggtttcttgttggtcggcgcatctatgctctgtgttgttcagtgtggggccgaactttcatgtcagtaccctgtttccggctcctatgcgctgcacgccagtagatttatagacccatcagtcggcttcagtataggaattaactacttattgatgtggctcatatcttaccctagcgagctggtaggatgttcgcttaccatctcttattgggcaccatcggtcaatcctgctgcctgggttgcaatcgcgttcgttttaagcatgctattgaatctttttggggcaagaggctttgcagaatcagagttttatatgtcaattttcaaaattgtggctctattcatttttataattattggtattgttctcattgcaggtggtgggcctgattctactggatacatcggcacgaagtattggcacgatccaggctccttcgctgttcctgttttcaaaaacctctgcaatacttttgtttcggcagcatactcctttagtggtacagaaatggttgttttaaccagcactgaagcaaggagtgtttcctcagtctctcgggcagcgaaaggtacgttctggagaattatcatcttttatattgttacagtgattataattggttgcctggtcccttataatgatcctcgtctgattagcggttcatccagtgaggatattactgcttccccgtttgttattgccttgagcaatactggtgctatgggaacaagagtgtctcattttatgaatgcggtcatcttgatagccgtattttctgtttgcaattcctgcgtttacgcatcctctagattgattcagggtttggcgacagcaggccaacttccaaagatctgcgcttacatggacaggaatggtcggcctttagttggcatggctatatgtggcgcttttggattgttaggctttttggttgtttccaagaaccagggtacagttttcacatggttgtttgcgttgtgttccatttcatttttcacaacttggttctgtatttgcttctgtcaagtcagatttaggatggcaatgaaagctcaaggaaggtcaaaggatgacattatctatagatcgacattagggatatacggaggaattttcggctgtatcttaaatgttctattggtaattggagaaatatatgtatcggctgcacccgtgggtagtcccagttctgctgctaatttctttgaatattgtatgagtattcccataatgattgctgtatatattggccatagaatttaccgcagagactggagacactggtacatcaagcggatggatattgacctcgatagcggacattcgttagaggacttcgaagccaccaagcttgagagggatgaggataagaaatacgtttcctctaagccactttactataggatctatcggtttttctgttaa

SEQ ID NO: 63649 - protein, 583 aa, Saccharomyces cerevisiae
MDEFESTKLSKVQFSTSVLSTPSNEGNNLIHRFKNSFKRNDSPAIQEGLLYSELSEEEKIQWDLANQPYKKVLDQRHLTMIAIGGTLGTGLFIGLGESLASGPASLLIGFLLVGASMLCVVQCGAELSCQYPVSGSYALHASRFIDPSVGFSIGINYLLMWLISYPSELVGCSLTISYWAPSVNPAAWVAIAFVLSMLLNLFGARGFAESEFYMSIFKIVALFIFIIIGIVLIAGGGPDSTGYIGTKYWHDPGSFAVPVFKNLCNTFVSAAYSFSGTEMVVLTSTEARSVSSVSRAAKGTFWRIIIFYIVTVIIIGCLVPYNDPRLISGSSSEDITASPFVIALSNTGAMGTRVSHFMNAVILIAVFSVCNSCVYASSRLIQGLATAGQLPKICAYMDRNGRPLVGMAICGAFGLLGFLVVSKNQGTVFTWLFALCSISFFTTWFCICFCQVRFRMAMKAQGRSKDDIIYRSTLGIYGGIFGCILNVLLVIGEIYVSAAPVGSPSSAANFFEYCMSIPIMIAVYIGHRIYRRDWRHWYIKRMDIDLDSGHSLEDFEATKLERDEDKKYVSSKPLYYRIYRFFC

SEQ ID NO: 63650 - DNA, 1779 bp, Saccharomyces cerevisiae
  CDS (1)..(1779)
atgaccgaagactttatttcttctgtcaagcgttcaaatgaggagctgaaggagcgaaaatctaactttggatttgtagaatacaaatccaagcaattaacatcatcctcatcacacaattcaaactcatcgcatcacgatgatgacaaccaacacggcaagaggaatattttccagcgatgtgttgattctttcaagtctcctctggacggctcgttcgacacaagtaatttgaagaggactctgaaaccaaggcacttaatcatgattgccattgggggcagtataggtactggtttgtttgtcggtagtggtaaggcaatcgccgaaggtggtcctcttggtgtcgtcattggttgggctattgcaggctctcaaatcatcgggacgattcatgggctaggtgaaatcacggtgcggtttcccgttgtcggggcctttgccaattacggcacaaggtttttggatccaagtataagttttgttgtttcgaccatatacgtgctacagtggttttttgtattacccttagaaatcattgcggcggcaatgaccgtacagtactggaactcgtctattgaccccgtaatttgggtagccatcttttatgctgttattgtttccataaatttgtttggtgtacgaggttttggggaagcggaatttgcattttccaccataaaagcaataacagtttgcggattcattatattgtgcgttgtcctcatttgcggtggaggtcccgaccacgagttcattggcgccaaatactggcacgaccctggttgtttggccaatgggttcccgggcgttctatctgttcttgttgttgcttcgtattctctcggtggtatagaaatgacgtgcctggcatcaggtgaaacggaccccaaaggcttaccaagtgctatcaagcaagtgttttggaggatcttatttttctttttgatatcactgaccctggtaggattcctggttccatatacaaaccaaaacttactgggtggttcatctgtggacaactcaccttttgtcattgccataaaattgcatcacattaaagccttgccctccatcgtcaatgcggtcatccttatcagtgttttgagtgtaggtaactcctgcatcttcgcttcaagtagaacgttgtgttcgatggcccaccaaggccttattccatggtggtttggttatatcgaccgtgctggtaggccgctggttggcattatggcaaattcactatttggattactagcatttctggtcaaatctggctcgatgtctgaagttttcaattggttaatggccattgccggcctggccacgtgcattgtctggttgagcatcaacctgtcacatatcagatttagactggcgatgaaggctcaagggaagtctctggatgaattagaatttgttagtgctgtcgggatttggggatcagcgtattccgctttaatcaactgtctaatcttgatagctcaattctattgttcactatggcccattggtggctggaccagcggcaaagaaagggctaaaatattttttcaaaattatctgtgtgccttaatcatgttatttatattcatcgtccacaaaatttattacaagtgtcaaacaggcaaatggtggggggttaaggcgttaaaggacatagatttggaaaccgatcgtaaagatatcgacatcgaaatagtcaagcaagaaattgccgaaaagaaaatgtacctagattcccgtccatggtacgtgagacagttccatttctggtgttaa

SEQ ID NO: 63651 - protein, 592 aa, Saccharomyces cerevisiae
MTEDFISSVKRSNEELKERKSNFGFVEYKSKQLTSSSSHNSNSSHHDDDNQHGKRNIFQRCVDSFKSPLDGSFDTSNLKRTLKPRHLIMIAIGGSIGTGLFVGSGKAIAEGGPLGVVIGWAIAGSQIIGTIHGLGEITVRFPVVGAFANYGTRFLDPSISFVVSTIYVLQWFFVLPLEIIAAAMTVQYWNSSIDPVIWVAIFYAVIVSINLFGVRGFGEAEFAFSTIKAITVCGFIILCVVLICGGGPDHEFIGAKYWHDPGCLANGFPGVLSVLVVASYSLGGIEMTCLASGETDPKGLPSAIKQVFWRILFFFLISLTLVGFLVPYTNQNLLGGSSVDNSPFVIAIKLHHIKALPSIVNAVILISVLSVGNSCIFASSRTLCSMAHQGLIPWWFGYIDRAGRPLVGIMANSLFGLLAFLVKSGSMSEVFNWLMAIAGLATCIVWLSINLSHIRFRLAMKAQGKSLDELEFVSAVGIWGSAYSALINCLILIAQFYCSLWPIGGWTSGKERAKIFFQNYLCALIMLFIFIVHKIYYKCQTGKWWGVKALKDIDLETDRKDIDIEIVKQEIAEKKMYLDSRPWYVRQFHFWC

SEQ ID NO: 63652 - DNA, 1860 bp, Saccharomyces cerevisiae
  CDS (1)..(1860)
atggacgatagtgtcagtttcattgccaaagaggccagtccagcacaatattcgcacagtttgcatgaaagaacacacagtgaaaaacaaaagagagactttacaataacagaaaaacaagatgaggtatctggacaaacagcggagcctcgaaggacggacagcaaatccatattacagaggaaatgcaaagaattcttcgactcttttaaaaggcagctgccaccagaccgtaattccgaactagagtcccaagaaaaaaacaacctgacaaagtcgatcaaatctcgtcacttagtcatgatcagtctcggtaccggtataggtactggtttactggtcggtaatggtcaggtgctgggaacagctggtcctgccgggttagtccttggttacggaatagcatcgatcatgctttactgtatcatccaagcggcaggcgagttaggtctctgttatgcaggactaaccggcaattacaccagatatccttctattttagtcgacccttcgttgggttttgcagtttctgtggtttacaccattcaatggctaactgttctgcccttacaattggtcactgcggcaatgacagttaagtactggacgagtgtaaatgcagacatctttgttgccgtggttttcgtttttgtaattatcattaatctatttgggtccagaggctatgctgaagccgagttcattttcaattcctgtaagatattgatggtaatcggattcgtcattctggcgattatcatcaattgtggtggtgcaggtgacagaagatacatcggtgctgagtactggcacaatcctggtccatttgcccacggtttcaaaggtgtatgtacggttttctgttatgctgcattcagctacggtggaattgaagttctacttctatctgccgctgagcaggaaaacccaacaaaatctattcccaatgcctgcaaaaaagtggtataccgtattctgctgatttacatgctcaccaccattttggtttgctttcttgttccatacaacagtgacgaattattagggtctagtgactcctctggatcccatgcctccccatttgtcattgctgttgcatcacatggtgtcaaagttgtgcctcactttataaatgctgttattttgatttctgtcatttctgttgcaaactcttcgttatattctgggccaagattgttattatcattggcagaacaaggcgtcttacctaaatgcttagcatatgttgatagaaacggcaggcctttactttgtttttttgtttcccttgtctttggatgcattgggtttgtagccactagtgacgctgaagaacaggttttcacctggttattggcaatttctagtctttcgcaattatttatctggatgtcaatgtccttgtcacatataagatttagagatgccatggcaaagcaaggtcgttcgatgaacgaagttggatacaaagcacaaactggctattggggttcatggcttgcagttttaattgcaatcttcttccttgtgtgccagttctgggtagccatcgcacctgttaatgaacatggaaaacttaacgtcaaagtgtttttccaaaattatttggcaatgcccatcgttttgtttgcctattttggtcacaagatatacttcaaatcatggagcttttggattccagccgaaaaaattgatttggactcacatagaaacatatttgtgtctccatcgcttacagagatcgacaaagttgacgataacgatgatcttaaagagtatgaaaattcagaatcgtcggaaaatccaaacagctcgcgttcaagaaagttttttaagaggatgaccaatttctggtgctaa

SEQ ID NO: 63653 - protein, 619 aa, Saccharomyces cerevisiae
MDDSVSFIAKEASPAQYSHSLHERTHSEKQKRDFTITEKQDEVSGQTAEPRRTDSKSILQRKCKEFFDSFKRQLPPDRNSELESQEKNNLTKSIKSRHLVMISLGTGIGTGLLVGNGQVLGTAGPAGLVLGYGIASIMLYCIIQAAGELGLCYAGLTGNYTRYPSILVDPSLGFAVSVVYTIQWLTVLPLQLVTAAMTVKYWTSVNADIFVAVVFVFVIIINLFGSRGYAEAEFIFNSCKILMVIGFVILAIIINCGGAGDRRYIGAEYWHNPGPFAHGFKGVCTVFCYAAFSYGGIEVLLLSAAEQENPTKSIPNACKKVVYRILLIYMLTTILVCFLVPYNSDELLGSSDSSGSHASPFVIAVASHGVKVVPHFINAVILISVISVANSSLYSGPRLLLSLAEQGVLPKCLAYVDRNGRPLLCFFVSLVFGCIGFVATSDAEEQVFTWLLAISSLSQLFIWMSMSLSHIRFRDAMAKQGRSMNEVGYKAQTGYWGSWLAVLIAIFFLVCQFWVAIAPVNEHGKLNVKVFFQNYLAMPIVLFAYFGHKIYFKSWSFWIPAEKIDLDSHRNIFVSPSLTEIDKVDDNDDLKEYENSESSENPNSSRSRKFFKRMTNFWC

SEQ ID NO: 63654 - DNA, 1740 bp, Schizosaccharomyces pombe
  CDS (1)..(1740)
atgtcagctaaagattatgacttcgatattgaaagcgttttgcctgaagaaaaagctccacaagtctcagaggccaaaaaggattatatttcccaagaatcgacagttttgtctggccaagttgattttgtagaacctgagcataaagggttttttcaaaacttaatagatggctttaaaccagccagagaagctgacggtaatggaggtcccgcattaaaacgaggtttaagtacgaggcatatgcaattgatgtctattggcggtgctattggtagtggtttgtatgttggttcaggaagcgctttggccgacggtggtccagcttcagtgatcattaattatattttaattggtattatgatgtttttcgttatttatgctctgggtgagatggctgtcgcgtatccagttgccggcagttttaatacttatgcaacgcgcttcattgatcctgcctggggatttgctgttagctggaattatttttttaattattttgttacattcccatttgagttaacgacttgcgcaattacgtttacgttttggacagatgtcaattgtgcggtttggattagtatttttttggttgtcgttattggtattaaccttttcggtgtccgtgtttttggagaagtggagtttgtattagctctgattaaagtggtcgctaccgtcggtttcattattttagccattattattaactgtggaggtgtaccaaccgaccaccgaggatatatcggtggcagtatcattaaacaaaaaccatttcgacatggatttaaaggattttgttctgtgtataccactgctgctttctccttttctggaactgaaatcgttggactggcagcggctgaagtcggcgatccaagaaaaacactacctggtgcagtgaagcaagtcttctggcgagtagctatattttatattgtttccctaatcttgatcggattgctcattagtcctgatgatcccaaattaatgggcaacggatcagcaagcgtttcacctttcgttcttgctattcaagaagctaacattaaaggtcttccttctgtttttaacgctgttattattatttccgtaatatccgtgacaaattcaagtacgtatacagctggtcgtaccctccatggtatggcgaatttaaagcaggcacctgcatttttcaagtacaccgaccgtctgggtcgtcctttaatagcaatgattgtggtcctttcatttggattcttcgcttatattaatgaagccaataataatggaaacgatatcagtgacacagtgttcgactggttactagcaatttccggtctttccaacttcttcacttggggaagtatatgtttatctcatattatgttccgtttagcatttaagaagcaaggtcattccttaaaggagttgggatttgtgtctcccatgggaatctggggttcagtcattggattgggtttcaacatattatgtttgatggctgagttttatgtatctctgttccccataggtggtagtccgaatgctaatgatttctttcaaggatatctagctgcctgcattactcttgttttcttcattggttacaagatttacgacagatcgcatattccctctttggataaactggatatcaccactggtttaaaaacatatgaatatgaagaaacgaaagattcttctgataccgggagattccgttttttcaaaaaaataattaataccgtttgctaa

SEQ ID NO: 63655 - protein, 579 aa, Schizosaccharomyces pombe
MSAKDYDFDIESVLPEEKAPQVSEAKKDYISQESTVLSGQVDFVEPEHKGFFQNLIDGFKPAREADGNGGPALKRGLSTRHMQLMSIGGAIGSGLYVGSGSALADGGPASVIINYILIGIMMFFVIYALGEMAVAYPVAGSFNTYATRFIDPAWGFAVSWNYFFNYFVTFPFELTTCAITFTFWTDVNCAVWISIFLVVVIGINLFGVRVFGEVEFVLALIKVVATVGFIILAIIINCGGVPTDHRGYIGGSIIKQKPFRHGFKGFCSVYTTAAFSFSGTEIVGLAAAEVGDPRKTLPGAVKQVFWRVAIFYIVSLILIGLLISPDDPKLMGNGSASVSPFVLAIQEANIKGLPSVFNAVIIISVISVTNSSTYTAGRTLHGMANLKQAPAFFKYTDRLGRPLIAMIVVLSFGFFAYINEANNNGNDISDTVFDWLLAISGLSNFFTWGSICLSHIMFRLAFKKQGHSLKELGFVSPMGIWGSVIGLGFNILCLMAEFYVSLFPIGGSPNANDFFQGYLAACITLVFFIGYKIYDRSHIPSLDKLDITTGLKTYEYEETKDSSDTGRFRFFKKIINTVC

SEQ ID NO: 63656 - DNA, 1743 bp, Schizosaccharomyces pombe
  CDS (1)..(1743)
atggaaccagaatatgtctcttttagcgacaaggacactaaatctatcctaaatgaaagcaaatcttctttgaaggatgtcaaaccttctttggaggaaaagagttacattaccccgggattagttgacgatgtggagcctaagggtaaaaacttcgtagtacgcttttttgatgactttaagcctgcaaaggcaacgggagaagatggcacggcgcttaagcgtagtctgaaaagccggcatatgcaaatgatatctattggaggtgcaattggtacaggtctatatgtcggttcaggtagttcgcttgcagatggcggacccgcttcagtgatcattaattacagcttaattggaattatgatgttctttattgtttatgcgcttggtgaaatggctgttgcttatccggtcgctggtggattcaatacctatgctacccgtttcattgatccagcttggggatttgcggtaagttggaactacttcatcaactatttcgttacttttccacttgaattaacaacttgcgctatcacatttcggtactggacggatattaatagcgcagcttggatctctatttttctggttgtcattattatagtcaatctttttggcgttcgcgcatatggagaagtggagtttattttaagtactgttaaagtggtcgctacctttggattcatcattttggccatcatcatcaattgcggtggtgttccaactgatcaccggggttacattggcggaagtattataaaacataagccgtttcgacatgggttcaaaggattttgttctgtctttactactgcggctttctccttttctggtactgaagtcattggtttagcggcggctgaagttgacaatcctcagaaagcgcttcctcatgccgttaagcaagttttttggcgtattgctatattttatgttgtctccttgatattgatcggtttgcttattagccccgatgatcctaatttgatgggaaatggctctaccagtgtgtcacctttcgtacttgctattaaagaagcaaacatcaaaggcctaccttccgtttttaacgctgttattattatttccgtcgtttctgtgacaaattccagcacatatacagccggtcgtaccctccatggtatggcgaatttaaagcaggcaccctccttctttaaatataccgatcgtcttggtcgtcctttacttgccatgatcgttgttctgttatttggattctttgcttatatcaacgaagctgataaaaatggtaacgatgttagtgatacggtattcaattggttgcttgctctatctggtctgtcaaacttttttacctggggaagtatatgtctttgtcatatcatatttcgcttggcgtttaagaaacaaggacattccctaaaagaattgggatttgtatctcctatgggtatttggggatcttgcattggattatttttcaatattttatgccttatggcacaattttatgtctccttatttccaatcggtggaaaaccaaatgcaaatgattttttccaggggtatttggcggcacccgttacactcgctttttttatcggttataaaatatatgatagatcgcacatcccttctttggataaactagacattactactggtcttaaaacatatgagaatctcgatgaagaagaagatgagcccaccactgcttctaagaggattttcaagaaaatcagttcggttttctgttaa

SEQ ID NO: 63657 - protein, 580 aa, Schizosaccharomyces pombe
MEPEYVSFSDKDTKSILNESKSSLKDVKPSLEEKSYITPGLVDDVEPKGKNFVVRFFDDFKPAKATGEDGTALKRSLKSRHMQMISIGGAIGTGLYVGSGSSLADGGPASVIINYSLIGIMMFFIVYALGEMAVAYPVAGGFNTYATRFIDPAWGFAVSWNYFINYFVTFPLELTTCAITFRYWTDINSAAWISIFLVVIIIVNLFGVRAYGEVEFILSTVKVVATFGFIILAIIINCGGVPTDHRGYIGGSIIKHKPFRHGFKGFCSVFTTAAFSFSGTEVIGLAAAEVDNPQKALPHAVKQVFWRIAIFYVVSLILIGLLISPDDPNLMGNGSTSVSPFVLAIKEANIKGLPSVFNAVIIISVVSVTNSSTYTAGRTLHGMANLKQAPSFFKYTDRLGRPLLAMIVVLLFGFFAYINEADKNGNDVSDTVFNWLLALSGLSNFFTWGSICLCHIIFRLAFKKQGHSLKELGFVSPMGIWGSCIGLFFNILCLMAQFYVSLFPIGGKPNANDFFQGYLAAPVTLAFFIGYKIYDRSHIPSLDKLDITTGLKTYENLDEEEDEPTTASKRIFKKISSVFC

SEQ ID NO: 63658 - DNA, 25 bp, Artificial sequence
  primer
atgtcagatcctatagtaacgtctt

SEQ ID NO: 63659 - DNA, 25 bp, Artificial sequence
  primer
ctaacaccaaaatttgtagactctg

SEQ ID NO: 63660 - protein, 518 aa, Artificial sequence
  consensus sequence
  Variant (3)..(4): Xaa in position 3 to 4 is any amino acid
  Variant (6)..(8): Xaa in position 6 to 8 is any amino acid
  Variant (10)..(11): Xaa in position 10 to 11 is any amino acid
  Variant (17)..(17): Xaa in position 17 is any amino acid
  Variant (19)..(20): Xaa in position 19 to 20 is any amino acid
  Variant (22)..(23): Xaa in position 22 to 23 is any amino acid
  Variant (25)..(27): Xaa in position 25 to 27 is any amino acid
  Variant (30)..(50): Xaa in position 30 to 50 is any amino acid
  Variant (51)..(51): Xaa in position 51 is any or no amino acid
  Variant (54)..(61): Xaa in position 54 to 61 is any amino acid
  Variant (62)..(62): Xaa in position 62 is any or no amino acid
  Variant (64)..(64): Xaa in position 64 is any amino acid
  Variant (66)..(67): Xaa in position 66 to 67 is any amino acid
  Variant (69)..(71): Xaa in position 69 to 71 is any amino acid
  Variant (73)..(77): Xaa in position 73 to 77 is any amino acid
  Variant (81)..(82): Xaa in position 81 to 82 is any amino acid
  Variant (84)..(84): Xaa in position 84 is any amino acid
  Variant (86)..(88): Xaa in position 86 to 88 is any amino acid
  Variant (90)..(95): Xaa in position 90 to 95 is any amino acid
  Variant (97)..(102): Xaa in position 97 to 102 is any amino acid
  Variant (104)..(106): Xaa in position 104 to 106 is any amino acid
  Variant (108)..(118): Xaa in position 108 to 118 is any amino acid
  Variant (119)..(123): Xaa in position 119 to 123 is any or no amino acid
  Variant (125)..(130): Xaa in position 125 to 130 is any amino acid
  Variant (132)..(134): Xaa in position 132 to 134 is any amino acid
  Variant (136)..(138): Xaa in position 136 to 138 is any amino acid
  Variant (139)..(139): Xaa in position 139 is any or no amino acid
  Variant (141)..(141): Xaa in position 141 is any amino acid
  Variant (143)..(143): Xaa in position 143 is any amino acid
  Variant (146)..(150): Xaa in position 146 to 150 is any amino acid
  Variant (152)..(156): Xaa in position 152 to 156 is any amino acid
  Variant (159)..(159): Xaa in position 159 is any amino acid
  Variant (161)..(167): Xaa in position 161 to 167 is any amino acid
  Variant (170)..(175): Xaa in position 170 to 175 is any amino acid
  Variant (176)..(180): Xaa in position 176 to 180 is any or no amino acid
  Variant (182)..(184): Xaa in position 182 to 184 is any amino acid
  Variant (186)..(187): Xaa in position 186 to 187 is any amino acid
  Variant (188)..(188): Xaa in position 188 is any or no amino acid
  Variant (190)..(190): Xaa in position 190 is any amino acid
  Variant (191)..(195): Xaa in position 191 to 195 is any or no amino acid
  Variant (197)..(198): Xaa in position 197 to 198 is any amino acid
  Variant (199)..(205): Xaa in position 199 to 205 is any or no amino acid
  Variant (208)..(215): Xaa in position 208 to 215 is any amino acid
  Variant (217)..(217): Xaa in position 217 is any amino acid
  Variant (219)..(221): Xaa in position 219 to 221 is any amino acid
  Variant (223)..(223): Xaa in position 223 is any amino acid
  Variant (225)..(231): Xaa in position 225 to 231 is any amino acid
  Variant (233)..(234): Xaa in position 233 to 234 is any amino acid
  Variant (235)..(236): Xaa in position 235 to 236 is any or no amino acid
  Variant (238)..(241): Xaa in position 238 to 241 is any amino acid
  Variant (243)..(243): Xaa in position 243 is any amino acid
  Variant (245)..(245): Xaa in position 245 is any amino acid
  Variant (247)..(250): Xaa in position 247 to 250 is any amino acid
  Variant (253)..(263): Xaa in position 253 to 263 is any amino acid
  Variant (265)..(266): Xaa in position 265 to 266 is any amino acid
  Variant (269)..(273): Xaa in position 269 to 273 is any amino acid
  Variant (275)..(276): Xaa in position 275 to 276 is any amino acid
  Variant (277)..(290): Xaa in position 277 to 290 is any or no amino acid
  Variant (293)..(293): Xaa in position 293 is any amino acid
  Variant (295)..(300): Xaa in position 295 to 300 is any amino acid
  Variant (302)..(305): Xaa in position 302 to 305 is any amino acid
  Variant (306)..(307): Xaa in position 306 to 307 is any or no amino acid
  Variant (309)..(311): Xaa in position 309 to 311 is any amino acid
  Variant (313)..(313): Xaa in position 313 is any amino acid
  Variant (317)..(318): Xaa in position 317 to 318 is any amino acid
  Variant (320)..(320): Xaa in position 320 is any amino acid
  Variant (323)..(323): Xaa in position 323 is any amino acid
  Variant (326)..(327): Xaa in position 326 to 327 is any amino acid
  Variant (329)..(331): Xaa in position 329 to 331 is any amino acid
  Variant (333)..(336): Xaa in position 333 to 336 is any amino acid
  Variant (339)..(343): Xaa in position 339 to 343 is any amino acid
  Variant (345)..(348): Xaa in position 345 to 348 is any amino acid
  Variant (350)..(350): Xaa in position 350 is any amino acid
  Variant (352)..(353): Xaa in position 352 to 353 is any amino acid
  Variant (357)..(366): Xaa in position 357 to 366 is any amino acid
  Variant (368)..(370): Xaa in position 368 to 370 is any amino acid
  Variant (372)..(381): Xaa in position 372 to 381 is any amino acid
  Variant (382)..(386): Xaa in position 382 to 386 is any or no amino acid
  Variant (388)..(388): Xaa in position 388 is any amino acid
  Variant (391)..(394): Xaa in position 391 to 394 is any amino acid
  Variant (398)..(399): Xaa in position 398 to 399 is any amino acid
  Variant (401)..(401): Xaa in position 401 is any amino acid
  Variant (403)..(404): Xaa in position 403 to 404 is any amino acid
  Variant (406)..(408): Xaa in position 406 to 408 is any amino acid
  Variant (410)..(410): Xaa in position 410 is any amino acid
  Variant (414)..(414): Xaa in position 414 is any amino acid
  Variant (416)..(418): Xaa in position 416 to 418 is any amino acid
  Variant (421)..(431): Xaa in position 421 to 431 is any amino acid
  Variant (432)..(432): Xaa in position 432 is any or no amino acid
  Variant (434)..(435): Xaa in position 434 to 435 is any amino acid
  Variant (438)..(450): Xaa in position 438 to 450 is any amino acid
  Variant (453)..(457): Xaa in position 453 to 457 is any amino acid
  Variant (459)..(460): Xaa in position 459 to 460 is any amino acid
  Variant (461)..(472): Xaa in position 461 to 472 is any or no amino acid
  Variant (475)..(475): Xaa in position 475 is any amino acid
  Variant (476)..(476): Xaa in position 476 is any or no amino acid
  Variant (479)..(480): Xaa in position 479 to 480 is any amino acid
  Variant (482)..(486): Xaa in position 482 to 486 is any amino acid
  Variant (488)..(504): Xaa in position 488 to 504 is any amino acid
  Variant (505)..(512): Xaa in position 505 to 512 is any or no amino acid
  Variant (514)..(517): Xaa in position 514 to 517 is any amino acid
RHXXMXXXGXXIGTGLXVXXGXXLXXXGPXXXXXXXXXXXXXXXXXXXXXXGEXXXXXXXXXGXFXXYXXXFXXXXXGFAXXWXYXXXWXXXXXXEXXXXXXTXXXWXXXXXXXXXXXXXXXXFXXXXXXIXXXGXXXXYXEXEFXXXXXKXXXXXGFXIXXXXXXXGGXXXXXXXXXXXGXXXWXXXGXXXXXXFXXXXXXXXXFKXXXXXXXXAXFXXXGXEXXXXXXXEXXXXPXXXXPXAXKXXXXRIXXXXXXXXXXXGXXVPXXXXXLXXXXXXXXXXXXXXXXSPXVXXXXXXGXXXXXXPXXXNXVILXXVXSVXNSXXYXXXRXXXXLAXXXXXPXXXXYXDXXGRPXXXXXXXXXXGXXXFXXXXXXXXXXXXXXXFXWLXXXXGLSXXFXWXXIXXXHXRFRXAXXXQGXXXXXXXXXXXXGXXGSXXXXXXXXXXXXXQFXXXXXPXXXXXXXXXXXXXXFFXXYLXXPXXXXXYXXXXXXXXXXXXXXXXXXXXXXXXXDXXXXR

SEQ ID NO: 63661 - protein, 21 aa, Artificial sequence
  protein pattern
  Variant (3)..(3): Xaa in position 3 is Ile, Leu, Met or Val
  Variant (4)..(5): Xaa in position 4 to 5 is any amino acid
  Variant (6)..(6): Xaa in position 6 is Ile or Met
  Variant (7)..(7): Xaa in position 7 is Ala, Cys, Gly, Ser or Thr
  Variant (8)..(8): Xaa in position 8 is Ile, Leu, Met or Val
  Variant (9)..(9): Xaa in position 9 is Ala, Gly or Val
  Variant (10)..(10): Xaa in position 10 is Ala, Gly, Ser or Thr
  Variant (11)..(11): Xaa in position 11 is Ala, Gly, Ser, Thr or Val
  Variant (14)..(14): Xaa in position 14 is Ala, Ser or Thr
  Variant (17)..(18): Xaa in position 17 to 18 is any amino acid
  Variant (19)..(19): Xaa in position 19 is Ala, Gly, Ser or Thr
  Variant (20)..(20): Xaa in position 20 is Asn, Ser or Thr
  Variant (21)..(21): Xaa in position 21 is Ala or Gly
RHXXXXXXXXXIGXGLXXXXX

SEQ ID NO: 63662 - protein, 39 aa, Artificial sequence
  protein pattern
  Variant (2)..(4): Xaa in position 2 to 4 is any amino acid
  Variant (5)..(5): Xaa in position 5 is any or no amino acid
  Variant (7)..(7): Xaa in position 7 is any amino acid
  Variant (9)..(12): Xaa in position 9 to 12 is any amino acid
  Variant (13)..(13): Xaa in position 13 is Phe, Ile, Leu or Val
  Variant (14)..(14): Xaa in position 14 is Phe, Trp or Tyr
  Variant (17)..(18): Xaa in position 17 to 18 is any amino acid
  Variant (19)..(19): Xaa in position 19 is Phe, Ile or Leu
  Variant (20)..(20): Xaa in position 20 is Phe or Tyr
  Variant (21)..(21): Xaa in position 21 is Phe, Ile, Leu, Met or Val
  Variant (22)..(22): Xaa in position 22 is any amino acid
  Variant (23)..(23): Xaa in position 23 is Ala, Cys, Ser or Thr
  Variant (24)..(25): Xaa in position 24 to 25 is any amino acid
  Variant (26)..(26): Xaa in position 26 is Phe, Ile, Leu, Met or Val
  Variant (27)..(27): Xaa in position 27 is Ile, Leu, Met or Val
  Variant (28)..(28): Xaa in position 28 is Ala, Cys, Gly or Thr
  Variant (29)..(30): Xaa in position 29 to 30 is any amino acid
  Variant (31)..(31): Xaa in position 31 is Ile, Leu or Val
  Variant (32)..(37): Xaa in position 32 to 37 is any amino acid
  Variant (39)..(39): Xaa in position 39 is Ile, Leu, Met or Val
PXXXXPXAXXXXXXRIXXXXXXXXXXXXXXXXXXXXXLX

SEQ ID NO: 63663 - protein, 23 aa, Artificial sequence
  protein pattern
  Variant (2)..(2): Xaa in position 2 is Ile, Met or Val
  Variant (4)..(6): Xaa in position 4 to 6 is any or no amino acid
  Variant (9)..(18): Xaa in position 9 to 18 is any amino acid
  Variant (19)..(19): Xaa in position 19 is Ala, Gly or Ser
  Variant (20)..(20): Xaa in position 20 is any amino acid
  Variant (21)..(21): Xaa in position 21 is Phe, Ile, Leu or Val
  Variant (22)..(22): Xaa in position 22 is Ala, Cys, Gly or Ser
  Variant (23)..(23): Xaa in position 23 is Phe or Tyr
YXDXXXRPXXXXXXXXXXXXXXX

SEQ ID NO: 63664 - protein, 13 aa, Artificial sequence
  protein pattern
  Variant (2)..(3): Xaa in position 2 to 3 is any amino acid
  Variant (4)..(4): Xaa in position 4 is Ala, Gly or Ser
  Variant (7)..(7): Xaa in position 7 is Ala, Gly or Leu
  Variant (8)..(8): Xaa in position 8 is any amino acid
  Variant (9)..(9): Xaa in position 9 is Ile, Leu, Met or Val
  Variant (10)..(10): Xaa in position 10 is any amino acid
  Variant (11)..(11): Xaa in position 11 is Ile, Leu or Val
  Variant (12)..(12): Xaa in position 12 is Ala, Asp, Gly, Asn or Val
  Variant (13)..(13): Xaa in position 13 is Trp or Tyr
LXXXGPXXXXXXX

SEQ ID NO: 63665 - DNA, 1014 bp, Saccharomyces cerevisiae
  CDS (1)..(1014)
atgaagaatgataataagttgcaaaaggaagcacttatgcgactatcgcagctaagatttccatttgccgatgctccaagtatagtacaagcgcatcaaaaagatgaacaaatccagggccttttgattatgaaagtgactgaattgtgcaaattgataaagagtcaattgtttgttaactcttaccctaaggaactgtccatatttgccaagctcctgtatttgctctttactacaggaagacgtggtagaacgttaggtgaggaatatgttgacttgacatacactaataggaagggtaccagacttgcaggacggctcaaaatgattgtattcgctttcgcttatcctttatgtccatatttcatcaccaaactatacaagaaaataatgaagaacaacaaggaaagtaaaattgaagatactgaaagtgttgccgcgttttgtaagggccttttagatttcattttagacgtacacatgaccctcttttatttcaaaggagctttttacagtatttccaaaaggatttttggtatgagatatgtttttaaacatatattgtcaaaaaatgaggccaattttagagaagagggctcacaaaagtacaaagtattaggttatatcctattagctcaaaatgttatgaaatggtaccctgtcctaacctctacgctcgggtcctggatttatgggagaaaaaggaccaatgattcaattactaggtcgtctgttggtctacaggagcgttcagaacatgaatctatagaaggcataccgaaggaatcgcagctgactcatataaatttgtcagataaaaaccaattgccatttattccagaagcctcgagaaaatgcatcctatgtctcatgaacatgagtgatcctagctgcgcgccatgtggacatctattttgttggagttgtcttatgagctggtgtaaagagaggccagaatgccccttgtgcagacaacactgtcaaccacaggaaattctggtcctgcggcaatag

SEQ ID NO: 63666 - protein, 337 aa, Saccharomyces cerevisiae
MKNDNKLQKEALMRLSQLRFPFADAPSIVQAHQKDEQIQGLLIMKVTELCKLIKSQLFVNSYPKELSIFAKLLYLLFTTGRRGRTLGEEYVDLTYTNRKGTRLAGRLKMIVFAFAYPLCPYFITKLYKKIMKNNKESKIEDTESVAAFCKGLLDFILDVHMTLFYFKGAFYSISKRIFGMRYVFKHILSKNEANFREEGSQKYKVLGYILLAQNVMKWYPVLTSTLGSWIYGRKRTNDSITRSSVGLQERSEHESIEGIPKESQLTHINLSDKNQLPFIPEASRKCILCLMNMSDPSCAPCGHLFCWSCLMSWCKERPECPLCRQHCQPQEILVLRQ

SEQ ID NO: 63667 - DNA, 900 bp, Drosophila melanogaster
  CDS (1)..(900)
atggactttcggaacgcccgcgcccggcagccggagatcgtgagatccgtgcagaaggatgcacggtacaccaacgagctggccgaagacttgtccgatgtcttgcgcctcaccggtccacggaactggataaagtacaaccagatgtgccgacttctggcggagctcagttaccacggattcgcctcggccaataaccttcagaccctcggcgaagagtacacggggataatacaggtggacgggaactataagcagattcccagcagattgttacaactgattgccattgtcctggagtttggtggcgactccctgttccaacgattgatgcaaaaacttgacacctacgtggccaacaatgacgagattcgaaccgagatcaagccgcagctaaagaagattattcagaggctcaggcaatctcccagctacgtaaaggccctgcacaagtctctattctacttggacgccagcaagtaccagctgtccaagcgcaccacgggcatcaactacgtactaatccgtcactggctgcagccggaattctcgctgtacggctacaagatactgggcgtaatcactttcctgcaggtcagcgtttccttggccattagtggatgggatgcctggagagagcacaagcgccagcagctagaatcaataaagcaggctggaaagaatttcctgcaaagatcttcgagtacaaaggacgtagatccaaacaccccacagtgcatcctttgcctggagccacgttctgacagcagtttgactccatgcggccacatcttttgctggagctgcctgctcgagtggctggaggagcgggatgagtgccccttgtgccgggagtcgctgaaaaagtcccaagtgatattactgcaaaactatgcctaa

SEQ ID NO: 63668 - protein, 299 aa, Drosophila melanogaster
MDFRNARARQPEIVRSVQKDARYTNELAEDLSDVLRLTGPRNWIKYNQMCRLLAELSYHGFASANNLQTLGEEYTGIIQVDGNYKQIPSRLLQLIAIVLEFGGDSLFQRLMQKLDTYVANNDEIRTEIKPQLKKIIQRLRQSPSYVKALHKSLFYLDASKYQLSKRTTGINYVLIRHWLQPEFSLYGYKILGVITFLQVSVSLAISGWDAWREHKRQQLESIKQAGKNFLQRSSSTKDVDPNTPQCILCLEPRSDSSLTPCGHIFCWSCLLEWLEERDECPLCRESLKKSQVILLQNYA

SEQ ID NO: 63669 - DNA, 1068 bp, Gibberella zeae PH-1
  CDS (1)..(1068)
atgtcctcctcctcgacaaccacaacaacatcaccataccctttcgccaccgcccccgacatcattcgctctcaccaaaaggatgcatactttaccggtcatctcgcccagatcctcagcgacctgcaccgtcgcctccgcggcgcccgtctaacacacacccgcgcccccgaaatccagaccctcgcgacactcgcctactttgccctcaccacgatccctggtaatcgcacactcggcgaggagtactgcgatcttgtgcagattgatgcgcgcgacggccaactgcccgccattgaccgtcgcgccggctacgtggccgccagcattctcctgccctatatcgctgcccgggtactacccggactgcgcgcccaagctcgcaagcttctgcagcggcgactggaaaccctgcgcaaaagggatggccagtcagctacagggcgtgaggcgcgcatatggtcatacctggaacaacatctgagctcttttacgtcgggcgctcccttccaagctgttattcttgcacttttctactttagcggcacatattaccaattgtctaagcgactcctttccctgcgatatgtctttacacgcaccgtccccgatacgcccgaccgcgcagggtatgagctacttggtgtgctgctagttgtccagcttgccgttcagagttattcgcatattcgctctaccatcaccgaatcaacggctcgcgaacgcgccgccttcggatcgtctgacgacatctctctcaatcatgatggtgcttacaaccaagacaacaacttgttgttgtccacaggcgcaccaggctccaaaaccaaagttgacatctttgctgccacgcacacaccagcagcgaccgtgccgcgcctccagttaactgatgataagactatgggctacataaagggtggacagcagagaaagtgcaccctctgcttagaagagatgaaagatccctcagcaacacaatgcggtcacgtcttttgctgggagtgtataggggattggtacagttcagatgaacagatattaatatgctcaactacatccaagtaa

SEQ ID NO: 63670 - protein, 355 aa, Gibberella zeae PH-1
MSSSSTTTTTSPYPFATAPDIIRSHQKDAYFTGHLAQILSDLHRRLRGARLTHTRAPEIQTLATLAYFALTTIPGNRTLGEEYCDLVQIDARDGQLPAIDRRAGYVAASILLPYIAARVLPGLRAQARKLLQRRLETLRKRDGQSATGREARIWSYLEQHLSSFTSGAPFQAVILALFYFSGTYYQLSKRLLSLRYVFTRTVPDTPDRAGYELLGVLLVVQLAVQSYSHIRSTITESTARERAAFGSSDDISLNHDGAYNQDNNLLLSTGAPGSKTKVDIFAATHTPAATVPRLQLTDDKTMGYIKGGQQRKCTLCLEEMKDPSATQCGHVFCWECIGDWYSSDEQILICSTTSK

SEQ ID NO: 63671 - DNA, 987 bp, Candida glabrata CBS 138
  CDS (1)..(987)
atggttgaagaagatagacgatggaagttgccgtttgctggtgcaccttcaatagtgcaggcgcaccagaaggatgaacagattgagacaatgttatcggtaaaagtcagcgagttactacggggggtaagaggtcagttgttcattaataactatcagaaggagatctcagtggttgtcaagctgatatatttgggactgacgactgcactatccagaagaacattgggtgaggaatatgtcgatctgatatatgtgaataaacggggttctcagttggtgagaggaattaaacgggtcctatttgtgcttagttatacttctattccttatttggtcactaagctctcaaagaaggtcaataataggagtacaaataatgaagagagtgatgatggcaacgagagtacttacaccgatattttgagtactatgattgacctgcatttgatggtgttctatataactggtacttattacgatgtatttaagcgtttttggggtatgagatatgcattggggcatactttatcacaagaagaagaaaactatcgtgataagagtagtaagagttacaagattctaggttacattattcttttacaacatatttctaaagttaaacctattattaacaaggtcctgagtatcttaccgcagacaaaggaaacattaaatgctgggtccaatggtgttggactaaaagaaggatttgcacctgcagcaacaccagggttattgacagatgtacctgaaaattttaacattgatcacatcaaattaagtaatggtaaagagctggcatttattcccacagaatcaagaaattgtattctttgcttgatggaaatgactgatccaagctgtctaccttgtgggcatgtattttgttgggactgtatcacagactggactaaggaaaatccagaatgccccttatgtcggcaacgtagctatcctcaacaggtgttggcattaagagcatga

SEQ ID NO: 63672 - protein, 328 aa, Candida glabrata CBS 138
MVEEDRRWKLPFAGAPSIVQAHQKDEQIETMLSVKVSELLRGVRGQLFINNYQKEISVVVKLIYLGLTTALSRRTLGEEYVDLIYVNKRGSQLVRGIKRVLFVLSYTSIPYLVTKLSKKVNNRSTNNEESDDGNESTYTDILSTMIDLHLMVFYITGTYYDVFKRFWGMRYALGHTLSQEEENYRDKSSKSYKILGYIILLQHISKVKPIINKVLSILPQTKETLNAGSNGVGLKEGFAPAATPGLLTDVPENFNIDHIKLSNGKELAFIPTESRNCILCLMEMTDPSCLPCGHVFCWDCITDWTKENPECPLCRQRSYPQQVLALRA

SEQ ID NO: 63673 - DNA, 918 bp, Kluyveromyces lactis NRRL Y-1140
  CDS (1)..(918)
atggcaccagacatgaagttcccatttgctgatgcacctagtatagttcaggcgcatcaaaaggatgatactgtggaaaacttgctgttacaaaagatccaggatgtactacggaaagttaagggacaacagttcactaacaggtatgttagtgagataatgatcctcagcaagttgatatacttgtcaattacaacactaaggtataggagaacgcttggagaagagtacgttgatttggcgtatgttgataggcgaggaaaaggtgttgcgagactcctgcgaaggattggtttcgctatcagttattgtggggtaccgtggatattatcgaaagtattctacaagtataagctcaatgagaggggatctggtttcttgaaagtattcaatggcaagagtttcagggacatcttggattccactttgaatttgcacttaattatattctacttgagcggacagtattatgatatctcaaagagaatatttggaatgagatatgtggttggccatgaaatgaacaagaatgaggtagaattcaagaagaagtcatcgcaaaactacaagattcttggttttatacttggtatgcaattagcttctaagcttttaccgcagattgcagaatacatcgctgacagaattggaacagatgatgggaagagccacaagagtttaagtgcattagctaaaaaacacacctcaaaagatcttagcgatctagaagtcctacctttcatcaaagaggattcacgtaagtgtgttttatgtcttaactatatgctggatcccagcgcgactccgtgtggtcaccttttctgctgggattgtatcatggaatggacgttagaaagacaggagtgtccattatgcaggcaaaggtgtccgagacagctgacgatacctgttagataa

SEQ ID NO: 63674 - protein, 305 aa, Kluyveromyces lactis NRRL Y-1140
MAPDMKFPFADAPSIVQAHQKDDTVENLLLQKIQDVLRKVKGQQFTNRYVSEIMILSKLIYLSITTLRYRRTLGEEYVDLAYVDRRGKGVARLLRRIGFAISYCGVPWILSKVFYKYKLNERGSGFLKVFNGKSFRDILDSTLNLHLIIFYLSGQYYDISKRIFGMRYVVGHEMNKNEVEFKKKSSQNYKILGFILGMQLASKLLPQIAEYIADRIGTDDGKSHKSLSALAKKHTSKDLSDLEVLPFIKEDSRKCVLCLNYMLDPSATPCGHLFCWDCIMEWTLERQECPLCRQRCPRQLTIPVR

SEQ ID NO: 63675 - DNA, 1002 bp, Debaryomyces hansenii CBS767
  CDS (1)..(1002)
atgtccaaggtaaatgataatgcattgccgtttgctgatgcttcaactatagtacgggcacatcaaaaagatacatattttgaatcttcatatcgttcacaagtgcaagatgttcttcatttatttaagggtcagcggtttattaatactcatcccgaggaaattacagtagcagcgaagtctttatatctaatgctcacaacattgatcggtgcaagaactttgggagaagagtatgttgatctaatttacgtcaatagatcaggtaagaggttccctcaattactcctgaagctagggttcattttgtcatatgcattgttaccgtacttattcaccagactagtgagaaagtataaacccaaagatggagatgaatctagtaaaccaaaggatggtacaaaggactggttagttcagttcttctcatcgtatccgaaagtattggacacacttatgaatttgcatatcgctattttttatttcaaaggagaattttattcattatcaaaacgtatctttggattacggtatgcatttggacataataaagatccaaaaaaattaagactcgctaggggtgattactcgttattgggtggtattattttgttacagttttttgtgaagtcgttgatcaaatttaaaagctacattgatgacaaaaataaagtaaatcaacctgaaaatgaggaaaacgaaaagaatgtcaatgcaatatttaaaatatcccaattggaaaattttagagacaaggtgactactaacaataaactctataagcaaatcaatgtggatttatcgaatccggatcatttgccgtatttacctgaaaactcaagggcgtgcatgttatgtttatcgccaatgacaaacccatctgcagcgtcgtgtggtcatttattctgttgggaatgcattgtagattgggtaagagaccaccctgaatgtcctttgtgtagacaacaatgtctcgaacaaaatttgcttccgttaaaatga

SEQ ID NO: 63676 - protein, 333 aa, Debaryomyces hansenii CBS767
MSKVNDNALPFADASTIVRAHQKDTYFESSYRSQVQDVLHLFKGQRFINTHPEEITVAAKSLYLMLTTLIGARTLGEEYVDLIYVNRSGKRFPQLLLKLGFILSYALLPYLFTRLVRKYKPKDGDESSKPKDGTKDWLVQFFSSYPKVLDTLMNLHIAIFYFKGEFYSLSKRIFGLRYAFGHNKDPKKLRLARGDYSLLGGIILLQFFVKSLIKFKSYIDDKNKVNQPENEENEKNVNAIFKISQLENFRDKVTTNNKLYKQINVDLSNPDHLPYLPENSRACMLCLSPMTNPSAASCGHLFCWECIVDWVRDHPECPLCRQQCLEQNLLPLK

SEQ ID NO: 63677 - DNA, 1134 bp, Yarrowia lipolytica CLIB122
  CDS (1)..(1134)
atgtggggaagttcacatgcattcgctggtgaatctgatctgacactacaactacacaccaggtccaacatgagcgacaatacgacaatcaaaaagccgatccgacccaaaccgatccggacggaacgcctgccttacgctggggccgcagaaatcatccgagccaaccagaaagaccactactttgagtccgtgcttgaacagcatctcgtcacgtttctgcagaaatggaagggagtacgatttatccaccagtacaaggaggagctggagacggcgtccaagtttgcatatctcggtttgtgtacgcttgtgggctccaagactctcggagaagagtacaccaatctcatgtacactatcagagaccgaacagctctaccgggggtggtgagacggtttggctacgtgctttccaacactctgtttccatacctgtttgtgcgctacatgggcaagttgcgcgccaaactgatgcgcgagtatccccatctggtggagtacgacgaagatgagcctgtgcccagcccggaaacatggaaggagcgggtcatcaagacgtttgtgaacaagtttgacaagttcacggcgctggaggggtttaccgcgatccacttggcgattttctacgtctacggctcgtactaccagctcagtaagcggatctggggcatgcgttatgtatttggacaccgactggacaagaatgagcctcgaatcggttacgagatgctcggtctgctgattttcgcccggtttgccacgtcatttgtgcagacgggaagagagtacctcggagcgctgctggaaaagagcgtggagaaagaggcaggggagaaggaagatgaaaaggaagcggttgtgccgaaaaagaagtcgtcaattccgttcattgaggatacagaaggggagacggaagacaagatcgatctggaggaccctcgacagctcaagttcattcctgaggcgtccagagcgtgcactctgtgtctgtcatacattagtgcgccggcatgtacgccatgtggacactttttctgttgggactgtatttccgaatgggtgagagagaagcccgagtgtcccttgtgtcggcagggtgtgagagagcagaacttgttgcctatcagataa

SEQ ID NO: 63678 - protein, 377 aa, Yarrowia lipolytica CLIB122
MWGSSHAFAGESDLTLQLHTRSNMSDNTTIKKPIRPKPIRTERLPYAGAAEIIRANQKDHYFESVLEQHLVTFLQKWKGVRFIHQYKEELETASKFAYLGLCTLVGSKTLGEEYTNLMYTIRDRTALPGVVRRFGYVLSNTLFPYLFVRYMGKLRAKLMREYPHLVEYDEDEPVPSPETWKERVIKTFVNKFDKFTALEGFTAIHLAIFYVYGSYYQLSKRIWGMRYVFGHRLDKNEPRIGYEMLGLLIFARFATSFVQTGREYLGALLEKSVEKEAGEKEDEKEAVVPKKKSSIPFIEDTEGETEDKIDLEDPRQLKFIPEASRACTLCLSYISAPACTPCGHFFCWDCISEWVREKPECPLCRQGVREQNLLPIR

SEQ ID NO: 63679 - DNA, 1122 bp, Aspergillus nidulans FGSC A4
  CDS (1)..(1122)
atggcggaccaggatctttccctctcaaccacagcacctccggcaagaccttcggccaaattctatcccttcgcgacctcaccggacattatccgttcacatgagaaagatgcgttcctcacggccaatttggccaacgaagcccagtctatcatccggacacttcgaggcgcccggtacgcgcatacctattcagaagcgatcaagcatctgacggagctcctatacttttcgctcacgacactcactggaaaccgaacgctaggagaagagtattgtgacctcgttcagttagaagatgacacactacgactaccatcaattggaagacgtgtcggatatatcctcagcagcataatggtaccatggacacttcagcgaatccttcctggcttccggcaacgtctccgcgccaaactggagcgcagcattgccaggcaacaattgaaggcacagcaggcgaaggattcgaacaaaactccgttaaagaacaagtcgaaacagccccctttctttacgaaactacgaattcagaaatacattctagagcatctagattcgatcacttctctgtcgccaatatatgccctaagcatagcgaccttctacttcaccggctcatattaccatctgtcaaaacgtttctggggactccgctatgttttcacgaaaaaattagaagagaacgaacagcgcgtggggtatgaagtgttgggagtcttactcgtcctacaaatagcagttcagagtattcttcacgtcaagaaggtcagccacagcctgcagtcggaggaccaagacgtacactccgaaacctctggatccagcagtaaagaagatactttgacccgctcgatcgaacatccagcctcccttcctgtcctccccgtgtctaccgcgagatatgacctctcggaagatccgaacgcaatcccttggattccagatggacagcagcgcaagtgtacactctgtcttgagtcattcaaggacccgagtgtcactacttgtggccacgtgttttgctggacatgcgtgtgtgactgggtccgtgagaagcccgaatgtcctctctgccgacaggagcttctggcatcgaaagtgcttcctctgagagggtga

SEQ ID NO: 63680 - protein, 373 aa, Aspergillus nidulans FGSC A4
MADQDLSLSTTAPPARPSAKFYPFATSPDIIRSHEKDAFLTANLANEAQSIIRTLRGARYAHTYSEAIKHLTELLYFSLTTLTGNRTLGEEYCDLVQLEDDTLRLPSIGRRVGYILSSIMVPWTLQRILPGFRQRLRAKLERSIARQQLKAQQAKDSNKTPLKNKSKQPPFFTKLRIQKYILEHLDSITSLSPIYALSIATFYFTGSYYHLSKRFWGLRYVFTKKLEENEQRVGYEVLGVLLVLQIAVQSILHVKKVSHSLQSEDQDVHSETSGSSSKEDTLTRSIEHPASLPVLPVSTARYDLSEDPNAIPWIPDGQQRKCTLCLESFKDPSVTTCGHVFCWTCVCDWVREKPECPLCRQELLASKVLPLRG

SEQ ID NO: 63681 - DNA, 1137 bp, Aspergillus niger
  CDS (1)..(1137)
atggccgacgacgatctctccttgaccacctccgctccgacaccgtccgtctctccctcggctcatttctaccctttcgctacctccccagatatcattcggtcgcatgaaaaggatgtctttatgacagggagcttgacaagccaagctcattcgatagtgcgctctctccgcggagctcgctatgcacacacgcactccgatgccatcaaacacctaaccgagattctctactttgccttgaccaccttcattggaaaccgaaccctaggagaagaatactgcgacttggtccagttagaagacgacaccctccaacttccttctctccccagacgagccggttacattctcagcagtatcctgctgccctggacactgcagcgaatcctccccgctttccgacaacgattgcgatcgaagctggaacgcagtatcgctcgacaacaactcaaagcatcccaagccaagaaaacaacagtggagcaagccaaagacaacaagctggctaagaaaccgtctttcttcacgaaattgcggatccagaagtacatcctcgagcatctggactccatcacgtcgctgtcacccatatatgctgttagcatcgcaacgttctatttcacgggcgcttattaccatctctcgaaacggttctcgggtctgcgatatgtcttcacgaaaaaggtcgaggagggtgaacaacgggtgggttatgaggtcttgggtgtgctgcttgtcttgcaaatcgctgtacagggcatcctgcatatcaagaaggtcggggccgatttgggacaagaaaatgaagatagtgggcttgaagcagatggcggtatgaaacagtatggagcttccttgataccgtctctcgagaacccctcctcgcttcctctccttcccgcttctgctgcccggtacgatttctcggaagattccaatgcgatcccctggatccctgaagggcagcagcgcaaatgtacgctttgtctggagttattcaaggatccgagtgtcacgacctgtggacatgtcttctgttggacgtgtgtacgggactgggtacgggagaagccagagtgcccgctttgtcggcaggaggtgctcttgtcgaaagtgctgcccttgagaggatga

SEQ ID NO: 63682 - protein, 378 aa, Aspergillus niger
MADDDLSLTTSAPTPSVSPSAHFYPFATSPDIIRSHEKDVFMTGSLTSQAHSIVRSLRGARYAHTHSDAIKHLTEILYFALTTFIGNRTLGEEYCDLVQLEDDTLQLPSLPRRAGYILSSILLPWTLQRILPAFRQRLRSKLERSIARQQLKASQAKKTTVEQAKDNKLAKKPSFFTKLRIQKYILEHLDSITSLSPIYAVSIATFYFTGAYYHLSKRFSGLRYVFTKKVEEGEQRVGYEVLGVLLVLQIAVQGILHIKKVGADLGQENEDSGLEADGGMKQYGASLIPSLENPSSLPLLPASAARYDFSEDSNAIPWIPEGQQRKCTLCLELFKDPSVTTCGHVFCWTCVRDWVREKPECPLCRQEVLLSKVLPLRG

SEQ ID NO: 63683 - DNA, 1209 bp, Ostreococcus tauri
  CDS (1)..(1209)
atgacgtgtttctccgcccccgaccgcctcgccgccgcgcgcgcccgcctcgccgccccccgcgcgccgcggccgccgcgatgtctcgtcatcattcatcgacgcgcgcgaatgtcgacgccgctcggcggattccccgccgcggcgcccccggacgtcgtccgagcgtcgcaaaaagacgacgccgtcgcctcggcgctggcggagcgattcaccgattgcgtcgcccgcgtcgtcggcccgcgcgcgctcgcgacgcgcgcgtcgacggttcgagcgatcgggcgggcgttctatccaggattgacgattctgagcgggacgcggacgctcggcgaggagtactgcgacgtgacgtgcgtcgacgcggagggacggacgccgtcgacgacgtcgcgcgtgacgcggtttttggtgcacgcgttcggtgatgaagtcattcgaggcgcgcgacgatgggtggaacgaaatgtcgaacgcggggtggggttgcgggagagcggggcgcgcgcggcggcgcgcgcggcggacggcggcgcgcgcgtcgcgctcgcgctcgcgggcgaacgcgtgcagcgcgtgggtgaagaagatgagatctcacacggggagcgggcgatcgatgcgcgcggtgggttcgcgaacgcggcgcacttggcgttgttttacctctacggcgagtattacgagtggagctgtcgagcgagcgggacgcgtagggtgtttacgggcgcgtacgcgggcgaagagcgaccgagttacgctgtgttggggatgttcgtcgcgtttcaactcgccgtggtgtcgttcgagcgcgtaagaagcgtcgtgcgaggggcgaacgtgggcggcgacgcgtccgcggagcgccgcgcgagggagaacagagtactcgaatccgacggaacgcccgcgcgggaggtggtcgtcgacgccgcgccggatcctccgagagatgtcttcgggaacgtcatcgacgttccgggcacgtcagcgaaaccatcgtcagcgtctatctcgccgctcgtcgccgctaagtgcgctttgtgtctctcccaaagacgcgcgccgacggcgacgccgtgcgggcacgtcttctgttggcgatgcgtcgccggatgggcgagtaaaaaacccgagtgtccgctctgtcgcgccccgacgacgccacagagtttggtcccgctcagtaacctcgcgtcggcgtga

SEQ ID NO: 63684 - protein, 402 aa, Ostreococcus tauri
MTCFSAPDRLAAARARLAAPRAPRPPRCLVIIHRRARMSTPLGGFPAAAPPDVVRASQKDDAVASALAERFTDCVARVVGPRALATRASTVRAIGRAFYPGLTILSGTRTLGEEYCDVTCVDAEGRTPSTTSRVTRFLVHAFGDEVIRGARRWVERNVERGVGLRESGARAAARAADGGARVALALAGERVQRVGEEDEISHGERAIDARGGFANAAHLALFYLYGEYYEWSCRASGTRRVFTGAYAGEERPSYAVLGMFVAFQLAVVSFERVRSVVRGANVGGDASAERRARENRVLESDGTPAREVVVDAAPDPPRDVFGNVIDVPGTSAKPSSASISPLVAAKCALCLSQRRAPTATPCGHVFCWRCVAGWASKKPECPLCRAPTTPQSLVPLSNLASA

SEQ ID NO: 63685 - DNA, 1098 bp, Gibberella zeae
  CDS (1)..(1098)
atgtcctcctcctcgacaaccacaacaacatcaccataccctttcgccaccgcccccgacatcattcgctctcaccaaaaggatgcatactttaccggtcatctcgcccagatcctcagcgacctgtaccgtcgcctccgcggcgcccgtctaacacacacccgcgcccccgaaatccagaccctcgcggcactcgcctactttgccctcaccacgatccctggtaatcgcacactcggcgaggagtactgcgatcttgtgcagattgatgcgcgcgacggccaactgcccgccgtttaccgtcgcgccggctacgtggccgccagcattctcctgccctatatcgctgcccgggtactgcccggactgcgcgcccaagttcgcaagcttctgcagcggcgactggaaaccctgcgcaaaagggatggccagtcagctacagggcgtgaggcgcgcatatggtcatacctggaacaacatctgagctcttttacgtcgggcgctcccttccaagctgttattcttgcacttttctactttagcggcacatattaccaattgtctaagcgactcctttccctgcgatatgtctttacacgcaccgtccccgatacgcccgaccgcgcagggtatgagctacttggtgtgctgctagtggtccagcttgccgttcagagttattcgcatattcgctctaccatcaccgaatcagcggctcgcgaacgtgccgccttcggatcgtctgacgacatctctctcaatcatgatggtgcttacaaccaagacaacaacttgttgttgtccacaggcgcaccaggctccaaaaccaaagttgacatctttgctgccacgcacacaccagcagcgaccgtgccgcgcctccagttaactgatgataagactatgggctacataaagggtggacagcagagaaagtgcaccctctgcttagaagagatgaaagatccctcagcaacacaatgcggtcacgtcttttgctgggagtgtataggggattgggtgagagagaaacccgagtgtccgttgtgtcgtcgggaagccatggcccaacatattctgccgttgcgagtgatgtaa

SEQ ID NO: 63686 - protein, 365 aa, Gibberella zeae
MSSSSTTTTTSPYPFATAPDIIRSHQKDAYFTGHLAQILSDLYRRLRGARLTHTRAPEIQTLAALAYFALTTIPGNRTLGEEYCDLVQIDARDGQLPAVYRRAGYVAASILLPYIAARVLPGLRAQVRKLLQRRLETLRKRDGQSATGREARIWSYLEQHLSSFTSGAPFQAVILALFYFSGTYYQLSKRLLSLRYVFTRTVPDTPDRAGYELLGVLLVVQLAVQSYSHIRSTITESAARERAAFGSSDDISLNHDGAYNQDNNLLLSTGAPGSKTKVDIFAATHTPAATVPRLQLTDDKTMGYIKGGQQRKCTLCLEEMKDPSATQCGHVFCWECIGDWVREKPECPLCRREAMAQHILPLRVM

SEQ ID NO: 63687 - DNA, 1122 bp, Aspergillus oryzae
  CDS (1)..(1122)
atggcggatgaagacttctctttgtctcctgcaacctccgccccggcgcccagtccctcggcgcatttctacccattcgcgacgtctccggatatcatacgatcccatgaaaaagacttattccttacctcgaatctagtacagcaagctcagaacatcatccgctcactccgcggagctcgatttgctcatacctactccgaaaccatcaagaatctgaccgagatcctatacttttccctgactaccctgatcggcaaccgaacgttgggggaggaatactgtgatcttgtccaattggaagatgacacactccagctcccttcttttatcaggcgggcgggatatatcgtgagcagtatcattgtgccctggatccttcagcggatcctaccagctttccgccagcgactacgggcgaagcttgagcggagcatcgcgcggcaacagcttaaggcccaacaagcccgggaagggacgaagcctagcaggaaagaaacttcaaaggcaccatccttcttcacgaagttacgaattcaaaagtatattctggaacaccttgattccatcacgtcattgagtcctatctacgccgtgagcattgcgaccttttacttcaccggcgcgtactatcatttgtcgaaacgcttttggggtctgcgatatgtattcacaaagaaacttgaggaaaacgagcagcgggtcgggtatgaagtgctaggagtgttgcttgtcttgcagatcgcggtacaaagcgtgctgcacgtcaagaaagtggggctcagtttgcagcaagaagaccttgagacagaggcgacccattctaggggcccggatgatacgttgatccactctattgagaacccgccaacactaccgcttcttcctgcatctgatgcccggtatgatctctcagaggactccactgcaatcccttggattccctcagggcagcaaagcagatgcacactttgcttagaacccttcaaagaccctagtgtcaccacatgcggacacgtattctgctggacatgcgtgcgagattgggtacgcgagaagcctgaatgtcccctgtgtcgacaagatgtcctgctatctaaaattctgcctttgagaggttag

SEQ ID NO: 63688 - protein, 373 aa, Aspergillus oryzae
MADEDFSLSPATSAPAPSPSAHFYPFATSPDIIRSHEKDLFLTSNLVQQAQNIIRSLRGARFAHTYSETIKNLTEILYFSLTTLIGNRTLGEEYCDLVQLEDDTLQLPSFIRRAGYIVSSIIVPWILQRILPAFRQRLRAKLERSIARQQLKAQQAREGTKPSRKETSKAPSFFTKLRIQKYILEHLDSITSLSPIYAVSIATFYFTGAYYHLSKRFWGLRYVFTKKLEENEQRVGYEVLGVLLVLQIAVQSVLHVKKVGLSLQQEDLETEATHSRGPDDTLIHSIENPPTLPLLPASDARYDLSEDSTAIPWIPSGQQSRCTLCLEPFKDPSVTTCGHVFCWTCVRDWVREKPECPLCRQDVLLSKILPLRG

SEQ ID NO: 63689 - DNA, 1014 bp, Saccharomyces cerevisiae
  CDS (1)..(1014)
atgaagaatgataataagttgcaaaaggaagcacttatgcgactatcgcagctaagatttccatttgccgatgctccaagtatagtacaagcgcatcaaaaagatgaacaaatccagggccttttgattatgaaagtgactgaattgtgcaaattgataaagagtcaattgtttgttaactcttaccctaaggaactgtccatatttgccaagctcctgtatttgctctttactacaggaagacgtggtagaacgttaggtgaggaatatgttgacttgacatacactaataggaagggtaccagacttgcaggacggctcaaaatgattgtattcgctttcgcttatcctttatgtccatatttcatcaccaaactatacaagaaaataatgaagaacaacaaggaaagtaaaattgaagatactgaaagtgttgccgcgttttgtaagggccttttagatttcattttagacgtacacatgaccctcttttatttcaaaggagctttttacagtatttccaaaaggatttttggtatgagatatgcttttaaacatatattgtcaaaaaatgaggccaattttagagaagagggctcacaaaagtacaaagtattaggttatatcctattagctcaaaatgttatgaaatggtaccctgtcctaacctctacgctcgggtcctggatttatgggagaaaaaggaccaatgattcaattactaggtcgtctgttggtctacaggagcgttcagaacatgaatctatagaaggcataccgaaggaatcgcagctgactcatataaatttgtcagataaaaaccaattgccatttattccagaagcctcgagaaaatgcatcctatgtctcatgaacatgagtgatcctagctgcgcgccatgtggacatctattttgttggagttgtcttatgagctggtgtaaagagaggccagaatgccccttgtgcagacaacactgtcaaccacaggaaattctggtcctgcggcaatag

SEQ ID NO: 63690 - protein, 337 aa, Saccharomyces cerevisiae
MKNDNKLQKEALMRLSQLRFPFADAPSIVQAHQKDEQIQGLLIMKVTELCKLIKSQLFVNSYPKELSIFAKLLYLLFTTGRRGRTLGEEYVDLTYTNRKGTRLAGRLKMIVFAFAYPLCPYFITKLYKKIMKNNKESKIEDTESVAAFCKGLLDFILDVHMTLFYFKGAFYSISKRIFGMRYAFKHILSKNEANFREEGSQKYKVLGYILLAQNVMKWYPVLTSTLGSWIYGRKRTNDSITRSSVGLQERSEHESIEGIPKESQLTHINLSDKNQLPFIPEASRKCILCLMNMSDPSCAPCGHLFCWSCLMSWCKERPECPLCRQHCQPQEILVLRQ

SEQ ID NO: 63691 - DNA, 1134 bp, Yarrowia lipolytica; identical to SEQ ID NO: 63677
  CDS (70)..(1134)

SEQ ID NO: 63692 - protein, 354 aa, Yarrowia lipolytica
MSDNTTIKKPIRPKPIRTERLPYAGAAEIIRANQKDHYFESVLEQHLVTFLQKWKGVRFIHQYKEELETASKFAYLGLCTLVGSKTLGEEYTNLMYTIRDRTALPGVVRRFGYVLSNTLFPYLFVRYMGKLRAKLMREYPHLVEYDEDEPVPSPETWKERVIKTFVNKFDKFTALEGFTAIHLAIFYVYGSYYQLSKRIWGMRYVFGHRLDKNEPRIGYEMLGLLIFARFATSFVQTGREYLGALLEKSVEKEAGEKEDEKEAVVPKKKSSIPFIEDTEGETEDKIDLEDPRQLKFIPEASRACTLCLSYISAPACTPCGHFFCWDCISEWVREKPECPLCRQGVREQNLLPIR

SEQ ID NO: 63693 - DNA, 1146 bp, Arabidopsis thaliana
  CDS (1)..(1146)
atgaggcttaatggggattcgggtccgggtcaggatgaacccggttcgagcgggtttcacggcggaatcagacgattcccgttagcagctcagccggagattatgagagctgctgagaaagacgatcaatacgcttctttcatccacgaagcttgccgcgatgccttccgacaccttttcggtacaagaatcgctcttgcttaccagaaggagatgaagctacttggacagatgctttactatgttcttacgacaggttcagggcaacaaactttaggagaggaatattgtgacattatacaggttgcagggccttatggactctctcctacaccagctagacgtgctttgttcatattgtaccagaccgcagttccatatatcgcagagagaattagcactcgagctgctacgcaagcagtcacctttgatgagtctgatgagttttttggtgatagtcatatccactcaccaagaatgatagatcttccatcttcatctcaagttgaaacttcaacttctgtagtatctaggttaaacgatagacttatgagatcgtggcaccgagctattcagcgatggcctgtggttcttcctgttgcccgcgaagtcttacaactggttttgcgtgccaatctgatgctcttctactttgaaggtttttattatcatatatcgaaacgtgcatccggggttcgttatgttttcataggaaagcaactgaatcagagacctagataccaaattcttggggttttccttctaatccaattgtgcatccttgctgctgagggcttgcgtcggagtaatttgtcatctatcactagctccattcagcaggcttctataggatcttatcaaacttcaggagggagaggtttacctgttttaaatgaagaggggaatttgataacttcggaagctgaaaagggaaactggtctacctccgattcaacttcaacggaggcagtagggaaatgcactctctgcttaagcacccgtcagcacccaacggccactccttgtggtcatgtgttttgttggagctgcattatggaatggtgcaacgagaagcaagaatgccctctttgtcgaacgcccaatacccattcaagtttggtttgtttgtatcattctgatttttag

SEQ ID NO: 63694 - protein, 381 aa, Arabidopsis thaliana
MRLNGDSGPGQDEPGSSGFHGGIRRFPLAAQPEIMRAAEKDDQYASFIHEACRDAFRHLFGTRIALAYQKEMKLLGQMLYYVLTTGSGQQTLGEEYCDIIQVAGPYGLSPTPARRALFILYQTAVPYIAERISTRAATQAVTFDESDEFFGDSHIHSPRMIDLPSSSQVETSTSVVSRLNDRLMRSWHRAIQRWPVVLPVAREVLQLVLRANLMLFYFEGFYYHISKRASGVRYVFIGKQLNQRPRYQILGVFLLIQLCILAAEGLRRSNLSSITSSIQQASIGSYQTSGGRGLPVLNEEGNLITSEAEKGNWSTSDSTSTEAVGKCTLCLSTRQHPTATPCGHVFCWSCIMEWCNEKQECPLCRTPNTHSSLVCLYHSDF

SEQ ID NO: 63695 - DNA, 1637 bp, Pichia angusta
  CDS (325)..(1212)
atcatcatcaagccgctaaaaaaaccgggcgtgccttcgtctccggtagtggaagagactcccagccgagcagaaacgcccacggggagcaaggcgcgggcaagtggtctttcgggtgagcttgatcgctcaggaagaccgtgcaagcggtggaccaaaaagacacgtgtgttcaagactttcagcggctgggacgtcgaggttgggatctggagaccgtgtacgtagggttttgcttttgttctatgtacgatttcactaaaaatatcaattacgaatgggctaatatttgcgtctggctaggctaaataattattcctttttatgtttaagcttttgtcttttgccaatgctccagcgattgtgcgggccaaccagaaggattcatattttgagtcgaggctgcacaaccagctcttagacgttgtgaaggccatcaaaggctctcactttgtccacaagtacccggaggagctgcgaaccctggccacggctctttatctgtgtctcacaacattggtgggttccaagacgctgggcgaggagtacgtggatctggtgtatgtgagtcgtgacggacgcaagataccgaaatttgcgtcccgatttggctttgtcgtggcgtatgtgctcttcccctatgctgttcgccaactgcttcaaaaactgaaagcacagcaaagccggctagcacaactggtttccggagtcagctacatgaacgtgatggatcttttgaatctccatctggcgctcttctacttcacgggcaaatactatcagtttgcgaaaagactctttggtctgcgatatgcgtttggctatcgagtcgacaaaaatcagcagagagcgcgaggcaactacgagttgctgggactgctgatcatttttcagacagtcttcaagaacgtggcaaacttgcgaaaactgtggggggccaccaagaccgtgcaggactcgggagatttaatctacaggttcagagaccagacgagcgacgttatagaccttgcagacccaaaggtgctgccgtacctgcctgaggcttcgcgcacgtgcatgctgtgtctgtcgccgatgaaagacccatcatgcggcgagtgcggccacgtcttctgctggaagtgcgtgctggactgggtcaaggagcgccaggagtgtccgttgtgcagggccaaaatgagagagtcgcagctgttgcctctacgataagtgtctatgaacaatacataagggccacggatcagtttctattaacacccattcggaacagcacctgcttgcccttcttgccctttctgatctcgaagtcgggctcttcgcgtcgttgctgtaagccctgaccccattgtccgatcgaggtgttgaccgggttgacccttggtggcttgggtttctgggcactgggcagtttcgggaacagctggtcgtccagagccggggcttgtggcttgggctgcgaattgttgaggtacgtcagccgcacgtttggcgaggtgcctctattgacgacaggcttcaacttcgggggcgcgctttgcgcagccccgttgtgggctggttctggccccacggtcccacgggccgcccgtggcgcagtgctgagcgcagggaactgctcgtccagcagcttttcg

SEQ ID NO: 63696 - protein, 295 aa, Pichia angusta
MFKLLSFANAPAIVRANQKDSYFESRLHNQLLDVVKAIKGSHFVHKYPEELRTLATALYLCLTTLVGSKTLGEEYVDLVYVSRDGRKIPKFASRFGFVVAYVLFPYAVRQLLQKLKAQQSRLAQLVSGVSYMNVMDLLNLHLALFYFTGKYYQFAKRLFGLRYAFGYRVDKNQQRARGNYELLGLLIIFQTVFKNVANLRKLWGATKTVQDSGDLIYRFRDQTSDVIDLADPKVLPYLPEASRTCMLCLSPMKDPSCGECGHVFCWKCVLDWVKERQECPLCRAKMRESQLLPLR

SEQ ID NO: 63697 - DNA, 1788 bp, Pichia pastoris
  CDS (274)..(1533)
actagtcgaaagaaagccaaattggataagaaccaaactcgtttaccgttcttcaaataaatcctagctttatcatatttattttaacttaaaacctaattaagtaactatttccttttctgatctcgaaagcctaatctaccttctccacatgcaaatcacttcccccactggacaccacatctgccttttcctctctcctctgttttcctttcttcagaaccaagcttaccacccagcaagaagcgcttcacatatctgccaatcttagatatgcccccatctgaagagatcaagctgagagcagtgtctccgaggcccgatttcaaggccaattacttagagtttgccaatgctccggcaattgtcagagccaaccagaaggactcctattttgaaacagtattacgggacaaactccaaaacgttattcagatctttaaagggcaaagattcacccatacccatccagaagagattggcgtagctgcaaaggcattatatttatctctaacaacgctactcggaactaaaacactaggggaagaatacgttgacctaatctatgtctctagagatggtaagagaatacctagatatcttgcaagagctgggtttatatttgcgtacgccatcttgccttattttttgaccaggttatttcggcgattaaaatcctcgtcaacaccgaaagatgaagtgacggaggaaaagatcaacaaagagctaccaatctcattgagaattgagaaatatttatcaaatatgtcatattcgaaggtgctggacaccatcatgaaccttcacatcgcagtgttctatttttcagggcagttctataacatatccaagaggtttttctccatgaggtatgcattcggtcacaagattaacaaggaaaggacaccaaatgggaactacgaattactaggagggttgattgtcctccaactggtcatgaaaagtctgggtggcttcaaaggtttgattggctcattcaccggaaacgacgagcatgatgaaagcaatttgagggcgaacaataaggatatcatgtatggaatcccctcagaagaagaacaggaagaggcaaagcaacaattaggaatcatagacttatcagatccgggtcaattaccttacattccggagtcttcaagacaatgcatgttgtgtctttcctatatgactaaccctactgcagctaattgtgggcattgcttctgttggagctgcataatagactggtgcaaagaaagacagactgtcctctgtgtaggcaaaaagtgttggaacagcaactgttaccattgcattagattattctatatcccaactttaaataagatttgcttcttctttcttttgtcctttttatcggttagagcagcatctaaggagttcaagtcgacaaaggaggagttcgcagaactgttcaatgaagaacttgcagacatagccggagaagatccccattgtcctggtccatttccaactggacgaactctagggtacttcttggttgtattttgaggtaatgcagggaacttttcagggtccaagccaaaagtttttggtttaggtttctgtttggttctggcggattgaatactagggaatgctgtaggagttgataaagtgctttttgcaggtttgggaaaacgttgttctgaaagaacacccttcttgttggctctaattggattattcccccaaccatgtggtgtgaatagatctgtgttgttgagagatgggtacttttgattgaattctgtctccctgtcatgg

SEQ ID NO: 63698 - protein, 419 aa, Pichia pastoris
MPPSEEIKLRAVSPRPDFKANYLEFANAPAIVRANQKDSYFETVLRDKLQNVIQIFKGQRFTHTHPEEIGVAAKALYLSLTTLLGTKTLGEEYVDLIYVSRDGKRIPRYLARAGFIFAYAILPYFLTRLFRRLKSSSTPKDEVTEEKINKELPISLRIEKYLSNMSYSKVLDTIMNLHIAVFYFSGQFYNISKRFFSMRYAFGHKINKERTPNGNYELLGGLIVLQLVMKSLGGFKGLIGSFTGNDEHDESNLRANNKDIMYGIPSEEEQEEAKQQLGIIDLSDPGQLPYIPESSRQCMLCLSYMTNPTAANCGHCFCWSCIIDWCKERQTVLCVGKKCWNSNCYHCIRLFYIPTLNKICFFFLLSFLSVRAASKEFKSTKEEFAELFNEELADIAGEDPHCPGPFPTGRTLGYFLVVF

SEQ ID NO: 63699 - DNA, 921 bp, Schizosaccharomyces pombe
  CDS (1)..(921)
atgcacttgtcagcacacattgatcctttacagataatcctatgtacggagattgatgaagcatgcattcaattcattaaatctcagatagagggtatagcccgtgcttgcggtcctcgtatgcaagcaaattttgagggggttttaattccatatgtagatgttttagggaaattcctttacagagcatgttgcttgcggtatgctacaatgggcgaggaagcagctcgaattgttttagctaagcaggatcgatcgaaaggactggttcttgctactactggagaaaggatgacttcgttgatattctcattagtcattgacttagtaggcgtacatgtcaacaagcttttgaaacaagcttcttattcttctagctttaaattaccttttgggctacgaaatttattacctgaagccgtaatttcgaaggaaaaacatttagtttacattctaaattcctttaaaccaattcttttaaaacttgtttcaattattcgctttttgtgccttacaatgaaagggcactgtgcaacagtttctcaattgcttttaggtcttaaatatatatctcttgatgaaataaatccagaggaaaagaaaaaagttttaaccctattactattgcttggtagtcggttgattgcttcaattcttcaacattctaattcctattttgaccaacacactatctcttcaattactgatgaacgggaccttgaggataaaaataaattaccgtttatccctgagggcaataggaagtgctcgctttgtatggaattcattcattgtcctgcagcaactgagtgtggtcatattttttgctggtcatgtattaatggttggacatccaaaaaatctgaatgccctttgtgccgcgcattttcttctccctcaaaaatcattttactccggtag

SEQ ID NO: 63700 - protein, 306 aa, Schizosaccharomyces pombe
MHLSAHIDPLQIILCTEIDEACIQFIKSQIEGIARACGPRMQANFEGVLIPYVDVLGKFLYRACCLRYATMGEEAARIVLAKQDRSKGLVLATTGERMTSLIFSLVIDLVGVHVNKLLKQASYSSSFKLPFGLRNLLPEAVISKEKHLVYILNSFKPILLKLVSIIRFLCLTMKGHCATVSQLLLGLKYISLDEINPEEKKKVLTLLLLLGSRLIASILQHSNSYFDQHTISSITDERDLEDKNKLPFIPEGNRKCSLCMEFIHCPAATECGHIFCWSCINGWTSKKSECPLCRAFSSPSKIILLR

SEQ ID NO: 63701 - DNA, 1170 bp, Oryza sativa
  CDS (1)..(1170)
atgcgcggcggcggcggcggggatgcgggcaccagctcgaggggcggcggttccggcggggcccccgcgcgtccgcggcggttccctgaggcggcgcagccggagatcatgcgggcggcggagaaggacgacggctacgccgcgcacgtcaccgaggcctgccgcgacgccttccgccacctcttcggtaccagggtcgccgttgcttatcagaacgagataaaattgcttggtcagtctctttattacttgctaacaactggttcaggccagcaaacacttggagaagaatactgtgatatatctcaggttgcaacctcgcacggacttccgcctacacctgctagacggattctattcattttgtaccaaactaccgttccctatcttgctgaacgcatcagctctagaattgttgcacgtggtattgccctcgaggactctcagcttgatgaccattctgaaagtgatagttctagtataggcactgcagcacaaccatccccaattaggaacagtccttcaagaagcttgagtttttctcatttgtcaaggttgagaggcagagtccataccttgtgggaatgggttcttcggaaatggccttcgatgctaccatttgctcaagattttatacagttaactatccggacaaaccttatgttcttctattttgaaggattgtattatcatttaccaaagcgagcagctggcattcgttatgtattcattgggaagccattgaatcagaggcccaggtatcaaatcttgggtatttttctgttaattcagttatgtattcttggtgctgaaagacttcgaagaagtaatttatcaacaatagctagttcgattaaccaaatctcatctggaggctatccttcatcaagaggtcgaggtgtccctgttctaaatgaagatggaaatataatcagcgacatccgccatgggaaaactgcagatttggctactagttcagaggcatccagtggtaagagcaaatgcaccctttgtctcagtacccgtcagaatcccactgccacaacctgtggccatgtcttctgctggagttgcattatggagtggtgtaatgagaagcctgaatgccccctatgcagaactccgattacacattcgagtttgatttgtatatatcattcagatttctag

SEQ ID NO: 63702 - protein, 389 aa, Oryza sativa
MRGGGGGDAGTSSRGGGSGGAPARPRRFPEAAQPEIMRAAEKDDGYAAHVTEACRDAFRHLFGTRVAVAYQNEIKLLGQSLYYLLTTGSGQQTLGEEYCDISQVATSHGLPPTPARRILFILYQTTVPYLAERISSRIVARGIALEDSQLDDHSESDSSSIGTAAQPSPIRNSPSRSLSFSHLSRLRGRVHTLWEWVLRKWPSMLPFAQDFIQLTIRTNLMFFYFEGLYYHLPKRAAGIRYVFIGKPLNQRPRYQILGIFLLIQLCILGAERLRRSNLSTIASSINQISSGGYPSSRGRGVPVLNEDGNIISDIRHGKTADLATSSEASSGKSKCTLCLSTRQNPTATTCGHVFCWSCIMEWCNEKPECPLCRTPITHSSLICIYHSDF

SEQ ID NO: 63703 - DNA, 1164 bp, Zea mays
  CDS (1)..(1164)
atgctagcaggcgcccccaccggcgatgcgggccccagctccggcgctgggagcaacccacccactcggccacggaggttccccggggcggcgcagccggagatcatgcgggcggcggagaaggacgatagctacgcagcccacgtcacggaggcatgccgcgacgcatttcggcacctcttcggtaccagggttgctgttgcttaccagaatgagataaaattgcttggtcagtccctttactacttgctaacaactggttcaggccagcaaacacttggtgaagaatattgtgatatatctcaggttgcaaccttgcatggacttccacctactcctgctaggcggattctattcattttgtaccaaactactgtgccctaccttgctgaacggatcagctccagaattgttgcccgtagtattgtactcaacgaatctcagtttgatgaccatcctgaaagtgataattctagtagtgacattgcacaatccaccacaaatagtgacattccttcaagaagcttaagtgtttctgctctgtcagggttcagaggccgagttcatgccttgtggcaatgggttcttcagaaatggccttcaatgctgccatatgctcaagattttatacagttggctatccggacaaatctaatgttcttctattttgaaggtctgtattatcatttgccaaagcgagcagctggtattcgctatgtattcattggcaagccaatgaatcagagacctaggtatcagatcttgggtatttttctgttgattcagttgtgtattcttggagctgaaagactccgaagaagtaatatatcgtcaatagctagttccattaatcaaatatcatctggaggctatccatcgactacaggtcggggcatccctgttctaaatgaagatggaaatatcatcagtgacatccgcagtggtaaagctgcagatatagcttctcattcagagacctccaatggcaagagcaaatgcaccctttgtctcagcatccggcaaaatcctactgccacaacctgtggacatgttttctgctggaattgcataatggagtggtgcaatgagaagcctgagtgccccctatgcagaactccgattacccattcgagtttgatttgtatatatcattcagatttctag

SEQ ID NO: 63704 - protein, 387 aa, Zea mays
MLAGAPTGDAGPSSGAGSNPPTRPRRFPGAAQPEIMRAAEKDDSYAAHVTEACRDAFRHLFGTRVAVAYQNEIKLLGQSLYYLLTTGSGQQTLGEEYCDISQVATLHGLPPTPARRILFILYQTTVPYLAERISSRIVARSIVLNESQFDDHPESDNSSSDIAQSTTNSDIPSRSLSVSALSGFRGRVHALWQWVLQKWPSMLPYAQDFIQLAIRTNLMFFYFEGLYYHLPKRAAGIRYVFIGKPMNQRPRYQILGIFLLIQLCILGAERLRRSNISSIASSINQISSGGYPSTTGRGIPVLNEDGNIISDIRSGKAADIASHSETSNGKSKCTLCLSIRQNPTATTCGHVFCWNCIMEWCNEKPECPLCRTPITHSSLICIYHSDF

SEQ ID NO: 63705 - DNA, 27 bp, Artificial sequence
  primer
atgaagaatgataataagttgcaaaag

SEQ ID NO: 63706 - DNA, 23 bp, Artificial sequence
  primer
ctattgccgcaggaccagaattt

SEQ ID NO: 63707 - protein, 379 aa, Artificial sequence
  consensus sequence
  Variant (2)..(2): Xaa in position 2 is any amino acid
  Variant (4)..(5): Xaa in position 4 to 5 is any amino acid
  Variant (7)..(7): Xaa in position 7 is any amino acid
  Variant (9)..(13): Xaa in position 9 to 13 is any amino acid
  Variant (16)..(33): Xaa in position 16 to 33 is any amino acid
  Variant (34)..(34): Xaa in position 34 is any or no amino acid
  Variant (36)..(53): Xaa in position 36 to 53 is any amino acid
  Variant (54)..(55): Xaa in position 54 to 55 is any or no amino acid
  Variant (57)..(59): Xaa in position 57 to 59 is any amino acid
  Variant (62)..(66): Xaa in position 62 to 66 is any amino acid
  Variant (73)..(73): Xaa in position 73 is any amino acid
  Variant (75)..(89): Xaa in position 75 to 89 is any amino acid
  Variant (90)..(93): Xaa in position 90 to 93 is any or no amino acid
  Variant (95)..(104): Xaa in position 95 to 104 is any amino acid
  Variant (106)..(144): Xaa in position 106 to 144 is any amino acid
  Variant (145)..(199): Xaa in position 145 to 199 is any or no amino acid
  Variant (202)..(203): Xaa in position 202 to 203 is any amino acid
  Variant (205)..(206): Xaa in position 205 to 206 is any amino acid
  Variant (208)..(210): Xaa in position 208 to 210 is any amino acid
  Variant (213)..(214): Xaa in position 213 to 214 is any amino acid
  Variant (216)..(216): Xaa in position 216 is any amino acid
  Variant (219)..(219): Xaa in position 219 is any amino acid
  Variant (221)..(230): Xaa in position 221 to 230 is any amino acid
  Variant (231)..(238): Xaa in position 231 to 238 is any or no amino acid
  Variant (240)..(241): Xaa in position 240 to 241 is any amino acid
  Variant (244)..(248): Xaa in position 244 to 248 is any amino acid
  Variant (250)..(296): Xaa in position 250 to 296 is any amino acid
  Variant (297)..(340): Xaa in position 297 to 340 is any or no amino acid
  Variant (342)..(342): Xaa in position 342 is any amino acid
  Variant (346)..(350): Xaa in position 346 to 350 is any amino acid
  Variant (352)..(355): Xaa in position 352 to 355 is any amino acid
  Variant (359)..(359): Xaa in position 359 is any amino acid
  Variant (363)..(363): Xaa in position 363 is any amino acid
  Variant (365)..(367): Xaa in position 365 to 367 is any amino acid
  Variant (369)..(370): Xaa in position 369 to 370 is any amino acid
  Variant (372)..(373): Xaa in position 372 to 373 is any amino acid
PXAXXPXIXXXXXKDXXXXXXXXXXXXXXXXXXXGXXXXXXXXXXXXXXXXXXXXYXXXTTXXXXXTLGEEYXDXXXXXXXXXXXXXXXXXXXRXXXXXXXXXXPXXXXXXXXXXXXXXXXXXXXXXXXXXXXXXXXXXXXXXXXXXXXXXXXXXXXXXXXXXXXXXXXXXXXXXXXXXXXXXXXXXXXXXXXXXXXXXFYXXGXXYXXXKRXXGXRYXFXXXXXXXXXXXXXXXXXXYXXLGXXXXXQXXXXXXXXXXXXXXXXXXXXXXXXXXXXXXXXXXXXXXXXXXXXXXXXXXXXXXXXXXXXXXXXXXXXXXXXXXXXXXXXXXXXXXXXXXXCXLCLXXXXXPXXXXCGHXFCWXCXXXWXXEXXECPLCR

SEQ ID NO: 63708 - protein, 32 aa, Artificial sequence
  protein pattern
  Variant (2)..(2): Xaa in position 2 is any amino acid
  Variant (6)..(9): Xaa in position 6 to 9 is any amino acid
  Variant (10)..(10): Xaa in position 10 is Ala, Asp or Asn
  Variant (12)..(12): Xaa in position 12 is Ala, Ser or Thr
  Variant (13)..(13): Xaa in position 13 is Ala, Cys or Val
  Variant (14)..(14): Xaa in position 14 is Ala, Gly or Thr
  Variant (15)..(15): Xaa in position 15 is Glu, Asn, Pro, Gln, Ser or Thr
  Variant (19)..(19): Xaa in position 19 is any amino acid
  Variant (23)..(23): Xaa in position 23 is any amino acid
  Variant (25)..(25): Xaa in position 25 is Ile, Leu or Val
  Variant (26)..(26): Xaa in position 26 is any amino acid
  Variant (27)..(27): Xaa in position 27 is Asp, Glu, Gly or Ser
  Variant (29)..(31): Xaa in position 29 to 31 is any amino acid
  Variant (32)..(32): Xaa in position 32 is Asp, His, Lys or Arg
CXLCLXXXXXPXXXXCGHXFCWXCXXXWXXXX

SEQ ID NO: 63709 - protein, 22 aa, Artificial sequence
  protein pattern
  Variant (3)..(3): Xaa in position 3 is Phe, Ile or Val
  Variant (4)..(4): Xaa in position 4 is any amino acid
  Variant (6)..(6): Xaa in position 6 is any amino acid
  Variant (7)..(7): Xaa in position 7 is any or no amino acid
  Variant (9)..(11): Xaa in position 9 to 11 is any amino acid
  Variant (12)..(12): Xaa in position 12 is any or no amino acid
  Variant (15)..(16): Xaa in position 15 to 16 is any amino acid
  Variant (17)..(17): Xaa in position 17 is Gly or Ser
  Variant (18)..(18): Xaa in position 18 is Ile, Leu, Met or Val
  Variant (21)..(21): Xaa in position 21 is Ala or Val
  Variant (22)..(22): Xaa in position 22 is Phe or Leu
FYXXGXXYXXXXKRXXXXRYXX

SEQ ID NO: 63710 - protein, 20 aa, Artificial sequence
  protein pattern
  Variant (2)..(3): Xaa in position 2 to 3 is any amino acid
  Variant (4)..(4): Xaa in position 4 is Phe, Ile or Leu
  Variant (6)..(11): Xaa in position 6 to 11 is any amino acid
  Variant (18)..(18): Xaa in position 18 is Cys or Val
  Variant (20)..(20): Xaa in position 20 is Ile, Leu or Val
YXXXTXXXXXXTLGEEYXDX

SEQ ID NO: 63711 - protein, 26 aa, Artificial sequence
  protein pattern
  Variant (2)..(2): Xaa in position 2 is Ala, Asp, Gly, Asn or Thr
  Variant (3)..(3): Xaa in position 3 is Ala, Gln or Ser
  Variant (4)..(4): Xaa in position 4 is Ala or Pro
  Variant (5)..(5): Xaa in position 5 is Ala, Asp, Glu or Ser
  Variant (7)..(7): Xaa in position 7 is Ile, Met or Val
  Variant (8)..(8): Xaa in position 8 is Gln or Arg
  Variant (9)..(9): Xaa in position 9 is Ala or Ser
  Variant (10)..(10): Xaa in position 10 is any amino acid
  Variant (11)..(11): Xaa in position 11 is Glu or Gln
  Variant (14)..(16): Xaa in position 14 to 16 is any amino acid
  Variant (17)..(17): Xaa in position 17 is Ala, Glu, Gln or Thr
  Variant (18)..(18): Xaa in position 18 is Ala, Gly, Asn, Ser or Thr
  Variant (19)..(19): Xaa in position 19 is any amino acid
  Variant (20)..(20): Xaa in position 20 is Ile, Leu or Val
  Variant (21)..(25): Xaa in position 21 to 25 is any amino acid
  Variant (26)..(26): Xaa in position 26 is Asp, Glu, Asn, Ser or Thr
AXXXXIXXXXXKDXXXXXXXXXXXXX

SEQ ID NO: 63712 - protein, 12 aa, Artificial sequence
  protein pattern
  Variant (7)..(7): Xaa in position 7 is Ala, Gln or Thr
  Variant (8)..(11): Xaa in position 8 to 11 is any amino acid
  Variant (12)..(12): Xaa in position 12 is Gln or Ser
ECPLCRXXXXXX

SEQ ID NO: 63713 - DNA, 2088 bp, Saccharomyces cerevisiae
  CDS (1)..(2088)
atggctggaattttgtcaaagactctttcagaagtgcatccttccctccgaacaaatggtatgggtatcggtaacactcacaggaggatatcgctaggcttcctacctcccaacaagaagaatcctctggtacgaaaatttcgtgcaagaacgagaaatattgatcagaggagtttcagatctttaacagatgattttggaagtaacgtccatgaaccaaatccgtacttaggtaatattgatgaggaacctgacctttactatcatgatgaagaagatggcgaactgagcagaacgatttctctaccatcaagggtatcagaaactcctgagctttcgccacaagatgttgattggattctacatgaacatgaacgacgatactcatcggtatgcaactctgataatgaggaagcaagtcaaagcaacacaccagatagaatacaagaatattctggaagagaactagaatatgacgaatttatgaatagactccaagctcagaaacagaaattaactcgaagtgcggtaacagacgctaaaggcacctcacatcacagaagaccatcattcgtatctgtgactagccgaggctcagttcccacaatttaccaagagatcgacgagaacgattctgaggcactagcagaattggctcacagccacgtcaccttcaaatcagaagcaagagttttggcatcttattccttccctctaattttcacattcttattggaacagattttccctatggtatgttcattaactgtgggccacttaggcaaaaatgaactagcagctgtgtccttagcatccatgacttctaatataacactagcgatattcgagggtattgccactagtctagatactctatgccctcaagcgtatggctctgggagattctacagtgtaggagttcaccttcaacgttgcattgctttttcattggtcatatatataccttttgctgtcatgtggtggtattctgaacctcttctttcttatatcatccctgagaaagaattaatcaacctaacgtcacgatttttaagagtactaatattgggagcgccagcgtatattttttttgaaaatttaaaacgatttttacaagcccaaggtattttcgatgcaggcatctacgttttgacaatatgtgctcccttaaacgtattagtcagttacactctcgtttggaacaagtacattggtgttggatttattggggctgcaattgccgttgtgcttaacttctggctaatgtttttcttactattgttttatgcattgtatattgatggaagaaaatgctggggtggattctcaaggaaggctttcacccattggaatgatttagggcatttagccttctcaggtattattatgttggaggcggaagagctgtcatatgaactattgacgttatttagtgcatattacggtgtcagttatctagcagctcagtcggcagtatctactatggctgcattgctctatatgatcccatttgcaataggtatatctacctctacgagaattgcgaacttcattggtgcaaaaagaaccgatttcgcgcacatctcttctcaagttgggttgtcattttcgtttattgcggggttcatcaattgctgcatactagtatttggacgtaatctaatcgccaacatttactcaaaagatcccgaagtcatcaaattaattgcgcaagtattgcccttggtgggtattgtgcaaaatttcgactcgcttaatgccgttgctgggtcttgcctcaggggtcaaggcatgcaatctctaggaagtatagtaaatttaatggcttactatctatttggaattcccctggctctcatcctaagttggttctttgacatgaaattgtatggtctttggattggtattggaagtgccatgcttttaattgggctagttgaggcttattacgtattatttcccgattgggacaaaattatgacctatgctgagattttgaaagaaaccgaagatgatgaagtagatagcgatgagtatttaacagactcagacgatcctgatgaaaacacagccctcttaggggcttaa

SEQ ID NO: 63714 - protein, 695 aa, Saccharomyces cerevisiae
MAGILSKTLSEVHPSLRTNGMGIGNTHRRISLGFLPPNKKNPLVRKFRARTRNIDQRSFRSLTDDFGSNVHEPNPYLGNIDEEPDLYYHDEEDGELSRTISLPSRVSETPELSPQDVDWILHEHERRYSSVCNSDNEEASQSNTPDRIQEYSGRELEYDEFMNRLQAQKQKLTRSAVTDAKGTSHHRRPSFVSVTSRGSVPTIYQEIDENDSEALAELAHSHVTFKSEARVLASYSFPLIFTFLLEQIFPMVCSLTVGHLGKNELAAVSLASMTSNITLAIFEGIATSLDTLCPQAYGSGRFYSVGVHLQRCIAFSLVIYIPFAVMWWYSEPLLSYIIPEKELINLTSRFLRVLILGAPAYIFFENLKRFLQAQGIFDAGIYVLTICAPLNVLVSYTLVWNKYIGVGFIGAAIAVVLNFWLMFFLLLFYALYIDGRKCWGGFSRKAFTHWNDLGHLAFSGIIMLEAEELSYELLTLFSAYYGVSYLAAQSAVSTMAALLYMIPFAIGISTSTRIANFIGAKRTDFAHISSQVGLSFSFIAGFINCCILVFGRNLIANIYSKDPEVIKLIAQVLPLVGIVQNFDSLNAVAGSCLRGQGMQSLGSIVNLMAYYLFGIPLALILSWFFDMKLYGLWIGIGSAMLLIGLVEAYYVLFPDWDKIMTYAEILKETEDDEVDSDEYLTDSDDPDENTALLGA

SEQ ID NO: 63715 - DNA, 1956 bp, Gibberella zeae PH-1
  CDS (1)..(1956)
atgtctctccccacgacttcaccgttcaatcctgacggcactcagcgaggccgccgtcactctatttttgcagactttattcccgacgatctagcctttccaccgccgttcatcgacccagcaccgaatgtggatgagatactgaacagagacatagacgagtgctcctctggcgacgagcatcgtgatgaagaagctgtcgaggacccgcgatacgtcgacgagtcggatttacaactggcattccatcccaacggcatagcatacggctcaggcttctcgacagttccgcccaccagcatcgacatccccgcgcccaacccacacgactttgagcaatcctaccgtgcagaggtttcccttcttcgcgataacgacgtgattccctccaagaacccgccaacaaaatggcattccacatactgggggcgcgtgtaccgtcacctttttagcacgcgcgttcgcgatcacgataaaccgctgttcgcggctgaagactcgggcgagacaacgccgcttctgcgcgacagaatcgtgcgcttcgatgggataccaccaacaccaggaccggatgaagttcataagcgatgggaggaggcgcttgctgcgaagaagctcgaaacgacgtggcagcgcgagaccaaaacattgatccaatatgctgcacctctgattgtcacatttttgcttcattactctgtcactgtcgcgagcgtgttgaccgtcgggcggttggggatggaggagctggctgccgtcaatttagccacaatgacagcaagcatcacatactacgtgcccgtccaaggcctagcgacgtgcctcgataccctctgcgcccaagcatacggctccggtcacaaacacctcgtcgggctccaggctcagcgcatgacatggctgctctggattctcatgctccccattgcggtgctatggtggttctccgagcccatcctcgccgcagctgttgggccaggacgtacaacggcactggctgccatgtacatgcgcattctcatcattggtatgcccggtgtatcagcatttgagagcgccaagcgtttcgtccagtcgcagggtctattccacgctacgacttacacgctgctcgtcggcgctcctctcagcttcctgcaaaactggttgttcgtgttcaaattcggctggggatttaacggcgcggccatcgccatggctgttacgcacaatcttctgcctcttctcctcattctgtacgtgcgtctctttgagggatccgagtgctggaagggctttaatcgcaaggcgtttagtaactggggaccgatgatcaaattggctctgccaggaatgatcatgatcgaagctcaattctctgtgttggagatcctcaccatcgctgctggcagatttggaaccgcgcaactagctgcacagggtgttctcgtgactatcacatcgacgtcgttcaacattcccttccctttggctatcgcgacgtcaactcgtgtggccaacctcatcggcgcgaacctgagtggtgccgcacgagttactgcgaaagtggccatcttcgctggactctttgttggtctgttcaacttgaccatgtttatcactctgcgaaagcagctaccaaatatctttacagatgacgaacagatatttgacgctcttgcggctgtctcccatggtcttttgagaggcatcggcagacaggccattggaggctacgccaacttgttctcatactacgtcgtggccttgcctattgcgctcggcactagttttggtctgggatggaacttggctggactttgggttggcttgacagctggccttgctgttgtatcgggtcttgaggccatttatctgtactttacggattgggaggctgccgtggcgcaggctgaagcgagaatgagaacggaaactcatcgcagacgatcttcaatttcggctagatcccagtaa

SEQ ID NO: 63716 - protein, 651 aa, Gibberella zeae PH-1
MSLPTTSPFNPDGTQRGRRHSIFADFIPDDLAFPPPFIDPAPNVDEILNRDIDECSSGDEHRDEEAVEDPRYVDESDLQLAFHPNGIAYGSGFSTVPPTSIDIPAPNPHDFEQSYRAEVSLLRDNDVIPSKNPPTKWHSTYWGRVYRHLFSTRVRDHDKPLFAAEDSGETTPLLRDRIVRFDGIPPTPGPDEVHKRWEEALAAKKLETTWQRETKTLIQYAAPLIVTFLLHYSVTVASVLTVGRLGMEELAAVNLATMTASITYYVPVQGLATCLDTLCAQAYGSGHKHLVGLQAQRMTWLLWILMLPIAVLWWFSEPILAAAVGPGRTTALAAMYMRILIIGMPGVSAFESAKRFVQSQGLFHATTYTLLVGAPLSFLQNWLFVFKFGWGFNGAAIAMAVTHNLLPLLLILYVRLFEGSECWKGFNRKAFSNWGPMIKLALPGMIMIEAQFSVLEILTIAAGRFGTAQLAAQGVLVTITSTSFNIPFPLAIATSTRVANLIGANLSGAARVTAKVAIFAGLFVGLFNLTMFITLRKQLPNIFTDDEQIFDALAAVSHGLLRGIGRQAIGGYANLFSYYVVALPIALGTSFGLGWNLAGLWVGLTAGLAVVSGLEAIYLYFTDWEAAVAQAEARMRTETHRRRSSISARSQ

SEQ ID NO: 63717 - DNA, 2088 bp, Candida glabrata CBS 138
  CDS (1)..(2088)
atggtgggtattttgtccaagacactatctgaggtgcatcctaccttgttgaccaatggtatgggtattaccaatactcatagaaggatttcattaggcttctttccaccgaaccgtaaaaacccgttagttaggaaatacagaaggaaaagggctaacctcaatactaatgaccagcgcagctttcaatcgttagttgatgattttggtagctcagttcatgaaccttcccaattccttaattacatcaatgaagatgaagaagatctttattacaacgatatagaagaaggcggcgaactaagcaggaccgtatccctaccatcattggtttctgagacgcctgatctgtcaccacccgatacagattggattattcaggaacatgagagaaggtattcctctgtctataattctgacaatgaaaatgacttagcagatgagcccgtcagtattgggggaagtatgacaaatagagagcttgagtacgatgaatttatgaatagaattaaagcgcaaaagcaagtttacgattctatagctagccacaaatatagaaggcgaccatctctcatttccgtaagtagtagaggtactgttcccacaatttatcaagaaattaatgggacagatggtgcggacgtttgtctccctgaaaagataacctttagagaggaagctaaggttttgagttccttttctttcccattgatattcacattcttattagaacaaatttttccaatggtttgttcattaactgtcggacatttaggtaaaaaccaacttgccgctgtttctttggcatctatgacctctaacattaccttagcagtatttgaaggtattgcgacaagtctggatacattgtgcccccaagcttatggagcaggcagatattatagcgtcggaatacattttcagagatgtgttctattttctttcataatattcctaccatttgctcttttctggtttttctcggagccaatattatttttggtagtcccagagaaagagttaattgcattgacttctcaatttctaagagttttaatctttggtgctcccgcatatattttattcgagaacttgaaaagatttcttcaagcacaaggaatctttgatgctggcatttacgttcttacaatatgtgcaccacttaatatattcgttagttataccttggtttggaataaatatattggaataggattcatcggttccgcggttgcagttgtgataaatttttggctaatgttcattctattattgttatacacaatctacattgatggtaagaaatgctggggtggcttctcaaagaaagcattcacacattggaaagatttgggacatttagcattttcaggaattatcatgctagaggctgaagaattatcctacgaaattctaacattgtttagtgcctattttggtactagttaccttgccgctcaatctgctgtatctacaatggccgcattattgtatatggtaccatttgctataggaatttctgcatcaacacgtattgctaactttattggggctaaaagggttgatcttgcacacaatgcatctgaggttggccttgtgttttcttttggtgctggcttaacaaattgctgtgttctcttttttggtagaaacataattgcacatgtgttctctagggatgatgaagttattgatttaatgactggattgcttagattagtggcagtagttcaaatctttgattccctaaatgctgtagctgggtcttgcttaagaggacaaggaatgcagagcttaggaagtattgtgaacttactaggttactacctgtttggaataccattagcattgatattaggatgggtattcaacatgaaattgtatggactctggattgggattggatgtgcgatgctgttgattggattaattgaggcatacaatgttctgtatccaaactgggactacatcttaaattatgctgagatcttaaaagaaacggaggaagatgatgatgatgacagctactttactgactctgatgataacgatgaagaacctactgagagaagccctttattagactaa

SEQ ID NO: 63718 - protein, 695 aa, Candida glabrata CBS 138
MVGILSKTLSEVHPTLLTNGMGITNTHRRISLGFFPPNRKNPLVRKYRRKRANLNTNDQRSFQSLVDDFGSSVHEPSQFLNYINEDEEDLYYNDIEEGGELSRTVSLPSLVSETPDLSPPDTDWIIQEHERRYSSVYNSDNENDLADEPVSIGGSMTNRELEYDEFMNRIKAQKQVYDSIASHKYRRRPSLISVSSRGTVPTIYQEINGTDGADVCLPEKITFREEAKVLSSFSFPLIFTFLLEQIFPMVCSLTVGHLGKNQLAAVSLASMTSNITLAVFEGIATSLDTLCPQAYGAGRYYSVGIHFQRCVLFSFIIFLPFALFWFFSEPILFLVVPEKELIALTSQFLRVLIFGAPAYILFENLKRFLQAQGIFDAGIYVLTICAPLNIFVSYTLVWNKYIGIGFIGSAVAVVINFWLMFILLLLYTIYIDGKKCWGGFSKKAFTHWKDLGHLAFSGIIMLEAEELSYEILTLFSAYFGTSYLAAQSAVSTMAALLYMVPFAIGISASTRIANFIGAKRVDLAHNASEVGLVFSFGAGLTNCCVLFFGRNIIAHVFSRDDEVIDLMTGLLRLVAVVQIFDSLNAVAGSCLRGQGMQSLGSIVNLLGYYLFGIPLALILGWVFNMKLYGLWIGIGCAMLLIGLIEAYNVLYPNWDYILNYAEILKETEEDDDDDSYFTDSDDNDEEPTERSPLLD

SEQ ID NO: 63719 - DNA, 2151 bp, Kluyveromyces lactis NRRL Y-1140
  CDS (1)..(2151)
atggctacactatttggaaagacgttgtctcaggttcatccgaagcttcgaacaaatggtattggtattgcaactaaccatagacgcatttcgctagggttcgatttagtgagcagagacaagaagaatccgttattacggaagtatttaaggaaacgcagacatcgtgggttgaggcgagggttgcatccagatgagcaaggtagttatcacactttggatgaggattttggaagcagtgttagagaaccgtctgtttacgacgatttagacgaagttttggaagatatagatgagtacgatgaggacggagaacccttaagtcggacggtgtcattgccctcgagggtatcagaaccaagcaacgtatcacaacaaaatcttgattggctcttagaggagcacgagagaaggttctcatcatcgcagaacagtgagaacgacgaagatgaggaccttgagaatgggacctcagaacaagcggatgtaatagcatatgacgactttatgcaccgggtcagacagcaattgcaacaagacttccatgatagagcatatgcaggtggtgctggcggtagtggtgcaggcggtcccaacaggagacgtgggtcgctaatatcagtaactagtcgaggttcagtaccgcaggtatttcaagatgtgggcagcatgaaagaagaagatttaagccatgctaaagtaaccgcaaatagtgaactcaaagtgttggcatcgtattcaatcccattgattttcactttcttattggaacagatgttccccgtggtatgctcgttaacggtgggtcatttggggaggacagaattggcagcggtctctttggcttcaatgaccacaaacattacgtatgctatctttgaaggtatagccacgagtttggatacactatgtccattagcctacggatctgggaattattacagtgttggtgttcacatgcagcgctgtatcatgttttcatttacagtattcataccgttcggatttatatggtggtggtctgaaacattgttgaccttagtaatgccgcatgaaccagaattaatccatatgaccgcgaaattccttcgagtcagtatactcggtgctccggcctacatcatattcgaaagtttaaagcggttcttacaagcacaaggtatctttgatgcagggatctacgttttaatgatatgtgctccttggaacatgtttgttagttacactttggtgtggaatgaaagaataggtatgggatttatcggagcacctattgctgttgtactcaatttttggactatggtcaccttgctatcgttatatgctatatacgtggacggatacaaatgttggggtgggtttaactccaagagtttaaaacattggaaagctttgtcagaacttgctgttcccggtatcgtgatgttagaagcagaagatctatcctatgagattttaaccctattcagttcttattttggtactccatacttggccgcccaatccgctgtttccaccacggcagcgttattgtacatgatcccattctctgtcggtatctcatcaagtacacgaattggaaatttcattggatgtagaagacccaactgtgccaaattgagtgctgaactcggtatagggtctagtttattcgttggactgctaaactgtttgataatcaacgtggacaagaggagcatagcaaatatctatacaaaggacgaagaagtcatccagttaatgtgtcaactgttaccgttggtcggtatagtggagatattcgactctttgaatgcgatcagtggatcatgtttacgtggtcttggactacagtacatcggaagcatagtgaaccttgttgtgtaccatctggtagccatcccattgggaattttcttggcatggtacatggacatgaaattgaatgggctatggatcggtatcggtgttggaatgttaattataggattagtgcaaagttattacgtgatttttgcagactggaacgacgtcatggaaagagcagagaagagacgggatcatgatcgggatgcagactcagatacagattcgctagaatctgtatcctcagtagaagcttattcagactcagaatcagactcagaatccagtccactgctattacgctag

SEQ ID NO: 63720 - protein, 716 aa, Kluyveromyces lactis NRRL Y-1140
MATLFGKTLSQVHPKLRTNGIGIATNHRRISLGFDLVSRDKKNPLLRKYLRKRRHRGLRRGLHPDEQGSYHTLDEDFGSSVREPSVYDDLDEVLEDIDEYDEDGEPLSRTVSLPSRVSEPSNVSQQNLDWLLEEHERRFSSSQNSENDEDEDLENGTSEQADVIAYDDFMHRVRQQLQQDFHDRAYAGGAGGSGAGGPNRRRGSLISVTSRGSVPQVFQDVGSMKEEDLSHAKVTANSELKVLASYSIPLIFTFLLEQMFPVVCSLTVGHLGRTELAAVSLASMTTNITYAIFEGIATSLDTLCPLAYGSGNYYSVGVHMQRCIMFSFTVFIPFGFIWWWSETLLTLVMPHEPELIHMTAKFLRVSILGAPAYIIFESLKRFLQAQGIFDAGIYVLMICAPWNMFVSYTLVWNERIGMGFIGAPIAVVLNFWTMVTLLSLYAIYVDGYKCWGGFNSKSLKHWKALSELAVPGIVMLEAEDLSYEILTLFSSYFGTPYLAAQSAVSTTAALLYMIPFSVGISSSTRIGNFIGCRRPNCAKLSAELGIGSSLFVGLLNCLIINVDKRSIANIYTKDEEVIQLMCQLLPLVGIVEIFDSLNAISGSCLRGLGLQYIGSIVNLVVYHLVAIPLGIFLAWYMDMKLNGLWIGIGVGMLIIGLVQSYYVIFADWNDVMERAEKRRDHDRDADSDTDSLESVSSVEAYSDSESDSESSPLLLR

SEQ ID NO: 63721 - DNA, 1779 bp, Debaryomyces hansenii CBS767
  CDS (1)..(1779)
atgtccttcaatgaaaggacacatcagttcactcactcgaactcccaacggagagcttcggtggtctatggttcaataggtaagggtggcttattcactccttctgattttatcaggccacatggtgacaatgctggtattagttttgatgacgaccaaggggttgcaccacatacacccgatgaaagcagtcagttgttggatcgtcctgctgtacttagcagcagaaaaaatcgtcgtcagtcaagtgtgactcgagaaattgtagaacaagagaggctgtttttacgagacagcaatattaaagtaccttcaaaaggaagtgaagatgatgttatagatacatttgaggaagcgattatatcgaaaaagttatctactactacagcatctattgaattaaagtcgttggttatttcatctattccattgattgtgacgtttcttttgcaaaattcgctttcgacagtatccgtttttactgttggacatttgggtgccgtggaattagctgctgtttcaatgggttcgatgactgcaaacattactggttatgccactattcaaggtattgcaactgctttggatacattatgtcctcaagcctttggagcaaagaagtacctgcttgttggggtctacttgcaaaagtgtacagcattaatctttactgttatggcacctgtattagtcatttggttattttttggatatgggttgatcacccttattttaccggataaggagactgccaaatatgctgcagtctatttgcaatatatagctcccggtattccagcgtatattctatttgaatgcggtaaaagatttttacaagctcaaggtatttatcacatttcaacagtggttttgttatttgcagccccatcgaatttgcttatgaattggttgttcgtcaaacatttagggtatattggtgctccaattgcagtggccattaactattggttgatggcaattggcttatttgttgctgttgtctattttgttaaaccagaaagtacccctactggtttgcatccgttggtttgttggagtggacttaatattagagactcttttagagcttgggataagctaatttatttagcaatacctggtttgatcatgttagaagcagagtttcttgcttttgaaatattgacattattggcatcctacttgggtaccgttgccttagcggcacagtcaattggtacaactatggcatcacttacgtatcaagttccttttgcgattggtattgcctcatccactcgtattgctaactttttgggcgcaggattgagttcacctgccaaaacagctacacgggtctctttatgttttggtcttgtcatatctacgttcaattttttggtgttattctgcttccaaactcagattgccgaattatttactaatgacaagaaggtgataaagactgtcgaaggagttatgtggttaattgcattaatgcagatttctgatgcaatgaatgccaattcagcaggttgtttgaggggtcagggtcaaacaaaaattggtggtatcgtcaacctagtatcctactatgtagtaggtttgccgctatctatctacttgacattttactcgaattttgggggaactttgcatggcctttggattggaagcactgtagcactaaccataattggtgttgtccaaagttattattcattgtttgctgattttgataagctttgcgcagaagccagggaaagaacttcagatgaaggcccaggtttcgccgtatag

SEQ ID NO: 63722 - protein, 592 aa, Debaryomyces hansenii CBS767
MSFNERTHQFTHSNSQRRASVVYGSIGKGGLFTPSDFIRPHGDNAGISFDDDQGVAPHTPDESSQLLDRPAVLSSRKNRRQSSVTREIVEQERLFLRDSNIKVPSKGSEDDVIDTFEEAIISKKLSTTTASIELKSLVISSIPLIVTFLLQNSLSTVSVFTVGHLGAVELAAVSMGSMTANITGYATIQGIATALDTLCPQAFGAKKYLLVGVYLQKCTALIFTVMAPVLVIWLFFGYGLITLILPDKETAKYAAVYLQYIAPGIPAYILFECGKRFLQAQGIYHISTVVLLFAAPSNLLMNWLFVKHLGYIGAPIAVAINYWLMAIGLFVAVVYFVKPESTPTGLHPLVCWSGLNIRDSFRAWDKLIYLAIPGLIMLEAEFLAFEILTLLASYLGTVALAAQSIGTTMASLTYQVPFAIGIASSTRIANFLGAGLSSPAKTATRVSLCFGLVISTFNFLVLFCFQTQIAELFTNDKKVIKTVEGVMWLIALMQISDAMNANSAGCLRGQGQTKIGGIVNLVSYYVVGLPLSIYLTFYSNFGGTLHGLWIGSTVALTIIGVVQSYYSLFADFDKLCAEARERTSDEGPGFAV

SEQ ID NO: 63723 - DNA, 1731 bp, Debaryomyces hansenii CBS767
  CDS (1)..(1731)
atgtcctacaggggagaatccaataatgaattttcaccattagcaaacagcggatttctgtatgatgcaacaagaaatgaggatttagatgaatctgaggtcatcacgtatattcagaagagaagagcttctattgcctcatgtggaactgataagatcccaagtagcttgattttaacccagggcggaacaaagcaccatttagagagaggtaatgaagagatgatgaccatgtctagatcgaatgcatcattcgttggcgatgtcctatctcacgcgagcggattattggctgaaccagaaacagatatcaaaacagaaattacggttttgtttgaatattcaattccattgattatcacatttttgttgcaatattcattaacagttgcatcggtattttcggttgggagactaggtctgaaggaattggcggctgttagcttatcttcaatgacggccaatatttcaggttacgctataatacagggagtttctacgtgtcttgatactctatgtgcacaggcatatggtagaaaagagtttaacgccgttggggtgcactttttcaagtgcaattatttattatttttgttgtgtattcccatgttcttactatgggtatttgggtcaaaaccaattcttttgataattattggtaatgagaaggaggagttgtgtacatttgcctctcaataccttcgagttctaagtttagggttgccggcattcatcctctttgaaaatggcaagcactttttgcaagctcaaggtatatctcatgcatcaacttatgtattggctatatgtgcaccattgaatgcatatcttaattatttgttggtatggaacaaatctattggtatgggttttgtaggagctcctatatctgtatcaataacaaactggttgatgtgtattttactttactcctatatttggttagttaagggtaaagaatgctggcctaacacaggtttgctttcgcccgtgttgtttcgaaattggagtagaatgataaacctttcgatacctggagtattgatggtagaggcagagtggttagcatttgaaatcattacgtttactgcatctaagtttggcactgacgttttagctgctcaatcaattgtctctaccacctgtgtcctactttatcagatacctttcgcaatatcaattgctatttcaactagagttgcctggtacattggtgccgccgcgaagaaacccgccaagtgtgcaacaacagttgcaatctacgtttcattactactagggtttattaatggatcttttttgttctggtttagagatgtattggcttccctctacaccaccgattcccatgtcattaaacttacctcaaaggtattaataattgcttcgatataccaaattaacgacttcttatcgtgctcgacaggggggattttaagaggtcaaggcagacaaaaaataggcggaatattaaatctaatatcctactactgcattgcgttaccttgcgcctttacatttgcattctactttaaattggaattggtaggtttatggctaggtatgattattgctctctttttcgtttctaccctacaatactactttgtattagctagtgactgggattatattatcagtgaatgcatcagtgagagtgtattcgacgatggcttcaatacagatgtacattccatggttcctagtatgagcagttcgcgttttgcttaa

SEQ ID NO: 63724 - protein, 576 aa, Debaryomyces hansenii CBS767
MSYRGESNNEFSPLANSGFLYDATRNEDLDESEVITYIQKRRASIASCGTDKIPSSLILTQGGTKHHLERGNEEMMTMSRSNASFVGDVLSHASGLLAEPETDIKTEITVLFEYSIPLIITFLLQYSLTVASVFSVGRLGLKELAAVSLSSMTANISGYAIIQGVSTCLDTLCAQAYGRKEFNAVGVHFFKCNYLLFLLCIPMFLLWVFGSKPILLIIIGNEKEELCTFASQYLRVLSLGLPAFILFENGKHFLQAQGISHASTYVLAICAPLNAYLNYLLVWNKSIGMGFVGAPISVSITNWLMCILLYSYIWLVKGKECWPNTGLLSPVLFRNWSRMINLSIPGVLMVEAEWLAFEIITFTASKFGTDVLAAQSIVSTTCVLLYQIPFAISIAISTRVAWYIGAAAKKPAKCATTVAIYVSLLLGFINGSFLFWFRDVLASLYTTDSHVIKLTSKVLIIASIYQINDFLSCSTGGILRGQGRQKIGGILNLISYYCIALPCAFTFAFYFKLELVGLWLGMIIALFFVSTLQYYFVLASDWDYIISECISESVFDDGFNTDVHSMVPSMSSSRFA

SEQ ID NO: 63725 - DNA, 1851 bp, Debaryomyces hansenii CBS767
  CDS (1)..(1851)
atggtgttgttccgaacaataaataggtttgctaatcctaatggtggtctcggcttaccagtaggaggaagaagaagaagattgtttataccaccgtcaaccaaccaaccactatttagttatggtggaggtgaggaccaaaggtcattcctatcattaggggagagtggttccgttcttacacatactgagaacgaaattagtgatactgccagtgtgagtacatcgagatcattaccatctacactaaagtctacaaatgaagaccaagaatcattccatagttggttgttagaagagcaccaaagaaggtattccgccgcgaactcggaggatgatgagaatgatgaagatggttggagtagaggcagtggaaggtctcgtagcctgttaaattcgtcctcccgtaactcacattcaaccggaaaatcgtcgtacaatgaactagaagattttgcgaacttgcagactacatttgctattgagatgaagatgttaatacgatacgcatttccattgattattaccttccttttagagcattttttctcgatagtctgtttactagttgttggtcatataggtaagaatgaattagccgcagtatctttagccactatgtcttctactattacatttgctatttttgaaggtattgctacagccttagatacattatgtcctcaggcatatggtgctggtaattatgaattagtgggtattcatgttcaaagatgtataatgttctcattggtggtgtacataccgtgtggactcttgtggtggtattcagcaagcgtcttgaagtttattattgacagcgaagaggttttacgtttgacaagttcattcttaagaattttaatacttggggcaccagcctatatcatatttgagaatagtaagcgattcttacaagctcaaggaatttttgaagcaggaacaggaatcttagttataagtcttccaattaatgtcctattatcgacattcctcgtatggaataaaaactttggcttagggtttatcggtgcaccaattgcaactgttatcaacttttggtttattgattttttactaataatgtacgtcatgtttgttgacggtgataaatgctggtatggaatcgcaccgatgaaagaaatatttcaacaatggggtagtctctcacacttggcaattccaggcattgtcatgatcgaatcggagtatatggcatacgaaatcatgacattatttgcatcctatttcggtactactgaattagcagctcagagtgcggtactgagtatcgcatctttatcttatatggtcccatttgctataagcattgctgcttctacgcgtatcgcaaattttataggtgggcaaaacatggcgtctgccaaaatggcaactaaagctagtttaactttatctgtaatcgcaggaaatattaacttcctcattttatttactttcaaaagacaaattgccaagttatttacaaaagatgaaggtgttactgaattaattgttgccttatttaatccattggtcgctgtactagaaatctttgatgggattgcatctgttgcaaatggtgttttaagggcgcaaggtctgcaaaagataggtggaataattaatttctttgtttattatgcttttgccatacctttagctatcgtcctaagcagggttgcagatctaaagctacttggtttgtggcttggtcttggtagcgggatgattttaattggtctaagcgagaccttggtgatatttaatagtgattgggacaagatattgatgaatgctggtttaatgaatgaggcatatttagatgttgaagaatctatagaagactaa

SEQ ID NO: 63726 - protein, 616 aa, Debaryomyces hansenii CBS767
MVLFRTINRFANPNGGLGLPVGGRRRRLFIPPSTNQPLFSYGGGEDQRSFLSLGESGSVLTHTENEISDTASVSTSRSLPSTLKSTNEDQESFHSWLLEEHQRRYSAANSEDDENDEDGWSRGSGRSRSLLNSSSRNSHSTGKSSYNELEDFANLQTTFAIEMKMLIRYAFPLIITFLLEHFFSIVCLLVVGHIGKNELAAVSLATMSSTITFAIFEGIATALDTLCPQAYGAGNYELVGIHVQRCIMFSLVVYIPCGLLWWYSASVLKFIIDSEEVLRLTSSFLRILILGAPAYIIFENSKRFLQAQGIFEAGTGILVISLPINVLLSTFLVWNKNFGLGFIGAPIATVINFWFIDFLLIMYVMFVDGDKCWYGIAPMKEIFQQWGSLSHLAIPGIVMIESEYMAYEIMTLFASYFGTTELAAQSAVLSIASLSYMVPFAISIAASTRIANFIGGQNMASAKMATKASLTLSVIAGNINFLILFTFKRQIAKLFTKDEGVTELIVALFNPLVAVLEIFDGIASVANGVLRAQGLQKIGGIINFFVYYAFAIPLAIVLSRVADLKLLGLWLGLGSGMILIGLSETLVIFNSDWDKILMNAGLMNEAYLDVEESIED

SEQ ID NO: 63727 - DNA, 1803 bp, Yarrowia lipolytica CLIB122
  CDS (1)..(1803)
atggagaatcacaaaaacgacccggagtgtaacgccgccaaggctgcggcagcaaacatcttcccggcctcgcccatggccaactccatgatgttcggctcgtcctactctcagtcatacaataagtctttcatgaaacgacactcgggcgagtacaaccgccactcgggcgagtaccgccactcgggcgaatccaaccggttttcgggggacttccaaagagtcaacgaagatctggaatctgcatctgagaccacccacctcaaccccagacctgcccgaccatccatggccgtgtccagctcctctgagccatctaccaaccatgcatccaacaacaccattagagagcccagtgatacccctgtctacggcaccactgctgcttccatctccacaacctctctcgaccccgaagataatgtgtgggaggatgtccccagccaaaagagatcgcaggacgtgcgggaactcaaaattctctggcagtattctctccccctcgcagtcaccttcctcctgcagtactcccttaccgttgcatcgatcttctccgtgggacacctgggtaaggaagagctgggtgctgtgtcccttgcatgcatgacttctaacattacaggttttgccctctttcagggcctatcgacttgcctcgacactctgtgttgccaagcctacggagctggcaacatgcgaaaggtcggcatctacttccagcagtgcgtctgcatgagcattcttgttttcctacccattgccgccatttggatgtgctccgagcctctcctggccctcatcattccagagggccaattagcagccctggcggcactctatctccagattgtggccctcggtgtgcctggctacatcgtgtttgagtgtggaaagaagtacctgcaagcccagggtatcttcatggctggaacctatgtcctggcaatctgcgctcccctcaatgccttcctgaactggctgctggtctgggataagcatgtcggtattggctacgctggagctcctgtcgctgttgtcatcaccgagtgggccatggccatactcatcatcgcctacattgcctttgtggacggccgacagtgctggttcggcatttctccccgagccgccttctccaattggggccccatgctgcgactggccatccccggtgtcatcatggttgaggccgagtttttggctttcgaaatcctcactctcgcatcctcctactttggatctgcagccctggcagcacagtccgttctgtcgacagtcatggccctggcctaccagattcccttctcggttgccattgctgcttccacccgagtggcccatttcattggtgctgcacagccccagtcggccaagcgagctgctcgaattgccctctactccactgttctcatctccactttcaactgcactacccttttcctcttccgacggcccattgctggtctcttttcgtctgacgtggacgtggtaaatctggtggcctttgtgctgcctctgtgtgccatcggccagttttttgactgtatttcttcagtcgtggctggtgtcctgagaggacagggccgacagaagattggaggttatgtgaatctcttttactactacgccgtagccactcctctgtctctcttctttggctttatctgcaagtgggagctgatgggtctttgggctggtatcattgtgggtattgtgggaattgctgccaccgaggcctacttcgtgctcacctctgactggaatgccatcatcgagaagaacgccgccatgcatcgagactaa

SEQ ID NO: 63728 - protein, 600 aa, Yarrowia lipolytica CLIB122
MENHKNDPECNAAKAAAANIFPASPMANSMMFGSSYSQSYNKSFMKRHSGEYNRHSGEYRHSGESNRFSGDFQRVNEDLESASETTHLNPRPARPSMAVSSSSEPSTNHASNNTIREPSDTPVYGTTAASISTTSLDPEDNVWEDVPSQKRSQDVRELKILWQYSLPLAVTFLLQYSLTVASIFSVGHLGKEELGAVSLACMTSNITGFALFQGLSTCLDTLCCQAYGAGNMRKVGIYFQQCVCMSILVFLPIAAIWMCSEPLLALIIPEGQLAALAALYLQIVALGVPGYIVFECGKKYLQAQGIFMAGTYVLAICAPLNAFLNWLLVWDKHVGIGYAGAPVAVVITEWAMAILIIAYIAFVDGRQCWFGISPRAAFSNWGPMLRLAIPGVIMVEAEFLAFEILTLASSYFGSAALAAQSVLSTVMALAYQIPFSVAIAASTRVAHFIGAAQPQSAKRAARIALYSTVLISTFNCTTLFLFRRPIAGLFSSDVDVVNLVAFVLPLCAIGQFFDCISSVVAGVLRGQGRQKIGGYVNLFYYYAVATPLSLFFGFICKWELMGLWAGIIVGIVGIAATEAYFVLTSDWNAIIEKNAAMHRD

SEQ ID NO: 63729 - DNA, 1800 bp, Candida albicans SC5314
  CDS (1)..(1800): transl_table=12
atgtctgatgaaaatgaaataactccattactcccatttacatctcatcgatctcgaagatcaagtaaatgttccgaaatcgatgaaaatgaaattgtatcatacgttcaacaacgaagacaatcaatagcttcagttggtcatgataaaattccaaaatcatttgctttaccagttacaactgctgcaactggtgtgacctctggtggtgttggtgttgtcactggtggtggtaccagtggtgtcgcgtcgccacgtttagctcggtcaatttctcgaagttcattaatttcagggaaatcttattctattaatgatattattgaaattcatcaacaagaaattgatcctgaaccgaaaacaacgattctcaatgaaattaaagtcattatcaaatattcattacctttaattgtcacttttctattacaatattcattaactgtagcatctgtattttctgttgggagattaggttcaaccgaattagctgcagttagtttgagttccatgacagctaatattagtggatatgctatgattcaaggtgtttctacttgtttggatactttatgtgctcaagcttttggaagaaaagattataattccgttggagttcatttcataaggtgcaattatttattattattactttatatccccatggcgatattttgggttttcggagctgaaccattgttagtcacaattattggtcaagattccattgccatgtgtcaattggctggaaaatatcttcgaatattgacgataggattacctgggtttatattatttgagaatgctaaacattttttacaaactcaaggaattttccatgcatcaactttagtattgattatatgtgctccattgaatgcatttcttaattatttattagtatggaataaatcaattggattaggttttattggtgctcctatatcagtagtaattactaattggatcatgtgtttcatgttatatggctacattttttgtattgatggttatcaatgttggcctcaacgtgaatatcgcaaactttatcataagatttttttcaaacattggaataaaatgattaaactttctgttcctggagtacttatggtagaagcagaatggttagcatttgaaatcataactttccaagctgctaaatttggtaccgaagtattagctgctcaatcaattataaataccacttgtgtcatattttatcaaatcccctttgccttgtcaatagctgctggaaccagaattgcctggtacattggtgctgcttcagaaacagcagccaaaaaatccacttatgcagtattatacgctgctacatttattggtttgttcaattgtgggttcatgttaactttccgtcatagtttagcatcattatatactgaagataatgctgttattgaattggctgctaaagtattaattgtgggatcaatttatcaaattaatgattgtttatcatgtgccacggcaggtgtattacgaggccaaggacgacaaatgattggaggaattgttaatttaattggttattatttaattgcattaccatttgcttatactttggcatttattttccaatttggattattaggtttatggtttggaatgattattgccttgattttcgtttcatttacacaaactttttttgtcatttctagtaattggcaaaaaatcattgatgattgtattgaagaagcaatcatagaagatgggaatttaaatattgatgctcattcaatattacctagtatgagtaattcaattgttgtgtaa

SEQ ID NO: 63730 - protein, 599 aa, Candida albicans SC5314
MSDENEITPLLPFTSHRSRRSSKCSEIDENEIVSYVQQRRQSIASVGHDKIPKSFALPVTTAATGVTSGGVGVVTGGGTSGVASPRLARSISRSSLISGKSYSINDIIEIHQQEIDPEPKTTILNEIKVIIKYSLPLIVTFLLQYSLTVASVFSVGRLGSTELAAVSLSSMTANISGYAMIQGVSTCLDTLCAQAFGRKDYNSVGVHFIRCNYLLLLLYIPMAIFWVFGAEPLLVTIIGQDSIAMCQLAGKYLRILTIGLPGFILFENAKHFLQTQGIFHASTLVLIICAPLNAFLNYLLVWNKSIGLGFIGAPISVVITNWIMCFMLYGYIFCIDGYQCWPQREYRKLYHKIFFKHWNKMIKLSVPGVLMVEAEWLAFEIITFQAAKFGTEVLAAQSIINTTCVIFYQIPFALSIAAGTRIAWYIGAASETAAKKSTYAVLYAATFIGLFNCGFMLTFRHSLASLYTEDNAVIELAAKVLIVGSIYQINDCLSCATAGVLRGQGRQMIGGIVNLIGYYLIALPFAYTLAFIFQFGLLGLWFGMIIALIFVSFTQTFFVISSNWQKIIDDCIEEAIIEDGNLNIDAHSILPSMSNSIVV

SEQ ID NO: 63731 - DNA, 1833 bp, Candida albicans SC5314
  CDS (1)..(1833): transl_table=12
atggttttatttccaacaataaacagacttgccaatcctaataatgcaggcgggctcaccggtagtagaagacgaaggttatttgtcccaccatcgacacagtacccacttttcatatacggcgatggcgatgaccaacgttcatttttgtcaaacatagaagttggatcacaaatatatagcccagaagacgaccatagtgatgttgcaagcgttagcacttcgcgatctttgccatcgactttgagttcagtgcagaccgctgatgaccaagaatcattccacgactggttgcatgaagagcatcaacggaggatatccgcagcatcctcaccagcaggaagtagtgatgaagacgatttagagttggggaggaggcgatctggcaccatgccaactgtcattagtccccaggaagactttcttaatttaaaaaccgattataatctagagtcaaaaagtttattcaaaaattcgttgccattaatattaacatttatcttggaacatatattttcgattgtatgtttggtggttgtaggaaaattgggtacaaaacaattaggggccgtgtcgttggcaactatgacttcaacaattacgtttgctatctttgaaggaacggcaactgcgttagatacgttgtgtccacaagcttacggtgcaggcaactatgagttgatgagtatttttgtacagagatgtaatattttttccatgattttgtttttgccatgtgctttattttggtggttttctggactgatcctaaaatatgtcattgacgatcctgaagtggtccatttaactcaggaatttttaaggtgcttgatattgggggcaccaggctatattctttttgaaaactcaaagagatttttgcaggctcagggtatatttgaagctggcacgggtatactattcgtcagtgctccaatcaatattggactttcgtggtttcttgtatggaatgagacatatgggattggctatattggtgcacccattgccacagggattaatttctggttaatgatgatattgttagttctttatgtcagatacattgatggaggaaagtgttggtttggattagcgtctatggaagagcttttcagtaactggaatcaaatcattcatttggccatacctggtattgttatgatggaatctgaatacatggcatatgaaataatgaccttgtttgcatcgtactttgggaccgttcaattagcagctcagagtgccgtttccagtattgcatcacttacatatatggtaccattttctgtgggaattgctgctaccaccaggattgctaattttattggtgggcagaatatggttggagctatcttagccactagagtagccatggtggcggcagtgattgtttccaccataaactgtttagcattgttttcgttccgatacgagattgctcggattttctcagatgatcctgaagtgatttcactcattgtcgatttattgaaccctttggtgagtgttttacaaattttcgatggtattgcctcggtcaatagtggtatattgagagctcaaggttcacaaaagataggtggctatataaattttattgcatattacgcatttgcattgccattggctatggttttgagtaaaattgttggcctacaagtctttggtttatggattggtgttggcagtggaatggctgtgattgccttgagtgaaactgccgttattatgtttagtaattgggatgacatattaatgaaggcaggtataatgaatgagtttggttttgatgatagtgatgacgatggtgaagatgatgatatattttag

SEQ ID NO: 63732 - protein, 610 aa, Candida albicans SC5314
MVLFPTINRLANPNNAGGLTGSRRRRLFVPPSTQYPLFIYGDGDDQRSFLSNIEVGSQIYSPEDDHSDVASVSTSRSLPSTLSSVQTADDQESFHDWLHEEHQRRISAASSPAGSSDEDDLELGRRRSGTMPTVISPQEDFLNLKTDYNLESKSLFKNSLPLILTFILEHIFSIVCLVVVGKLGTKQLGAVSLATMTSTITFAIFEGTATALDTLCPQAYGAGNYELMSIFVQRCNIFSMILFLPCALFWWFSGSILKYVIDDPEVVHLTQEFLRCLILGAPGYILFENSKRFLQAQGIFEAGTGILFVSAPINIGLSWFLVWNETYGIGYIGAPIATGINFWLMMILLVLYVRYIDGGKCWFGLASMEELFSNWNQIIHLAIPGIVMMESEYMAYEIMTLFASYFGTVQLAAQSAVSSIASLTYMVPFSVGIAATTRIANFIGGQNMVGAILATRVAMVAAVIVSTINCLALFSFRYEIARIFSDDPEVISLIVDLLNPLVSVLQIFDGIASVNSGILRAQGSQKIGGYINFIAYYAFALPLAMVLSKIVGLQVFGLWIGVGSGMAVIALSETAVIMFSNWDDILMKAGIMNEFGFDDSDDDGEDDDIF

SEQ ID NO: 63733 - DNA, 1866 bp, Aspergillus oryzae
  CDS (1)..(1866)
atgggccgcagtaatagtctgcgctcagcagaggaacaagccttacatggccgcttcttgtccagttccccgctcgctgaggctgcaattgctcgagatctagagaattatgcggacgacgagggctcaatgattactactgacgacgaggcttccgagacatccactattcgcgcgataaacagtcagcccggcacgaacccccattctctatctggatcttaccgtcgtcctagcttcttcactacagtctcccacgctacagttgtaccatatactgcagaacgagagaggctgacacgcagggaacgcgaacgcgccattgaggatgagcgggatcttctcagcgataataatgttatggacgcgagggcgaggcggcgagtgactccaactagtgcaccctcaggagaaactacggcactcctaggaagtcacgtaggtggtcgcgaatacaatgccacggatgatgaagaaattgacaggaagtgggaagaggctgtcgcagctgggctaattcacacaacatggagacgggaagcacaggtgattggtaaaaacgctgctccgttgatggtcactttcctgctccaatattcgttgacagtagccagcattttcaccctgggccatctgggaaagaaagagcttggtgcagtgagtttagctagcatgactgtgaacattaccggatacgcagtataccaaggtttagcaaccagtttagacactctatgtgcacaggcatatggttctgggaggaagaagttggtaggcctgcaaatgcaaaagatggtgtttttcctttgcaccatcactatcccgattgctgtactgtggttctttgcagacaagattcttatgaagatcgtcccggagaaagatgtcgccgcgcttgctggcttatacttgaaggttgtcatccttggggcaccgggatatgcttgcttcgagagtgggaagcgttatgtacaagctcaaggactcttttcggcctcgctatatgtcttactcatatgcgcacctcttaacgcctttatgaactggctatttgtttggaaattccaatgggggtttgttggcgcccctatcgcagtagctattacagacaatctgatgccgctattcttgttcctttatgtgtatttcattgacggagcggaatgttggagtggatttactaccaaggccttgcgcaactggggtccaatgatccggcttgccttacctggtctggtgatggtagaagctgagtgcctcgcttttgaagtactaaccttagcatcgtcgtatctcggcacaacccccttagctgcccagtcagttctctccaccatcgccagtattatgttccaagttcctttccccctttcaatttccggcagtacccgtgttgcaaacctcatcggagcaactcttgttggtcccgctaagatctccgccaaagtgacaatgggatatgctgtcatcgtagggatgctcaacatgctgttgctctcctcgctgcgctcatacatcccacgactatttacaccagaagaagaagtgattgagctcgtagcacaggtccttccattgtgtgcagcgttccagttgtttgacgccctcgcagccaattgcaacggtatcctccgtggaatcggcagacaagaaataggcggttacgtccagctcttttgctactatgcagttgcaatgcccattagcttcggtactacatttggactgggctgggacttactaggactctggtccggtgttgctcttgcccttttcttggtatcagtgatcgaggtggtcttcttaatacgaaccgactgggaccgctcagtccaagatgctcttcagagaaacgcaatggcatag

SEQ ID NO: 63734 - protein, 621 aa, Aspergillus oryzae
MGRSNSLRSAEEQALHGRFLSSSPLAEAAIARDLENYADDEGSMITTDDEASETSTIRAINSQPGTNPHSLSGSYRRPSFFTTVSHATVVPYTAERERLTRRERERAIEDERDLLSDNNVMDARARRRVTPTSAPSGETTALLGSHVGGREYNATDDEEIDRKWEEAVAAGLIHTTWRREAQVIGKNAAPLMVTFLLQYSLTVASIFTLGHLGKKELGAVSLASMTVNITGYAVYQGLATSLDTLCAQAYGSGRKKLVGLQMQKMVFFLCTITIPIAVLWFFADKILMKIVPEKDVAALAGLYLKVVILGAPGYACFESGKRYVQAQGLFSASLYVLLICAPLNAFMNWLFVWKFQWGFVGAPIAVAITDNLMPLFLFLYVYFIDGAECWSGFTTKALRNWGPMIRLALPGLVMVEAECLAFEVLTLASSYLGTTPLAAQSVLSTIASIMFQVPFPLSISGSTRVANLIGATLVGPAKISAKVTMGYAVIVGMLNMLLLSSLRSYIPRLFTPEEEVIELVAQVLPLCAAFQLFDALAANCNGILRGIGRQEIGGYVQLFCYYAVAMPISFGTTFGLGWDLLGLWSGVALALFLVSVIEVVFLIRTDWDRSVQDALQRNAMA

SEQ ID NO: 63735 - DNA, 25 bp, Artificial sequence
  primer
atggctggaattttgtcaaagactc

SEQ ID NO: 63736 - DNA, 23 bp, Artificial sequence
  primer
ttaagcccctaagagggctgtgt

SEQ ID NO: 63737 - protein, 452 aa, Artificial sequence
  consensus sequence
  Variant (2)..(4): Xaa in position 2 to 4 is any amino acid
  Variant (6)..(10): Xaa in position 6 to 10 is any amino acid
  Variant (14)..(14): Xaa in position 14 is any amino acid
  Variant (19)..(29): Xaa in position 19 to 29 is any amino acid
  Variant (32)..(32): Xaa in position 32 is any amino acid
  Variant (35)..(36): Xaa in position 35 to 36 is any amino acid
  Variant (39)..(39): Xaa in position 39 is any amino acid
  Variant (44)..(45): Xaa in position 44 to 45 is any amino acid
  Variant (48)..(49): Xaa in position 48 to 49 is any amino acid
  Variant (52)..(52): Xaa in position 52 is any amino acid
  Variant (53)..(53): Xaa in position 53 is any or no amino acid
  Variant (55)..(57): Xaa in position 55 to 57 is any amino acid
  Variant (59)..(60): Xaa in position 59 to 60 is any amino acid
  Variant (62)..(62): Xaa in position 62 is any amino acid
  Variant (68)..(68): Xaa in position 68 is any amino acid
  Variant (73)..(78): Xaa in position 73 to 78 is any amino acid
  Variant (81)..(83): Xaa in position 81 to 83 is any amino acid
  Variant (85)..(85): Xaa in position 85 is any amino acid
  Variant (87)..(95): Xaa in position 87 to 95 is any amino acid
  Variant (97)..(100): Xaa in position 97 to 100 is any amino acid
  Variant (102)..(124): Xaa in position 102 to 124 is any amino acid
  Variant (125)..(127): Xaa in position 125 to 127 is any or no amino acid
  Variant (129)..(133): Xaa in position 129 to 133 is any amino acid
  Variant (135)..(135): Xaa in position 135 is any amino acid
  Variant (137)..(138): Xaa in position 137 to 138 is any amino acid
  Variant (140)..(140): Xaa in position 140 is any amino acid
  Variant (143)..(144): Xaa in position 143 to 144 is any amino acid
  Variant (146)..(146): Xaa in position 146 is any amino acid
  Variant (155)..(155): Xaa in position 155 is any amino acid
  Variant (157)..(160): Xaa in position 157 to 160 is any amino acid
  Variant (162)..(164): Xaa in position 162 to 164 is any amino acid
  Variant (167)..(167): Xaa in position 167 is any amino acid
  Variant (169)..(175): Xaa in position 169 to 175 is any amino acid
  Variant (178)..(179): Xaa in position 178 to 179 is any amino acid
  Variant (180)..(183): Xaa in position 180 to 183 is any or no amino acid
  Variant (185)..(186): Xaa in position 185 to 186 is any amino acid
  Variant (189)..(189): Xaa in position 189 is any amino acid
  Variant (192)..(196): Xaa in position 192 to 196 is any amino acid
  Variant (198)..(198): Xaa in position 198 is any amino acid
  Variant (200)..(202): Xaa in position 200 to 202 is any amino acid
  Variant (204)..(205): Xaa in position 204 to 205 is any amino acid
  Variant (207)..(211): Xaa in position 207 to 211 is any amino acid
  Variant (213)..(214): Xaa in position 213 to 214 is any amino acid
  Variant (215)..(224): Xaa in position 215 to 224 is any or no amino acid
  Variant (227)..(227): Xaa in position 227 is any amino acid
  Variant (229)..(233): Xaa in position 229 to 233 is any amino acid
  Variant (234)..(239): Xaa in position 234 to 239 is any or no amino acid
  Variant (241)..(242): Xaa in position 241 to 242 is any amino acid
  Variant (244)..(248): Xaa in position 244 to 248 is any amino acid
  Variant (251)..(251): Xaa in position 251 is any amino acid
  Variant (254)..(255): Xaa in position 254 to 255 is any amino acid
  Variant (257)..(257): Xaa in position 257 is any amino acid
  Variant (261)..(264): Xaa in position 261 to 264 is any amino acid
  Variant (267)..(267): Xaa in position 267 is any amino acid
  Variant (269)..(274): Xaa in position 269 to 274 is any amino acid
  Variant (277)..(278): Xaa in position 277 to 278 is any amino acid
  Variant (284)..(286): Xaa in position 284 to 286 is any amino acid
  Variant (288)..(292): Xaa in position 288 to 292 is any amino acid
  Variant (294)..(295): Xaa in position 294 to 295 is any amino acid
  Variant (298)..(300): Xaa in position 298 to 300 is any amino acid
  Variant (302)..(303): Xaa in position 302 to 303 is any amino acid
  Variant (307)..(307): Xaa in position 307 is any amino acid
  Variant (309)..(310): Xaa in position 309 to 310 is any amino acid
  Variant (313)..(318): Xaa in position 313 to 318 is any amino acid
  Variant (320)..(336): Xaa in position 320 to 336 is any amino acid
  Variant (338)..(348): Xaa in position 338 to 348 is any amino acid
  Variant (350)..(354): Xaa in position 350 to 354 is any amino acid
  Variant (356)..(356): Xaa in position 356 is any amino acid
  Variant (357)..(357): Xaa in position 357 is any or no amino acid
  Variant (359)..(360): Xaa in position 359 to 360 is any amino acid
  Variant (362)..(372): Xaa in position 362 to 372 is any amino acid
  Variant (373)..(373): Xaa in position 373 is any or no amino acid
  Variant (375)..(376): Xaa in position 375 to 376 is any amino acid
  Variant (378)..(386): Xaa in position 378 to 386 is any amino acid
  Variant (390)..(390): Xaa in position 390 is any amino acid
  Variant (392)..(392): Xaa in position 392 is any amino acid
  Variant (394)..(394): Xaa in position 394 is any amino acid
  Variant (397)..(399): Xaa in position 397 to 399 is any amino acid
  Variant (402)..(403): Xaa in position 402 to 403 is any amino acid
  Variant (406)..(409): Xaa in position 406 to 409 is any amino acid
  Variant (411)..(422): Xaa in position 411 to 422 is any amino acid
  Variant (423)..(424): Xaa in position 423 to 424 is any or no amino acid
  Variant (426)..(426): Xaa in position 426 is any amino acid
  Variant (430)..(430): Xaa in position 430 is any amino acid
  Variant (432)..(451): Xaa in position 432 to 451 is any amino acid
EXXXLXXXXXPLIXTFLLXXXXXXXXXXXVGXLGXXELXAVSLXXMTXXITXXAXXXGXXTXLDTLCXQAYGXXXXXXVGXXXQXCXXXXXXXXXPXXXXWXXXXXXXXXXXXXXXXXXXXXXXXXXLXXXXXGXPXXIXFEXXKXFLQAQGIFXAXXXXLXXXAPXNXXXXXXXVWXXXXXXGXXGAXIAXXXXXWXMXXXLXXYXXXXXGXXXXXXXXXXXXCWXGXXXXXXXXXXXFXXWXXXXXLAXPGXXMXEAEXXXXEIXTXXXXXXGTXXLAAQSXXXTXXXXXYXXPFXXXIXXSTRXAXXIGXXXXXXAXXXXXXXXXXXXXXXXXNXXXXXXXXXXXAXXXXXDXXVXXLXXXXXXXXXXXXQXXDXXXXXXXXXLRGXGXQXIGXXXNLXXYYXXXXPXXXXXXXXXXXXXXLXGLWXGXXXXXXXXXXXXXXXXXXXXW

SEQ ID NO: 63738 - protein, 51 aa, Artificial sequence
  protein pattern
  Variant (2)..(2): Xaa in position 2 is any amino acid
  Variant (3)..(4): Xaa in position 3 to 4 is any or no amino acid
  Variant (6)..(6): Xaa in position 6 is any amino acid
  Variant (7)..(8): Xaa in position 7 to 8 is any or no amino acid
  Variant (10)..(10): Xaa in position 10 is Ala, Ile, Leu or Val
  Variant (12)..(12): Xaa in position 12 is Ala or Gly
  Variant (13)..(13): Xaa in position 13 is Phe or Tyr
  Variant (14)..(14): Xaa in position 14 is Ala or Ile
  Variant (15)..(15): Xaa in position 15 is any amino acid
  Variant (18)..(18): Xaa in position 18 is Cys, Asn or Ser
  Variant (19)..(19): Xaa in position 19 is any amino acid
  Variant (21)..(21): Xaa in position 21 is His, Lys or Arg
  Variant (22)..(22): Xaa in position 22 is Phe or Tyr
  Variant (23)..(23): Xaa in position 23 is Leu or Val
  Variant (25)..(25): Xaa in position 25 is Ala or Thr
  Variant (28)..(28): Xaa in position 28 is Ile or Leu
  Variant (29)..(29): Xaa in position 29 is Phe or Tyr
  Variant (30)..(30): Xaa in position 30 is any amino acid
  Variant (31)..(31): Xaa in position 31 is Ala or Ile
  Variant (32)..(32): Xaa in position 32 is Gly or Ser
  Variant (33)..(34): Xaa in position 33 to 34 is any amino acid
  Variant (35)..(35): Xaa in position 35 is Ile or Val
  Variant (37)..(37): Xaa in position 37 is any amino acid
  Variant (38)..(38): Xaa in position 38 is Phe, Ile or Val
  Variant (39)..(39): Xaa in position 39 is Ala, Cys or Ser
  Variant (40)..(40): Xaa in position 40 is Ala or Leu
  Variant (42)..(42): Xaa in position 42 is any amino acid
  Variant (44)..(45): Xaa in position 44 to 45 is any amino acid
  Variant (46)..(46): Xaa in position 46 is Leu, Met or Val
  Variant (47)..(47): Xaa in position 47 is Asn or Ser
  Variant (48)..(49): Xaa in position 48 to 49 is any amino acid
  Variant (50)..(50): Xaa in position 50 is Phe or Leu
LXXXIXXXGXPXXXXFEXXKXXXQXQGXXXXXXXXLXXXXPXNXXXXXXXV

SEQ ID NO: 63739 - protein, 40 aa, Artificial sequence
  protein pattern
  Variant (3)..(3): Xaa in position 3 is Phe, Ile, Leu or Val
  Variant (6)..(6): Xaa in position 6 is Ile or Leu
  Variant (8)..(10): Xaa in position 8 to 10 is any amino acid
  Variant (11)..(11): Xaa in position 11 is Phe, Leu or Val
  Variant (12)..(12): Xaa in position 12 is Pro, Ser or Thr
  Variant (13)..(13): Xaa in position 13 is any amino acid
  Variant (14)..(14): Xaa in position 14 is Ala or Val
  Variant (15)..(15): Xaa in position 15 is Cys or Ser
  Variant (16)..(16): Xaa in position 16 is any amino acid
  Variant (17)..(17): Xaa in position 17 is Phe, Leu or Val
  Variant (18)..(18): Xaa in position 18 is Ser, Thr or Val
  Variant (21)..(21): Xaa in position 21 is His, Lys or Arg
  Variant (22)..(22): Xaa in position 22 is Ile or Leu
  Variant (24)..(25): Xaa in position 24 to 25 is any amino acid
  Variant (26)..(26): Xaa in position 26 is Glu or Gln
  Variant (28)..(28): Xaa in position 28 is Ala or Gly
  Variant (31)..(31): Xaa in position 31 is Asn or Ser
  Variant (32)..(32): Xaa in position 32 is Leu or Met
  Variant (33)..(33): Xaa in position 33 is Ala, Gly or Ser
  Variant (34)..(34): Xaa in position 34 is Ser or Thr
  Variant (36)..(36): Xaa in position 36 is Ser or Thr
  Variant (37)..(37): Xaa in position 37 is Ala, Ser or Thr
  Variant (38)..(38): Xaa in position 38 is Asn, Ser or Thr
  Variant (40)..(40): Xaa in position 40 is Ser or Thr
LIXTFXLXXXXXXXXXXXVGXXGXXXLXAVXXXXMXXXIX

SEQ ID NO: 63740 - protein, 30 aa, Artificial sequence
  protein pattern
  Variant (2)..(3): Xaa in position 2 to 3 is any amino acid
  Variant (4)..(4): Xaa in position 4 is Glu or Gln
  Variant (6)..(8): Xaa in position 6 to 8 is any amino acid
  Variant (9)..(9): Xaa in position 9 is any or no amino acid
  Variant (15)..(15): Xaa in position 15 is Ala, Cys or Pro
  Variant (18)..(18): Xaa in position 18 is Phe or Tyr
  Variant (20)..(25): Xaa in position 20 to 25 is any amino acid
  Variant (26)..(26): Xaa in position 26 is Met or Val
  Variant (27)..(27): Xaa in position 27 is Gly or Ser
  Variant (28)..(28): Xaa in position 28 is Ile, Leu or Val
  Variant (29)..(29): Xaa in position 29 is any amino acid
  Variant (30)..(30): Xaa in position 30 is Phe, Leu, Met or Val
AXXXGXXXXLDTLCXQAXGXXXXXXXXXXX

SEQ ID NO: 63741 - protein, 40 aa, Artificial sequence
  protein pattern
  Variant (2)..(3): Xaa in position 2 to 3 is any amino acid
  Variant (5)..(5): Xaa in position 5 is any amino acid
  Variant (6)..(6): Xaa in position 6 is Ile, Leu or Met
  Variant (7)..(7): Xaa in position 7 is Ala, Asn or Ser
  Variant (8)..(8): Xaa in position 8 is Ala, Cys or Ser
  Variant (9)..(9): Xaa in position 9 is Ala, Asn, Ser or Val
  Variant (10)..(10): Xaa in position 10 is Ala, Cys, Asn, Ser, Thr or Val
  Variant (11)..(11): Xaa in position 11 is any amino acid
  Variant (12)..(12): Xaa in position 12 is Gly or Ser
  Variant (13)..(13): Xaa in position 13 is any amino acid
  Variant (16)..(16): Xaa in position 16 is Ala or Gly
  Variant (17)..(17): Xaa in position 17 is any amino acid
  Variant (19)..(19): Xaa in position 19 is any or no amino acid
  Variant (21)..(22): Xaa in position 21 to 22 is any amino acid
  Variant (23)..(23): Xaa in position 23 is any or no amino acid
  Variant (25)..(25): Xaa in position 25 is Gly or Ser
  Variant (26)..(26): Xaa in position 26 is any amino acid
  Variant (27)..(27): Xaa in position 27 is Ala, Ile, Leu or Val
  Variant (28)..(28): Xaa in position 28 is Asn or Gln
  Variant (29)..(29): Xaa in position 29 is Phe or Leu
  Variant (30)..(30): Xaa in position 30 is Phe, Ile, Leu, Met or Val
  Variant (31)..(31): Xaa in position 31 is any amino acid
  Variant (34)..(34): Xaa in position 34 is any amino acid
  Variant (35)..(35): Xaa in position 35 is Phe, Ile or Val
  Variant (36)..(36): Xaa in position 36 is Ala or Gly
  Variant (37)..(37): Xaa in position 37 is any amino acid
  Variant (39)..(39): Xaa in position 39 is any amino acid
  Variant (40)..(40): Xaa in position 40 is Ala or Ser
QXXDXXXXXXXXXLRXXGXQXXXGXXXXXXXYYXXXXPXX

SEQ ID NO: 63742 - protein, 22 aa, Artificial sequence
  protein pattern
  Variant (2)..(2): Xaa in position 2 is Phe or Tyr
  Variant (3)..(3): Xaa in position 3 is any amino acid
  Variant (6)..(6): Xaa in position 6 is Ala or Pro
  Variant (8)..(11): Xaa in position 8 to 11 is any amino acid
  Variant (12)..(13): Xaa in position 12 to 13 is any or no amino acid
  Variant (15)..(19): Xaa in position 15 to 19 is any amino acid
  Variant (20)..(21): Xaa in position 20 to 21 is any or no amino acid
GXXGAXIXXXXXXNXXXXXXXL

SEQ ID NO: 63743 - protein, 35 aa, Artificial sequence
  protein pattern
  Variant (2)..(2): Xaa in position 2 is any amino acid
  Variant (6)..(6): Xaa in position 6 is any amino acid
  Variant (8)..(8): Xaa in position 8 is Ile, Leu, Met or Val
  Variant (9)..(10): Xaa in position 9 to 10 is any amino acid
  Variant (11)..(11): Xaa in position 11 is Ala or Gly
  Variant (12)..(12): Xaa in position 12 is Ile, Leu or Met
  Variant (13)..(14): Xaa in position 13 to 14 is any amino acid
  Variant (15)..(15): Xaa in position 15 is Ile or Val
  Variant (16)..(16): Xaa in position 16 is Ala, Gly or Ser
  Variant (17)..(18): Xaa in position 17 to 18 is any amino acid
  Variant (19)..(19): Xaa in position 19 is Glu or Gln
  Variant (20)..(22): Xaa in position 20 to 22 is any amino acid
  Variant (23)..(23): Xaa in position 23 is Ile, Leu or Val
  Variant (24)..(25): Xaa in position 24 to 25 is any amino acid
  Variant (26)..(26): Xaa in position 26 is Ala, Pro, Ser or Thr
  Variant (27)..(27): Xaa in position 27 is Asp or Asn
  Variant (29)..(29): Xaa in position 29 is Asp, Glu, Asn or Gln
  Variant (30)..(31): Xaa in position 30 to 31 is any amino acid
  Variant (32)..(32): Xaa in position 32 is Ile, Leu, Met or Val
  Variant (33)..(34): Xaa in position 33 to 34 is any amino acid
  Variant (35)..(35): Xaa in position 35 is Ala, Cys or Asn
LXGLWXGXXXXXXXXXXXXXXXXXXXXWXXXXXXX

SEQ ID NO: 63744 - protein, 29 aa, Artificial sequence
  protein pattern
  Variant (2)..(4): Xaa in position 2 to 4 is any amino acid
  Variant (5)..(5): Xaa in position 5 is Ile, Leu or Met
  Variant (6)..(11): Xaa in position 6 to 11 is any amino acid
  Variant (12)..(12): Xaa in position 12 is Ile or Leu
  Variant (14)..(14): Xaa in position 14 is any amino acid
  Variant (15)..(15): Xaa in position 15 is Ile, Leu or Val
  Variant (16)..(16): Xaa in position 16 is Phe or Tyr
  Variant (17)..(17): Xaa in position 17 is Ser or Thr
  Variant (18)..(18): Xaa in position 18 is any amino acid
  Variant (20)..(21): Xaa in position 20 to 21 is any amino acid
  Variant (23)..(28): Xaa in position 23 to 28 is any amino acid
  Variant (29)..(29): Xaa in position 29 is Leu or Val
NXXXXXXXXXXXAXXXXXDXXVXXXXXXX

SEQ ID NO: 63745 - DNA, 1620 bp, Saccharomyces cerevisiae
  CDS (1)..(1620)
atgttattaccattaacaaagctaaaaccgagagcaaaagttgctgttgtagggggtggcgtttctggactatgttttacttattttttaagcaagttgagaccggatgttgaaatcacactgttcgaatcgcagaacagaactgggggttggatatattcttgtaacacaagagatatgagtgggaacccaattatgttggagaagggacccagaacattgaggggcgtatcagacgggaccgttctgattatggatacccttaaagacttgggcaaggaagcagttattcaaagcattgataaaggttgcattgcagacaaaaagtttctactagaccccagtgataaactcgtgcaggttcctaattcgatatctacaacagtaaaatttctgctgaatccgttgggaaaaggactcatcacgggtatgatgggagaatggttcagaaaaaaatctccacatcctggccaagacgaaagtgtcgaatccatttgtgacagaaggtttgggaataactacatatcaaacaatatgatcagtgccttactaagaggtatctatggggatgacgtttccctattaagtgccaagagaacgtttaagaaaatatactacaatgaactaaagcacggatctaacacacaagctatgattgataatatgcgcggaaagtcaagaagtaaaaaaactgagaacctgcaccaatctttaactggctgccttaacgactactcaaatgcgtttggaaaagacaggtcaaagttattagacttatccaacacgctaaagaaatatcccatgttgggtcttgctgggggactagaaacgtttcccaagatagtcagaaatgctttgaacgaatttaaaaacgtcaaaatagttactgggaacccggttacgcaaataatgaaacgccctgctaacgaaacgacaatcggattgaaagcgaaatctggcgaccaatacgaaacatttgaccatttaagacttacgataacacctcccaaaatcgctaaattgctaccgaaggatcaaaattcattatccaagttattagatgagatacaatcaaacacaataattttagttaattattatttgccaaacaaagatgtaatagatgccgatctacaaggctttggatacttggttcccaaatccaataagaatccagggaaattgcttggtgtaattttcgattctgttatcgaaaggaatttcaaaccactttttgacaaactctccacaaacccaaacgccctcaacaaatatacaaaagtgactgcgatgataggaggttgtatgctcaatgaacacggtgttcctgtagtgccatccagggaggtaaccattaatgcagtcaaagatgcgctgaacaaccacctcggcatcagtaacaaggatctggaagctggtcagtgggaattcactatcgccgatagatgtctgccaagatttcatgtaggttatgacgcatggcaagaaagagctgaaaggaagttgcaagaatcttacggccaaacagtttctgtggggggaatgggattttctagaagtcccggtgtccctgacgttattgtagacggctttaacgacgccttacagctaagcaaataa

SEQ ID NO: 63746 - protein, 539 aa, Saccharomyces cerevisiae
MLLPLTKLKPRAKVAVVGGGVSGLCFTYFLSKLRPDVEITLFESQNRTGGWIYSCNTRDMSGNPIMLEKGPRTLRGVSDGTVLIMDTLKDLGKEAVIQSIDKGCIADKKFLLDPSDKLVQVPNSISTTVKFLLNPLGKGLITGMMGEWFRKKSPHPGQDESVESICDRRFGNNYISNNMISALLRGIYGDDVSLLSAKRTFKKIYYNELKHGSNTQAMIDNMRGKSRSKKTENLHQSLTGCLNDYSNAFGKDRSKLLDLSNTLKKYPMLGLAGGLETFPKIVRNALNEFKNVKIVTGNPVTQIMKRPANETTIGLKAKSGDQYETFDHLRLTITPPKIAKLLPKDQNSLSKLLDEIQSNTIILVNYYLPNKDVIDADLQGFGYLVPKSNKNPGKLLGVIFDSVIERNFKPLFDKLSTNPNALNKYTKVTAMIGGCMLNEHGVPVVPSREVTINAVKDALNNHLGISNKDLEAGQWEFTIADRCLPRFHVGYDAWQERAERKLQESYGQTVSVGGMGFSRSPGVPDVIVDGFNDALQLSK

SEQ ID NO: 63747 - DNA, 1527 bp, Arabidopsis thaliana
  CDS (1)..(1527)
atggcgtctggagcagtagcagatcatcaaattgaagcggtttcaggaaaaagagtcgcagtcgtaggtgcaggtgtaagtggacttgcggcggcttacaagttgaaatcgaggggtttgaatgtgactgtgtttgaagctgatggaagagtaggtgggaagttgagaagtgttatgcaaaatggtttgatttgggatgaaggagcaaacaccatgactgaggctgagccagaagttgggagtttacttgatgatcttgggcttcgtgagaaacaacaatttccaatttcacagaaaaagcggtatattgtgcggaatggtgtacctgtgatgctacctaccaatcccatagagctggtcacaagtagtgtgctctctacccaatctaagtttcaaatcttgttggaaccatttttatggaagaaaaagtcctcaaaagtctcagatgcatctgctgaagaaagtgtaagcgagttctttcaacgccattttggacaagaggttgttgactatctcatcgacccttttgttggtggaacaagtgctgcggaccctgattccctttcaatgaagcattctttcccagatctctggaatgtagagaaaagttttggctctattatagtcggtgcaatcagaacaaagtttgctgctaaaggtggtaaaagtagagacacaaagagttctcctggcacaaaaaagggttcgcgtgggtcattctcttttaaggggggaatgcagattcttcctgatacgttgtgcaaaagtctctcacatgatgagatcaatttagactccaaggtactctctttgtcttacaattctggatcaagacaggagaactggtcattatcttgtgtttcgcataatgaaacgcagagacaaaacccccattatgatgctgtaattatgacggctcctctgtgcaatgtgaaggagatgaaggttatgaaaggaggacaaccctttcagctaaactttctccccgagattaattacatgcccctctcggttttaatcaccacattcacaaaggagaaagtaaagagacctcttgaaggctttggggtactcattccatctaaggagcaaaagcatggtttcaaaactctaggtacacttttttcatcaatgatgtttccagatcgttcccctagtgacgttcatctatatacaacttttattggtgggagtaggaaccaggaactagccaaagcttccactgacgaattaaaacaagttgtgacttctgaccttcagcgactgttgggggttgaaggtgaacccgtgtctgtcaaccattactattggaggaaagcattcccgttgtatgacagcagctatgactcagtcatggaagcaattgacaagatggagaatgatctacctgggttcttctatgcaggtaatcatcgaggggggctctctgttgggaaatcaatagcatcaggttgcaaagcagctgaccttgtgatctcatacctggagtcttgctcaaatgacaagaaaccaaatgacagcttataa

SEQ ID NO: 63748 - protein, 508 aa, Arabidopsis thaliana
MASGAVADHQIEAVSGKRVAVVGAGVSGLAAAYKLKSRGLNVTVFEADGRVGGKLRSVMQNGLIWDEGANTMTEAEPEVGSLLDDLGLREKQQFPISQKKRYIVRNGVPVMLPTNPIELVTSSVLSTQSKFQILLEPFLWKKKSSKVSDASAEESVSEFFQRHFGQEVVDYLIDPFVGGTSAADPDSLSMKHSFPDLWNVEKSFGSIIVGAIRTKFAAKGGKSRDTKSSPGTKKGSRGSFSFKGGMQILPDTLCKSLSHDEINLDSKVLSLSYNSGSRQENWSLSCVSHNETQRQNPHYDAVIMTAPLCNVKEMKVMKGGQPFQLNFLPEINYMPLSVLITTFTKEKVKRPLEGFGVLIPSKEQKHGFKTLGTLFSSMMFPDRSPSDVHLYTTFIGGSRNQELAKASTDELKQVVTSDLQRLLGVEGEPVSVNHYYWRKAFPLYDSSYDSVMEAIDKMENDLPGFFYAGNHRGGLSVGKSIASGCKAADLVISYLESCSNDKKPNDSL

SEQ ID NO: 63749 - DNA, 1428 bp, Drosophila melanogaster
  CDS (1)..(1428)
atgacgacggccgtgctgggaggcggattgagtggactatccgccggatactacctgttgcggcgattcgggaagccgctgaccatctacgaggcctcgccccgtgtgggcggatgggtgcggtcggagaatcgcaaggatcgcaacttcatcttcgagagcggaccgcgaaccatacgcccagttggtgagccaggtgccaatacgctagaattggtggaggatctgaagctggaggtgactcccattcgacgcagtcatgtcgcagcacgcaaccgaatgctgtatgccaagggacagctctgcatgctgcccaacagtcccaagggtctcttcggcgtcctgcctcccttcacgaagccgctatacaaagcggttcttcgcgatctgttcacagcaagcaagaaagcgaagctggaggatgagagcatctacagtttcgctgagcggcggtttggtaaggagatagccgactacgccatcagtcccatgatctgcggtatttgcgccggtgacgcgcgagaaataagtgtgcgcttcctgatggaggggctctttgaaaaggaacagaagtacggaggagtgctcaagggcacactcatttcccgctttgagaagaacaagaccaaggacaccaaggatggactatttgccgaaagacagcccaagctgtatgcgcaggcggtaaaggagaagtgggccatgtacgggctgaaaggcggtctggagaacctacccaaaactatgcgaaagtacttaggtgagcgggatgtgaacgtgcagctaagcaacgaatgccggaacctgaccttcagcagctccggggttcgaatgaacatcaaggatgccgaagttccggtggagcatgtggtcagctccctgcccgcctacaaactcgcgcccctggtaaagcagcagcatccctcgctgagcgcccaacttttgagcattccgtacgtggatgtgctggtagtgaacatgcagttccccggcaagctactcaaacaagacggctttggattgctagtgccgccagtggaaaagttacctctgctcggcgtcatcttcgacagctgctgcttcgacatgggcgagaacactgtgcttaccgtgatgatgggtggccattggttcgaccagtggttcggtgatcgtccaagccccaagcagattcttgacttagccaccagccatgtgcagaaaatgctgcagatacgcgaggaacccaaattcagtcgagtgcacacgctgcacaagtgcatcccgcagtacactgtgggccacaagcggcgcgttgaagccattcggaactacatcaagacctacaaactgccactgtctgtctgtggagctgcatacgatggcgtgggcatcaacgatgttatcctatccgcccggcgacaagtggaagccatacccttgtcctaa

SEQ ID NO: 63750 - protein, 475 aa, Drosophila melanogaster
MTTAVLGGGLSGLSAGYYLLRRFGKPLTIYEASPRVGGWVRSENRKDRNFIFESGPRTIRPVGEPGANTLELVEDLKLEVTPIRRSHVAARNRMLYAKGQLCMLPNSPKGLFGVLPPFTKPLYKAVLRDLFTASKKAKLEDESIYSFAERRFGKEIADYAISPMICGICAGDAREISVRFLMEGLFEKEQKYGGVLKGTLISRFEKNKTKDTKDGLFAERQPKLYAQAVKEKWAMYGLKGGLENLPKTMRKYLGERDVNVQLSNECRNLTFSSSGVRMNIKDAEVPVEHVVSSLPAYKLAPLVKQQHPSLSAQLLSIPYVDVLVVNMQFPGKLLKQDGFGLLVPPVEKLPLLGVIFDSCCFDMGENTVLTVMMGGHWFDQWFGDRPSPKQILDLATSHVQKMLQIREEPKFSRVHTLHKCIPQYTVGHKRRVEAIRNYIKTYKLPLSVCGAAYDGVGINDVILSARRQVEAIPLS

SEQ ID NO: 63751 - DNA, 1407 bp, Oceanobacillus iheyensis HTE831
  CDS (1)..(1407): transl_table=11
atgaccactaacaagaaggttgttgttgttggcggcggaattacaggtctatccgccgcctactatcttcaaaaagaaaaagaagcgcaagaattgccaattgatatcactttagtagaagcgtcggaccgagttggtggaagaattcatacagtaaaacgtgatgggttcacgattgaaagaggaccagactcattactatctcgaaagcctgctgctatggaattagtaaactcactgaacattcaaagtaaagttgtaagaaattctactggacagtcttatatattagtaaaaaataaattacataaaatgccaaaaggagcctatatgggggttccaaaagaaataaaacctttactaaactcaaaggcgatatctacacgtggaaaattacgagcattaatggatgtagtcttgccaaaatcaaagggtgctaaagatcagtctttaggtagttttatgcgacatagatttggtgatgaactagttgataatcaaatcgatcccttattatcaggcatacattccggagatattgatcaaatgagtttacaagcaatttatccaatttttgaacgcatggaacaagagtatggtagtgtaatgaaaggattacagaaaaccatgccagcttcgaaaacgaaaaaaacttctaaaaagccctctgttggcatgtttttctcatttgaaggtggtttacaaacacttgtggatgcgttgagcagtcacttaaatggtattattcaatgtaatcgagctgtagatcatattgaaaaaaaggaagatgggtaccatttattactaaataacggagaggtcctttttgctgatgtcgttattatgactgcccctcatacgaaggttccggagatgttaagtaagcatgagccaatgaaacaactaaacaaaatacctgctacatctacggctaacgttatattagcatttgatgataaacagataaaacgtgatttagatggaacaggatttttaataacaagaaacagtgattatcgtataactgcctgcacatggacacatcggaagtgggcgaatacgacaccagacggtaaagctcttctacgttgctatgtaggtaagccagatgatcaaggtgttgtagatctgacggatgaggagattactgaaatagtattgaaagatttaaataaagttatgaaaataaaagggaaacctctgttttatgaggttacaagattcaaaaatgctcgcccgcaatatcatgtaggacatcttgatattgttcatgaagtacgtcactatattgatcattatttacctggatttgttttaacaggaagttcttatgatggtacaggtattccagattgtattgaacatggaaaatcaagtgcgcatcaagcaatgaatctgatcaaataa

SEQ ID NO: 63752 - protein, 468 aa, Oceanobacillus iheyensis HTE831
MTTNKKVVVVGGGITGLSAAYYLQKEKEAQELPIDITLVEASDRVGGRIHTVKRDGFTIERGPDSLLSRKPAAMELVNSLNIQSKVVRNSTGQSYILVKNKLHKMPKGAYMGVPKEIKPLLNSKAISTRGKLRALMDVVLPKSKGAKDQSLGSFMRHRFGDELVDNQIDPLLSGIHSGDIDQMSLQAIYPIFERMEQEYGSVMKGLQKTMPASKTKKTSKKPSVGMFFSFEGGLQTLVDALSSHLNGIIQCNRAVDHIEKKEDGYHLLLNNGEVLFADVVIMTAPHTKVPEMLSKHEPMKQLNKIPATSTANVILAFDDKQIKRDLDGTGFLITRNSDYRITACTWTHRKWANTTPDGKALLRCYVGKPDDQGVVDLTDEEITEIVLKDLNKVMKIKGKPLFYEVTRFKNARPQYHVGHLDIVHEVRHYIDHYLPGFVLTGSSYDGTGIPDCIEHGKSSAHQAMNLIK

SEQ ID NO: 63753 - DNA, 1449 bp, Staphylococcus epidermidis ATCC 12228
  CDS (1)..(1449): transl_table=11
atggcgtattttaataaatttttaagcaattctgaaaggaagcgtggaaaagtgagtaagaaagtggcaattattggagcgggaatcactggtttatctagcgcatatttcattaaaaaacaagacccttctattgaagtaactatcttcgaagcctcaaatagagtaggtggaaagattcaaacatatagatcagatggttacacaattgagttaggccctgagtcttatttaggtcgtaagacaattatgactgatgtggcaaaagatattggattagaaaatgaccttataacaaatactactggccaatcttatatttttgctaaaaataaattatatcctattcctggtggctcaattatgggaattcctacagatattaaaccatttattaaaacaagactcatttcacctattggtaaattaagagcggggcttgatttgtttaaaaaaccgatagaaattgaagatgatatttctgttggtagtttctttagacaacgattaggtaatgaagtattagagaacttaattgaaccactaatgggtggtatttatggcactgatattgatcaattgagcttaatgagtacatttcctaactttaaagaaaaagaggaacaatttggtagtttgattaaaggaatgaaagatgaaaaagaacaacgtattaaaaaacgtcaattatatccaggtgctcctaaaggacaattcaaacagtttagacacggattgagttcttttatagaggctcttgttaaagatattgaaagtaaaggtgtccacatacgatataacacgccagtcaaagatatattgatttcgcaaaaagattatgaaattttattagaagatgacagcaaagagaaatttaatggcttacttgtaacaacgccacatcaagtatttatgaattggtttagtcacgatcctgcatttgattactttaagaacatggattctactactgtcgcaacagttgttttggcctttgatgagaaaaatattaccaatacgtacgatggaactggctttgttattgcaagaacaagtcaaacggatattactgcatgtacttggacatcaaagaaatggccatttactactccagaaggtaaagttttaattcgagcatatataggaaaaccaggtgatactgtagtagatgatcacaccgatgaagaaatagtatcaattgttagaaaagacttaagccaaatgatgaccatctcagggaatcctgattttacaattgtaaatcggttacctaagagtatgccccaataccacgtgggtcatattaaaatgattaaagaaattcaacaacatattaaaacaacttatcctagattacgtgttacaggggcaccgtttgaagctgttggtttaccagactgcatacaacaaggtaagaatgcagttgatgaaatattagaagagttataa

SEQ ID NO: 63754 - protein, 482 aa, Staphylococcus epidermidis ATCC 12228
MAYFNKFLSNSERKRGKVSKKVAIIGAGITGLSSAYFIKKQDPSIEVTIFEASNRVGGKIQTYRSDGYTIELGPESYLGRKTIMTDVAKDIGLENDLITNTTGQSYIFAKNKLYPIPGGSIMGIPTDIKPFIKTRLISPIGKLRAGLDLFKKPIEIEDDISVGSFFRQRLGNEVLENLIEPLMGGIYGTDIDQLSLMSTFPNFKEKEEQFGSLIKGMKDEKEQRIKKRQLYPGAPKGQFKQFRHGLSSFIEALVKDIESKGVHIRYNTPVKDILISQKDYEILLEDDSKEKFNGLLVTTPHQVFMNWFSHDPAFDYFKNMDSTTVATVVLAFDEKNITNTYDGTGFVIARTSQTDITACTWTSKKWPFTTPEGKVLIRAYIGKPGDTVVDDHTDEEIVSIVRKDLSQMMTISGNPDFTIVNRLPKSMPQYHVGHIKMIKEIQQHIKTTYPRLRVTGAPFEAVGLPDCIQQGKNAVDEILEEL

SEQ ID NO: 63755 - DNA, 1458 bp, Rhodopirellula baltica SH 1
  CDS (1)..(1458): transl_table=11
atgaacattgcgatcattggtggtggactgtcaggattgtccacttccgttcacatacgcttgttggcccaaaagcaaaacaagcctcttccgaacatcactcttttcgaagcttccgatcgactcggaggcgtgattcacactgaaacgctgacggacgatcacggccgcacttttgtgatcgatcacggggccgatatgtttgccaccgccccatcggcagcaatcgatttgtgtgagcaacttggtgtcgcggatcaattgctgcgtcccagtccgctcggccgcggcgcgatgatcgcacgaggcaaccgtctgattccaatcccggaaggattcgtactgatgcgtccgaccaaacttgggtcgatgctgacgacgcctctgctgagcctcacggccaaacttcgtttgctgcaagagcgtttcattgcacgaagggtggaaagcgtgaccgatgagagcgtgggatcgttcgtccgccggcgacttggcgaagagtgcctggacaacatcgtcgctcccttggtcgctggcatttacaccgcggatgtcgatcgcctcagcatggcggcaacgatgaaaccgatttgggacatggagaccagcgacggttcacttgcgaaagcgacgttgcgacgcattcggacaggcgaagactccaccgagcaagccagcagtggagctcgctatgagaagttccgcgcgtttcccaatggcatgaagcagtggatcgacacgcttgcagacttcacaggccgggaaaacattcggctcaacaccgctgtgcagtcgattgtcccacttcccgacaatcgctatcaactgaacgtcaaatctgacatcgacggtcaatcaactcaagagtttgatcaggtcgttgtttcaacgcccgcgcacgtcgcggcaacacttctgcaaccactcagcgaagaagccgcgtccacgcttcgctccataccattcgcgtccaccgcaattgttgtgatggcagtccgacgcgagtgcatctcgcggttgccgacgacgtttgggtttgttgtgccaccaaaagaaaaccgccgcgtattggcaggcagtttcgcgagtacaaaatttccccagcgggcgcccgatgactatgtcattgtcagggcatttgtgggcggcgtgatgcaacctgagatcttagatagcagcgataatgagatcatcgacattgttcgtgccgaactgggtgagctgatcgggctggaccaaactcaatcgctccaagacatcaccgcgatggtgaaagtcgtgcgatggaacgacgcgatgcctcaatacgaagttggccatttggacaaagtccaacggatccgcaccgctcttgcatcactcgaaggactgcacctgaacacaaacgcactgggtggcgtcgggatcgctccagtgatcgcagcttcaaaacggaccgcggaacgcatcttgaagtga

SEQ ID NO: 63756 - protein, 485 aa, Rhodopirellula baltica SH 1
MNIAIIGGGLSGLSTSVHIRLLAQKQNKPLPNITLFEASDRLGGVIHTETLTDDHGRTFVIDHGADMFATAPSAAIDLCEQLGVADQLLRPSPLGRGAMIARGNRLIPIPEGFVLMRPTKLGSMLTTPLLSLTAKLRLLQERFIARRVESVTDESVGSFVRRRLGEECLDNIVAPLVAGIYTADVDRLSMAATMKPIWDMETSDGSLAKATLRRIRTGEDSTEQASSGARYEKFRAFPNGMKQWIDTLADFTGRENIRLNTAVQSIVPLPDNRYQLNVKSDIDGQSTQEFDQVVVSTPAHVAATLLQPLSEEAASTLRSIPFASTAIVVMAVRRECISRLPTTFGFVVPPKENRRVLAGSFASTKFPQRAPDDYVIVRAFVGGVMQPEILDSSDNEIIDIVRAELGELIGLDQTQSLQDITAMVKVVRWNDAMPQYEVGHLDKVQRIRTALASLEGLHLNTNALGGVGIAPVIAASKRTAERILK

SEQ ID NO: 63757 - DNA, 1425 bp, Nasonia vitripennis
  CDS (1)..(1425)
atgacagctattttagggggaggaatatcgggcctaagtgcagcatattacgctgtcgaacactcaaaattagggtcgattgttctctatgaagcatctaatcgtttaggaggatggataagaagtgtaacagcacccagtggagtgatatttgagaaaggtcctcgcaccatcagatctgaaggcgctgctggagaaaatactctgcaacttataagtgatctcaacttgagtgacaaagttgttgcagtcaaaatgtttcatccagctgccagaaacagactgatttatgtaaatgaaaaattgcacctattgcctaattcactgggtggtttgttaaaaattcaagaaccatttaagagacgtttggcttcaataatatggactgacttaagagctccgaaagaaataaaggaagacgaaagtatttatagttttgttgaaagaagaatgggaaaagacgttgctgattacttaatcagtccaatgatttgcggaatatgcgctggagatgcaaagcaaataagtgttaactttttgctgaaaagtgcctttgaattcgaacagaagcacggttcaatgactaagggtcttttgttgaatctgttaaaaaaaaaatctaatcaaagtacaaacaaaaataaagcaagttcaaccaagtcacatttagttgaaaagtctaagctagagaaatggtcagtttggggtcttagaggagggttagaacaatttcctatagcattgagtaattccttaaaatctaagtctaatttatctttaaaaactaaaacgaattgcgaacaaatcacattcaaaccaggtcaggtggaattatccgtgaatgggaaagctgaaaaacatctaagagtggtctcaagtttgtcagcaaagagtcttgctcccttgcttaaaagacagcatccacaattgtcaagggagctagaagcaataccatgtgccactgtagctgtagttaatcttcattttaatggagacgttttgccattggaaggttttggatttcttgtagcaccatctgaaaatttgcctattctaggagttatctttgattcgtgtgtctttagcaatgagaataatactacagtactaacggtaatgatgggtggagcatggtttgacaaatactttggaaagagcgtaacaaatgaccaactcctatctacagcagttaagcatacgaaaaatatacttaaaatacaagaagatccagtcgaggtcgatgtagctgtgttgaaggactgtattccacagtacgtggttggtcatagtcaaagaatgcagcgcattcaaaactatatctcctcgcataaaatccctttggtgctctgcggatcgtcatatcacggggttggtctgaacgacgttattctgtcagcaaaacgagccatttccgacattgtttaa

SEQ ID NO: 63758 - protein, 474 aa, Nasonia vitripennis
MTAILGGGISGLSAAYYAVEHSKLGSIVLYEASNRLGGWIRSVTAPSGVIFEKGPRTIRSEGAAGENTLQLISDLNLSDKVVAVKMFHPAARNRLIYVNEKLHLLPNSLGGLLKIQEPFKRRLASIIWTDLRAPKEIKEDESIYSFVERRMGKDVADYLISPMICGICAGDAKQISVNFLLKSAFEFEQKHGSMTKGLLLNLLKKKSNQSTNKNKASSTKSHLVEKSKLEKWSVWGLRGGLEQFPIALSNSLKSKSNLSLKTKTNCEQITFKPGQVELSVNGKAEKHLRVVSSLSAKSLAPLLKRQHPQLSRELEAIPCATVAVVNLHFNGDVLPLEGFGFLVAPSENLPILGVIFDSCVFSNENNTTVLTVMMGGAWFDKYFGKSVTNDQLLSTAVKHTKNILKIQEDPVEVDVAVLKDCIPQYVVGHSQRMQRIQNYISSHKIPLVLCGSSYHGVGLNDVILSAKRAISDIV

SEQ ID NO: 63759 - DNA, 1437 bp, Anopheles gambiae str. PEST
  CDS (1)..(1437)
atgactgccatcctcggcgccggtatcagtggactggcggcaggccattacttgctcaggaaaacaccgactctacctcttaccatttacgaagcgacggatcgtatcggtggttggattcgttctgaacgcagcccagaccatggatacgtgtttgaagccggaccgcgcaccattcgtcctaagggcccggcggcaagtaacacgctcgagctgatagaagaacttggccttaccgatcaggtgtactccattagctccaaccatacggcggcccggaatcgtatgatttacgcgaagggcaaattgaatctgcttcccaactcactcggaggcgtgctgaaaacggtgccgcccttcacgagacctctgtactttgccgcctttcacgatctgctggccggccgatccaaaactccgctgaccgatgaatctatgtactcgttcgtggaacgaaggttcggcaaggagattgcggactacgcggtcagctcgatgctgtgcggcatttgtgccggggacgctaaacagatcagcgttaaatttctcatgaaagatcttttcgagcgcgaacagcgccatggcggtgtaattgtagggctgctcaaggaggcacttcagaatcggaaaaagaaacaaccgaagagcgttaaaaagcctgccacccagatggcacggttggccgacagggcaaaggcggagaattggagcatctattcgatccgtggcggtttgcagacgttgccggaaacgttggccaccgatctgcaggcgaagggcgcatcgatcgtaacgggcaccaagttcgaagagcttaccttcgacggagaccgggtggtgctgcgggtcgatgggaaggagcagctgctgcagcatctcgttagcagcatcccgagctacaagctggcaaagcacgtccagaagcaacacccccagctggccagcacgctgagcagcatcccgtttgtggacgtgtgcgtgatcaatctgcggtaccggaggggcgatttgttgcagcaagatggcttcggctttctggtgcctccgattgaaaacctaccgatactgggtgtcattttcgacagctgctgcttcgatatggacgacaacacggtgctgactgtgatgatgggaggagcgtggttcgagcagtggttcgggaaaaatccgtccgacgagcatttgctcggggtcgcactcgagcacattaagaagatcctgcacattgagcagcagcccgacagctacaaggtaaacttgctacgcaaatgcattccccagtacaccgttggccatcaggatcgggtgaaggccatccgggcgtatgtagagcagcatcggcttccgctgtcgctgtgcggtgcttcgtacgacggtgtcggcgtgaacgacgttatactatctgctaggaagaatgttgagacgatacaacaataa

SEQ ID NO: 63760 - protein, 478 aa, Anopheles gambiae str. PEST
MTAILGAGISGLAAGHYLLRKTPTLPLTIYEATDRIGGWIRSERSPDHGYVFEAGPRTIRPKGPAASNTLELIEELGLTDQVYSISSNHTAARNRMIYAKGKLNLLPNSLGGVLKTVPPFTRPLYFAAFHDLLAGRSKTPLTDESMYSFVERRFGKEIADYAVSSMLCGICAGDAKQISVKFLMKDLFEREQRHGGVIVGLLKEALQNRKKKQPKSVKKPATQMARLADRAKAENWSIYSIRGGLQTLPETLATDLQAKGASIVTGTKFEELTFDGDRVVLRVDGKEQLLQHLVSSIPSYKLAKHVQKQHPQLASTLSSIPFVDVCVINLRYRRGDLLQQDGFGFLVPPIENLPILGVIFDSCCFDMDDNTVLTVMMGGAWFEQWFGKNPSDEHLLGVALEHIKKILHIEQQPDSYKVNLLRKCIPQYTVGHQDRVKAIRAYVEQHRLPLSLCGASYDGVGVNDVILSARKNVETIQQ

SEQ ID NO: 63761 - DNA, 1779 bp, Gibberella zeae PH-1
  CDS (1)..(1779)
atgagtcgcagtcgagcagaatcaacggctgcagctctcttgggctcagcagctcgttcaacaacgaaaccccacctacaagtatccctccgtcgactcaatggcttccgcagcctcagcacctgctcagcctcggtcttgacccggcgacgacccattgtcgcatgtaagcatacacaaagcttcaacgatggaaggagatatgtgtcgcaggcaaaggatgcaaatattgcggtaattggaggcggattaacaggtctttcggcggcatactacctcgcaaagaaacttccctcaacgacaaagatcaccttgtatgaagccagtgatcggctaggaggatggatcaagacggatagagtgccagtagatatcgggggcaaaagaggaatcgtgtcttttgagcgcggttctcgttcgttgacgtccctggctggcaatactttccgcttcgatgacctcgtcctctacgatcttactcttgacctaggcctctctctcaactttcccccagccaagccacgatatgtctattaccccgaccatcttgtttccatgcccccgaacgtcagcatcttcgatattatccgcgagcccctctacctcgagagcatcggcgcaggccttggccttatgatcaaccacctgcgcaagagacatctccctgccgaagacgaatccgttgccgattggctttacaaagtcaccaacagtcgcaagggcattggcaacatggcctcagctatgatgcacggcatctacggcggcgatatccacaagctaagcgctcgaagtgttttggatcgcatctactggggttggtatctaccaaaccctggtttgcatgcgcgccctatgcctgtacctgagtcgctgattctcgagacgctgggacaggatcgacaaattcaaaagctggcgttggagcccaagagtgcgctgatagattttggcgataagggcatggagtcactgccgcaagcgataggtgcggctttgcaagatcaacccaatgttacaatcaagaccggcgaggctgtcaaagatatccagtatgatgaggccaagcaacaagtccagatcaacagtttcagcgccaagaacgaggagaaaagtaactcgcaggcctacgacaaggtcatttcaacactatcagcccagcagatcgcccgactcgcaagtgataaagtaccatcgctctccgccgcacactctgtctctgtcatgacagtcaacatttggttccctcaggagaaccttaagcctcccggcttcggatatctcatccccaactccgttgacccagagctcaacccagaacatgccctcggtgtcttctttgactcagacgttggaactcgatccaaagacgaacccgccggtaccaagctgttcgtcctgatgggaggtcattactacgaccgccctgatgttactccccctactgaggaggaagctgttgttcaagctcgcaacctactagagcgtcacctcggcatcccacgcgatgctcccgcctatgccacagcaaattttgccaaggaatgtatccctcagcactacgtcggacaccagggcctcctgcgtaacgctcacgccgagctgaagcagaactttggcgggcgccttgccgttgctggaggctcgttccatcgcatcggcactattgccggtctgcgctctggctacgatgctgctgttgcggcgaagagtggtcttgaagctactggtctggaagcgacggaaggagacaaggttacaatgccggttcagtactaa

SEQ ID NO: 63762 - protein, 592 aa, Gibberella zeae PH-1
MSRSRAESTAAALLGSAARSTTKPHLQVSLRRLNGFRSLSTCSASVLTRRRPIVACKHTQSFNDGRRYVSQAKDANIAVIGGGLTGLSAAYYLAKKLPSTTKITLYEASDRLGGWIKTDRVPVDIGGKRGIVSFERGSRSLTSLAGNTFRFDDLVLYDLTLDLGLSLNFPPAKPRYVYYPDHLVSMPPNVSIFDIIREPLYLESIGAGLGLMINHLRKRHLPAEDESVADWLYKVTNSRKGIGNMASAMMHGIYGGDIHKLSARSVLDRIYWGWYLPNPGLHARPMPVPESLILETLGQDRQIQKLALEPKSALIDFGDKGMESLPQAIGAALQDQPNVTIKTGEAVKDIQYDEAKQQVQINSFSAKNEEKSNSQAYDKVISTLSAQQIARLASDKVPSLSAAHSVSVMTVNIWFPQENLKPPGFGYLIPNSVDPELNPEHALGVFFDSDVGTRSKDEPAGTKLFVLMGGHYYDRPDVTPPTEEEAVVQARNLLERHLGIPRDAPAYATANFAKECIPQHYVGHQGLLRNAHAELKQNFGGRLAVAGGSFHRIGTIAGLRSGYDAAVAAKSGLEATGLEATEGDKVTMPVQY

SEQ ID NO: 63763 - DNA, 1617 bp, Candida glabrata CBS 138
  CDS (1)..(1617)
atgctttctcccttgacagctcttcctaagaatgccaaagtggctgtaggtggtagcggtatagctggtctatcatttgcatacttcttagccaaaatgaggccagatgtatctgttacattgtatgaaaaggcagcaagaaatagtggatggatcaattcatggcagacaaaggacaagaatggtcaaccagtaatgatagaacgtggaccaagaaccttaagaggtgtatcagatgggacagtaatgatgatcgatgccatgaaagacctgaaaagcttggacatagtacattttatagaacacaactctgatgctgataagaagtttttacttgatccaaatgacaaactagttaaggtacctgactcctttttgagtggtattaaattcataatgagtgatttagggaaaggtattatacctgcaatgctaggtgaattctggagaaaagccagtgcaaaccccggtaaggatgaaactgtggcttccatgttagataaaagaatgggtaatgagcatttaggtaaaaatgtcttcagtgccatatatagaggtatctatgctgacgatattaatactctcagtgccaaaaaagttatgcacaagatggtagcaaatgaactgaagtttggctctaacacaaaagcattaattcattcgatgaagactaaaaaagacaggaaaaagaatgctgactctttaaccttgattctcgataaatatactaaagtaatgggaaaggaagagtctaagatattagagctgtctaagaagttaaagcattaccccatgttaggttttaagggaggcctagaaagcttctgccaaacattactcaaaggtcttgaatccatgcctaatgtctccgttttgaataactcagctatcactaaattaatctcagacgcaaagtctgacaataataacataactgttgaaattaatcacggaaagtccacagagaaatttgaccacgttcgcctaaccggtattccccatagattgggaccattactacgtgagattgatggccatatagccgacagtctggagaccatcaaagccaataccgtggttttggtaaatttctacctgcctgataaggatgtcatcccaaagaaaaaccgtggttttggctatctggtacctgagtcaaacccaaataaagaaaaactattgggtgtgatctttgactcagttattgagcaaaacttgaaaaacattgagaatgcacaagaaatggtatcatcagacaaaaaatcttatactaagttaacagctatggttggtggatatatgtataacgatcctgctaccggtgaacctgtagtaccaaaagatgagcagattatcgatgctgttagaaacactttagagagacatttgggagtatcacctaatgatcttgacagaggtttgtggcaggtaactcctgcaaacaagtgtttgccaaaatataatgttggctacatggattggcaaaccgatatggaaaagaaaatactaaaactcttcaacaacaaggtttctataggtggtatgggctttgccattggtcctggtatccctgatgtttttgcagatggattccaagatgcgttaaaactacgttaa

SEQ ID NO: 63764 - protein, 538 aa, Candida glabrata CBS 138
MLSPLTALPKNAKVAVGGSGIAGLSFAYFLAKMRPDVSVTLYEKAARNSGWINSWQTKDKNGQPVMIERGPRTLRGVSDGTVMMIDAMKDLKSLDIVHFIEHNSDADKKFLLDPNDKLVKVPDSFLSGIKFIMSDLGKGIIPAMLGEFWRKASANPGKDETVASMLDKRMGNEHLGKNVFSAIYRGIYADDINTLSAKKVMHKMVANELKFGSNTKALIHSMKTKKDRKKNADSLTLILDKYTKVMGKEESKILELSKKLKHYPMLGFKGGLESFCQTLLKGLESMPNVSVLNNSAITKLISDAKSDNNNITVEINHGKSTEKFDHVRLTGIPHRLGPLLREIDGHIADSLETIKANTVVLVNFYLPDKDVIPKKNRGFGYLVPESNPNKEKLLGVIFDSVIEQNLKNIENAQEMVSSDKKSYTKLTAMVGGYMYNDPATGEPVVPKDEQIIDAVRNTLERHLGVSPNDLDRGLWQVTPANKCLPKYNVGYMDWQTDMEKKILKLFNNKVSIGGMGFAIGPGIPDVFADGFQDALKLR

SEQ ID NO: 63765 - DNA, 1611 bp, Kluyveromyces lactis NRRL Y-1140
  CDS (1)..(1611)
atgaaaccaattgtaggttcattaccttttaatgctagaattgcagttgttggtggaggagtttcggggttgacttttacttatttcttgtccaaattaagaccagatgttaaggtaacgctatatgaaaaacaggatagatgtggtgggtggattcattctgacataatagatgatggagaaggaaaccgggttatggttgagaaaggtccacgtactttacgaggagtttcggatggaagcgtcataattgttcagacattgcgagacttaggcaaacaagatgtcgttcaatacatcgctgcagactccgaagcaaacaggaaatttcttttggataagaataatgttttgactcaagttcctgattcacctataagtgctttgaaattctttgctggctctcttggaaagggattcatatctggtatcttaggtgaaccattcaggtccgctaaggtaactggaacagacgaaagcgcccacagtttcatccataggaggtttggtaatgaacatatcagcaaaaatgtatttagtgctttattccatggcatatatgctggggatatcaaaaaactaagtgcaaaacgaacgataggaaagatggtcgaaatggaaaacacatctggatctctaatcaaatcaatgtttaacaaaatgattatcaaatataaaaaccgtaatgatactagatcacacaagatagagatcagtcctttacttaaaaagtttgcagaagcgacaggccagagtgagaaacagttaatttctttgtctcaacgattgaaggcttttccaatggtgggattcagatcaggattggattgttatccgaagacattatctgagtatattacaggattaccaaatgtctctgtcaaacatgaggcagtggaatcagttataccggggaaagatggaaagaatgtggttatagtgtctgattccggagaatcaaccttcgaccatgctcgtttaactgtaaatcccaatgtactcgagaacattatcccatttgagccattagcaaagaagcttagagaggttcattcaaacacagttatattagtgaatttctatttgccacgcaaggatgtcatttctaactaccatggattcggttatttagtaccacaatctaaccaaaaccatgagaaattgctcggtgtcatttttgattccgttatcgaaaagaacttcaaacctgtgtttggcgtccaaaacgaatcgaaaagccctgatgatgacaagcgctacacaaaagttactgctatgctcggaggtcactatctgaataatgagggcgaacagaacatcccatcgaaatcgataataataaactctgtgaaatatgcttttatgaaacatttgcacatagatgaaaacgatttggaagacggaacatgggaagtcacagttgccaaggattgtcttccccaataccatgttggatacgacgattgggtccaacagacagcgaagttagtacaagaacagtattcaaactatgtatctcttggaggaatggctttcagtacaggaccaggagtacctaacgttatagaagatggatttgaaagtgcgtatgtgctatccaaagctgaataa

SEQ ID NO: 63766 - protein, 536 aa, Kluyveromyces lactis NRRL Y-1140
MKPIVGSLPFNARIAVVGGGVSGLTFTYFLSKLRPDVKVTLYEKQDRCGGWIHSDIIDDGEGNRVMVEKGPRTLRGVSDGSVIIVQTLRDLGKQDVVQYIAADSEANRKFLLDKNNVLTQVPDSPISALKFFAGSLGKGFISGILGEPFRSAKVTGTDESAHSFIHRRFGNEHISKNVFSALFHGIYAGDIKKLSAKRTIGKMVEMENTSGSLIKSMFNKMIIKYKNRNDTRSHKIEISPLLKKFAEATGQSEKQLISLSQRLKAFPMVGFRSGLDCYPKTLSEYITGLPNVSVKHEAVESVIPGKDGKNVVIVSDSGESTFDHARLTVNPNVLENIIPFEPLAKKLREVHSNTVILVNFYLPRKDVISNYHGFGYLVPQSNQNHEKLLGVIFDSVIEKNFKPVFGVQNESKSPDDDKRYTKVTAMLGGHYLNNEGEQNIPSKSIIINSVKYAFMKHLHIDENDLEDGTWEVTVAKDCLPQYHVGYDDWVQQTAKLVQEQYSNYVSLGGMAFSTGPGVPNVIEDGFESAYVLSKAE

SEQ ID NO: 63767 - DNA, 1599 bp, Debaryomyces hansenii CBS767
  CDS (1)..(1599)
atgaacttaaacaagatacctcataatggtagggtggctgtaataggtggtggaatatctggattgtcgtttagttattttttgaataaattaaggcctgatataaagatcaatatatttgaatctcaaaaccaacctgggggatggatcaaatcggagtacttgcaattgaaaaatgaaaagcaaaaggttttgttggagaagggacctagaacattgagaggagttagcgatgggtcattattaattatagatgttctacggaacttgaatcaatcaagtaaaatagaagtaatggctcatgattcgattgcaaacagaaaatacctattatccagagaaaacatcttagttcaagtcccgaattcgatcaagtcttttggtaagtttctaagcagcggtattgttaatggtatcttgaaaggaatgcttctagagccatttgccaagggtagaatatcaccaaatgaggacgagagtgtcgaaagttttattactaggaggttcggaagtagtaagttatccgacaatattctcagcggtgttttgcatggtatttatgctggagatatttctaagcttagtgtccgctcggttttacctagtttagttagtcttgaaactgaaaatggatcaataattaaaggtatgattaagaaaataagagaaactcctccaacaaaagagctatccgcttcattagcaagttatcaggacaagatatcaagcaatagtaatttattagaattagcctcaactttaaaaaagtatcctatggttagattgaaagatggcttacagacgcttccaacaagcatggcaaagtatttagaactgcagccgaacgtggaaattttttacaattctgaaattcaagaaattaatgctaagacaccccacatcgttgtaaataatcaggtacaaaagtacgaccacatcagatcaactatcaacaccaatacattgagcaaattaattacgaatgatgaaattaaggcggttttaccattagaatatgtatctatatttttagtgaatatttactgccgcaagcctatattgataccttccgacaagaatggatttggcttccttgtcccaaaagttaatcaaaatcacgaaagcttactaggaataatgtatgattcagacatagaacgtcatgttaaaccattatatctgaatgagaaaatctcgactgacaattataataaaataaccttaatgatgggaggtcactactacaacaagatagggattccctcaaacaaccttaacgttaaagcaatcaaaaatgtattgtcatcaatcttaaatactagcctaaaggaccacaacttaatattcagaaacgaggctcaaatgaccgataagtcactttctctcgaagaaaatgatattatgatttcgtataatttacaccgagactgtatcccccagtacaatgttggttacgagaaacaaaaacaaaaattgtatgaaattatgaaccagcagtgtaacggtaaattctcgctaggtggaatgggcttcgccgcaggtatgggagtacccgattgcgtaatgaatggattagttgattccttagaaatcgcctag

SEQ ID NO: 63768 - protein, 532 aa, Debaryomyces hansenii CBS767
MNLNKIPHNGRVAVIGGGISGLSFSYFLNKLRPDIKINIFESQNQPGGWIKSEYLQLKNEKQKVLLEKGPRTLRGVSDGSLLIIDVLRNLNQSSKIEVMAHDSIANRKYLLSRENILVQVPNSIKSFGKFLSSGIVNGILKGMLLEPFAKGRISPNEDESVESFITRRFGSSKLSDNILSGVLHGIYAGDISKLSVRSVLPSLVSLETENGSIIKGMIKKIRETPPTKELSASLASYQDKISSNSNLLELASTLKKYPMVRLKDGLQTLPTSMAKYLELQPNVEIFYNSEIQEINAKTPHIVVNNQVQKYDHIRSTINTNTLSKLITNDEIKAVLPLEYVSIFLVNIYCRKPILIPSDKNGFGFLVPKVNQNHESLLGIMYDSDIERHVKPLYLNEKISTDNYNKITLMMGGHYYNKIGIPSNNLNVKAIKNVLSSILNTSLKDHNLIFRNEAQMTDKSLSLEENDIMISYNLHRDCIPQYNVGYEKQKQKLYEIMNQQCNGKFSLGGMGFAAGMGVPDCVMNGLVDSLEIA

SEQ ID NO: 63769 - DNA, 1584 bp, Yarrowia lipolytica CLIB122
  CDS (1)..(1584)
atgtcgattcaacacacactgtacaggccattgaaggagggagcgagtttggcgatccttggaggcggaattggcggacttctatccgcggcattcctcgccagagcgcgcccagacatcaaaatcacactgtacgagtcaaaggcgcaatgtggaggatggatcaagagcaagttgcttgaatgccacgatggcggctcggagatgatcgaaaagggaccccgaacgctcagaatgcaccccggcacactcattttactccaggccatttctcatgtggacccaaagttctccatctacggactacctaccgacagtccagccaacaccaagtggatcctcaacaaggaccaactcatgtcgctgagcgtgttcaagagccccgcaaatctgatgcggttcctgtcgtcgtctgtctttcgagccatggctatgggcgccttcaacttcctcgtatatccatggacccggaaacgagaccctaatgtccaagacgaaagcgtggctgatttcatcggaagacgagcctcgcctgctctgggcgatagaatgggctcagcgattctacacggaatctacgctggagaccacaagactctgagtgctcgaatgactctgcgaccattctacggacctgatagactgctgaaaccggccaaattgttcaccaacgaggagtttgagaaactgtacaagaagctgtttcccgaggcgtccacgtcgctgtttgatctcaagaagttcccggccatgtttgcctttccccagggtctgtctggaatgattgatgtactccataagcatctggaaaaaagtcccaatgtggagattaaatgtaacacggagattaccagagttgaaaccaccattggaggcatgcttgtgtctgattctaccggtgtttctaccactcacaatgccgtctactctctgttgagttaccaggctgtgtccaaattgcttcctgacactgccgaccgagctctcatcaaggacatgtcttctgtcgacgtcatggtgctcaacttctcattcgagaaacccaaggaccccaagtacaccggctttggatacctcattccccaggccgaagaaaaccccgagcaggttctgggcgttattttcgactctgatgtcggtcgaggcagtgagctcatctctggtgagccctacaagtcgccttcgggccgagaaaatgtcacagtcatgatgggaggtcattactggaaggatggtaatattccgtcttccgaggagtgtgtggagagagcaaagaaggtgctcaaacgacacattggcctggaggtgactgataccaccgagtacgatgtggagctgcacaagagctgcattcctcagtacgccgttggtcatctggagcgtgtggaccagtttaagcacattgtcagcaaggagactcatcatcgagtggctctggcaggcatgtcgttcggtcgaggagtgggtatctctgatgccgctgttgacgcctttttgtttgtggctagtcagagtcatgatccggagacgttgaaattgacgagaaagattgtggatcattatgagaccaccgtacgactttag

SEQ ID NO: 63770 - protein, 527 aa, Yarrowia lipolytica CLIB122
MSIQHTLYRPLKEGASLAILGGGIGGLLSAAFLARARPDIKITLYESKAQCGGWIKSKLLECHDGGSEMIEKGPRTLRMHPGTLILLQAISHVDPKFSIYGLPTDSPANTKWILNKDQLMSLSVFKSPANLMRFLSSSVFRAMAMGAFNFLVYPWTRKRDPNVQDESVADFIGRRASPALGDRMGSAILHGIYAGDHKTLSARMTLRPFYGPDRLLKPAKLFTNEEFEKLYKKLFPEASTSLFDLKKFPAMFAFPQGLSGMIDVLHKHLEKSPNVEIKCNTEITRVETTIGGMLVSDSTGVSTTHNAVYSLLSYQAVSKLLPDTADRALIKDMSSVDVMVLNFSFEKPKDPKYTGFGYLIPQAEENPEQVLGVIFDSDVGRGSELISGEPYKSPSGRENVTVMMGGHYWKDGNIPSSEECVERAKKVLKRHIGLEVTDTTEYDVELHKSCIPQYAVGHLERVDQFKHIVSKETHHRVALAGMSFGRGVGISDAAVDAFLFVASQSHDPETLKLTRKIVDHYETTVRL

SEQ ID NO: 63771 - DNA, 1809 bp, Aspergillus nidulans FGSC A4
  CDS (1)..(1809)
atgcgtggatcatgcgccgctagttctgcactaaagcgtttagaaagaccattggcttttccttgcaatggtcaacggcgcttcttgcatgccatttcggagggacacactgttggcatcataggcggtggaatcactggcctcacagccgcataccgattatccagggacccaaaatgctccaaggttaccgtctatgagaaaggccctcgcgtgggcggctggattcaatccgagaaaattaacgtggacggagagcatattgtcttcgaatatggaccgcgtacactgcgagctagcaccattactgcatttccacttttggacttgttgaccgagctggggctagaagacgaaatgcttatcacgaaaacgtcatccgccgcgagccagaaccgctatatctattaccccgatcgcctcgttcgtatgccggggccgcagaaaggggccagtcgaatatctcagctcataacgacgttgaaaagtctactacaagaaccagtcttcgagagtgtgcttcctagccttttgaaggagcccttcgttaagcgtccattgaacttgccttcagacgaatccgtcatggagtttgtatcacgacggtggtctaccaaaatagctgacaatttggcttccagtgtatttcaaggcatatatgcagggaatattgacaagctgagtgcggaaacgctcctgggcccgcttcgggcgcatgagttgtctggtagtgtagccaagggtataacggagatgaaagggaaacagtactggatttcggacgatttcatttccatgctcctcataagtgaagcaaagaaagcgtctcacttagactacctcagaagcctggcaaaggacagcagtacattgactttcaagaacggcgtcggtcagctggcagacgctctggttgcagagttgaaacgatcaccaaaagttgaagtcctcacgcatgcaaatgtcacaagcattctccaagatcatgagagctccaacctcactgtaaaagtagaagatggtcagagtcgtgttcacaaccgtctcattgctaccaacccgccttgcgacctcgcaagacaacttcagtgttcactggagcccgagaagcagcccacaggaacaataaatgccctacagagacacaactacgcaacaactactatggttgtgaatttgtattactcaaatcctgatctgatccctgttcgaggtttcggctacctgattcccaggtcgataccttttgcgcagaatcctgagcgagcactgggtgtgatatttgcttcagaatctagtgtaggtcaagacacagccaccggcacaaagctcacagtcatgatggggggccattattgggacgggtggaaagaatcagactatccggaccacgatactgcggtctcgatgtctcaagccttactgaaaaggcatctgggcatcctggattctcccaaagtagcccacacccgattgcagcgcgatgctattcctcagcccaccgttgggcatcttgaacgtatgcaagacatttcaacgtctattaagtctgagctcaaaaaccgtgtcactctggctggggcgtggtattcaatgcatggtaccggcgtggtggacagcattcgtcaggcttatctagctgcgaaatatggccctgagctggaatactcaggagcaccgttcccttttccatccctgacggattcacttggtggtggtggtataattacccactaccaacctcgctggataacggcgtcatctgaggaattgttcaggaaatgtgggatagaaaagaatcccaattag

SEQ ID NO: 63772 - protein, 602 aa, Aspergillus nidulans FGSC A4
MRGSCAASSALKRLERPLAFPCNGQRRFLHAISEGHTVGIIGGGITGLTAAYRLSRDPKCSKVTVYEKGPRVGGWIQSEKINVDGEHIVFEYGPRTLRASTITAFPLLDLLTELGLEDEMLITKTSSAASQNRYIYYPDRLVRMPGPQKGASRISQLITTLKSLLQEPVFESVLPSLLKEPFVKRPLNLPSDESVMEFVSRRWSTKIADNLASSVFQGIYAGNIDKLSAETLLGPLRAHELSGSVAKGITEMKGKQYWISDDFISMLLISEAKKASHLDYLRSLAKDSSTLTFKNGVGQLADALVAELKRSPKVEVLTHANVTSILQDHESSNLTVKVEDGQSRVHNRLIATNPPCDLARQLQCSLEPEKQPTGTINALQRHNYATTTMVVNLYYSNPDLIPVRGFGYLIPRSIPFAQNPERALGVIFASESSVGQDTATGTKLTVMMGGHYWDGWKESDYPDHDTAVSMSQALLKRHLGILDSPKVAHTRLQRDAIPQPTVGHLERMQDISTSIKSELKNRVTLAGAWYSMHGTGVVDSIRQAYLAAKYGPELEYSGAPFPFPSLTDSLGGGGIITHYQPRWITASSEELFRKCGIEKNPN

SEQ ID NO: 63773 - DNA, 1596 bp, Candida albicans SC5314
  CDS (1)..(1596): transl_table=12
  misc_feature (427)..(427): n is a, g, c or t
atgactttgacaactctacctcaaaatgcaagagtggcagttttaggagcaggaattctgggattaacattcacatatttcctttctaaactacgcccagatttacaattcacaatatttgaaaaactgaaaagaccaggtggttggatgtcatcacctaaattacacgtcaataataccaatgaatcgattctttttgaaaagggaccaagaactttacgtggagttaaagatgggactttattaatgcttgatattttaagaaaattggatttggattctcaaatagaagtaattaatgaaaaatgtaatgccaataagaaatatattcttgattcttcaggggaaatcattcaagtgcctaattcaattggaacaacaattgaatttcttaaaaatgttaaatgtgtcgatagaaaattaatanctgggataataaaggaaccatttgtgaaaccaataaaagaagatgaaacgattgaacaatttttcaaaagaagattaggtagtaccgtacttacagataatgttgccagttctattattcatgggatatatgctggagatgtcgggaaattgagtattaaaagtattatgtcatttatgaaagatattgaaaatcaatcaggatccatagtgaaacatattttcaaatccctatattcaaccaagaaaaaagaggaaccacaattatcacaagaattacaaacatacaatcagttaatgtctccaaaagcggaattgttgactctacaaaaaacattgaaacaataccctatgattaaattgcatgatggaatggaaaccttacctaaatatttagctgaatatttaatcaacaacaccaacacaaaaatcgaatataatacttctatacaagatatagatgcagtgacagggaaaatcaatggtgaatcatatgatcatatccgatccactattaatacccatgatttagcaaaaacattaccaacaacagatccattagtacctgaattgaaatccatagaatacgtcagtatctttttaaccaatgtttattcaagatcgtcaaatttgatacctaaaggtaaaccagggtttggatttttatcaccacgatatggaaatgtttggaaaaatcctgatgcattattaggaacaatttatgattctgatattgaaaataatgtcgaaggactctttgttgatactaaacctgttcataatccaaataataaaatcaccattatgatgggtggtcattattatacaaattggacaattccttcgaattcagtgaatttgaaaattgttaaagatgtattgacatcaaaattaaaagttgatttatcaaaattcaatctaaaagtgattaaagatggtgaaccattacaaatagatgaaattaatgacaatgatcttgtgatttcatataatttccattcaaattgtattccccaatataatttgggttatcaagaaacaaaagataaagtaaatcaattactcgataaaggttataagctttcatttggaggaacggtgtttgctgatggtgttggtgttcctgattgtgtgttgaatgggttcaaagatgccttaaaattgaaatag

SEQ ID NO: 63774 - protein, 531 aa, Candida albicans SC5314
  misc_feature (143)..(143): The Xaa at location 143 stands for Ala, Pro, Ser, or Thr.
MTLTTLPQNARVAVLGAGISGLTFTYFLSKLRPDLQFTIFEKSKRPGGWMSSPKLHVNNTNESILFEKGPRTLRGVKDGTLLMLDILRKLDLDSQIEVINEKCNANKKYILDSSGEIIQVPNSIGTTIEFLKNVKCVDRKLIXGIIKEPFVKPIKEDETIEQFFKRRLGSTVLTDNVASSIIHGIYAGDVGKLSIKSIMSFMKDIENQSGSIVKHIFKSLYSTKKKEEPQLSQELQTYNQLMSPKAELLTLQKTLKQYPMIKLHDGMETLPKYLAEYLINNTNTKIEYNTSIQDIDAVTGKINGESYDHIRSTINTHDLAKTLPTTDPLVPELKSIEYVSIFLTNVYSRSSNLIPKGKPGFGFLSPRYGNVWKNPDALLGTIYDSDIENNVEGLFVDTKPVHNPNNKITIMMGGHYYTNWTIPSNSVNLKIVKDVLTSKLKVDLSKFNLKVIKDGEPLQIDEINDNDLVISYNFHSNCIPQYNLGYQETKDKVNQLLDKGYKLSFGGTVFADGVGVPDCVLNGFKDALKLK

SEQ ID NO: 63775 - DNA, 1596 bp, Candida albicans SC5314
  CDS (1)..(1596): transl_table=12
atgactttgacaactctacctcaaaatgcaaaagtggcagttttaggagcaggaattctgggattaacattcacatatttcctttctaaactacgcccagatttacaattcacaatatttgaaaaactgaaaagaccaggtggttggatgtcatcacctaaattacacgtcaataataccaatgaatcgattctttttgaaaagggaccaagaactttacgtggagttaaagatgggactttattaatgcttgatattttaagaaaattagatttggattctcaaatagaagtgattaatgaaaaatgtaatgccaataagaaatatatacttgattcttcaggggaaatcattcaagtgcctaattcaattggaacaacaattgaatttcttaaaaatgttaaatgtgtcgatagaaaattaataactgggatattaaaggaaccatttgtgaaaccaataaaagaagatgaaacgattgaacaatttttcaaaagaagattaggtagtaccgtacttacagataatgttgccagttctattattcatgggatatatgctggagatgtcgggaaattgagtattaaaagtattatgtcatttatgaaagatattgaaaatcaatcaggttcaatagtgaaacatattttcaaatccctatattcaaacaagaaaaaagaggaaccacaattatcacaggaattacaaatatacaatcagttaatgtctccaaaagcggaattgttgactctacaaaaaacattgaaacaataccctatgattaaattgcatgatggaatggaaaccttacctaaatatttagctgaatatttaatcaataacaccaacacaaagatcaaatataatacttctatacaagatatagatgctgtgacagggaaaatcaatggtgaatcatatgatcatatccgatccactattaatacccatgacttagcaaaaacattaccaacaacagatccattagtacctgaattgaaatccatagaatacgtcagtatctttttaaccaatgtttattcaagatcgtcaaatttgatacctaaaggtaaaccagggtttggatttttatcaccacgatatggaaatgtttggaaaaatcctgatgcattattaggaacaatttatgattctgatattgaaaataatgtcgaaggactctttgttgatactaaacctgttcataatccaaataataaaatcaccattatgatgggtggtcattattatacaaattggacaattccttcgaattcagtgaatttgaaaattgttaaagatgtattgacatcaaaattaaaagttgatttatcaaaattcaatctaaaagtgattaaagatggtgaaccattacaaatagatgaaattaatgacaatgatcttgtgatttcatatagtttccattcaaattgtattccccaatataatttgggttatcaagaaacaaaagataaagtaaatcaattactcgataaaggttataagctttcatttggaggaacggtgtttgctgatggtgttggtgttcccgattgtgtgttgaatgggttcaaagatgccttgaaattgaaatag

SEQ ID NO: 63776 - protein, 531 aa, Candida albicans SC5314
MTLTTLPQNAKVAVLGAGISGLTFTYFLSKLRPDLQFTIFEKSKRPGGWMSSPKLHVNNTNESILFEKGPRTLRGVKDGTLLMLDILRKLDLDSQIEVINEKCNANKKYILDSSGEIIQVPNSIGTTIEFLKNVKCVDRKLITGILKEPFVKPIKEDETIEQFFKRRLGSTVLTDNVASSIIHGIYAGDVGKLSIKSIMSFMKDIENQSGSIVKHIFKSLYSNKKKEEPQLSQELQIYNQLMSPKAELLTLQKTLKQYPMIKLHDGMETLPKYLAEYLINNTNTKIKYNTSIQDIDAVTGKINGESYDHIRSTINTHDLAKTLPTTDPLVPELKSIEYVSIFLTNVYSRSSNLIPKGKPGFGFLSPRYGNVWKNPDALLGTIYDSDIENNVEGLFVDTKPVHNPNNKITIMMGGHYYTNWTIPSNSVNLKIVKDVLTSKLKVDLSKFNLKVIKDGEPLQIDEINDNDLVISYSFHSNCIPQYNLGYQETKDKVNQLLDKGYKLSFGGTVFADGVGVPDCVLNGFKDALKLK

SEQ ID NO: 63777 - DNA, 1602 bp, Cryptococcus neoformans var. neoformans B-3501A
  CDS (1)..(1602)
atgtcccccccaccaaaacatataacaatcctcggaggtggcctctcaggcctctcgactgcctaccacctgtcccgtgtccttccggcgagtaccaaaatctccctggtcgagggcacatcaagagttggcgggtggatcgattctcagaaacatgaactggggttcaaggatcaaagggggcaaatgagagagggagtggtgggcatcgagactgggcctaggagtatacggcctagaggaagtagaggagcggcaagcatgctgaagatgttggaagatctcgggctggagaacgatatcatgcctatcccgttctctcatccatctgctcaaaatcgattcttactggactactccacttcgaaactgacggcgctcccctcttcccttacatcttttcttggccgccagccacctcttctcaaaggtcttctctcagcaggtttatctgaacctctcaaaccaaaagcaccaaggaaacatctgactgctgataaagatgagtctgtggatgcattcttccgcagacgatttggcgataatgtggcggacaacctggcctcagctatggttcatggtatctatgctgcctcttcttcgcagctttccctcagatcggcttttccctcactgtgggaagcagagaggaagtatggttctgtggtaattggcatgctgctaggaactaagacagcggcggagaaggctgaggagaagcgagagtgggaagagttgggagaagtaggcaaggagagggaaaaatggagtttgtacggcatcaaaggtggtttgggcacaatgacggacaaactactggacagaatttcgtcccggggtgtggaaatcatcttaggggaacctgtacgcaagattgagctttcctcaaaccagaaaattgctatccacacccacagccactccctttcaacttcccatgtcatctccgccctacctcccagagttcttgctcgcaccctctcttctcctttaccccaccttacacacaatccctccacatgcgttggagttgtcaacgtcgtatatccccttccacccacatccattcactctgcaggcttcggctatcttgttcctcgtccacccaccaacctcaacccgaacccgagcccgaacccctcgggggtcctcggtgtcatcttcgactcaacagctttacccccccaccctcctgagctgggtggacaggtgacgaagctcacattgatgatgggtggtccgtactgggcaaactactccccgcgaatctcacctcccagtgacccggaagaactcttaccactcgccatccaacacctcaataccattttcccgcatcttcgaaacgtcaagcctatcttgacggtctgtaacattcatcataactgtattcctacgtatcttccggggcatggtgctcgtttgcgcgaaatgcatgaggcgattgagagtggagaatggaatgggaagttgagcttggttgggagcggatacggtggagtgggtgtgaatgattgcgtgctttctggggtggacgtcgctaggagattggcgaaggggaaggaagtgacaggattggaagcgtggaaggactgggagtga

SEQ ID NO: 63778 - protein, 533 aa, Cryptococcus neoformans var. neoformans B-3501A
MSPPPKHITILGGGLSGLSTAYHLSRVLPASTKISLVEGTSRVGGWIDSQKHELGFKDQRGQMREGVVGIETGPRSIRPRGSRGAASMLKMLEDLGLENDIMPIPFSHPSAQNRFLLDYSTSKLTALPSSLTSFLGRQPPLLKGLLSAGLSEPLKPKAPRKHLTADKDESVDAFFRRRFGDNVADNLASAMVHGIYAASSSQLSLRSAFPSLWEAERKYGSVVIGMLLGTKTAAEKAEEKREWEELGEVGKEREKWSLYGIKGGLGTMTDKLLDRISSRGVEIILGEPVRKIELSSNQKIAIHTHSHSLSTSHVISALPPRVLARTLSSPLPHLTHNPSTCVGVVNVVYPLPPTSIHSAGFGYLVPRPPTNLNPNPSPNPSGVLGVIFDSTALPPHPPELGGQVTKLTLMMGGPYWANYSPRISPPSDPEELLPLAIQHLNTIFPHLRNVKPILTVCNIHHNCIPTYLPGHGARLREMHEAIESGEWNGKLSLVGSGYGGVGVNDCVLSGVDVARRLAKGKEVTGLEAWKDWE

SEQ ID NO: 63779 - DNA, 1404 bp, Tribolium castaneum
  CDS (1)..(1404)
atgagcaaagtgatcctcggcgggggcttgggtggcctgtctgctgcctactacttgaagaagttttcgcctaaccaagctgttactttaattgagtcttcgtcacgtaccgggggctggatcaagtcaagtgtgcaagaaaatggggctatttttgaacaagggcctcgtaccatacgtccccggggggatgcaggcgctaatactttacaactgattgaagaactaaatttaagcgatcaaatcgtccctataacttcgggacaccctgctgctaaaaatcggctcatttacgccaacggttctttgcatttgttgccgtcgtctttgactggtttgtttaggaaacaagagccgttttcaaagcctttgattcttcacttgttgaatgatttgaaagcgaggaggaaggaagtgaaggatgagtcaatttatgattttatcggtcgcagatttggtagtgaagtggctgattatttgatcagtccgttgatttgtggcatttgtgccggaaacgccaaggaaattagtgtgaagtttttaatgaaacagttgtttgaatacgaacaaaaacatggaagtgtatcaaaggggctccttacaagtttgtttgcaaagtcaaaacgaccaactgttctgtgtgaaactgccctcagagctagaagtgagaaatggaatatttattcctttaaaaatgggtgtgaaacgttacccatagccttaagaaataatattgtttcaaatggggttaatattaaatttaataccgaatgtacggaaattataacggacaagggccaagtaatactaaatttatttaataacgaaacaattaagtgtgatcacttagtaggtgcaatacctgcaaacgttttaggacgtcttttacaaaaacagcacccggaacttgcccagtgtttgaaaaaactgacaaaaaacgtgtcagtggctgttgttaatttactttttaaggagaattttattaaaaatccagcctttggtttattggttgttcctaaagaacaacttcctgtgctaggtgttatttacgatagttgttgtttccctgtcgaaaactgtggaacggttttaaccgtaatgatgggtggttactggtttgaggaacattttggcacaaatccgcaagaaaatgtgttgctggatgttgccgtaaaacacgtgaaacgtatcttaaattgtgatcacgatccgtttaattataaagtgaatattttaaagcagtgtttgcctcaatatgttgtgggtcatgacgaaaatttggacctgattaatggttacataaggacgcataaattaccaatttctttgtgcggtgcctcttattacggtgtggggattaatgatgtaattttgtcggcgaaaaatgccgtaaaggatttgtaa

SEQ ID NO: 63780 - protein, 467 aa, Tribolium castaneum
MSKVILGGGLGGLSAAYYLKKFSPNQAVTLIESSSRTGGWIKSSVQENGAIFEQGPRTIRPRGDAGANTLQLIEELNLSDQIVPITSGHPAAKNRLIYANGSLHLLPSSLTGLFRKQEPFSKPLILHLLNDLKARRKEVKDESIYDFIGRRFGSEVADYLISPLICGICAGNAKEISVKFLMKQLFEYEQKHGSVSKGLLTSLFAKSKRPTVLCETALRARSEKWNIYSFKNGCETLPIALRNNIVSNGVNIKFNTECTEIITDKGQVILNLFNNETIKCDHLVGAIPANVLGRLLQKQHPELAQCLKKLTKNVSVAVVNLLFKENFIKNPAFGLLVVPKEQLPVLGVIYDSCCFPVENCGTVLTVMMGGYWFEEHFGTNPQENVLLDVAVKHVKRILNCDHDPFNYKVNILKQCLPQYVVGHDENLDLINGYIRTHKLPISLCGASYYGVGINDVILSAKNAVKDL

SEQ ID NO: 63781 - DNA, 1374 bp, Candidatus Protochlamydia amoebophila UWE25
  CDS (1)..(1374): transl_table=11
gtggttaaacatatcgtgatcttaggtgctggaattagcggacttgcaacagcatggtttttgaaaaaactattaggatcttccgttcaacttactttgttagaagcaaattcaagagccggaggatggattcaaacgattcattctcaagattttttgtttgagacaggtccacgcagttgccgttcgaaaggctctggaagagaaatgcttcaactcattgaagaattaggattatgtgatgaaatcattggggcacattcttctgcgaaccttcgttttctttattttcaaaaaaaattacagcctttacccagttccttttttcatattctttttaaccctcttgttaaaggatggctcaaagcggtttatcgggatttaaattctccaaggtcgttaaaagaagatgaatctatagaagaattttttagccgacgtattggaaaagaatggacctcccgtttaattgatccatttgtttcaggaatttatgctggagattgcaaaaaattatccatgaaaagctgttttcctcttttttggaagtgggaacaagaaaacggatctttaattaaagggatatggaatcaaaaaaaagaaaaaaaatcctctagcgcttttgtttcatattggatgaaacaacctcttttttcctttaagcaaggaatgggatatttaatacaatctttcgtgcatcaattagatgctaatattcatttttcttctactgtgaaaacgattgaaatggaaaaagagggggccacagttgttttagataacggaaaagtttttaaagctgatcatttgatttctactttgccagcttcaaaattggctcctttacttggttcagagtttagtgaaacggcttcactgctacagtctatggaatcaacctctgtgatggttgtcaattgtggttatcgtcgacctgttttaaaaaaatctggctttggttatttaattccctttcaagaaaaagaatcaattttgggatgtgtatgggattcagcagtgtttcctaagcaaaatttttctcctgaacacactcgcttaacagttatgatggggggaactcagcaccctcagatagatgataggcaaaaaggattagcccttgcattatcttctatcgaaaggcatttggcgattgattctgtgccagatgaagtttatgtttctttagccaaacaggcgatccctcaatatcaaattggacattacctaactttaatcaatttatctcaatccttatctctttatccccaattcacttttacaggtcattcttttgacggggtttctgtgaatgatagagttttgcaagcccgtttattagccgttaaaattgcaaaaggttttaacatttag

SEQ ID NO: 63782 - protein, 457 aa, Candidatus Protochlamydia amoebophila UWE25
MVKHIVILGAGISGLATAWFLKKLLGSSVQLTLLEANSRAGGWIQTIHSQDFLFETGPRSCRSKGSGREMLQLIEELGLCDEIIGAHSSANLRFLYFQKKLQPLPSSFFHILFNPLVKGWLKAVYRDLNSPRSLKEDESIEEFFSRRIGKEWTSRLIDPFVSGIYAGDCKKLSMKSCFPLFWKWEQENGSLIKGIWNQKKEKKSSSAFVSYWMKQPLFSFKQGMGYLIQSFVHQLDANIHFSSTVKTIEMEKEGATVVLDNGKVFKADHLISTLPASKLAPLLGSEFSETASLLQSMESTSVMVVNCGYRRPVLKKSGFGYLIPFQEKESILGCVWDSAVFPKQNFSPEHTRLTVMMGGTQHPQIDDRQKGLALALSSIERHLAIDSVPDEVYVSLAKQAIPQYQIGHYLTLINLSQSLSLYPQFTFTGHSFDGVSVNDRVLQARLLAVKIAKGFNI

SEQ ID NO: 63783 - DNA, 1401 bp, Staphylococcus aureus subsp. aureus MRSA252
  CDS (1)..(1401): transl_table=11
gtgactaaatcagtggctattataggagcggggataacaggtttatcaagtgcatattttttaaaacagcaagatcctaatattgatgtaaccatctttgaagcatcgaatcgtccgggggggaagattcaatcgtatcgtaaagatggttatatgattgaactagggcctgaatcttatttaggtagaaaaacgattatgacagaattagcgaaagatattggattagaacaagatattgttacaaatacgactggacaatcttatatttttgcgaaaaacaaattgtatcctattccaggtggatcaattatgggaattccgacagatatcaaaccgtttgtgacaactaaattaatttcaccatttggaaagttaagagcagggtttgatttatttaaaaaacctactcaaatgcagaatggtgacatttctgttggtgcatttttcagagcaagattaggtaatgaggtacttgagaatttaattgagcctttaatgggtggtatttatggtaccgatattgataaattaagtttgatgagtacgtttcctaattttaaagaaaaagaagaggcattcggaagtctgataaaaggtatgaaggatgagaaaaataagcgtctgaaacaaagacaattatatcctggcgcaccaaaaggacaattcaaacaatttaagcatggtttaagttcatttattgaagcattagaacaagatgtgaaaaataaaggtgtgacaatacgttacaatacgtcagtggatgatattattacatctcaaaagcaatataaaattgtttacagtaatcaacaagaagatgtattcgatggggtattagtgacaacaccgcatcaagtttttttgaattggttcggacaagatccagcatttgattattttaaaacgatggatagtacgactgttgcaactgttgtattggcatttgatgaaaaagacattgaaaatacttatgatggtactggcttcgtgattgcgagaacgagtgatactgacattaccgcatgtacttggacatcgaaaaaatggccatttactacaccagaaggtaaggttttgattcgtgcgtatgtaggtaaaccaggtgatactgtggttgatgatcatacagatgatgaattagtatcgattgtacgtagagatttaagtcaaatgatgacatttaaaggcgatcctgaatttacaattgtcaatcgtttgccgaaaagtatgccacagtaccatgttggtcacattcaacaaattaggcagattcaagcacatattaaacaaacatatccacgacttagagtaactggtgcatcttttgaagcggttggactacctgattgtattacacaaggtaaagttgctgctgaagaagtaatcgcagagttgtaa

SEQ ID NO: 63784 - protein, 466 aa, Staphylococcus aureus subsp. aureus MRSA252
MTKSVAIIGAGITGLSSAYFLKQQDPNIDVTIFEASNRPGGKIQSYRKDGYMIELGPESYLGRKTIMTELAKDIGLEQDIVTNTTGQSYIFAKNKLYPIPGGSIMGIPTDIKPFVTTKLISPFGKLRAGFDLFKKPTQMQNGDISVGAFFRARLGNEVLENLIEPLMGGIYGTDIDKLSLMSTFPNFKEKEEAFGSLIKGMKDEKNKRLKQRQLYPGAPKGQFKQFKHGLSSFIEALEQDVKNKGVTIRYNTSVDDIITSQKQYKIVYSNQQEDVFDGVLVTTPHQVFLNWFGQDPAFDYFKTMDSTTVATVVLAFDEKDIENTYDGTGFVIARTSDTDITACTWTSKKWPFTTPEGKVLIRAYVGKPGDTVVDDHTDDELVSIVRRDLSQMMTFKGDPEFTIVNRLPKSMPQYHVGHIQQIRQIQAHIKQTYPRLRVTGASFEAVGLPDCITQGKVAAEEVIAEL

SEQ ID NO: 63785 - DNA, 1413 bp, Bacillus licheniformis ATCC 14580
  CDS (1)..(1413): transl_table=11
atgagtggagaacgcaggcagattgtcatcatcggcggcggtattaccgggttggccgccgccttctacttggagaaggaaatcaaaaagaatgatctcccggccgaagtcacgcttgttgaagcaagcccgagactgggcggaaagatgcagacggtacacaaagacggctatgtgattgaacggggtccggattcatttttggaacggaaacaaagcgcacctcagctcgtgaaggatctcggactggagcatttgcttgtgaacaatgcgactggccagtcttatgtgcttgtcagcgaaacgctctatccgattccggaaggagccgtgatgggggtgccgacaaaaatcggtccttttctgacaaccggcttgttttccttgccggggaagttgagagccggaatggatttggtgcttccagcaagcaagccgcaggaagaccaatcgctcggagaatttttcagaaggcgcgtcggcggtgaagtggtggagaacctgatcgaaccgcttttgtcaggcatttatgccggggacatcgaccgtctcagtctgatgtcgactttcccgcagttctatcagacagagcagaagtacagaagcttgatcatcgggatgaaaaaatcgcgcggcgcccagagcgtcggaaagcctgcaaacaaaaagaaaggccagttccagacggtgaaaaccggcctgcagacgatagttgaagaattggaaaagcagctcggcatcacaaaggtttataaaggcacaaaggtcgtcagcattgagcgtgcgggctcggcttacagcatgaagcttgacaacggcaaggtgcttcacgccgattcggccgtggtcaccgctcctcataaagcagctgccgcgatgtttcaaaaagaggattggctgaagggtttagaggatatggtgtcaacatctgtcgccaatgtggcgctcggatttccggaagaagccgtccaaatggagcatcaaggcacgggctttgtcatttcaagaaacagcgatttttccattacggcgtgtacctggacaaacaaaaaatggccgagcacaacgcctgaaggaaaagtcctgctaagggcttatgtagggaaagccggcgatgagtccgttgtcgaacagtctgataacgaaatggtgaaaatcgtcctcgacgatttaaaacggattatgaagatcgacggcgaaccggaaatgacctgcatcacaagatggcatgaagcgatgccgcaataccatgtcggccataagaaaagaattaaagaaatcagggaaggcttggaagcgtcctatccgggtgttttcattacgggggcctcatttgaaggggtcggcatccctgattgcatcgaccaaggcaagcaggccgtcgccgatgtactctcgcaccttttcgaataa

SEQ ID NO: 63786 - protein, 470 aa, Bacillus licheniformis ATCC 14580
MSGERRQIVIIGGGITGLAAAFYLEKEIKKNDLPAEVTLVEASPRLGGKMQTVHKDGYVIERGPDSFLERKQSAPQLVKDLGLEHLLVNNATGQSYVLVSETLYPIPEGAVMGVPTKIGPFLTTGLFSLPGKLRAGMDLVLPASKPQEDQSLGEFFRRRVGGEVVENLIEPLLSGIYAGDIDRLSLMSTFPQFYQTEQKYRSLIIGMKKSRGAQSVGKPANKKKGQFQTVKTGLQTIVEELEKQLGITKVYKGTKVVSIERAGSAYSMKLDNGKVLHADSAVVTAPHKAAAAMFQKEDWLKGLEDMVSTSVANVALGFPEEAVQMEHQGTGFVISRNSDFSITACTWTNKKWPSTTPEGKVLLRAYVGKAGDESVVEQSDNEMVKIVLDDLKRIMKIDGEPEMTCITRWHEAMPQYHVGHKKRIKEIREGLEASYPGVFITGASFEGVGIPDCIDQGKQAVADVLSHLFE

SEQ ID NO: 63787 - DNA, 1449 bp, Staphylococcus epidermidis RP62A
  CDS (1)..(1449): transl_table=11
atggcgtattttaataaatttttaagcaattctgaaaggaagcgtggaaaagtgagtaagaaagtggcaattattggagcgggaatcactggtttatctagcgcatatttcattaaaaaacaagacccttctattgaagtaactatcttcgaagcctcaaatagagtaggtggaaagattcaaacatatagatcagatggttacacaattgagttaggccctgagtcttatttaggtcgtaagacaattatgactgatgtggcaaaagatattggattagaaaatgaccttataacaaatactactggccaatcttatatttttgctaaaaataaattatatcctattcctggtggctcaattatgggaattcctacagatattaaaccatttattaaaacaagactcatttcacctattggtaaattaagagcggggcttgatttgtttaaaaaaccgatagaaattgaagatgatatttctgttggtagtttctttagacaacgattaggtaatgaagtattagagaacttaattgaaccactaatgggtggtatttatggcactgatattgatcaattgagcttaatgagtacatttcctaactttaaggaaaaagaggaacaatttggtagtttgattaaaggaatgaaagacgaaaaagaacaacgtattaagaaacgtcaattatatccaggtgctcctaaaggacaattcaaacagtttagacacggattgagttcttttatagaggctcttgttaaagatattgaaagtaaaggtgtccacatacgatataacacgccagtcaaagatatattgatttcgcaaaaagattatgaaattttattagaagatgacagtaaagagaaatttaatggcttacttgtaacaacaccacatcaagtatttctgaactggtttagtcacgatccagcatttgattactttaaaaacatggattctactactgtcgcaacagttgttttggcctttgatgagaaaaatattaccaatacgtacgatggaactggctttgttattgcaagaacaagtcaaacggatattactgcatgtacttggacatcaaagaaatggccatttactactccagaaggtaaagttttaattcgagcatatataggaaaaccaggtgatactgtagtagatgatcacaccgatgaagaaatagtatcaattgttagaaaagacttaagccaaatgatgaccatctcagggaatcctgattttacaattgtaaatcggttacctaagagtatgccccaataccacgtgggtcatattaaaatgattaaagaaattcaacaacatattaaaacaacttatcctagattacgtgttacaggggcaccgtttgaagctgtcggtttaccagactgcatacaacaaggtaagaatgcagttgatgaaatattagaagagttataa

SEQ ID NO: 63788 - protein, 482 aa, Staphylococcus epidermidis RP62A
MAYFNKFLSNSERKRGKVSKKVAIIGAGITGLSSAYFIKKQDPSIEVTIFEASNRVGGKIQTYRSDGYTIELGPESYLGRKTIMTDVAKDIGLENDLITNTTGQSYIFAKNKLYPIPGGSIMGIPTDIKPFIKTRLISPIGKLRAGLDLFKKPIEIEDDISVGSFFRQRLGNEVLENLIEPLMGGIYGTDIDQLSLMSTFPNFKEKEEQFGSLIKGMKDEKEQRIKKRQLYPGAPKGQFKQFRHGLSSFIEALVKDIESKGVHIRYNTPVKDILISQKDYEILLEDDSKEKFNGLLVTTPHQVFLNWFSHDPAFDYFKNMDSTTVATVVLAFDEKNITNTYDGTGFVIARTSQTDITACTWTSKKWPFTTPEGKVLIRAYIGKPGDTVVDDHTDEEIVSIVRKDLSQMMTISGNPDFTIVNRLPKSMPQYHVGHIKMIKEIQQHIKTTYPRLRVTGAPFEAVGLPDCIQQGKNAVDEILEEL

SEQ ID NO: 63789 - DNA, 1386 bp, Carboxydothermus hydrogenoformans Z-2901
  CDS (1)..(1386): transl_table=11
ttgccggattttttagtaataggtgggggtatagccggacttgctgctgcctatgaattattccgcgaaggtcaggattttatcttaatcgaagaaaacgattatttcggtggtaaagttaaaacaatagaacgcgagggttttataatcgaaggtggtcctgactgctttctctcggaaaagccacaggtatttcaaattgcccgggaacttaaatttgaagataaaattatcggtaccaatgatgaatttaaaggtacttatatcctctccggcggaaggcttcacgagctaccggaaggactaatgatgatggtacctaccagaataatcccctttgctttaagcccattgatttcctggccggggaaaatccgcatgggtatggacctgtttattccccggaaaagagatgatgaagatgaaagcctttacagctttgtaacccggcgtcttggccgggaagctttagaaaaaattgccgaacctttaattggtgggattcacgcgggaacccccgaagaaatgagcgttaaggcaagttttcctcgctttgtagagatggaaaagaaatatggaagccttatccggggaatgctggcggcgaaaaaagcttcctcaaatagacctaaaactaagtcgaataccacttactttatgagctttcaaaagggtatgggagaacttgccgagaatattgttaaaaatcttcccgactacaaactttttaccggcaaaaaagccgttaaggttacctatcaaaagggaaaataccggacctatttaactgatggggaaataattgaaagtaagcacgttatcctggcagtgcccgcttataatgcggctgaacttttggaagagataaataaagatctggccgaacttttagcccaaaccggctttgcctcttccgctacaatcactttagcctatagaaaagaagactggccttttaaagtaaatacctttggctttgtagttcccaggatagaaaaacgacatttaatggccttaacttatagttctgtaaagtggagctaccgggtacccgatgatagctatcttttagtccggggttttttagggggagctaccaaccagaacgatgtctttttaccggaaaaagagatggtcgaactggttttagcggaaataaaagatatcctcggcgttacagctaaaccccttttttacgaaattttccgctggcccagggggatggcccagtataaggttggtcatttagagagacttgccaaaatcgaggagttggtttttgaaatgccgggacttgctttagccggtagctcctaccggggaatcggagttcccgattgcattaaaagcggccgggaggcggtaagaaatcttttaaataagtaa

SEQ ID NO: 63790 - protein, 461 aa, Carboxydothermus hydrogenoformans Z-2901
MPDFLVIGGGIAGLAAAYELFREGQDFILIEENDYFGGKVKTIEREGFIIEGGPDCFLSEKPQVFQIARELKFEDKIIGTNDEFKGTYILSGGRLHELPEGLMMMVPTRIIPFALSPLISWPGKIRMGMDLFIPRKRDDEDESLYSFVTRRLGREALEKIAEPLIGGIHAGTPEEMSVKASFPRFVEMEKKYGSLIRGMLAAKKASSNRPKTKSNTTYFMSFQKGMGELAENIVKNLPDYKLFTGKKAVKVTYQKGKYRTYLTDGEIIESKHVILAVPAYNAAELLEEINKDLAELLAQTGFASSATITLAYRKEDWPFKVNTFGFVVPRIEKRHLMALTYSSVKWSYRVPDDSYLLVRGFLGGATNQNDVFLPEKEMVELVLAEIKDILGVTAKPLFYEIFRWPRGMAQYKVGHLERLAKIEELVFEMPGLALAGSSYRGIGVPDCIKSGREAVRNLLNK

SEQ ID NO: 63791 - DNA, 1794 bp, Aspergillus oryzae
  CDS (1)..(1794)
atgagactaccatgtgtccctagctgtgcactaaggggggtgcgcacgccattggcgttcgcccgcatcggccagagatactcctcaacgtacgatgccgccgtcattggcggtggcatcaccggtctcacagcagcgtatcggctatcgcaggaccccaattgctccaagatcacactatacgagaaggctcctcgtgtagggggctggctactgtcagaaaagattccggtcgaaggtggaaacgtcgtttttgagtatggcccgcggaccttgcggaccgcagtcccctcgtgcctaccccttctcgatctgctcgtcgagttaggtctacatgatgacgttctcttaaccagcagctcatcgcctgctgcgcgcaatcgttatatctactatcccgaccatctcgtccgtatgcccgcacccgaccccaatgccggaccgatagaaaatattacaaatccgctatttgctatgttacgtgagccggtcttcgagggcctaattgcgagtgctctcttggagccagtccgcgctcctccggaccacaaaacatttaactccgacgaatccgttgcggacttcgtgtcgcgccgattgtgcccggaggtagcagacaacctcgtttcagctttgttccatggtatctatgcgggcgacataagtcggttaagcgcgcagacactgctgggtaccttccgggaccttgaaaatgatgaccgccgagttatcggaggctacattaattctctgatgtcggatgtcaagcttatggccatggatgacctgttggccttggaatctgtcgcacatgagaaacctgggatgtactggaaaagcttacggacgctcgtcaacaagactagcgttttgacgttgaaagacggtctgagccagctctcggacgccctggtcgacgctttgaagaaatccaagaaggttgacgtgttggcaaatacggacgttaagtccattactcagaacccgatgactgacgatcttattgttggatctggacaggacaggtctcgaatccacaaccgcgtgattgctacaattccagctcccgaactggcaaacaagctcgcgactacgacagtcaaagaccagaaagtacctcaaagtactattcggaaccttcaagagcacaattatgctgtaacagtcatggttgtcaacttgtatttccctaacccagacctcctcccggtcagcggctttggatatctcataccgcgatcgatcccttatgagcagaatcccgagagggcattaggggttatatttggatctgattctagcgtgggtcaagatactgcacccggcactaagcttacagtgatgatgggtggccattggtgggatgggtggaaagagtccgattatcccgaccatgacacagctgttgcaatgtctcgtgcgttgcttcaccggcatctgggcattacggatgcgcccactctaacgagcagccggctgcagcggaatgccattcctcaatacactgtgggacacttgtctcgcatgcgcgaactgtctcggtccacacggcacgagcttaacaatagacttactctggcaggaagttggtataatggtgttggtgtgacggactgtatccgacaggggtatttagcggcgtcgttcggcgtcggtgctcgaaagctgggccccggtgacggcgatcgcccctggaggaggttcgactatgaaaaatgggagttggagggcggcatcgtcacatctcctgtacgatgggctgaggtgtacaggaccgagcgcaaacatttttga

SEQ ID NO: 63792 - protein, 597 aa, Aspergillus oryzae
MRLPCVPSCALRGVRTPLAFARIGQRYSSTYDAAVIGGGITGLTAAYRLSQDPNCSKITLYEKAPRVGGWLLSEKIPVEGGNVVFEYGPRTLRTAVPSCLPLLDLLVELGLHDDVLLTSSSSPAARNRYIYYPDHLVRMPAPDPNAGPIENITNPLFAMLREPVFEGLIASALLEPVRAPPDHKTFNSDESVADFVSRRLCPEVADNLVSALFHGIYAGDISRLSAQTLLGTFRDLENDDRRVIGGYINSLMSDVKLMAMDDLLALESVAHEKPGMYWKSLRTLVNKTSVLTLKDGLSQLSDALVDALKKSKKVDVLANTDVKSITQNPMTDDLIVGSGQDRSRIHNRVIATIPAPELANKLATTTVKDQKVPQSTIRNLQEHNYAVTVMVVNLYFPNPDLLPVSGFGYLIPRSIPYEQNPERALGVIFGSDSSVGQDTAPGTKLTVMMGGHWWDGWKESDYPDHDTAVAMSRALLHRHLGITDAPTLTSSRLQRNAIPQYTVGHLSRMRELSRSTRHELNNRLTLAGSWYNGVGVTDCIRQGYLAASFGVGARKLGPGDGDRPWRRFDYEKWELEGGIVTSPVRWAEVYRTERKHF

SEQ ID NO: 63793 - DNA, 1635 bp, Zea mays
  CDS (1)..(1635)
atgctcgctttgactgcctcagcctcatccgcttcgtcccatccttatcgccacgcctccgcgcacactcgtcgcccccgcctacgtgcggtcctcgcgatggcgggctccgacgacccccgtgcagcgcccgccagatcggtcgccgtcgtcggcgccggggtcagcgggctcgcggcggcgtacaggctcagacagagcggcgtgaacgtaacggtgttcgaagcggccgacagggcgggaggaaagatacggaccaattccgagggcgggtttgtctgggatgaaggagctaacaccatgacagaaggtgaatgggaggccagtagactgattgatgatcttggtctacaagacaaacagcagtatcctaactcccaacacaagcgttacattgtcaaagatggagcaccagcactgattccttcggatcccatttcgctaatgaaaagcagtgttctttcgacaaaatcaaagattgcgttattttttgaaccatttctctacaagaaagctaacacaagaaactctggaaaagtgtctgaggagcacttgagtgagagtgttgggagcttctgtgaacgccactttggaagagaagttgttgactattttgttgatccatttgtagctggaacaagtgcaggagatccagagtcactatctattcgtcatgcattcccagcattgtggaatttggaaagaaagtatggttcagttattgttggtgccatcttgtctaagctagcagctaaaggtgatccagtaaagacaagacatgattcatcagggaaaagaaggaatagacgagtgtcgttttcatttcatggtggaatgcagtcactaataaatgcacttcacaatgaagttggagatgataatgtgaagcttggtacagaagtgttgtcattggcatgtacatttgatggagttcctgcactaggcaggtggtcaatttctgttgattcgaaggatagcggtgacaaggaccttgctagtaaccaaacctttgatgctgttataatgacagctccattgtcaaatgtccggaggatgaagttcaccaaaggtggagctccggttgttcttgactttcttcctaagatggattatctaccactatctctcatggtgactgcttttaagaaggatgatgtcaagaaacctctggaaggatttggggtcttaataccttacaaggaacagcaaaaacatggtctgaaaacccttgggactctcttttcctcaatgatgttcccagatcgagctcctgatgaccaatatttatatacaacatttgttgggggtagccacaatagagatcttgctggagctccaacgtctattctgaaacaacttgtgacctctgaccttaaaaaactcttgggcgtagaggggcaaccaacttttgtcaagcatgtatactggggaaatgcttttcctttgtatggccatgattatagttctgtattggaagctatagaaaagatggagaaaaaccttccagggttcttctacgcaggaaatagcaaggatgggcttgctgttggaagtgttatagcttcaggaagcaaggctgctgaccttgcaatctcatatcttgaatctcacaccaagcataataattcacattga

SEQ ID NO: 63794 - protein, 544 aa, Zea mays
MLALTASASSASSHPYRHASAHTRRPRLRAVLAMAGSDDPRAAPARSVAVVGAGVSGLAAAYRLRQSGVNVTVFEAADRAGGKIRTNSEGGFVWDEGANTMTEGEWEASRLIDDLGLQDKQQYPNSQHKRYIVKDGAPALIPSDPISLMKSSVLSTKSKIALFFEPFLYKKANTRNSGKVSEEHLSESVGSFCERHFGREVVDYFVDPFVAGTSAGDPESLSIRHAFPALWNLERKYGSVIVGAILSKLAAKGDPVKTRHDSSGKRRNRRVSFSFHGGMQSLINALHNEVGDDNVKLGTEVLSLACTFDGVPALGRWSISVDSKDSGDKDLASNQTFDAVIMTAPLSNVRRMKFTKGGAPVVLDFLPKMDYLPLSLMVTAFKKDDVKKPLEGFGVLIPYKEQQKHGLKTLGTLFSSMMFPDRAPDDQYLYTTFVGGSHNRDLAGAPTSILKQLVTSDLKKLLGVEGQPTFVKHVYWGNAFPLYGHDYSSVLEAIEKMEKNLPGFFYAGNSKDGLAVGSVIASGSKAADLAISYLESHTKHNNSH

SEQ ID NO: 63795 - DNA, 1428 bp, Drosophila melanogaster
  CDS (1)..(1428)
atgacgacggccgtgctgggaggcggattgagtggactatccgccggatactacctgttgcggcgattcgggaaaccgctgaccatctacgaggcctcgccccgtgtgggcggatgggtgcggtcggagaatcgcaaggatcgcaacttcatcttcgagagcggaccgcgaaccatacgcccagttggtgagccaggtgccaatacgctagaattggtggaggatctgaagctggaggtgactcccattcgacgcagtcatgtcgcagcacgcaaccgaatgctgtatgccaagggacagctttgcatgctgcccaacagtcccaagggtctcttcggcgtcctgcctcccttcacgaagccgctgtacaaagcggttcttcgcgatctgttcacagcaagcaagaaggccaagctggaggatgagagcatctacagtttcgctgagcggcggtttggtaaggagatagccgactacgccatcagtcccatgatctgcggtatttgcgccggtgacgctcgagaaataagtgtgcgcttcctgatggagggactctttgaaaaggaacagaagtacggaggagtgctcaagggcacactcatttcccgctttgagaagaacaagaccaaggacaccaaggatggactatttgccgaaagacagcccaagctgtatgcgcaggcggtaaaggagaagtgggccatgtacgggctgaaaggcggtctggagaacctacccaaaactatgcgaaagtacttaggtgagcggaatgtgaacgtgcagctaagcaacgaatgccggaacctgaccttcagcagctccggggttcgaatgaacatcaaagatgccgaagtcccggtggagcatgtggtcagctccctgcccgcctacaaactcgcgcccctagtaaagcagcagcatccctcgctgagcgcccaacttttgagcattccgtacgtggatgtgctggtagtgaacatgcagttccccggcaagctactcaaacaagacggatttggattgctagtgccgccagtggaaaagttacctctgctcggcgtcatcttcgacagctgctgcttcgacatgggcgagaacactgtgcttaccgtgatgatgggtggccattggttcgaccagtggttcggtgatcgtccaagccccaagcagattgttgacttagccaccagccatgtgcagaaaatgctgcagatacgcgaggaacccaaattcagtcgagtgcacacgttgcacaagtgcatcccgcagtacactgtgggccacaagcggcgcgttgaagccattcgaaactacatcaagacttacaaactgccactgtctgtctgtggagctgcatacgatggcgtgggcatcaacgatgttatcctatccgcccggcgacaagtggaagccatacccttgtcctaa

SEQ ID NO: 63796 - protein, 475 aa, Drosophila melanogaster
MTTAVLGGGLSGLSAGYYLLRRFGKPLTIYEASPRVGGWVRSENRKDRNFIFESGPRTIRPVGEPGANTLELVEDLKLEVTPIRRSHVAARNRMLYAKGQLCMLPNSPKGLFGVLPPFTKPLYKAVLRDLFTASKKAKLEDESIYSFAERRFGKEIADYAISPMICGICAGDAREISVRFLMEGLFEKEQKYGGVLKGTLISRFEKNKTKDTKDGLFAERQPKLYAQAVKEKWAMYGLKGGLENLPKTMRKYLGERNVNVQLSNECRNLTFSSSGVRMNIKDAEVPVEHVVSSLPAYKLAPLVKQQHPSLSAQLLSIPYVDVLVVNMQFPGKLLKQDGFGLLVPPVEKLPLLGVIFDSCCFDMGENTVLTVMMGGHWFDQWFGDRPSPKQIVDLATSHVQKMLQIREEPKFSRVHTLHKCIPQYTVGHKRRVEAIRNYIKTYKLPLSVCGAAYDGVGINDVILSARRQVEAIPLS

SEQ ID NO: 63797 - DNA, 1473 bp, Schizosaccharomyces pombe
  CDS (1)..(1473)
atgtcaattgcaatttgtggaggaggtatagctggtcttagtacagcattttatcttgctagattgattccaaaatgtactattgatttgtacgaaaaaggtcctcgtttaggtggatggcttcagtcggtcaaaatcccgtgtgcagattctccaacaggaacggttttgtttgagcaaggtcctagaactcttcgtcctgctggggttgctggcttagcaaacttagatttaattagcaagttgggcatcgaagacaagttgttaaggatttcgagcaattctcccagcgcaaaaaaccgatatatttattacccagatcgcttaaatgaaattccttcaagcattttagggagtataaagtcgattatgcagcctgctttgcgtccgatgcctttggctatgatgcttgagccctttcgtaaaagtaagcgagattcgacagatgaaagcgtgggttcatttatgagaagaagatttggtaaaaacgttacggatagagttatgagtgcaatgataaatggtatttatgctggtgatttgaatgatttgtctatgcattctagcatgtttggatttttagcgaagattgaaaaaaagtatggaaacattactttgggattaattagagctcttcttgcacgtgaaatattatctcctgctgagaaagctttgaaagcagcactactcgcagagccaaaaacagcagagctgtcaaacagtatgaaatcgacaagtatgtttgctttcaaggaagggattgagactattacattgtcaatagcagatgaattaaaaaaaatgccgaatgtcaagatacatctaaacaaaccggccaaaactttggttccacataaaactcagtctcttgtagacgtcaatggtcaagcttacgagtatgttgtgtttgcaaactcttctcgcaatttagagaatctaatatcttgtcctaaaatggaaactccgacgtcgagtgtttatgtcgtcaacgtttattataaggaccctaatgttcttccaatccgtggttttgggcttttgattccatcatgcactccaaataatccgaatcatgttcttggtatcgtttttgatagtgagcaaaacaaccctgaaaatggaagcaaggtcactgtcatgatgggagggtctgcttatacaaaaaatacttctttgattccaaccaaccccgaagaagccgttaacaatgctctcaaagctttgcagcatactttaaaaatatccagtaagccaacactcacgaatgcaacattacaacaaaattgcatccctcaatatcgtgttgggcatcaagataatcttaattctttgaaatcttggattgagaaaaatatgggagggcgaattcttctaactggaagttggtataatggtgttagtattggggattgtattatgaatggacattcaacagctcgaaaactagcatcattgatgaattcttcttcttga

SEQ ID NO: 63798 - protein, 490 aa, Schizosaccharomyces pombe
MSIAICGGGIAGLSTAFYLARLIPKCTIDLYEKGPRLGGWLQSVKIPCADSPTGTVLFEQGPRTLRPAGVAGLANLDLISKLGIEDKLLRISSNSPSAKNRYIYYPDRLNEIPSSILGSIKSIMQPALRPMPLAMMLEPFRKSKRDSTDESVGSFMRRRFGKNVTDRVMSAMINGIYAGDLNDLSMHSSMFGFLAKIEKKYGNITLGLIRALLAREILSPAEKALKAALLAEPKTAELSNSMKSTSMFAFKEGIETITLSIADELKKMPNVKIHLNKPAKTLVPHKTQSLVDVNGQAYEYVVFANSSRNLENLISCPKMETPTSSVYVVNVYYKDPNVLPIRGFGLLIPSCTPNNPNHVLGIVFDSEQNNPENGSKVTVMMGGSAYTKNTSLIPTNPEEAVNNALKALQHTLKISSKPTLTNATLQQNCIPQYRVGHQDNLNSLKSWIEKNMGGRILLTGSWYNGVSIGDCIMNGHSTARKLASLMNSSS

SEQ ID NO: 63799 - DNA, 28 bp, Artificial sequence
  primer
atgttattaccattaacaaagctaaaac

SEQ ID NO: 63800 - DNA, 24 bp, Artificial sequence
  primer
ttatttgcttagctgtaaggcgtc

SEQ ID NO: 63801 - protein, 574 aa, Artificial sequence
  consensus sequence
  Variant (2)..(2): Xaa in position 2 is any amino acid
  Variant (4)..(5): Xaa in position 4 to 5 is any amino acid
  Variant (8)..(12): Xaa in position 8 to 12 is any amino acid
  Variant (14)..(20): Xaa in position 14 to 20 is any amino acid
  Variant (21)..(27): Xaa in position 21 to 27 is any or no amino acid
  Variant (29)..(30): Xaa in position 29 to 30 is any amino acid
  Variant (32)..(34): Xaa in position 32 to 34 is any amino acid
  Variant (36)..(36): Xaa in position 36 is any amino acid
  Variant (39)..(50): Xaa in position 39 to 50 is any amino acid
  Variant (51)..(63): Xaa in position 51 to 63 is any or no amino acid
  Variant (65)..(65): Xaa in position 65 is any amino acid
  Variant (68)..(110): Xaa in position 68 to 110 is any amino acid
  Variant (111)..(120): Xaa in position 111 to 120 is any or no amino acid
  Variant (122)..(152): Xaa in position 122 to 152 is any amino acid
  Variant (153)..(169): Xaa in position 153 to 169 is any or no amino acid
  Variant (173)..(175): Xaa in position 173 to 175 is any amino acid
  Variant (177)..(179): Xaa in position 177 to 179 is any amino acid
  Variant (181)..(181): Xaa in position 181 is any amino acid
  Variant (183)..(195): Xaa in position 183 to 195 is any amino acid
  Variant (196)..(196): Xaa in position 196 is any or no amino acid
  Variant (199)..(201): Xaa in position 199 to 201 is any amino acid
  Variant (203)..(206): Xaa in position 203 to 206 is any amino acid
  Variant (208)..(218): Xaa in position 208 to 218 is any amino acid
  Variant (219)..(219): Xaa in position 219 is any or no amino acid
  Variant (221)..(223): Xaa in position 221 to 223 is any amino acid
  Variant (225)..(255): Xaa in position 225 to 255 is any amino acid
  Variant (256)..(286): Xaa in position 256 to 286 is any or no amino acid
  Variant (288)..(376): Xaa in position 288 to 376 is any amino acid
  Variant (377)..(400): Xaa in position 377 to 400 is any or no amino acid
  Variant (404)..(420): Xaa in position 404 to 420 is any amino acid
  Variant (421)..(430): Xaa in position 421 to 430 is any or no amino acid
  Variant (432)..(446): Xaa in position 432 to 446 is any amino acid
  Variant (447)..(463): Xaa in position 447 to 463 is any or no amino acid
  Variant (466)..(507): Xaa in position 466 to 507 is any amino acid
  Variant (508)..(531): Xaa in position 508 to 531 is any or no amino acid
  Variant (535)..(536): Xaa in position 535 to 536 is any amino acid
  Variant (538)..(558): Xaa in position 538 to 558 is any amino acid
  Variant (559)..(561): Xaa in position 559 to 561 is any or no amino acid
  Variant (563)..(566): Xaa in position 563 to 566 is any amino acid
  Variant (567)..(568): Xaa in position 567 to 568 is any or no amino acid
  Variant (570)..(570): Xaa in position 570 is any amino acid
  Variant (572)..(573): Xaa in position 572 to 573 is any amino acid
GXGXXGLXXXXXLXXXXXXXXXXXXXXTXXEXXXRXGGXXXXXXXXXXXXXXXXXXXXXXXXXEXGPXXXXXXXXXXXXXXXXXXXXXXXXXXXXXXXXXXXXXXXXXXXXXXXXXXXXXPXXXXXXXXXXXXXXXXXXXXXXXXXXXXXXXXXXXXXXXXXXXXXXXXDESXXXFXXXRXGXXXXXXXXXXXXXXGIXXXDXXXXSXXXXXXXXXXXXEXXXGXXXXXXXXXXXXXXXXXXXXXXXXXXXXXXXXXXXXXXXXXXXXXXXXXXXXXXXXXXXXXXGXXXXXXXXXXXXXXXXXXXXXXXXXXXXXXXXXXXXXXXXXXXXXXXXXXXXXXXXXXXXXXXXXXXXXXXXXXXXXXXXXXXXXXXXXXXXXXXXXXXXXXXXXXXXXXXXXGFGXXXXXXXXXXXXXXXXXXXXXXXXXXXSXXXXXXXXXXXXXXXXXXXXXXXXXXXXXXXXGGXXXXXXXXXXXXXXXXXXXXXXXXXXXXXXXXXXXXXXXXXXXXXXXXXXXXXXXXXXXXXXXXXXPQYXXGXXXXXXXXXXXXXXXXXXXXXXXXGXXXXXXGXGXXD

SEQ ID NO: 63802 - protein, 12 aa, Artificial sequence
  protein pattern
  Variant (2)..(2): Xaa in position 2 is Ala or Gly
  Variant (4)..(4): Xaa in position 4 is Ile, Leu or Val
  Variant (5)..(5): Xaa in position 5 is Ala, Ser or Thr
  Variant (8)..(10): Xaa in position 8 to 10 is any amino acid
  Variant (11)..(11): Xaa in position 11 is any or no amino acid
GXGXXGLXXXXY

SEQ ID NO: 63803 - DNA, 909 bp, Saccharomyces cerevisiae
  CDS (1)..(909)
atgagggaaaaaagaacaatttcaaataaagacacaaactatctcaaattcccaaataaactccaaagatattcccgattcttgagcaggaagatatccaataccagcccagaaaagcaaccgaagaagaacataaaagaacactgtttatcgagttatcataaagaacactcggtaaaaccaaagcaaaactccggtaatgttgcagcaaaagaagacaaagatacgcagcatttacaaaataatgtcgctaatgaagaagcaacggaatgtctaacaagaagtaatttgaaaaagttacaagagaaaattttcgatagagaacttaatgatattgcctgtgatcattgtctttgtagcacagaaaatagaagagatatcaagtattcacgactttggttcctttttgagttggaaatgagtgaaaactggaatgaaaatctccgccttagttgctataataaatatgtgtattccgcaattgatgagtcgtggaaaatggagaatattctacttaaagaacaagagaagcattatgaatattttccaataggacaattactgatacccaataatattgactacactaataaacagaaaaggaaggaaaacattgaagacttaacaattgaaattgatagtattatagagacaaaccatcaaaagaaaagatttttgccgcaaagtgtcctgataaaaagggaggatgaaattgcatttgacgactttcatttggatgcacgaaaggttctaaacgatttgagcgccacttctgaaaatccattcagctcttcaccaaatacaaaaaaaattaaatcaaagggaaaaaccttggaagtggttcccaaaaagaaaaacaaaaagatcataggtgctttggaaagaaagctacatatagatgaaaattaa

SEQ ID NO: 63804 - protein, 302 aa, Saccharomyces cerevisiae
MREKRTISNKDTNYLKFPNKLQRYSRFLSRKISNTSPEKQPKKNIKEHCLSSYHKEHSVKPKQNSGNVAAKEDKDTQHLQNNVANEEATECLTRSNLKKLQEKIFDRELNDIACDHCLCSTENRRDIKYSRLWFLFELEMSENWNENLRLSCYNKYVYSAIDESWKMENILLKEQEKHYEYFPIGQLLIPNNIDYTNKQKRKENIEDLTIEIDSIIETNHQKKRFLPQSVLIKREDEIAFDDFHLDARKVLNDLSATSENPFSSSPNTKKIKSKGKTLEVVPKKKNKKIIGALERKLHIDEN

SEQ ID NO: 63805 - DNA, 27 bp, Artificial sequence
  primer
atgagggaaaaaagaacaatttcaaat

SEQ ID NO: 63806 - DNA, 28 bp, Artificial sequence
  primer
ttaattttcatctatatgtagctttctt

SEQ ID NO: 63807 - DNA, 1536 bp, Saccharomyces cerevisiae
  CDS (1)..(1536)
atggctttccaacaaggtgtattgtcaaggtgttccggtgtctttagacaccatgtgggacattctcgccatatcaataatattctttatagacatgccatcgcgtttgcatccatcgctccacgaataccaaaatctagcttccatacttctgcaatcagaaacaacgaagcattcaaggacccgtacgatactttaggcttgaagaaatctgctacaggtgcggaaatcaaaaaagcatactacaaactggcaaagaagtaccacccggatatcaacaaggaaccggatgctgagaagaaattccacgatttacagaacgcttatgaaattctgtcagacgaaacgaagaggcagcagtacgatcaatttgggcccgctgccttcggcggcggcggtgccgctggaggtgccggtggtggtagtggctctccctttggttcccaatttcatgatttctcaggattcaccagtgcaggcggctcgccatttggcggtatcaattttgaagacctgtttggtgctgcatttggtggtggtggccgcggtagcggtggcgcaagcaggtcgtcatctatgttcagacaatataggggcgacccaatcgagattgtccataaagtgtctttcaaggacgcagtgtttgggtccaagaacgttcagttaagattctctgcgctggacccttgtagtacctgttcagggacgggaatgaaaccaaacacgcataaggtcagttgtagcacttgtcacggaacaggaaccactgttcacattaggggcggatttcagatgatgtcgacttgtcctacttgcaacggtgaaggtaccatgaaacggcctcaggacaattgtaccaagtgccatggtgagggtgttcaggtcaacagggcaaagacaattacggtggacttgccacatggattacaggacggcgacgtggtcaggatccctggccaaggctcataccctgacatcgctgtagaggcggacttgaaagattcagtcaagttatcaagaggtgatattttggtgagaattcgtgtcgacaaggatcccaacttttcgataaagaacaagtacgatatttggtacgacaaggagattcctataaccacagctgcacttggtggtactgtcactatccccactgtggagggacaaaagatcaggataaaggtcgctccagggactcaatacaatcaagtgatatccattcctaacatgggtgttcctaaaacatcaaccattcgcggtgatatgaaagtccagtacaagatcgttgttaagaaaccgcaatcgctggcagaaaaatgcttgtgggaggcactggcagatgtcaccaacgatgacatggccaagaaaaccatgcaaccgggcacagccgcgggtacagccattaatgaagagatactgaagaaacaaaaacaagaagaggaaaaacacgcaaaaaaggatgacgacaacactttgaagagactagaaaatttcattaccaacacattcaggaagatcaaaggtgacaaaaaaaattaa

SEQ ID NO: 63808 - protein, 511 aa, Saccharomyces cerevisiae
MAFQQGVLSRCSGVFRHHVGHSRHINNILYRHAIAFASIAPRIPKSSFHTSAIRNNEAFKDPYDTLGLKKSATGAEIKKAYYKLAKKYHPDINKEPDAEKKFHDLQNAYEILSDETKRQQYDQFGPAAFGGGGAAGGAGGGSGSPFGSQFHDFSGFTSAGGSPFGGINFEDLFGAAFGGGGRGSGGASRSSSMFRQYRGDPIEIVHKVSFKDAVFGSKNVQLRFSALDPCSTCSGTGMKPNTHKVSCSTCHGTGTTVHIRGGFQMMSTCPTCNGEGTMKRPQDNCTKCHGEGVQVNRAKTITVDLPHGLQDGDVVRIPGQGSYPDIAVEADLKDSVKLSRGDILVRIRVDKDPNFSIKNKYDIWYDKEIPITTAALGGTVTIPTVEGQKIRIKVAPGTQYNQVISIPNMGVPKTSTIRGDMKVQYKIVVKKPQSLAEKCLWEALADVTNDDMAKKTMQPGTAAGTAINEEILKKQKQEEEKHAKKDDDNTLKRLENFITNTFRKIKGDKKN

SEQ ID NO: 63809 - DNA, 1263 bp, Oryza sativa (japonica cultivar-group)
  CDS (1)..(1263)
atgtacggacgcatgccaaagaagagtaacaataccaagtattatgaggtgcttggtgtatctaagacagcaacccaggatgagctgaagaaagcgtaccgtaaagctgccattaaaaaccaccctgataagggtggagaccctgagaagtttaaagaattggctcaagcttacgaggttcttaatgatcctgaaaagagggaaatctatgaccaatatggcgaggatgcactcaaagaaggaatgggaggaggcagcagcagtgatttccatagtcccttcgatttatttgagcaaatttttcagaatcgtggtggctttgggggtagaggacacagacaaaagcgtggcgaagatgtggtacatactatgaaggtttctttagaagacctgtataatggtactaccaaaaaactgtctttgtcacggaatgctctgtgcacaaagtgcaagggtaaaggatccaagagtggggcagcagcaacttgccatggttgtcatggtgcaggaatgagaacaataacaagacaaattgggcttggcatgatccaacagatgaacactgtttgccctgaatgcagaggatcaggtgagatgataagtgacaaggataaatgcccgagttgtaagggaaacaaagtagtccagcagaagaaggtcttggaggttcatgttgagaagggaatgcaacatggccaaaagattgtattccagggtgaagctgatgaagctcctgatacagtgacaggagacatagtttttgtcttgcaacttaaagaccacccaaaatttaagaggaagtttgatgacctctttactgagcacacaatctccctgaccgaggctctgtgtggcttccagtttgttctaacccatcttgatggtcggcaactcctaatcaaatctaatccaggggaggttataaaacctggtcaacacaaggccatcaatgatgaaggcatgccccagcatggccgccctttcatgaaaggtcgtctttttgttgaattcaacgtggagtttcctgagcctggtgcactcactcctggccaatgccgatcgcttgagaagattttgccaccacgacccaggaatcaattgtcagacatggagctagatcaatgtgaggagaccaccatgcatgatgtcaacatagaagaggagatgaggcgcaggcagcagcacaggcggcaggaagcatatgatgaagacgacgacgaggatgctggagctggaccaagggtacagtgtgcccagcagtaa

SEQ ID NO: 63810 - protein, 420 aa, Oryza sativa (japonica cultivar-group)
MYGRMPKKSNNTKYYEVLGVSKTATQDELKKAYRKAAIKNHPDKGGDPEKFKELAQAYEVLNDPEKREIYDQYGEDALKEGMGGGSSSDFHSPFDLFEQIFQNRGGFGGRGHRQKRGEDVVHTMKVSLEDLYNGTTKKLSLSRNALCTKCKGKGSKSGAAATCHGCHGAGMRTITRQIGLGMIQQMNTVCPECRGSGEMISDKDKCPSCKGNKVVQQKKVLEVHVEKGMQHGQKIVFQGEADEAPDTVTGDIVFVLQLKDHPKFKRKFDDLFTEHTISLTEALCGFQFVLTHLDGRQLLIKSNPGEVIKPGQHKAINDEGMPQHGRPFMKGRLFVEFNVEFPEPGALTPGQCRSLEKILPPRPRNQLSDMELDQCEETTMHDVNIEEEMRRRQQHRRQEAYDEDDDEDAGAGPRVQCAQQ

SEQ ID NO: 63811 - DNA, 1464 bp, Oryza sativa (japonica cultivar-group)
  CDS (1)..(1464)
atggcgttcgcgacctccacgctcccattcgcgccatccaacccctcgccgtcctcccgctccgccgcagcggctttctctccccgcggcggggtccacttcgccgccgctaggagcggcctcccgctcgcgtgcgccgcgccgaggcaccgagggaggcctcctccgaggaggcgccgcggagggtgcctggtggtgtgggcgtccgccgactactacgccacgctcggcgtgccgcgctccgcgagcaacaaggacatcaaggccgcctaccggaagcttgcgcgccagtaccatcctgatgtcaataaggaacctggagcaaccgataagttcaaagagataagtgcagcatatgaggtgctatcagatgaaaagaagagggcgctgtatgatcaatatggtgaagctggggttaggagtgcggttggaggctcagctggagcttacacaagtaatccttttgatctatttgagacattctttggagcaagcatgggtggcttttctggtatggaccagggaacatttaggacacgcaggaggagcactgctgttcagggggaagacatcagatatgatgtgaatctggggttctcagaggcaatatttggaacagaaaaggatattatattatctcatttggagacatgcgatgcatgtgctggttctggatcaaagattgggtcgaaaatgagaatatgctccacatgtggtggtcgagggcaagtaatgagaactgagcagacaccatttggtctgttctcccaggtttcaatttgccccacctgtgcaggagagggtgaagtcatttcagagtattgcaagaaatgtgctggagaggggcgtgttcgtgttagaaaggagatcaaagtaaaaattcctccaggtgttagcaaaggtagtactcttcgtgtacgtggtgaaggtgatgcgggaccaaaaggaggacctcctggagatctttttgtttgccttgatatagaggagccagcagatattaaaagggatggtatcaacttgtattcaactgtttcagtaagctacattgaagctattctgggcactgttaaaaaggtcagaactgttgatggaaatagtgaacttagaatacctccaggtacccaacctggtgatgtagtggttctagcaaagcaaggtgttccatcattgaataaaccatctgttcgtggtgatcatctattcactattaaggtcactatacccaaacgtataagcggacgagaaaaggagctacttgaggaactggcttctttgagcaatggtggttttgctggtgcacctgtgaagccaaaatccatacgccaagagaatgaaactactgttgcccaagaaaattcggatcaacctgatgaaggggagggtgactggttgaagaaacttcaagattttgcaggatccattgctaatggtgctgccaagtggctaaaagacaacctttag

SEQ ID NO: 63812 - protein, 487 aa, Oryza sativa (japonica cultivar-group)
MAFATSTLPFAPSNPSPSSRSAAAAFSPRGGVHFAAARSGLPLACAAPRHRGRPPPRRRRGGCLVVWASADYYATLGVPRSASNKDIKAAYRKLARQYHPDVNKEPGATDKFKEISAAYEVLSDEKKRALYDQYGEAGVRSAVGGSAGAYTSNPFDLFETFFGASMGGFSGMDQGTFRTRRRSTAVQGEDIRYDVNLGFSEAIFGTEKDIILSHLETCDACAGSGSKIGSKMRICSTCGGRGQVMRTEQTPFGLFSQVSICPTCAGEGEVISEYCKKCAGEGRVRVRKEIKVKIPPGVSKGSTLRVRGEGDAGPKGGPPGDLFVCLDIEEPADIKRDGINLYSTVSVSYIEAILGTVKKVRTVDGNSELRIPPGTQPGDVVVLAKQGVPSLNKPSVRGDHLFTIKVTIPKRISGREKELLEELASLSNGGFAGAPVKPKSIRQENETTVAQENSDQPDEGEGDWLKKLQDFAGSIANGAAKWLKDNL

SEQ ID NO: 63813 - DNA, 1251 bp, Oryza sativa (japonica cultivar-group)
  CDS (1)..(1251)
atgtttgggcgtgtaccgaggagtaacaacaccaagtactatgaggttcttggagttcctaaaactgcaagcaaggatgagctaaagaaggcataccggaaggctgccataaaaaaccatcctgacaagggaggggatccagaaaagtttaaagaattatcacaagcgtatgaggttctcactgatcctgagaagagagacatatatgaccaatatggggaggatgctcttaaggatggaatgggaggaggcagtgacttccataatccatttgacatatttgagcagtttttcgggggtggtgcctttggggggagtagctcaagagtacgcagacagagacgtggtgaagatgtggcgcatactttgaaggtgtctttagaagatgtgtataatggatctatgaagaaactatcattatcacgaaatattctgtgcccaaagtgcaaaggaaaagggaccaaatctgaggctccagcaacatgctatggttgtcatggtgtaggaatgaggaatataatgcgacagataggactaggcatgattcaacatatgcagactgtctgtcctgaatgcagaggatcaggtgagatcataagtgacagggataaatgcacaaactgcagagctagcaaagttattcaggagaaaaaggtgcttgaggttcatattgagaagggaatgcaacatggccaaaaaattgtattccaaggtgaagctgatgaagctcctgatacagtgacaggagatatagtatttatcttgcaagttaaggtacatccaagatttaagaggaaatatgatgacctgttcattgagcgcacaatctctttaactgaggcattgtgtgggttccaattcatcctcactcatctggacagtaggcagctcctaatcaaggcaaatcctggcgaaattattaaacctggtcaacacaaggccataaatgatgagggaatgccacaccatggccggcctttcatgaagggccgtctctttgtggaattcaatgttgagttccctgaatctggtgtactctcccgtgaccaatgccgggcacttgagatgatcctaccacctaaacctgggcaccaattatcagatatggacctggatcaatgtgaggaaactaccatgcatgatgtgaacatagaagaggagatgaggcgcaagcagtatcaaaggaagcaggaagcgtacgacgaagatgaggaggaggatgctccaagagtacagtgtgctcaacagtaa

SEQ ID NO: 63814 - protein, 416 aa, Oryza sativa (japonica cultivar-group)
MFGRVPRSNNTKYYEVLGVPKTASKDELKKAYRKAAIKNHPDKGGDPEKFKELSQAYEVLTDPEKRDIYDQYGEDALKDGMGGGSDFHNPFDIFEQFFGGGAFGGSSSRVRRQRRGEDVAHTLKVSLEDVYNGSMKKLSLSRNILCPKCKGKGTKSEAPATCYGCHGVGMRNIMRQIGLGMIQHMQTVCPECRGSGEIISDRDKCTNCRASKVIQEKKVLEVHIEKGMQHGQKIVFQGEADEAPDTVTGDIVFILQVKVHPRFKRKYDDLFIERTISLTEALCGFQFILTHLDSRQLLIKANPGEIIKPGQHKAINDEGMPHHGRPFMKGRLFVEFNVEFPESGVLSRDQCRALEMILPPKPGHQLSDMDLDQCEETTMHDVNIEEEMRRKQYQRKQEAYDEDEEEDAPRVQCAQQ

SEQ ID NO: 63815 - DNA, 1329 bp, Oryza sativa (japonica cultivar-group)
  CDS (1)..(1329)
atgcggctccccggcgacgctcgcctcgccctcctcctcgctcgccgccgcgccctcccctcctcctcgcccgccgcgtcggcgtcccccttccacggctcgcgcgcccacggagcgaggtggggcgacgcgtttcgcgccgcggctcccgcgtggaggtcgccgttctcctcgccgactagtgccaggctcttccacgggacgaggccggtggcagcgagggactactacgatgtgctcggcgtgagcaggaacgcgagccagggggagatcaagaaagcgtattacgcgcttgcgaaaaagctccatccggatacaaataaaggtgattctgatgcagagaggaagtttcaagaggttcagcgagcttatgagactttgaaggatgatcagaagagatcattatatgatcaggttggccctgatcagtatgagaaagcttccgctggaggaggacctggtggtgcatatgaagggggttttggcaatccgtttgaggatatttttggtggaggtggcggcggcggtggaatgaatgatttctttagaaacatattcagagagagagaatttagcgggcatgatgccaaggttgcacttgaaatatcatttatggaagcagttcaggggtgcacaaagacgatcaattttcagactgctgttacatgtgacacctgcaagggagctggcgtaccccctggaaccaaacctgaaacttgcctagcctgcaggggttcaggatttatcttcatgcaaactggtcccttcaggatgcaatcaacatgcacacagtgtggtggtagtgggaagactgtgaaggaattctgcaagtcatgcaaaggaaggaaagttgtgccaggaacaaaaaacatccgactcaacatagtgcctggtacggatgatggtgacgttataaagttggttagatcaggtggagcagatccagatggtggtagtcctggtgatctttatgtaactctgaaggttcgtgaggatccggtatttcgaagagagaaaggtgatattcatgtagatgctgtattgaacgtgactcaggcaattttgggcgggacagttcaggttccaactctctctggagatgtagttctaaaggtcaagcctggtactcagcctggccaaaaggtggttctgagaggaaaaggaatcaagacgagaaattcatcgtactatggagatcagtatgtccacttcaatgtcaacatccctgcgaatttgacaccgagacagcgcgtgctgatcgaggaatttgcgaaggaagagcaagctgaagaggagaaagacgcaaaggcagcaggagcatcgggatag

SEQ ID NO: 63816 - protein, 442 aa, Oryza sativa (japonica cultivar-group)
MRLPGDARLALLLARRRALPSSSPAASASPFHGSRAHGARWGDAFRAAAPAWRSPFSSPTSARLFHGTRPVAARDYYDVLGVSRNASQGEIKKAYYALAKKLHPDTNKGDSDAERKFQEVQRAYETLKDDQKRSLYDQVGPDQYEKASAGGGPGGAYEGGFGNPFEDIFGGGGGGGGMNDFFRNIFREREFSGHDAKVALEISFMEAVQGCTKTINFQTAVTCDTCKGAGVPPGTKPETCLACRGSGFIFMQTGPFRMQSTCTQCGGSGKTVKEFCKSCKGRKVVPGTKNIRLNIVPGTDDGDVIKLVRSGGADPDGGSPGDLYVTLKVREDPVFRREKGDIHVDAVLNVTQAILGGTVQVPTLSGDVVLKVKPGTQPGQKVVLRGKGIKTRNSSYYGDQYVHFNVNIPANLTPRQRVLIEEFAKEEQAEEEKDAKAAGASG

SEQ ID NO: 63817 - DNA, 1344 bp, Drosophila melanogaster
  CDS (1)..(1344)
atgatgatttcgtgtaaaaaattattcgtgttccggcagctgccggcggtgcgccgttgcctagcggcagccgcgttctccacgccacgcgcgacctcctaccgaatcctctccagcgccgggagcggaagtacccgggcagacgcaccccaagtgcgccgcctgcacaccacgcgcgacctcctggccaaggactactacgccacgctgggcgttgccaagaacgccaacggcaaggacatcaagaaagcctactaccagctggccaagaagtaccatccggacacgaacaaggaggatccggatgcgggccgcaagttccaggaggtctccgaggcctacgaagtgctcagcgacgagcagaagcgccgtgagtacgacacctatggccagacggcggaaaacattggtcgccagggcggcggattccctggcggaggagccggtggctttggccccgagggtttctcgcagagctggcagttccgctcgagcatcgaccccgaggagctcttccgcaagatcttcggcgagggcaactttcgaacgaactcgttcgacgacttcgccgactccaagttcggattcggccaggcccaggagatggtcatggacctgacctttgcccaggcggcgcgcggcgttaacaaggatgtcaacgtcaacgtggtggaccagtgccccaagtgcgccggcaccaagtgcgagccgggcaccaagccaggtcgctgtcagtactgcaacggcaccggcttcgaaacggtgtccactgggcccttcgtaatgcgctccacttgccgctactgccagggcacgcggcagcacattaagtatccgtgcagcgagtgcgagggcaagggccgcacggtccagcgccgcaaggtcaccgtgccggtgccggctggcattgagaacgggcaaacggtgcgaatgcaggtgggcagcaaggagctgttcgtcacgttccgcgtggagcggagcgactacttccggcgcgagggcgccgatgtgcacacggacgcggccatatccctggcccaggcggtgctgggcggcactgtgcgtgtccagggcgtatacgaggatcagtggatcaacgtggagccgggcacctcgtcgcaccacaagatcatgctgcgcggcaagggtctgaaacgcgtgaatgcccacggacacggcgatcattacgtgcacgtcaagatcacggtgccatcggcaaagaagctggacaagaagcgactggctctgatcgaggcgtacgccgagctggaggaggacacccccgggcagatccacggaatcgcgaatcgcaaagacggcagtaagcaagcaacgagcgagtga

SEQ ID NO: 63818 - protein, 447 aa, Drosophila melanogaster
MMISCKKLFVFRQLPAVRRCLAAAAFSTPRATSYRILSSAGSGSTRADAPQVRRLHTTRDLLAKDYYATLGVAKNANGKDIKKAYYQLAKKYHPDTNKEDPDAGRKFQEVSEAYEVLSDEQKRREYDTYGQTAENIGRQGGGFPGGGAGGFGPEGFSQSWQFRSSIDPEELFRKIFGEGNFRTNSFDDFADSKFGFGQAQEMVMDLTFAQAARGVNKDVNVNVVDQCPKCAGTKCEPGTKPGRCQYCNGTGFETVSTGPFVMRSTCRYCQGTRQHIKYPCSECEGKGRTVQRRKVTVPVPAGIENGQTVRMQVGSKELFVTFRVERSDYFRREGADVHTDAAISLAQAVLGGTVRVQGVYEDQWINVEPGTSSHHKIMLRGKGLKRVNAHGHGDHYVHVKITVPSAKKLDKKRLALIEAYAELEEDTPGQIHGIANRKDGSKQATSE

SEQ ID NO: 63819 - DNA, 1329 bp, Arabidopsis thaliana
  CDS (1)..(1329)
atggctataatacaacttggaagtacatgtgttgctcaatggagtattcgtcctcaatttgcagtcagagcttattatcccagcagaatcgaatcaactcgccatcaaaattccagtagccaagtaaattgtttgggagcttcaaagtcgagtatgttctcacatgggtcattgcccttcttgtccatgacgggaatgtccagaaatatgcatcctcctcgcagaggatctcgcttcactgttagagctgatgcagattactattcggtactcggagtttcgaaaaatgcaaccaaagctgagattaaaagcgcttatcggaagctggctaggaattaccatccggatgtgaacaaggatcctggcgcagaagagaaattcaaagaaataagtaacgcatatgaggttttatcagatgatgaaaagaaatctctttacgataggtatggtgaggccggacttaaaggcgctgctggatttggcaatggggattttagtaatccgttcgatctattcgactcattattcgaaggcttcggtggtgggatgggtagaggttcaagaagcagagctgtggatggtcaagacgagtattacacgctaatcttaaacttcaaagaagcggttttcggaatggagaaagaaatagagatatcccggctcgagagctgtgggacatgtgaaggttcaggtgcaaaacctggaaccaaaccgaccaaatgcaccacgtgtggcggacaaggccaagtggtttcagcagctagaactcctctgggcgtgttccaacaagtcatgacttgctcgtcctgtaatggcactggagagatctcgacgccgtgtggtacttgctctggagacggacgcgtgaggaagacaaaacggataagtctcaaagtaccagccggggttgattcaggtagccggttgagagtgagaggagaaggcaatgccgggaagagaggcggatcaccaggcgatctgtttgttgttatagaagttatcccagacccgattttgaaacgagacgatacaaatattctctacacttgcaagatatcgtatatcgatgcgattttagggacgacactgaaagtaccaacagtggatgggacagtagatttgaaagttccagctgggacacaacctagcacgacgcttgtgatggcgaaaaaaggagttccggtattgaacaagagtaatatgagaggagatcagttggtgagagtacaagtggagatacctaagagattgagcaaagaggagaaaaaacttattgaagagcttgctgatatgagcaagaacaagactgctaatagcaccagtagatga

SEQ ID NO: 63820 - protein, 442 aa, Arabidopsis thaliana
MAIIQLGSTCVAQWSIRPQFAVRAYYPSRIESTRHQNSSSQVNCLGASKSSMFSHGSLPFLSMTGMSRNMHPPRRGSRFTVRADADYYSVLGVSKNATKAEIKSAYRKLARNYHPDVNKDPGAEEKFKEISNAYEVLSDDEKKSLYDRYGEAGLKGAAGFGNGDFSNPFDLFDSLFEGFGGGMGRGSRSRAVDGQDEYYTLILNFKEAVFGMEKEIEISRLESCGTCEGSGAKPGTKPTKCTTCGGQGQVVSAARTPLGVFQQVMTCSSCNGTGEISTPCGTCSGDGRVRKTKRISLKVPAGVDSGSRLRVRGEGNAGKRGGSPGDLFVVIEVIPDPILKRDDTNILYTCKISYIDAILGTTLKVPTVDGTVDLKVPAGTQPSTTLVMAKKGVPVLNKSNMRGDQLVRVQVEIPKRLSKEEKKLIEELADMSKNKTANSTSR

SEQ ID NO: 63821 - DNA, 1344 bp, Arabidopsis thaliana
  CDS (1)..(1344)
atggctcttatacaatttggaagttcatgtgttgctcaatgggggattcttcgtcctcggtttgctgttaaagctttttatccaagcagattggagtctcaccaagacaattgcatcagccaaataaattgtctgggagcttcaaggtcgagtatgtttgcacagggctctttacccttcttgtcattgacgggagtatctcctaatacacattctcgtagaggagctcgcttcactgttagagctgatactgatttctattctgtccttggagtctcgaaaaatgcaaccaaagctgagattaaaagcgcttatcggaagctcgctaggagttatcatccagatgtgaacaaggatgctggggcagaagataaatttaaagaaataagtaatgcatatgagatcttatcagatgatgagaaaagatctctatacgacagatatggcgaggcaggagttaaaggcgctggaatgggaggcatgggggattatagtaatccgtttgatctatttgagtcattattcgaaggaatgggtgggatgggaggaatgggcggtggaatgggtagtagaggttcaaggagcagagctatcgatggtgaagatgagtattactcactaatcttgaatttcaaagaagcggttttcggtattgagaaagaaattgagatatctcggttagagagctgtgggacttgcaatggttctggagctaaagcgggaaccaaaccaaccaaatgcaaaacatgtggcgggcaaggacaggtggtagcatcaacgaggacaccactcggtgtattccaacaagtgatgacttgctctccgtgtaacggaactggggagatatcaaaaccgtgtggtgcatgctcaggagatggacgtgtgagaaggacaaagcggattagtcttaaagttcctgcgggtgtggattctggaagtaggttaagagtgaggggagaagggaatgcaggaaagagaggtggatcaccgggagatctctttgcggttattgaggttattccagatccggttttgaagcgtgatgatacaaatatactttatacgtgtaagatatcgtatgtagatgccatattggggacgactttgaaggtaccaacagtggatggagaggtggatttgaaagtaccggcagggacacaaccaagcacgacattggtgatggctaaaaaaggagttccggttttgaataagagcaagatgagaggtgatcagttagtgagagtgcaagttgagattcctaagagattgagtaaagaagagaagatgcttgttgaggagctggctgatatgagcaagaacaaggtagctaatagcaggagataa

SEQ ID NO: 63822 - protein, 447 aa, Arabidopsis thaliana
MALIQFGSSCVAQWGILRPRFAVKAFYPSRLESHQDNCISQINCLGASRSSMFAQGSLPFLSLTGVSPNTHSRRGARFTVRADTDFYSVLGVSKNATKAEIKSAYRKLARSYHPDVNKDAGAEDKFKEISNAYEILSDDEKRSLYDRYGEAGVKGAGMGGMGDYSNPFDLFESLFEGMGGMGGMGGGMGSRGSRSRAIDGEDEYYSLILNFKEAVFGIEKEIEISRLESCGTCNGSGAKAGTKPTKCKTCGGQGQVVASTRTPLGVFQQVMTCSPCNGTGEISKPCGACSGDGRVRRTKRISLKVPAGVDSGSRLRVRGEGNAGKRGGSPGDLFAVIEVIPDPVLKRDDTNILYTCKISYVDAILGTTLKVPTVDGEVDLKVPAGTQPSTTLVMAKKGVPVLNKSKMRGDQLVRVQVEIPKRLSKEEKMLVEELADMSKNKVANSRR

SEQ ID NO: 63823 - DNA, 1371 bp, Arabidopsis thaliana
  CDS (1)..(1371)
atggtcccttccaatggcgcaaaggttcttcgcttgttgagtcgtcgatgtctctcttcatcgcttattcaagatttagccaatcagaaactgagaggagtatgtattgggagttataggagattgaatacgagtgttggcaatcatgctaacgtgattggagattacgcttcaaaatctggacatgatcggaaatggatcaactttggaggttttaatactaattttggttctacaaggtcttttcatggaacaggttcttcgtttatgtctgctaaggactactatagtgttcttggagtgagtaagaatgctcaagaaggtgaaatcaagaaggcttattatgggcttgctaagaaactccatcctgatatgaataaagatgatccagaagctgagacgaagttccaggaagtctcaaaagcatatgaaattttgaaagataaggagaagcgtgacctttatgaccaggttggtcatgaagcatttgagcaaaatgctagtggtggatttccaaatgatcaaggcttcggtggtggtggtggtggtgggtttaacccatttgatatctttgggagcttcaatggcgatatttttaacatgtaccggcaagatattggaggtcaagatgtcaaggttttgcttgatctttctttcatggaagctgttcaaggatgctccaaaactgtgacttttcaaaccgagatggcttgtaatacttgtggtggacaaggtgttcctcctggtaccaaacgagagaaatgcaaagcctgtaatggctctgggatgacctcactgaggaggggtatgttaagcatccaaacaacttgccagaagtgtggtggagctggtcaaacgttctcaagtatttgcaaatcctgtagaggggctagagtggttcgaggacagaagtcagtgaaagtcactattgatccaggggttgacaatagtgatacattaaaggtggcaagggtgggtggggctgatcctgaaggtgaccagcctggagatctttatgttactctcaaggttcgtgaagatcctgtgttccgcagagaaggatcggatattcatgtggacgcggttctcagtgttacccaggccattcttggaggaaccattcaagttccaaccctcactggtgatgttgtcgtgaaggtccgtcctggaacccaacctggtcacaaagtagtgctaagaaataaaggaattagagcaagaaagtcgactaaatttggggatcagtatgtgcatttcaacgtcagcatccctgcaaatataacgcagagacagcgtgaactgcttgaggaatttagtaaagcagaacaaggtgaatacgagcagcgcacagcaactggatcttcccagtga

SEQ ID NO: 63824 - protein, 456 aa, Arabidopsis thaliana
MVPSNGAKVLRLLSRRCLSSSLIQDLANQKLRGVCIGSYRRLNTSVGNHANVIGDYASKSGHDRKWINFGGFNTNFGSTRSFHGTGSSFMSAKDYYSVLGVSKNAQEGEIKKAYYGLAKKLHPDMNKDDPEAETKFQEVSKAYEILKDKEKRDLYDQVGHEAFEQNASGGFPNDQGFGGGGGGGFNPFDIFGSFNGDIFNMYRQDIGGQDVKVLLDLSFMEAVQGCSKTVTFQTEMACNTCGGQGVPPGTKREKCKACNGSGMTSLRRGMLSIQTTCQKCGGAGQTFSSICKSCRGARVVRGQKSVKVTIDPGVDNSDTLKVARVGGADPEGDQPGDLYVTLKVREDPVFRREGSDIHVDAVLSVTQAILGGTIQVPTLTGDVVVKVRPGTQPGHKVVLRNKGIRARKSTKFGDQYVHFNVSIPANITQRQRELLEEFSKAEQGEYEQRTATGSSQ

SEQ ID NO: 63825 - DNA, 1587 bp, Schizosaccharomyces pombe 972h-
  CDS (1)..(1587)
atgttcagcaagtatttacaatcccgagtttgtggattgcattcttttacaaattcttctgctcagcagctcttttcaaagtcaattgcccattcttccaggcggaatttcgtcataagctcttcttgcaccaaatttcgaaatgtagcaattcaacgaaatgcaaaacgagagttttctcgatgtgctgccttgaaaaacttttcatatcatgcacgatgcttccatgccactagagcagtttgggaaatgactgatccctataaaacgttgggagtatcaaaaagcgcttctgcttctgagataaaatcagcatactataaactggcaaagcaataccatcctgatgcgaaccctgacaaagctgctcaagataaatttgttgaaatcaaacaggcttatgaggtgttgcaggatccgaagaagaaaaaagctttcgatacatatggtgcaggcgcatttaagaatggagagtttactggcggtgattttgaaggattccagaacggatttgctggcgcttcttctttttcttctggttttccaggttttaatttcgaagacttatttggattttcctctcgaggcccccaagctcgtcgtaatacctcttttgatgtatttgttggtgaagacattgaggcaagtattactatcgatttcatggaagcagtgaggggtgcaaaaaaagacttatcctattcagtctcttctacttgctcatcatgtcatggatctggcttgcaacccggttctcataagagcacttgctttgcttgtaaaggtactggtcaacgtcttcatttcattcccccatcttttcacatgcaaactacctgtgactcttgtggtggaactggaacaaccattcctcccaactctgcttgtcgctcttgtatgggatctggtacagttcgagagcgaaaaactgtctcaattgacattcctccaggaattgacgacaatacagttcttcgtgtaatgggtgcaggaaatgatgcgtctactgctaagggaggcccaaatgcgaaatcaaggcccggcgatttgtttgcaactattcatgttcgcaagcatccgttctttgttagagagggtaccaatgttacttataatgcaaaaattcccatgactactgctgcgctaggtggcactcttcgggttcctacacttacaggaaacgtggatcttcgggtttctccaggcacttcgactggagaccgaatcactatggccggaaaaggtattcgcaaggttaacacatctcgctacggaaacttttatgttaattttgaagtcactattccgaaaattctatctccgcatgaaagaagtctccttgaacaactagcagacgcattaaatgatagcacagctcgacggacacaaagtagcccttcaggaacaaactcttctacgtcgacatcttctacttcttccaaacactctacaggaatatctaccgagccaactacaggagaagaaaacaaacaagacggttcggtcggcgggttttttaagcgtgcctttcgtcgtctgcatcctgatgaagatcagaatccaaaaaaggatgaatcctcttcatag

SEQ ID NO: 63826 - protein, 528 aa, Schizosaccharomyces pombe 972h-
MFSKYLQSRVCGLHSFTNSSAQQLFSKSIAHSSRRNFVISSSCTKFRNVAIQRNAKREFSRCAALKNFSYHARCFHATRAVWEMTDPYKTLGVSKSASASEIKSAYYKLAKQYHPDANPDKAAQDKFVEIKQAYEVLQDPKKKKAFDTYGAGAFKNGEFTGGDFEGFQNGFAGASSFSSGFPGFNFEDLFGFSSRGPQARRNTSFDVFVGEDIEASITIDFMEAVRGAKKDLSYSVSSTCSSCHGSGLQPGSHKSTCFACKGTGQRLHFIPPSFHMQTTCDSCGGTGTTIPPNSACRSCMGSGTVRERKTVSIDIPPGIDDNTVLRVMGAGNDASTAKGGPNAKSRPGDLFATIHVRKHPFFVREGTNVTYNAKIPMTTAALGGTLRVPTLTGNVDLRVSPGTSTGDRITMAGKGIRKVNTSRYGNFYVNFEVTIPKILSPHERSLLEQLADALNDSTARRTQSSPSGTNSSTSTSSTSSKHSTGISTEPTTGEENKQDGSVGGFFKRAFRRLHPDEDQNPKKDESSS

SEQ ID NO: 63827 - DNA, 1128 bp, Thermosynechococcus elongatus BP-1
  CDS (1)..(1128): transl_table=11
gtggctatggctcgtgatttctatgagatcctaggtgtctcacggtctgcggatgctgaagaattaaaacgagcctatcggcgcttggctcgcaagtatcaccccgacgtcaacaaagaaccgggcgctgaggaaaagttcaaggaaatcaaccgcgcctacgaggtgctctcggatccccaagcgcgagccaactacgatcgctttggggaagccggcgttagtggggtgggagcggctggctttagtgactttggtattggcgatatgggtggcttcgccgatatttttgaaaccttctttgggggttttaccactagcagtcggcggcagcagggacccactcgaggtgaggatctgcgctatgacctaaaactggaatttcgcgaagccgtttttggtggtgagaaggaaattcgcattaaccatttggaaacctgtaagacctgtcaaggcacaggggcaaaacccggcacacgaccagttacctgtagtacctgtggtggtgttggtcaagtgcggcgatcggcacgaactccctttggcagttttacccagctaaccacctgtccaacctgtggcggttccggtgtggtgattgaagaccgctgtgagtcctgtggcggccaaggccatatccaagtcagcaaaaagctaaaaattacgattcctgctggggtggacaacggcacacggctgcgggtctcaggtgaaggggatgccggtttgcggggagggcctcccggcgatctctatgtctacctttttgttcaacctgatcctgagtttcagcgcgaaggcaacaacatcctgtcgcggattaaaattagctacctgcaagcaattcttggctgtcggatttccgtcagcacggtggatggagaagcagaactgaaaattcccgcgggtacccaacccggcaccgtgttagttctagaaggtcgcggtgttccgcgggtgggcaatcccgtggcgcggggcgatcacctaattaccgttgatgtcgaaattcccacccatatcacccatgaggagcgtgagctgctggagaaattggcaaaaattcgtggcgagcgtctgggcaaaggcggtttagagggcttcctcggcagtctatttggtggttag

SEQ ID NO: 63828 - protein, 375 aa, Thermosynechococcus elongatus BP-1
MAMARDFYEILGVSRSADAEELKRAYRRLARKYHPDVNKEPGAEEKFKEINRAYEVLSDPQARANYDRFGEAGVSGVGAAGFSDFGIGDMGGFADIFETFFGGFTTSSRRQQGPTRGEDLRYDLKLEFREAVFGGEKEIRINHLETCKTCQGTGAKPGTRPVTCSTCGGVGQVRRSARTPFGSFTQLTTCPTCGGSGVVIEDRCESCGGQGHIQVSKKLKITIPAGVDNGTRLRVSGEGDAGLRGGPPGDLYVYLFVQPDPEFQREGNNILSRIKISYLQAILGCRISVSTVDGEAELKIPAGTQPGTVLVLEGRGVPRVGNPVARGDHLITVDVEIPTHITHEERELLEKLAKIRGERLGKGGLEGFLGSLFGG

SEQ ID NO: 63829 - DNA, 1503 bp, Arabidopsis thaliana
  CDS (1)..(1503)
atggctgccctcgcttctccctccctcatcccctcttctctctgcttcgctgccgccgccgatggtccccgttccctctcttctaatttctctgccttttccgacggcggttccaatttcaggtatcacaagagcttcttgtcgctttcatcttcgtcttcttcgtctacgccttatcgaaatcgacggggccgttccctcgtcgtatttgctacttccggagactactacgccactctcggtgtctctaaatctgccaataacaaggagattaaagctgcttatcgacggctcgctcgtcagtatcatcccgatgtgaacaaggaacccggagcaactgaaaaattcaaggaaatcagtgctgcctatgaggtgctatcagacgagcaaaagagagcattatatgatcaatatggtgaagccggtgtcaagagtacagtaggaggagcttctggtccttacacgtcaaatccctttgaccttttcgagacattctttggtgcaagtatgggtggatttcccgggatggaccaagctgattttgggagaacccgccgcagtagggttaccaaaggtgaagatttacggtatgacatcaccttagaactttcggaggctatttttggatctgagaaagaatttgatcttacgcatctggagacatgtgaagcttgtgctggcaccggggcaaaagcaggatccaagatgagaatatgctccacttgtggtgggcggggtcaagttatgagaactgagcaaacaccatttggcatgttttcacaggtttctatatgtccaaactgtggtggagatggtgaggtgatttctgaaaattgccggaaatgttctggagaagggcgtgtgcgtataaaaaaaagcatcaaagtcaaaattcccccgggagttagtgcaggtagcatccttagagtcgccggagaaggtgattctggtcccagaggtggccctccaggagatttgtatgtatatcttgatgttgaagatgtccggggaattgaaagagatggcataaacctattatctaccctttcgatcagttaccttgatgctatactgggtgctgttgttaaggtgaaaacagttgaaggagacactgaactgcagatacctccaggtacacaacctggtgatgtgctagtcctggcaaagaaaggagtaccgaaactgaatagaccgtctatccgcggtgaccacttgtttacagtcaaagtttctgtaccaaatcaaataagtgctggagaacgggagttgctggaggaacttgcatctctgaaggacacgtccagcaaccgctcacgaactcgtgctaagcctcagcaacccagtactctgagcactgcacccagtggctcagaaaacaagaaagatgaagttaaggaggaaaatgaagaaccggagcaagaaaactacttgtggaataacatcaaagaatttgcagggtctgtcgcaaatggagctctaaaatggctgagagataacctctag

SEQ ID NO: 63830 - protein, 500 aa, Arabidopsis thaliana
MAALASPSLIPSSLCFAAAADGPRSLSSNFSAFSDGGSNFRYHKSFLSLSSSSSSSTPYRNRRGRSLVVFATSGDYYATLGVSKSANNKEIKAAYRRLARQYHPDVNKEPGATEKFKEISAAYEVLSDEQKRALYDQYGEAGVKSTVGGASGPYTSNPFDLFETFFGASMGGFPGMDQADFGRTRRSRVTKGEDLRYDITLELSEAIFGSEKEFDLTHLETCEACAGTGAKAGSKMRICSTCGGRGQVMRTEQTPFGMFSQVSICPNCGGDGEVISENCRKCSGEGRVRIKKSIKVKIPPGVSAGSILRVAGEGDSGPRGGPPGDLYVYLDVEDVRGIERDGINLLSTLSISYLDAILGAVVKVKTVEGDTELQIPPGTQPGDVLVLAKKGVPKLNRPSIRGDHLFTVKVSVPNQISAGERELLEELASLKDTSSNRSRTRAKPQQPSTLSTAPSGSENKKDEVKEENEEPEQENYLWNNIKEFAGSVANGALKWLRDNL

SEQ ID NO: 63831 - DNA, 1524 bp, Drosophila melanogaster
  CDS (1)..(1524)
atgatgatttcgtgtaaaaaattattcgtgttccggcagctgccggcggtgcgccgttgcctagcggcagccgcgttctccacgccacgcgcgacctcctaccgaatcctctccagcgccgggagcggaagtacccgggcagacgcaccccaagtgcgccgcctgcacaccacgcgcgacctcctggccaaggactactacgccacgctgggcgttgccaagaacgccaacggcaaggacatcaagaaagcctactaccagctggccaagaagtaccatccggacacgaacaaggaggatccggatgcgggccgcaagttccaggaggtctccgaggcctacgaagtgctcagcgacgagcagaagcgccgtgagtacgacacctatggccagacggcggaaaacattggtcgccagggcggcggattccctggcggaggagccggtggctttggccccgagggtttctcgcagagctggcagttccgctcgagcatcgaccccgaggagctcttccgcaagatcttcggcgagggcaactttcgaacgaactcgttcgacgacttcgccgactccaagttcggattcggccaggcccaggagatggtcatggacctgacctttgcccaggcggcgcgcggcgttaacaaggatgtcaacgtcaacgtggtggaccagtgccccaagtgcgccggcaccaagtgcgagccgggcaccaagccaggtcgctgtcagtactgcaacggcaccggcttcgaaacggtgtccactgggcccttcgtaatgcgctccacttgccgctactgccagggcacgcggcagcacattaagtatccgtgcagcgagtgcgagggcaagggccgcacggtccagcgccgcaaggtcaccgtgccggtgccggctggcattgagaacgggcaaacggtgcgaatgcaggtgggcagcaaggagctgttcgtcacgttccgcgtggagcggagcgactacttccggcgcgagggcgccgatgtgcacacggacgcggccatatccctggcccaggcggtgctgggcggcactgtgcgtgtccagggcgtatacgaggatcagtggatcaacgtggagccgggcacctcgtcgcaccacaagatcatgctgcgcggcaagggtctgaaacgcgtgaatgcccacggacacggcgatcattacgtgcacgtcaagatcacggtgccatcggcaaagaagctggacaagaagcgactggctctgatcgaggcgtacgccgagctggaggaggacacccccgggcagatccacggaatcgcgaatcgcaaagacggcacgcaggagcgagtgaggagccaggagcgggagcagctgctaaagccagtgcagcagccgccggatcaggagcctccaagccaggaccaggagcagaaaaaagcgaaggcaaagaccagtggacggacaacgagaaaaccaaagcgaaagaaggcggcggatccggatccggacaaggcgacggcggaggcggaggcttcataa

SEQ ID NO: 63832 - protein, 507 aa, Drosophila melanogaster
MMISCKKLFVFRQLPAVRRCLAAAAFSTPRATSYRILSSAGSGSTRADAPQVRRLHTTRDLLAKDYYATLGVAKNANGKDIKKAYYQLAKKYHPDTNKEDPDAGRKFQEVSEAYEVLSDEQKRREYDTYGQTAENIGRQGGGFPGGGAGGFGPEGFSQSWQFRSSIDPEELFRKIFGEGNFRTNSFDDFADSKFGFGQAQEMVMDLTFAQAARGVNKDVNVNVVDQCPKCAGTKCEPGTKPGRCQYCNGTGFETVSTGPFVMRSTCRYCQGTRQHIKYPCSECEGKGRTVQRRKVTVPVPAGIENGQTVRMQVGSKELFVTFRVERSDYFRREGADVHTDAAISLAQAVLGGTVRVQGVYEDQWINVEPGTSSHHKIMLRGKGLKRVNAHGHGDHYVHVKITVPSAKKLDKKRLALIEAYAELEEDTPGQIHGIANRKDGTQERVRSQEREQLLKPVQQPPDQEPPSQDQEQKKAKAKTSGRTTRKPKRKKAADPDPDKATAEAEAS

SEQ ID NO: 63833 - DNA, 1563 bp, Drosophila melanogaster
  CDS (1)..(1563)
atgatgatttcgtgtaaaaaattattcgtgttccggcagctgccggcggtgcgccgttgcctagcggcagccgcgttctccacgccacgcgcgacctcctaccgaatcctctccagcgccgggagcggaagtacccgggcagacgcaccccaagtgcgccgcctgcacaccacgcgcgacctcctggccaaggactactacgccacgctgggcgttgccaagaacgccaacggcaaggacatcaagaaagcctactaccagctggccaagaagtaccatccggacacgaacaaggaggatccggatgcgggccgcaagttccaggaggtctccgaggcctacgaagtgctcagcgacgagcagaagcgccgtgagtacgacacctatggccagacggcggaaaacattggtcgccagggcggcggattccctggcggaggagccggtggctttggccccgagggtttctcgcagagctggcagttccgctcgagcatcgaccccgaggagctcttccgcaagatcttcggcgagggcaactttcgaacgaactcgttcgacgacttcgccgactccaagttcggattcggccaggcccaggagatggtcatggacctgacctttgcccaggcggcgcgcggcgttaacaaggatgtcaacgtcaacgtggtggaccagtgccccaagtgcgccggcaccaagtgcgagccgggcaccaagccaggtcgctgtcagtactgcaacggcaccggcttcgaaacggtgtccactgggcccttcgtaatgcgctccacttgccgctactgccagggcacgcggcagcacattaagtatccgtgcagcgagtgcgagggcaagggccgcacggtccagcgccgcaaggtcaccgtgccggtgccggctggcattgagaacgggcaaacggtgcgaatgcaggtgggcagcaaggagctgttcgtcacgttccgcgtggagcggagcgactacttccggcgcgagggcgccgatgtgcacacggacgcggccatatccctggcccaggcggtgctgggcggcactgtgcgtgtccagggcgtatacgaggatcagtggatcaacgtggagccgggcacctcgtcgcaccacaagatcatgctgcgcggcaagggtctgaaacgcgtgaatgcccacggacacggcgatcattacgtgcacgtcaagatcacggtgccatcggcaaagaagctggacaagaagcgactggctctgatcgaggcgtacgccgagctggaggaggacacccccgggcagatccacggaatcgcgaatcgcaaagacggcagtaagcaagcaaccgcaggagcgagtgaggagccaggagcgggagcagctgctaaagccagtgcagcagccgccggatcaggagcctccaagccaggaccaggagcagaaaaaagcgaaggcaaagaccagtggacggacaacgagaaaaccaaagcgaaagaaggcggcggatccggatccggacaaggcgacggcggaggcggaggcttcataagcaagatcaagtccatgttcaactga

SEQ ID NO: 63834 - protein, 520 aa, Drosophila melanogaster
MMISCKKLFVFRQLPAVRRCLAAAAFSTPRATSYRILSSAGSGSTRADAPQVRRLHTTRDLLAKDYYATLGVAKNANGKDIKKAYYQLAKKYHPDTNKEDPDAGRKFQEVSEAYEVLSDEQKRREYDTYGQTAENIGRQGGGFPGGGAGGFGPEGFSQSWQFRSSIDPEELFRKIFGEGNFRTNSFDDFADSKFGFGQAQEMVMDLTFAQAARGVNKDVNVNVVDQCPKCAGTKCEPGTKPGRCQYCNGTGFETVSTGPFVMRSTCRYCQGTRQHIKYPCSECEGKGRTVQRRKVTVPVPAGIENGQTVRMQVGSKELFVTFRVERSDYFRREGADVHTDAAISLAQAVLGGTVRVQGVYEDQWINVEPGTSSHHKIMLRGKGLKRVNAHGHGDHYVHVKITVPSAKKLDKKRLALIEAYAELEEDTPGQIHGIANRKDGSKQATAGASEEPGAGAAAKASAAAAGSGASKPGPGAEKSEGKDQWTDNEKTKAKEGGGSGSGQGDGGGGGFISKIKSMFN

SEQ ID NO: 63835 - DNA, 1461 bp, Nasonia vitripennis
  CDS (1)..(1461)
atggccaccggcaagggtctcgctgctatccttcgtccgaggaatttgagccttataactcgcggtaagcctcaaaatggtcagaatcaagcatcgccgagatgctccgactgccggcgacactatgccacgggcccgatgcctgtcgactcctggagcggcagtttcaaggtgcacaagtatactgctgcaggttcactacaaagccataggaaatttcacttgacaagtgaaacactcgcaaagaagagttactacgaagtgttaggtatctccagaaactcttcagcaaaggatattaaaaaagcctactaccagctagccaaaaaataccatcccgacacaaacaaagatgatccaaatgccagtaaaaaatttcaagaagtctcagaggcttatgaagttctcagcgatgagactaaaagaaaagagtacgacacatggggtgccacatcagaacaaatgggaatgggaggaggtcctccaccaggagctggcagaaatcatgataccagagactttaactggcagttcaaatcaactattaatccagaagagttatttagaaaaatatttggagaagctggctttaaaagtggtggattttctgattttgaagattatgcagactccagatatggctttggagctgcccaagaggtgataatgaatctgacattttctcaagctgctagaggaattaacaaagacatcaacattaatgtagttgacacatgtcctaagtgtcagggaagtcggtgtgaattaggctataaacctataaaatgtcattactgtaatggcactggaatggagactattagtactggaccatttgtcatgcgctctacatgtaggcaatgtcatggcactagagtatatataaagcatccttgtggagagtgtgaaggaaagggacaatgtgtgcagcgcaaaaaagtaacagtaccggtgccggctggcgttgaggatggccagactgtacgaatggctgttggcaacaaagagatcttcataacattccgcgtggaaaagtcaaagtacttccgtcgcgatggaccagacattcacacggatgcggacgtcagcatctcgcaggctgtcctcggtggtaccattcgaatcgaaggtgtttacgaggttctgacggtacagatacgacccggtacctcgtcgcacacgcttatacgattgaacggcaagggactgaaaaaggtcaacaccgtcggctacggcgatcactatgtacagatcaagatcaagacacccacgtcactgaatgagaagcaacgggcactcatacaggcttacgcggagttggaaagtgacacgccgggatcgatacatggcatcaccacgaaaaaggatggcatgtcggagaaaactcaagcgagcggagagagtcatacgagtcaaggcgatgggtttcttgatagggtgaagagggcgatttttggatag

SEQ ID NO: 63836 - protein, 486 aa, Nasonia vitripennis
MATGKGLAAILRPRNLSLITRGKPQNGQNQASPRCSDCRRHYATGPMPVDSWSGSFKVHKYTAAGSLQSHRKFHLTSETLAKKSYYEVLGISRNSSAKDIKKAYYQLAKKYHPDTNKDDPNASKKFQEVSEAYEVLSDETKRKEYDTWGATSEQMGMGGGPPPGAGRNHDTRDFNWQFKSTINPEELFRKIFGEAGFKSGGFSDFEDYADSRYGFGAAQEVIMNLTFSQAARGINKDININVVDTCPKCQGSRCELGYKPIKCHYCNGTGMETISTGPFVMRSTCRQCHGTRVYIKHPCGECEGKGQCVQRKKVTVPVPAGVEDGQTVRMAVGNKEIFITFRVEKSKYFRRDGPDIHTDADVSISQAVLGGTIRIEGVYEVLTVQIRPGTSSHTLIRLNGKGLKKVNTVGYGDHYVQIKIKTPTSLNEKQRALIQAYAELESDTPGSIHGITTKKDGMSEKTQASGESHTSQGDGFLDRVKRAIFG

SEQ ID NO: 63837 - DNA, 1581 bp, Gibberella zeae PH-1
  CDS (1)..(1581)
atgaatcctagtttgatatcaaaggccgcccgtcccacgcgggtcctggcgcaaaatgcaccaaagattcaatgtttaaggaaaggtgcccagcttcacactgcagcatggcatgtcggttctcagcgtcaaccttcttttagaaaggggtcccaatctccttctgcgaagcggttgttccatgccacaaatgccgttcagcaaaaggatccttaccaagctcttggtgttggtaagacagcaagcgccggcgatattaagaaggcatactatggcctagcgaaaaagtaccaccccgatacgaataaggaccctcaagcgaaggacaagttcgccgatattcagtccgcctacgaaattctatccgaccccaagaagcgcgagcagtttgaccagttcggtgccgccggcttcgaccccagcggaggaggcgcccccggaggcggtggcggtttcggcggaggacacccgttctctggcttcggtggatttggcggacaaggtggttttggcggtttcggcggccagggaggtttcggagctggagtcaactttgaagatatcttctcggcattcaccggacagcaagggttcggccgccgatcacgacagcaagcttatcaacaagagatcctcgttggcgaaaatatcgaggtccaatcgactattagcttcatggaggcagcgaagggcacaaccaaaaccatttcgattacaccactcagcacctgcgacacatgtaagggcaatggcatgaagtctggttcgtcaaggagcgcatgtagcgcttgtgatggatctggtacccggataaactatatgcagggcggctttcaaatggcatctacttgcggaacttgcggcggcactggcacggttatccccaggggatccgagtgtaagccttgttcaggaaatggtgttgtgagggaaaggaagacgatcacagtggatatccctgcaggcattgaggatggtatgcgactccgagttgacggtgctggtgacgcagcccttaccggtcggtctgctgagcccaatgctcgcagccagaacggagacctgtacgtctttgtgcgcgtcgccaaggatcccaagttccgacgagatggctccaatattctatacacagctaacattcctctcacaaccgctttgctgggtggacacgccgagatccctactctggatggaacggtcaacgtcaaggttgctacaggcaccaacactggcgataagatcaccttgcctggcatgggaatgaagcgcctcggttctcgacgtggcggaaacggtgacctcagggttgagtacagggtcagtatgcccaaatacctgagcgccaaccagcgaaccattgttgaggtgctcgcggatgagatgggcgacaagacagctaagcgggtgatgggtgttggttcttcaagggacccaaacgaccccgatacgcatagagacgagggcttcctcaaatcgctctggcatactctcaccaaccatcccgctcaccaaaagccgaacgaggatggaagccaaaacgacggctccaccaagaagcctggtgatgacgataagaaataa

SEQ ID NO: 63838 - protein, 526 aa, Gibberella zeae PH-1
MNPSLISKAARPTRVLAQNAPKIQCLRKGAQLHTAAWHVGSQRQPSFRKGSQSPSAKRLFHATNAVQQKDPYQALGVGKTASAGDIKKAYYGLAKKYHPDTNKDPQAKDKFADIQSAYEILSDPKKREQFDQFGAAGFDPSGGGAPGGGGGFGGGHPFSGFGGFGGQGGFGGFGGQGGFGAGVNFEDIFSAFTGQQGFGRRSRQQAYQQEILVGENIEVQSTISFMEAAKGTTKTISITPLSTCDTCKGNGMKSGSSRSACSACDGSGTRINYMQGGFQMASTCGTCGGTGTVIPRGSECKPCSGNGVVRERKTITVDIPAGIEDGMRLRVDGAGDAALTGRSAEPNARSQNGDLYVFVRVAKDPKFRRDGSNILYTANIPLTTALLGGHAEIPTLDGTVNVKVATGTNTGDKITLPGMGMKRLGSRRGGNGDLRVEYRVSMPKYLSANQRTIVEVLADEMGDKTAKRVMGVGSSRDPNDPDTHRDEGFLKSLWHTLTNHPAHQKPNEDGSQNDGSTKKPGDDDKK

SEQ ID NO: 63839 - DNA, 1452 bp, Apis mellifera
  CDS (1)..(1452)
atggcgaccggcaaaggacttgcaatcgttttccgatcaaagactattaattttatcagcaatagtaaattaaataaattgtcatgtggtattatgcagaaatgtagcacatgtcatcaatctaatacaacaatagtattgagtgtcggcaactggaacttaaagaaaatagaaaaatgtatgataggaaatttaactcaaattcaaagaggaatacatacaacacaaaaactattaaaacgtaattattatgaaatattgggtgtatccaaaaatgcttcagcaaaagatattaaaaaggcttattatcaacttgctaaaaaatatcatcctgatacaaataaaggagatccagatgcaagtaaaaagtttcaggaagtttcagaagcatatgaagtactaagtgatgataacaaaagaaaagaatatgatacatggggagctacatcagaacaaatgggaatgggacaacagggtactggtcatactaaagactttaatgaaggatggcaatttcggtcatcaatcaatccagaagaattatttagaaaaatatttggagaaactggatttcaaactaatatttttaatgattttgaagattatcaagagtcaaaatatggttttggagcagctcaagaggttattatgaatttaacattccctcaagctgccagaggagtgaataaagatatacaactaaatgtagtagatacatgtccaaaatgtttaggttcacgatgtgaacctggaacaaaagcagttagatgtccatattgtaatggaactggaatggaaacgattagcactggtccttttgtaatgcgatctagttgccgttattgtttaggtaccagaatgtttattaaatatccctgtcaggaatgtcaaggaaaaggacaaacggtgcagcgtaaaaaagtgatagttccagtaccagctggtgtcgaagatggtcaaacaattcggatggctgttggtaacaaagaagtattcataacattccgtgtggaaaaatcaaaatactttcgaagagatggtccagatatacatacagatgctcaaatttcattatcacaagcagtacttggtggtacaataagaatagaaggcgtttatgaggatcatactatacaaattcggcctggtacttcatctcatactaaaattcgactcagtggtaaaggaatgaaaaaagtgaatggtgtaggatacggagatcactatgtacaaattaaaattattgtacctacaaaattaaatgataaacaattagcattacttcaagcatatgctgaacttgaagatgatacacctggaagtatacatggcataacatacaaaacagatggtccaagggtaaaaactcaagcgagacagaatatgcaaagtgaacagaatgttgaaaatgatggtcttcttaataaaatcaagaaagctatatttggatag

SEQ ID NO: 63840 - protein, 483 aa, Apis mellifera
MATGKGLAIVFRSKTINFISNSKLNKLSCGIMQKCSTCHQSNTTIVLSVGNWNLKKIEKCMIGNLTQIQRGIHTTQKLLKRNYYEILGVSKNASAKDIKKAYYQLAKKYHPDTNKGDPDASKKFQEVSEAYEVLSDDNKRKEYDTWGATSEQMGMGQQGTGHTKDFNEGWQFRSSINPEELFRKIFGETGFQTNIFNDFEDYQESKYGFGAAQEVIMNLTFPQAARGVNKDIQLNVVDTCPKCLGSRCEPGTKAVRCPYCNGTGMETISTGPFVMRSSCRYCLGTRMFIKYPCQECQGKGQTVQRKKVIVPVPAGVEDGQTIRMAVGNKEVFITFRVEKSKYFRRDGPDIHTDAQISLSQAVLGGTIRIEGVYEDHTIQIRPGTSSHTKIRLSGKGMKKVNGVGYGDHYVQIKIIVPTKLNDKQLALLQAYAELEDDTPGSIHGITYKTDGPRVKTQARQNMQSEQNVENDGLLNKIKKAIFG

SEQ ID NO: 63841 - DNA, 1569 bp, Candida glabrata CBS 138
  CDS (1)..(1569)
atgaagagtacacgatcattactgctgcaaagacggtacttgtcgctgacacacaggcgggtgctgagctctagtgtgagacagccgttgctacggagaggattccactctacatcgtctgtgaagcaagagtttaaggacccttatgagacactgggtgtcaagaagtcatcgtcccagtcggacatcaagaaagcgtattataagctggccaagaagtaccacccggatattaacaaagaggctggcgcagagaagaagttccacgacttgcagaacgcgtacgagatcttatccgatgaaagcaagaggaaacagtacgatcagttcggcgcagctgcgttctctggtggcgcgggtgctggccccggcgggccaggtgctggtcccggtgggtttaatccctttggcaacgggtttggcttcgatttctcgggaggccaggccggtggcgctggtggtttcggaggcatcaacttcgaggacttgttcggaactgctttcggaggcgggccattcggttcctcgtcaaacagcgggcgcaggtcttcctcaatgttcagagagtacaaaggtgataccatcgaagtcatacagaacctggatttcaaagatgcagtcttcggtaagaaaaacgtatcgattaagttcagagcgctcgacccttgcggaacttgcaacggttctggtctcaagtccggcgcatcaaagaccacttgtccgtcttgccacggatcaggtacaactgttcacgtaagagccgggttccagatgatgtccacttgccagacgtgtggcggtgaaggaaccacggtgaacgcctccgatttctgcaaatcctgccacggtgaaggtgtcaatgtaaatacccaaaagaccatcactgttgacttaccacacggactacaggacggagatgtagtcagaatacccggccagggttcatacccagatatcgctgtggacaaggaaatggcaaaatctgtcaaactgtcccgtggtgatatcctggtgagaatacgcgtcaacaaggacccgcatttcagcataaagaacaagtacgacatctggtacaccaaagaaatacctatcacaacagcagccctgggtggtactgtatcgatccccaccatcgaaggcacaaagatcagaatcaaagtccctgctggaacagcccctgagcaggtcatctctataccaaacatgggtgtgcctaaatccagcccatacagaaactctgccgtccaggctagaggcgatatgaagattcagtacaaagtcgtgatcagaaagccgcaatccaaagccgaacagtgcttatgggaagccctggctgatgtgacgaacgacactaacgccaagagaactatggaaagttttgcctcctcggtcgagaagtctgtagaagacaagctcagcgataatgacaacaagacttccaataactctaaggagacgtataacacaaccgaagacaactctatgaacccagacgccccaagcaccttgggtagattggagaagttcatcagtaacacttttaagaagatcaaaggtgacaagaactaa

SEQ ID NO: 63842 - protein, 522 aa, Candida glabrata CBS 138
MKSTRSLLLQRRYLSLTHRRVLSSSVRQPLLRRGFHSTSSVKQEFKDPYETLGVKKSSSQSDIKKAYYKLAKKYHPDINKEAGAEKKFHDLQNAYEILSDESKRKQYDQFGAAAFSGGAGAGPGGPGAGPGGFNPFGNGFGFDFSGGQAGGAGGFGGINFEDLFGTAFGGGPFGSSSNSGRRSSSMFREYKGDTIEVIQNLDFKDAVFGKKNVSIKFRALDPCGTCNGSGLKSGASKTTCPSCHGSGTTVHVRAGFQMMSTCQTCGGEGTTVNASDFCKSCHGEGVNVNTQKTITVDLPHGLQDGDVVRIPGQGSYPDIAVDKEMAKSVKLSRGDILVRIRVNKDPHFSIKNKYDIWYTKEIPITTAALGGTVSIPTIEGTKIRIKVPAGTAPEQVISIPNMGVPKSSPYRNSAVQARGDMKIQYKVVIRKPQSKAEQCLWEALADVTNDTNAKRTMESFASSVEKSVEDKLSDNDNKTSNNSKETYNTTEDNSMNPDAPSTLGRLEKFISNTFKKIKGDKN

SEQ ID NO: 63843 - DNA, 1416 bp, Kluyveromyces lactis NRRL Y-1140
  CDS (1)..(1416)
atgtttaagagatatttattacaatacccacgtcaattccatacggcaagacttctaagacaagagtttaaggatccttataaggtccttgggattaacaagaactccagtcagtccgacattaagaaagcgtactacaagctggccaagaagtatcatccggatataaataaggaagaagactctcagaagaagttccatgatttgcaaaacgcgtatgaaatattaagcgatgaagataagaggaaacagtatgatcaattcggtgctgctgcattcagccaagctggtggtgccggtggaccaggcggtgcctatggcggtgctggtgctggtggtgcacaaggattcggaggctttggagggttcgatttcggtggattgaactttgaagatcttttcggaagtgcgtttggtggtggtggtggtggtggtgccggaggcaggagagctggttcgcatggagcaggatttggcggttccgattttgtccgtgaatataaaggtgagaatgtcactgtaccattccaagtatccttcaaagatgccgtcttcggtgtgaagaatgtcaaattgaattaccaatgctacgatccgtgttcgtcatgtgatggaagtgggttgaaagctggacattcgagaagtgtttgtcctacatgtcatggtacaggtactcaggtacatgtaagagcaggtttccaaatggcctctacttgtcaaacatgtgatggtgagggttcaactattaaggacagcgataaatgtggtacctgtcatagccacggtttcaaattgaattcaaataaaactatcaccgtagacttacctcacggacttcaggacggtgacacaattagagtacctaaccaaggtagttaccccggtatggctatcgatccgtccatgaaatctgaattgcatttaaccagaggcgatttgttgattcgtgtcagagtcaggaaagacacaagattccaagtttcaaataattacgacatcatttacactcaggaaatcccaattacaacggcagcactaggtggcgtcattgaagtacccaccgtagaggaagaaaagatcagattgaaggtcagctctggtactcaacacgatcaagtcatcagaattccaaataagggtgtccctcgtggagctagaggtgacaggggtgacatgcttgtcaagttcaagattgttatcaaaaaaccaaaggatgaaacagaacgttatctatgggagaccttggcccacttgaccaatgataccactgcaagaaggaccattactccctctggatcgtcggctaaggacaactcttcctctgctgataaagacacagttgaaaacaatgaaggaaccatcaagaaattggaaaatttcttgtctaacactttaaagaagatcagaggggaatga

SEQ ID NO: 63844 - protein, 471 aa, Kluyveromyces lactis NRRL Y-1140
MFKRYLLQYPRQFHTARLLRQEFKDPYKVLGINKNSSQSDIKKAYYKLAKKYHPDINKEEDSQKKFHDLQNAYEILSDEDKRKQYDQFGAAAFSQAGGAGGPGGAYGGAGAGGAQGFGGFGGFDFGGLNFEDLFGSAFGGGGGGGAGGRRAGSHGAGFGGSDFVREYKGENVTVPFQVSFKDAVFGVKNVKLNYQCYDPCSSCDGSGLKAGHSRSVCPTCHGTGTQVHVRAGFQMASTCQTCDGEGSTIKDSDKCGTCHSHGFKLNSNKTITVDLPHGLQDGDTIRVPNQGSYPGMAIDPSMKSELHLTRGDLLIRVRVRKDTRFQVSNNYDIIYTQEIPITTAALGGVIEVPTVEEEKIRLKVSSGTQHDQVIRIPNKGVPRGARGDRGDMLVKFKIVIKKPKDETERYLWETLAHLTNDTTARRTITPSGSSAKDNSSSADKDTVENNEGTIKKLENFLSNTLKKIRGE

SEQ ID NO: 63845 - DNA, 1479 bp, Debaryomyces hansenii CBS767
  CDS (1)..(1479)
atggggaagtttaatttatatccatcgataagcaataatataaaacgtacagttttaaactcaataaagccaaaatcggcttcgaggttaggcctattccagtctgtacaatcaaaacttcaaacgagggcgtttcattcgtctcgtaatgtgttgatcaacttcgacccgtacctgacgctaggagtggaaaagtcggcttcagctaaagacattaagaaggcatattatcaattggtcaaaaagtaccatccggatgttaataaggagaaagatgctgaaaaacgattccacaagatccaagagtcatatgagttattgagtgacaaagaaaagaggtctcagtacgatcagttcggtgcagcagcgtttgattcgaacggtaatgcaaatccatttgcaggtggtaatccatttggcgggtctcatggtggtaatccatttggaggaggtgctggtggtaaccctttcggtggcatgggatttgacttcgaggatttatttaaacaagcattcaatggtggcgctggtggtagaggtggtggtggtggccaattcgtgacggaacatgtcggagataatatagaagtcttgaagacgataggattcaaagaatccattttcgggacaaaggtggaaatcaactacaaggcagttgattcatgtaatacgtgtaagggtagtggtatgaagaagggtaaaaagaagactacttgttcgacatgtcacggtacgggacagagtacccatattttaggtgggttccacatgtcatcaacttgtaactcatgtcatgggactggtgtgactattccttccagtgatcaatgtactagttgtaaaggtaatggggtggaagaagtcccaaaatctacttcggttgatttgccatgtggtatcgccgatggtacaagattaagaattccaggtgccggtgatgctcctttcatcacaaaggatccttacaaccaaactagaaatggtgatttgattatcagagttcacgtttctaaggatcccgttttcactagaagtaataataagattgttgtaaatcaagacattattatgactactgcggcattaggtggtgaaattgtagttccaacgatagatgggcaaagtattaagttgaagttgagacctggtgttcaaaatggtaagactttaactattccagagaaaggtgtaccaataaacagaaatattcaaaacagaggtgatatggaagttaaaataaatgtcaagacattgattccagaaacccctatacaaactgcgcttttggaagctttagctgatgcatttgatgacaaaaatgctaagagaacggacgcacattggaagttagacttaaacgaagacgaaaaggacgttaaggaaacttttgatgagaaagacttacatccttcgaagttgaatagaattggcaaattcttgggaaaatttttcaacatgaaggatgaagacaagaaatga

SEQ ID NO: 63846 - protein, 492 aa, Debaryomyces hansenii CBS767
MGKFNLYPSISNNIKRTVLNSIKPKSASRLGLFQSVQSKLQTRAFHSSRNVLINFDPYLTLGVEKSASAKDIKKAYYQLVKKYHPDVNKEKDAEKRFHKIQESYELLSDKEKRSQYDQFGAAAFDSNGNANPFAGGNPFGGSHGGNPFGGGAGGNPFGGMGFDFEDLFKQAFNGGAGGRGGGGGQFVTEHVGDNIEVLKTIGFKESIFGTKVEINYKAVDSCNTCKGSGMKKGKKKTTCSTCHGTGQSTHILGGFHMSSTCNSCHGTGVTIPSSDQCTSCKGNGVEEVPKSTSVDLPCGIADGTRLRIPGAGDAPFITKDPYNQTRNGDLIIRVHVSKDPVFTRSNNKIVVNQDIIMTTAALGGEIVVPTIDGQSIKLKLRPGVQNGKTLTIPEKGVPINRNIQNRGDMEVKINVKTLIPETPIQTALLEALADAFDDKNAKRTDAHWKLDLNEDEKDVKETFDEKDLHPSKLNRIGKFLGKFFNMKDEDKK

SEQ ID NO: 63847 - DNA, 1422 bp, Yarrowia lipolytica CLIB122
  CDS (1)..(1422)
atgcgaattttcaagcaggcacgaccccaggtggggttgcgggcggttcgggcagctttcggcggccccggaaagcccgcgatccgagcaccactccacccgcgttttttccgacactcggcccgcctccagatgcaggacccctacaaggctctgggggtggagtccaatgccagcgccaaggagatcaaaaagagctactatcagctggcgaaaaagtaccatccggacgtgaacaaggaggaggacgccaagaagaagtttgaggaggtccagaaggcctacgagctgctgtccaacgaggaggagcgaaagaagtacgacacctttggtcccgcggcgtttggagaaggcggccagcccggaggccagggatacggaggcaacccgtttgccggcggtggaaacccgtttgccggatttggaggagccgggtttggcggaggagggtttggagcccagggcatcaatctggacgatctgttttcggcggcgtttggaggccagggcggtggccgaggcggatttggacgtcagcagccatacgtccaggagtttgagggtaacgatatccagctgaacgtggagatttcgctggaagacgtggctcgcggcgtgacccgggacctcaagtaccaggcggtgacttcgtgcaacacttgtgagggttccggcatgaagaaggatgctaagaaaaacacctgttcggcctgtggcggcacaggagcccgtgttcatgtggtgaatggcggtttccaaatgtccaccacctgtgaggtctgccgaggctctggagaacagatccccaaggacggcgagtgtggatcgtgccattccaacggagtggttcgagagacccgtgagacctccatcaacattcctcccggagtcgacaacggcacgattctgcgggtgtcgggaatgggagacgctcccgaggcccaggccggacccacggtgcgtctgcacaatggagatctgctggttcgaatccacgtcaagcccagcaagacgtttgttcgacagcggtccgatctcgtctacaagaaggagattcctatgaccaccgctgctctgggcggtactgttctgatccccactctgctgggaggcaagctgcgaatcaaagtgcctgctggaacccagcccggcgcccagatcgccatccccgagcagggtctccccaagggccgaaacggctttggcgacctcaaggtgatctacgacgtgaagattaccgcgcccacggacaagacacagacggcggtgctggagacgctggcggacctcacacacgacgagtcggcccgtcgaagcgatggccatgtcaagtcggagcccgaggccccggcagaggacgagaagaagcacaccccgttcctcaagaagctgtttaaccggctcaaacatcataacgagtaa

SEQ ID NO: 63848 - protein, 473 aa, Yarrowia lipolytica CLIB122
MRIFKQARPQVGLRAVRAAFGGPGKPAIRAPLHPRFFRHSARLQMQDPYKALGVESNASAKEIKKSYYQLAKKYHPDVNKEEDAKKKFEEVQKAYELLSNEEERKKYDTFGPAAFGEGGQPGGQGYGGNPFAGGGNPFAGFGGAGFGGGGFGAQGINLDDLFSAAFGGQGGGRGGFGRQQPYVQEFEGNDIQLNVEISLEDVARGVTRDLKYQAVTSCNTCEGSGMKKDAKKNTCSACGGTGARVHVVNGGFQMSTTCEVCRGSGEQIPKDGECGSCHSNGVVRETRETSINIPPGVDNGTILRVSGMGDAPEAQAGPTVRLHNGDLLVRIHVKPSKTFVRQRSDLVYKKEIPMTTAALGGTVLIPTLLGGKLRIKVPAGTQPGAQIAIPEQGLPKGRNGFGDLKVIYDVKITAPTDKTQTAVLETLADLTHDESARRSDGHVKSEPEAPAEDEKKHTPFLKKLFNRLKHHNE

SEQ ID NO: 63849 - DNA, 1467 bp, Candida albicans SC5314
  CDS (1)..(1467): transl_table=12
atgagaataccctcagcaagatttgttagaacaggtttatgttcctttaagcctagatcttttgcatcaggtagattaccttacacttacttggccacaagagcatttcactcatcaaaaataagagccattaattttgatccttataagacattgggagtagacaaatcagcagatgatagacagattaagaaagcatactatgatttagttaaaaaataccatcctgatgtgaacaaggagaaggatgcagaaaagagatttcataagatccaagaaagttatgagttattgcgagacaaagagaagagagcacaatacgatcagtttggagcttctgcctttgatgcaaatggaaatgccaatccgtttgcaggacaaggaggaaacccattcggtggattcgggggaggatcagctggaggcaacccattttcaggtatgggatttgatttcgaagatttgtttagggaagcctttgcaggtggaagaggcggagcaggtggcggtagaggtggtagatcctttgtaactgaacatgttggtgacaatattgaagttttaaaaactattccctttaaagattctatatttggtacatctgtgacaatcaattacaaggcagttgattcatgtacaacatgtagtggaagtggattgaaagcaggagctaaaaagaatacttgtccaacatgtcatggtgctggtcaaactactcatgtcatgggtgggttccatatgtcttccacgtgtccatcttgccaaggtgctggtgttactatatcgaaaagtgatgagtgtggaacgtgccatggtcatggagttcaagaaattcctaaatctaagactgttgaaatccctgcaggtgttagtgatggtaccagaatcagaattcctggtgccggtgatgctccaatggtaaccaaagacccttataaccaattagtgaatggtgatttgattattagaatcaacgtacaaaaggatcctgttttcagtcgtaacaaaaatgatttagttatcaatgaagaaatattgatgaccactgcagcattaggaggagagatcgttgttccaactttagatggacaaaagataaaattaaaagtgagacctggtgttcaaaatggaagaaaattaactatacctgaaaagggtgtaccaataaacagaaacttgaataaccgtggtaacttagaagttattttgaatgtcaagactgttgtcccagaaactccaacacagaaggccttactagaagctttggctgatacattcaatgacaagaatgccaagagaacagacgccgattggagcttggatattgaagatgacaaaaatggcaaggtaaacgagacatatgacgaaagtgatttgcatccatccaagttgaagagaattggaaaagtattaggcaagtttttcaattttgaacaaaatgacaaaggtacaaaaaagaacaattga

SEQ ID NO: 63850 - protein, 488 aa, Candida albicans SC5314
MRIPSARFVRTGLCSFKPRSFASGRLPYTYLATRAFHSSKIRAINFDPYKTLGVDKSADDRQIKKAYYDLVKKYHPDVNKEKDAEKRFHKIQESYELLRDKEKRAQYDQFGASAFDANGNANPFAGQGGNPFGGFGGGSAGGNPFSGMGFDFEDLFREAFAGGRGGAGGGRGGRSFVTEHVGDNIEVLKTIPFKDSIFGTSVTINYKAVDSCTTCSGSGLKAGAKKNTCPTCHGAGQTTHVMGGFHMSSTCPSCQGAGVTISKSDECGTCHGHGVQEIPKSKTVEIPAGVSDGTRIRIPGAGDAPMVTKDPYNQLVNGDLIIRINVQKDPVFSRNKNDLVINEEILMTTAALGGEIVVPTLDGQKIKLKVRPGVQNGRKLTIPEKGVPINRNLNNRGNLEVILNVKTVVPETPTQKALLEALADTFNDKNAKRTDADWSLDIEDDKNGKVNETYDESDLHPSKLKRIGKVLGKFFNFEQNDKGTKKNN

SEQ ID NO: 63851 - DNA, 1293 bp, Strongylocentrotus purpuratus
  CDS (1)..(1293)
atggcgttctttggtatgggaccgcgaccgagtgcctcaactgacacaaagctgtacgaccttctcggagtgccacaaaatgtagagaatacagagttgaaaaaggcgtatagaaaacttgcaaaacaatttcatccagataaaaaccctgaatatggagaaaagttcaaagatatcagctttgcatatgaagtgctgtcagatccagagaagagagaaacctatgatagctatggattggaaggattgaaggaaggaagaggtggaggaggaggagggggtatggaggatctcttctccagcttttttggtgacaatatctttggaggtggaggtcatccgttcggtggaggaggaaggggaggttccagacgaccaggaaggaggagaatgaaaggagaagatacaatgcatcaacacaaagtatctcttgaagacttgtataatgggaaagttgccaagctgcaattgagtaaaaatgtaatctgcgtgtcttgtggaggtgttgggggcaagccaggtgctatgcagccctgtcgtacctgccatggtagaggtatcaaggtgacgatacgacagctaggtccaggaatggtccaacagatgcaatctacttgtcctgattgtagaggagaaggagaaaggataaacgagaaagaccgatgtaagaagtgcaacggggtgaaagtgaacaaagaatccaagatcttagaggttcatgttgataagggaatgaaagaaggtcagaagatcaccttcagaggagaaggagatcagcagccggatgttgaaccaggtgatgtagttatagtgttagtggagaaggaacataaccagtttaagcgtattggtaatgatctgtacatggagcatactatcggtatcacagaggctttatgtggattccagttctcattaacacacttagatgacagaaagattctcatcaagtatcctccaggaaaaatcatccaaccaggatgtaaacgagttgttgaaggagaaggcatgcccttgtacaggaatccttttgagaaaggcaacctcatcgtcaagttcaatatagaattcccagagaataacttcacatcagaagataaattaaaggagctggagcagttgctacctagacgacctgaaacagcctcaccaagtgaagattccgaggaggtaaccatgatggactttgaacaaagtaattcaggtggaaactctcgggaagcataccgcgaggatgatgaggatgatgaccatccaggtggaggcccttccgtccagtgcgcacatcaataa

SEQ ID NO: 63852 - protein, 430 aa, Strongylocentrotus purpuratus
MAFFGMGPRPSASTDTKLYDLLGVPQNVENTELKKAYRKLAKQFHPDKNPEYGEKFKDISFAYEVLSDPEKRETYDSYGLEGLKEGRGGGGGGGMEDLFSSFFGDNIFGGGGHPFGGGGRGGSRRPGRRRMKGEDTMHQHKVSLEDLYNGKVAKLQLSKNVICVSCGGVGGKPGAMQPCRTCHGRGIKVTIRQLGPGMVQQMQSTCPDCRGEGERINEKDRCKKCNGVKVNKESKILEVHVDKGMKEGQKITFRGEGDQQPDVEPGDVVIVLVEKEHNQFKRIGNDLYMEHTIGITEALCGFQFSLTHLDDRKILIKYPPGKIIQPGCKRVVEGEGMPLYRNPFEKGNLIVKFNIEFPENNFTSEDKLKELEQLLPRRPETASPSEDSEEVTMMDFEQSNSGGNSREAYREDDEDDDHPGGGPSVQCAHQ

SEQ ID NO: 63853 - DNA, 1392 bp, Tribolium castaneum
  CDS (1)..(1392)
atggcgaatgtcagaagtcttattggcattttgtttttacacatttcatcccgaaaaatccacctaaacccggttttgcgtgcggcgaaagactattaccaaattctgggggttagtcgtaacgcatctggggccgaaataaagaaggcttattataaactagcgaaaaagtatcatcccgatgtcaataaagatgacccaaatgcggctaaaaaattccaagaggtgtccgaagcgtacgagatacttggcgacgaaaccaaacggaagcaatttgacacgtttggcgccacgtccgagcagatgggcggcatggggagcggcggtggcccccgtcccggcgcccaaggcttcgccgaaagctggcaataccagtcaaccattaacccggaagaactcttccggaaaattttcggagaggccggttttggcaaaagcgggggatttgatgattttgctgaatcgaattttgggtttggacaagcacaagaggttgtggttaaattgagcttcttgcaagccgcaagggggactaataaggatattactgtcaatgttgtggacacctgtcccaagtgtcacggctcgaggtgcgaaccaggcaccaaggccacacggtgcacacattgtgatgggactgggatggaaagtgtgacccgggggccctttattatgcggtccacttgtaggtattgccaaggaagtcgtatgtttatcaaacataagtgtgtcgagtgtgagggaaagggacaaacggtgcaaaggaaaaggatcacggtgccagtaccagcaggtattgaagacggtcaaactgtgagaatgtcggtagggcaaaaagaattgtttataacgtttcatattgaaaaatcgcgctatttcaaacgagacggggctgatgtacacacggaggccgaaatttccgtggcgcaggcacttttagggggcaccatccgtatagaagggttgtacgaagaccacatgatacaggtaatgccgggaacgtcgtcacacacccgaataagacttgccggcaaaggcatgaaaaaagtagatggttacggtcatggtgaccattatgtcactttcaaaatagctgtaccaaaacaactttctcctaaacaaaaagccctagcccaggcatatgccgagctggaaactgatactccgggacaaattttaggagtgacgttaaaaactgatggtagcaaaatttttgtctcgaaagacaaacaagaacttttagaagcccttaggttagtgctacaaggtaagaaagtcgaaaccgccaaagaaaatcactcacaaaaaaacactaagaaagttgtagatagagatgttgataatgaaaatgttagcgacactgaagaagcaaaaagaaataaaatgccataa

SEQ ID NO: 63854 - protein, 463 aa, Tribolium castaneum
MANVRSLIGILFLHISSRKIHLNPVLRAAKDYYQILGVSRNASGAEIKKAYYKLAKKYHPDVNKDDPNAAKKFQEVSEAYEILGDETKRKQFDTFGATSEQMGGMGSGGGPRPGAQGFAESWQYQSTINPEELFRKIFGEAGFGKSGGFDDFAESNFGFGQAQEVVVKLSFLQAARGTNKDITVNVVDTCPKCHGSRCEPGTKATRCTHCDGTGMESVTRGPFIMRSTCRYCQGSRMFIKHKCVECEGKGQTVQRKRITVPVPAGIEDGQTVRMSVGQKELFITFHIEKSRYFKRDGADVHTEAEISVAQALLGGTIRIEGLYEDHMIQVMPGTSSHTRIRLAGKGMKKVDGYGHGDHYVTFKIAVPKQLSPKQKALAQAYAELETDTPGQILGVTLKTDGSKIFVSKDKQELLEALRLVLQGKKVETAKENHSQKNTKKVVDRDVDNENVSDTEEAKRNKMP

SEQ ID NO: 63855 - DNA, 1125 bp, Prochlorococcus marinus str. MIT 9515
  CDS (1)..(1125): transl_table=11
atggctgatttttatcaaatacttggtgtttcaagagatgctgatgctaatactttaaaaagcgcttatagaaagttagcaagacagtatcatcctgatgtgaataaggatccgggtgctgaagataaatttaaggagataggaaaggcttatgaggcattagccgatccagaaactagagcgagatacgatcagtttggagaggctggaataggaggtgcggctggaatgccagatatgggagacatggggggtttcggagatttattcgaaactttctttaatggtttcggaggacaatcttcacaaggaggcagatcacaaagaagaggtcctcaacaaggtgatgatttaaggtatgacttaaatattgattttaaagatgctatttttggacaacaaagagaaataaagatacctcacttagaaacttgtgacatttgtagaggaagtggggcaaaaaaaggtacaggtccaataaactgtacaacatgtggtggaagtggtcaggttagaagagcgacaagaactccctttggtaattttactcaagttgcagaatgtcccacttgtaatggagttggacaagtaatttcagatccatgcgcaagttgcggtggaaatggtgtaaaacaagtgagaaaaaaattacgtattaatattcctgcaggagttgattctggaactaaattgagagtttctggagagggtaatgtcggtttaaaaggtggaccgcctggagatctttatgtttttataaaagttaaaagtgacccgaatttaaaaagagatggtattaatatttattccgaaatatcagttagttatcttcaagctattcttggagatacccttgatatcatgacagttgacggaaaggttaacttaaaaattccaagcggtacccagccaaatagtactttatccttagaaaacaaaggtgttccccgattaggtaatcctgttgctcgcggtaatcatcaagttttagtgaaggttaaacttcccacgcgaataacagatgaagagagaaatcttctggagaatttagcttccaaatattctgaacataactctaattctaatagtggattgtttagtaagttgtttggtaaggaatcttga

SEQ ID NO: 63856 - protein, 374 aa, Prochlorococcus marinus str. MIT 9515
MADFYQILGVSRDADANTLKSAYRKLARQYHPDVNKDPGAEDKFKEIGKAYEALADPETRARYDQFGEAGIGGAAGMPDMGDMGGFGDLFETFFNGFGGQSSQGGRSQRRGPQQGDDLRYDLNIDFKDAIFGQQREIKIPHLETCDICRGSGAKKGTGPINCTTCGGSGQVRRATRTPFGNFTQVAECPTCNGVGQVISDPCASCGGNGVKQVRKKLRINIPAGVDSGTKLRVSGEGNVGLKGGPPGDLYVFIKVKSDPNLKRDGINIYSEISVSYLQAILGDTLDIMTVDGKVNLKIPSGTQPNSTLSLENKGVPRLGNPVARGNHQVLVKVKLPTRITDEERNLLENLASKYSEHNSNSNSGLFSKLFGKES

SEQ ID NO: 63857 - DNA, 1131 bp, Prochlorococcus marinus str. NATL1A
  CDS (1)..(1131): transl_table=11
atggctgatttttacgatctattgggtgtcagcagagatgctgatgctgacactttaaaaagagcttatagacagcaagctcggaaatatcaccctgacgtcaataaggaagcaggtgcagaggataagttcaaagaaataggcaaagcatatgaagttttaagcgactctcaaaagcgagctcgttacgaccaatttggagaagctggaataggtggggccgctggcatgccggatatgggagatatgggtggctttgcagatctgtttgataccttttttaatggctttggtggtgctagttcagctggaggttctcgccctcaaagacgcggaccacaacagggagacgatttacgttacgacctaacgattgattttgataaagctatttttggacaagaaaaagagattacggtccctcatttagaaacttgtgatgtttgcagaggcactggggctaagaaaggcactggtcctgttacttgttctacatgtagtggtgcaggtcaagtaaggagagcgactcgtacaccttttggaagttttactcaagtagctgaatgcccaacctgtggtggtactggacaagtgattaaagatccttgcaacgcttgtggagggaaaggcgttaaacaagtaagaaaaaaattaaaaattaatattcctgctggagttgatagcggaacacgattaagagtttcaggagagggtaatgctggattaaagggtggtccatctggagatctatatgtttttttaaaagttaaaaatcatcctaatttaaagagagatggattgacaattttatctgaggttaatattagttaccttcaggcaattttaggagatactattgaaatagagactgtagatggccctactaagttgcaaattccagcagggacccaacctaactctattttgaatttagaaaataaaggagtgccaaaactaggcaatccagttgctagaggtaatcatcaagtctcagtaaagattaaattacctacaaaattatcagattctgaaagaaatttattagaagaattagctggacattactctgcacttggaccacaacatcattatcataaaagtggcttatttagtaagttatttggcaaataa

SEQ ID NO: 63858 - protein, 376 aa, Prochlorococcus marinus str. NATL1A
MADFYDLLGVSRDADADTLKRAYRQQARKYHPDVNKEAGAEDKFKEIGKAYEVLSDSQKRARYDQFGEAGIGGAAGMPDMGDMGGFADLFDTFFNGFGGASSAGGSRPQRRGPQQGDDLRYDLTIDFDKAIFGQEKEITVPHLETCDVCRGTGAKKGTGPVTCSTCSGAGQVRRATRTPFGSFTQVAECPTCGGTGQVIKDPCNACGGKGVKQVRKKLKINIPAGVDSGTRLRVSGEGNAGLKGGPSGDLYVFLKVKNHPNLKRDGLTILSEVNISYLQAILGDTIEIETVDGPTKLQIPAGTQPNSILNLENKGVPKLGNPVARGNHQVSVKIKLPTKLSDSERNLLEELAGHYSALGPQHHYHKSGLFSKLFGK

SEQ ID NO: 63859 - DNA, 1155 bp, Clostridium difficile 630
  CDS (1)..(1155): transl_table=11
ttgagtacaaaaagggattattatgaagtcttaggtatcagtaaaggtgcagaagctcaagagataaaaaaagcttatagaaaattagcaatgaagtaccatccagatagaaatcctggagataaagaggcggaagaaaaatttaaagagataaatgaagcttatgaagttctatctgatgatacaaagagaaaaacttatgaccagtttggacatgatgggctaaatggtcaaggcggttttggtggtcaaggaggatttggcggtcaaggctttggtggttttgaagatatgttcggagatatatttggtgacatgtttggaggaagcttcggaggtggaagagcaagaagaagagggcctcaacgtggtgcagatataagacagagtgttactatatcttttgaagaagctgcatttggtaaaaagatgtctataaaagtaaatagaagtgaagaatgtgaagaatgtaatggaactggagcaaaaccaggaacatcaaagaaaacttgttcaacttgtaatggaactggtcaagttagaactgttcaaagaactccatttggtaatatagcaagttcaagaccatgtagtgcttgtaatggaactggagaagtgattgaatctccatgtagtaaatgtcatggaactggaaatacaagaaaagttaagactatagaagtagatatacctgctggtatagatgatggtcaaatgataaaactttctggtcaaggtgaagtaggagaaaaaggtgctccaagaggagacctatatattgtagttaatgttaagtcacatccactatttactagagatggaaatgatatttattttgaaatgccaattacatttgttcaagcaactttaggtgatgagatagaagtacctactttggatggaaaagttaaatatagtgtgccagaggggacacaaactggaactgtatttagacttaaagagaaaggaatccctagaattagaggtaattcaagaggagaccaatatgttaaggttgtagttgaaattcctaaaaaattaaacgataagcaaaaagaactattgagagaatttgcgaaggagtgtgggtcgaacgtccacgaaaagaagaaaaccttcggacaaaagatagaagatatgtttaagaaaaagtag

SEQ ID NO: 63860 - protein, 384 aa, Clostridium difficile 630
MSTKRDYYEVLGISKGAEAQEIKKAYRKLAMKYHPDRNPGDKEAEEKFKEINEAYEVLSDDTKRKTYDQFGHDGLNGQGGFGGQGGFGGQGFGGFEDMFGDIFGDMFGGSFGGGRARRRGPQRGADIRQSVTISFEEAAFGKKMSIKVNRSEECEECNGTGAKPGTSKKTCSTCNGTGQVRTVQRTPFGNIASSRPCSACNGTGEVIESPCSKCHGTGNTRKVKTIEVDIPAGIDDGQMIKLSGQGEVGEKGAPRGDLYIVVNVKSHPLFTRDGNDIYFEMPITFVQATLGDEIEVPTLDGKVKYSVPEGTQTGTVFRLKEKGIPRIRGNSRGDQYVKVVVEIPKKLNDKQKELLREFAKECGSNVHEKKKTFGQKIEDMFKKK

SEQ ID NO: 63861 - DNA, 1191 bp, Streptococcus pyogenes MGAS10394
  CDS (1)..(1191): transl_table=11
ttgtcggatttcctatttttcattgagtcgttttacggcttggtatcttacattatgaacaatacagaatattacgatcgtctgggggtttctaaggacgcttctcaggacgatatcaaaaaagcttatcgaaaaatgtctaagaaatatcatccagatatcaataaagaagctggagcggagcaaaaatataaggatgttcaagaagcttacgaaaccttaagcgattcacaaaagcgtgctgcttatgatcaatacggcgctgcaggtgctcaaggcggctttggtggcggagcaggcggctttggtggttttgacggaggcggctttggtggttttgaagatatcttctcaagcttctttggtggcggtggaagccgaaacccaaatgcccctcgtcaaggtgacgatttgcaatatcgtgttaatttatcttttgaagaggctgtatttggtgttgaaaaagaagttagctataatcgcgaagcaacctgcggcacttgtttaggctcaggtgcaaaacctggtaccgctccagtaacttgtcgtaagtgccatggttcaggtgtaatgacaattgacacccaaacaccacttggtatgatgcgtcgacaagtcacctgcgatatttgtcatggtagtggtaaggaaattaaagaaccctgtcaaacctgtcacggtactggtcatgaaaagcaagctcataaagtgtctgttaagattccagctggtgtagagactggtcagcaaatccgtttacaaggtcaaggagaagctggctttaatggcggaccttatggtgatttatttgttattttgaatgtcttaccaagtaagcaatttgaacgcaatggttccactatttactacagcttagatatttcttttactcaagcagccttaggagatactgttgaaattccaacggttcatggcgatgttgagatggctatccctgctgggacacaaacaggtaaaaccttccgcctcaaaggcaaaggagcaccaaaactccgtggtggaggtcaaggggatcaacatgttaccgttaatattgtgaccccaaccaaactcaatgacgctcaaagggaagccttgcaagcatttgcagaagcgagtggtgataaaatgttacatccaaagaaaaaaggtttttttgataaagtgaaagatgccttagaggatatttaa

SEQ ID NO: 63862 - protein, 396 aa, Streptococcus pyogenes MGAS10394
MSDFLFFIESFYGLVSYIMNNTEYYDRLGVSKDASQDDIKKAYRKMSKKYHPDINKEAGAEQKYKDVQEAYETLSDSQKRAAYDQYGAAGAQGGFGGGAGGFGGFDGGGFGGFEDIFSSFFGGGGSRNPNAPRQGDDLQYRVNLSFEEAVFGVEKEVSYNREATCGTCLGSGAKPGTAPVTCRKCHGSGVMTIDTQTPLGMMRRQVTCDICHGSGKEIKEPCQTCHGTGHEKQAHKVSVKIPAGVETGQQIRLQGQGEAGFNGGPYGDLFVILNVLPSKQFERNGSTIYYSLDISFTQAALGDTVEIPTVHGDVEMAIPAGTQTGKTFRLKGKGAPKLRGGGQGDQHVTVNIVTPTKLNDAQREALQAFAEASGDKMLHPKKKGFFDKVKDALEDI

SEQ ID NO: 63863 - DNA, 1125 bp, Pseudomonas fluorescens Pf-5
  CDS (1)..(1125): transl_table=11
atggcaaagcgtgactattacgaagtgttgggtgtggagcgtggctccagcgatgcggagctgaaaaaggcttaccgtcgcttggcgatgaagcatcacccggaccgtaatcccggcgacaaagcgtcggaagacatgttcaaggaggccaacgaggcctacgaagtactgtccgattccagcaagcgtgccgcgtatgaccagtacggccacgctggtgtcgacccgagcatgggtggcggggggggcggcttcggcgggcagaacttctccgatatcttcggtgacgtgttcagtgatttcttcggtggcggtcgcggcggttcccgtggcggtgcgcaacgcggcagcgacctgcgttacaccctggagttgaacctggaagaggcggtgcgtggcaccacggtgaatatccgtgtgccgacactggtcaactgcaagccatgcgatggttcgggcgccaagaaggggtcttcccctgtcacttgtccgacctgtggcggtattggtcaggtgcgcatgcagcagggtttcttctcggtgcagcagacctgcccgcgctgccatggccagggcaagatcatttccgatccgtgcgattcgtgccacggcgaaggtcgggtcgaagagtacaagacgctgtcggtgaaagtgccggcaggtgtcgataccggcgaccgtattcgcctgtccggcgaaggcgaggcggggacccagggtggcccgactggcgacctgtatgtggtgatcaatgtgcgtgagcacgcgatcttccagcgcgacggcaagcacctgttctgtgaagtgcccatcagcttcgtagatgcggcgttgggtggcgagctggagattccgaccctggatggtcgggtcaagctgaagattcccgaaggaactcagaccggcaagcagttccggattcgtggcaagggcgttgctcccgtgcgtggcggcggtgctggcgacctgatgtgccgggttgcggtggagacgccagtgaacctgagtcgtcgtcagcgcgaactgctggaagagttgcgtggttcgctggatgacgacaactctcactcgccgaaaaccaccggctggttcgagggcgtcaagcgcttcttcggtgacctgtaa

SEQ ID NO: 63864 - protein, 374 aa, Pseudomonas fluorescens Pf-5
MAKRDYYEVLGVERGSSDAELKKAYRRLAMKHHPDRNPGDKASEDMFKEANEAYEVLSDSSKRAAYDQYGHAGVDPSMGGGGGGFGGQNFSDIFGDVFSDFFGGGRGGSRGGAQRGSDLRYTLELNLEEAVRGTTVNIRVPTLVNCKPCDGSGAKKGSSPVTCPTCGGIGQVRMQQGFFSVQQTCPRCHGQGKIISDPCDSCHGEGRVEEYKTLSVKVPAGVDTGDRIRLSGEGEAGTQGGPTGDLYVVINVREHAIFQRDGKHLFCEVPISFVDAALGGELEIPTLDGRVKLKIPEGTQTGKQFRIRGKGVAPVRGGGAGDLMCRVAVETPVNLSRRQRELLEELRGSLDDDNSHSPKTTGWFEGVKRFFGDL

SEQ ID NO: 63865 - DNA, 1125 bp, Psychrobacter arcticus 273-4
  CDS (1)..(1125): transl_table=11
atgagtaagcgcgatttttatgaaatactaggtgtcagtaagaccgctgataacaaagaggtcaagcgagcctaccgcaagcttgccatgaaataccatccagaccgtaactctgacgaccctgatgctgaagacaaatttaaagaagcatcgatggcttatgaagtattgagtagcgaagaaaaacgctcagcgtatgaccgtatgggtcatgctgcttttgaaaacggtatgggcggtggtggtggtggtggaaacttccaagatatcttcggcgatatttttggtaactttggcgatatttttggtcaatcacgtggcggcggcggtggacgttcgcgtcgcggctcagacctgcgttatgtgattgagctgactttagaggaagcggtacgcggctgcaaaaaagaaatcagctttactgcacctgcgccttgcgatacctgtgatggtaaaggcgcaaaaaatgcctctgatatcgtgacttgtcaaacctgtcatggtcaaggtcaagtccgtatgcagcaaggtttctttgctgttcaacaagcctgcccacattgtggcggtactggcaaacaaatcaaaaatccttgttctgactgtcatggtaatggcgtcaaggataagtcgcgcacgctagaagtctctatcccagcaggcgttgatgatggcgatcgcgtacgtttgtcaggcgaaggcgaagcgggcggcgctggcgtacaaaacggcgatttatacgtcgaagtacgtgttaaaccgcacaatgtctttacacgccaaggtgccgatctgtatatggatgtacctattagtattactgatgcagctttgggtaaagaagttgaaatcccaaccttagacggcaaagtcaaaatcaaagtcgccgaagggacacaaagtggtaagttgctgcgagtacgtggtagaggtgtgacgccagtacgtactacgatgaaaggtgatttgatttgccgtgtggtcatcgaaacgccagtgaatttaacccgtgagcaaaaagatctgttacgtcagttccaagatacgcttgatggtgatagcaagcatcagcagtcaccacataaaaaatctttctttaaaaagattggtgatttgttcgactaa

SEQ ID NO: 63866 - protein, 374 aa, Psychrobacter arcticus 273-4
MSKRDFYEILGVSKTADNKEVKRAYRKLAMKYHPDRNSDDPDAEDKFKEASMAYEVLSSEEKRSAYDRMGHAAFENGMGGGGGGGNFQDIFGDIFGNFGDIFGQSRGGGGGRSRRGSDLRYVIELTLEEAVRGCKKEISFTAPAPCDTCDGKGAKNASDIVTCQTCHGQGQVRMQQGFFAVQQACPHCGGTGKQIKNPCSDCHGNGVKDKSRTLEVSIPAGVDDGDRVRLSGEGEAGGAGVQNGDLYVEVRVKPHNVFTRQGADLYMDVPISITDAALGKEVEIPTLDGKVKIKVAEGTQSGKLLRVRGRGVTPVRTTMKGDLICRVVIETPVNLTREQKDLLRQFQDTLDGDSKHQQSPHKKSFFKKIGDLFD

SEQ ID NO: 63867 - DNA, 1137 bp, Colwellia psychrerythraea 34H
  CDS (1)..(1137): transl_table=11
atgtcaaaacgtgattattatgaaacattaggggttagccaagacgcctctgagaaagaagttaaaaaagcctataaaaaattagcaatgaaatatcacccagaccgtactcaaggtgataagtctaaagaagaaacgtttaaagaagttaaagaggcctatgaaatcctcaatgacgaccaaaagcgtgctgcttacgaccagtatggtcatgctgcttttgaacaaggtggtaacggtggcggcggcggtggtcatggtggtggatttggtcaagacttcggcgatatttttggtgatatttttggaggcggcggcggtggtcgtggacgtcagcgtcagcaacgtggttcagatttacgttataacgtagatttatcacttgaagatgcggttaagggtaaaagcttagaaattaaagtaccgacgtatgttagctgtgaaccttgtgatggctctggagctaagaaaggcacttcagctaaaacatgtagcacttgtcatggccacggccaagtacaaatgcgtcaagggttatttgctgttcagcaaacgtgtcctacttgtagtggcaagggtaaagttattgctgataagtgtacttcatgtcgtggtcaagggcgtgtggagaaaacgaaaacgttatcagttaaaattccagcgggcgttgatactggcgatagaattcgtttatcaggtgaaggtgaagccggagaacatggcgcaccagcaggcgatttatatgtacaagtaaatgtacgagaccacgaaatatttgttcgtgatgaaaatcacttatattgtgaagtgcctattagctttgttactgctgccttaggtggtgatattgaagtaccgacgcttggtggtaaagttaagctgaaagtgcctaaagaaacacaaacaggtaagatgttccgtttgcgtggtaaaggcgttaagtctgtacgtagttctactaccggtgatttgatgtgtaaagtcgttattgaaacgcctgttaacttatcaggtgatcaggctgacttattacgtcaattagaagaaaaaatggcgagtagcagcaagaaacacagtccaaaagaaaccggtttttttgacggtgttaagaaattttttgatgatcttaaaagctag

SEQ ID NO: 63868 - protein, 378 aa, Colwellia psychrerythraea 34H
MSKRDYYETLGVSQDASEKEVKKAYKKLAMKYHPDRTQGDKSKEETFKEVKEAYEILNDDQKRAAYDQYGHAAFEQGGNGGGGGGHGGGFGQDFGDIFGDIFGGGGGGRGRQRQQRGSDLRYNVDLSLEDAVKGKSLEIKVPTYVSCEPCDGSGAKKGTSAKTCSTCHGHGQVQMRQGLFAVQQTCPTCSGKGKVIADKCTSCRGQGRVEKTKTLSVKIPAGVDTGDRIRLSGEGEAGEHGAPAGDLYVQVNVRDHEIFVRDENHLYCEVPISFVTAALGGDIEVPTLGGKVKLKVPKETQTGKMFRLRGKGVKSVRSSTTGDLMCKVVIETPVNLSGDQADLLRQLEEKMASSSKKHSPKETGFFDGVKKFFDDLKS

SEQ ID NO: 63869 - DNA, 1140 bp, Ralstonia eutropha JMP134
  CDS (1)..(1140): transl_table=11
atggcaaaacgtgactactacgaagtgctcggggtaggcaagaacgcgagcgacgacgagatcaagaaggcttatcgcaagctcgcgatgaaataccacccggaccgcaatccggacagcaaggaatccgaggaaaagttcaaggaggtcaaagaggcctacgagatgctttccgacgcggagaagaaggcggcctatgaccagtatggtcatgccggcgtcgatccgaacatggcaggcggctttggcggcggtcagggctacggcggctttgccgaagcgttcggcgacatcttcggcgacatcttcggccagcaggccggcggtggccgccgcggtggcggtggcccgcaggcctaccgcggcgccgacctgcgctacagcatggaaatctcgctggagcaggccgcgcatggccacgaggcgcagatccgcgtgccgcactgggacgattgcgaccactgccacggcaatggcgccgagcccggctcgagcgtggaaacctgcccgacctgccacggcgccggccaggtgcgcgtgtcgcagggctttttcagcatgcagcagacctgcccgaaatgccacggcagcggcaagttcattccgaagccgtgcaccaagtgccacggccagggcaagctgaagtcgcagaagacgctggaagtgaagattccggctggcatcgacgaaggcatgcgcatccgctcgtcgggcaacggcgagccgggcatcaacggcggcccgccgggcgacctgtatgtcgaagtccatatcaaggcccatccggtgttcgagcgcgacggcgacgacctgcactgccagatgccgatttccttcgccaccgcggcgctgggcggcgatctggaagtgccgacgctgaacggcaaggccacgttcccggtgcctgaagccacccagtcgggcaagacgttccgcctgcgcggcaaaggcatcaagggcgtgcgttcgggctatccgggcgatctctacgtgcatgtgaacgtggagacgccggtcaagctgaccgaggcccagaaggacatgctgcgccagttcgaccgctctgtgcacgaaggcggctcgcgccacagtccgcaggagcagtcctggctggacaaggtgaagagcttcttcagctaa

SEQ ID NO: 63870 - protein, 379 aa, Ralstonia eutropha JMP134
MAKRDYYEVLGVGKNASDDEIKKAYRKLAMKYHPDRNPDSKESEEKFKEVKEAYEMLSDAEKKAAYDQYGHAGVDPNMAGGFGGGQGYGGFAEAFGDIFGDIFGQQAGGGRRGGGGPQAYRGADLRYSMEISLEQAAHGHEAQIRVPHWDDCDHCHGNGAEPGSSVETCPTCHGAGQVRVSQGFFSMQQTCPKCHGSGKFIPKPCTKCHGQGKLKSQKTLEVKIPAGIDEGMRIRSSGNGEPGINGGPPGDLYVEVHIKAHPVFERDGDDLHCQMPISFATAALGGDLEVPTLNGKATFPVPEATQSGKTFRLRGKGIKGVRSGYPGDLYVHVNVETPVKLTEAQKDMLRQFDRSVHEGGSRHSPQEQSWLDKVKSFFS

SEQ ID NO: 63871 - DNA, 1149 bp, Ehrlichia canis str. Jake
  CDS (1)..(1149): transl_table=11
atgagcaaaagcgactattatgaactattaggtgtaagcaaaaatgcaacatcagaagaaataaagaaagcttatagaaaaatggcactaaagtatcaccctgatacaaatcctggtaataaagaagcagaagaaaagtttaaagagttgtcagaagcatatgatgttcttatagatcaagataaaagagcagcttacgataaatatggacataatgcttttgatggtgctgctggaagaggcggttttgactttaatagtggtttttctggtgacttttctgatatatttaatgatctttttggtggtggtttcggcagtagaggaggaagaggttcatccagaagaagtgaaggtgctgcaggttcagacttaagattcgacgtagaaataacactggaagactcttttaatggtaagaaggtacctataagttatgtaacttatgtaaagtgttccagctgtagcggttcaggaagtgagggatcagcaaaatctgtacaatgtaatacgtgtcatggtgcaggtagtgttaggacacaacaaggattttttacaatagaaagaacttgccatgtgtgcaacggagaaggtgaaattatacaaaacaaatgtaagaaatgctcaggaagtggtcgtgttagagatgaagtaaatttacttgttacaattccaaaaggaatagaaagtggaaataaaattagattaaacgggaaaggggaagcagggtacagaggagcaagaagtggagatttatacgtctattctaacatacaaaaacataaatttttcacacgtagtggacctgatctatattgtactgtacctataaagatgacacttgctgcactaggtggacacatagaaatgccatctatagacggtacatggacaaaagtaaaagttccagaaggatcacaaagtggtgataaattaaggttaaaagaaaagggaatgccagttataaactcatcaaaaagaggtgatatgtatatacagataaccgtagaaactccagtgaaattaacaaaaaaacaaaaagaacttttacaaaaatttgatgatgaacctaatgtagattgtaaccctcaatctacaggcttttttcaaaaagtaaaaagtttttggaaagacattagatcaaattaa

SEQ ID NO: 63872 - protein, 382 aa, Ehrlichia canis str. Jake
MSKSDYYELLGVSKNATSEEIKKAYRKMALKYHPDTNPGNKEAEEKFKELSEAYDVLIDQDKRAAYDKYGHNAFDGAAGRGGFDFNSGFSGDFSDIFNDLFGGGFGSRGGRGSSRRSEGAAGSDLRFDVEITLEDSFNGKKVPISYVTYVKCSSCSGSGSEGSAKSVQCNTCHGAGSVRTQQGFFTIERTCHVCNGEGEIIQNKCKKCSGSGRVRDEVNLLVTIPKGIESGNKIRLNGKGEAGYRGARSGDLYVYSNIQKHKFFTRSGPDLYCTVPIKMTLAALGGHIEMPSIDGTWTKVKVPEGSQSGDKLRLKEKGMPVINSSKRGDMYIQITVETPVKLTKKQKELLQKFDDEPNVDCNPQSTGFFQKVKSFWKDIRSN

SEQ ID NO: 63873 - DNA, 1119 bp, Thiobacillus denitrificans ATCC 25259
  CDS (1)..(1119): transl_table=11
atgtctaaacgcgactactacgaagtcctcggcgtcgccaagaacgcctccgacgaagaaatcaagaaggcctaccgcaagctggccatgaaacaccatcccgatcgcaacccgggcgaccatgcggcagaggataaattcaaggaagccaagcaggcctacgaaatcctgtccgattccgacaagcgcgcggcctacgaccagttcggccacgccggcgtcgacccgcagtccggaatgggcggtggaggcttcggcggcggcggattctcggacgccttctcggacatcttcggcgacatcttcggcgggggcggcggcaaccgccgcgaccgcgtctaccgcggcgccgacctgcgctacaacctcgagatcggactcgaggaggcagcgcgcggcaccgaaaccaagatccgcattccgacgctcgaggaatgcggcacctgccacggcagcggcgccaagcccggtacccagccgacgacctgcagcgcctgcggcgggcatggccaggtacgcgtgcagcagggcttcttctcggtgcagcagacctgcccgcgctgcggcggaaccggcaagatggtgtccgacccctgcccgagctgccacggcgaaggccgggtcaagaagcacaagacgctgtcggtcaagattccggccggcgtcgacagcggtgaccgcatccgcctcgctggcgaaggcgaagccggggtcaacggtgggccctcgggcgatctctacgtcgtgatccacctcaaggatcacccggtattcaagcgcgacggcgacgacctgcactgcgaaatgccgatcagcttcgccaccgcggcactcggcggcgaggtcgaaatccccacgctcgacggtcacgccaaaatcaagatcccggccgaaacccagtccggcaaggtgttccgcctgcgcggcaagggcatcaaaggcgtgcgcagccacgccccgggcgacctgctgtgccacatgctcgtcgaaacgccggtgaacctgtccgagcgccaacgcgaactgctgcgcgaattcgaggcgctgagcccgggacgcaacaacaacccgcgcgcccagtccttcatggacaaggtgaaatccttcttcggaacctag

SEQ ID NO: 63874 - protein, 372 aa, Thiobacillus denitrificans ATCC 25259
MSKRDYYEVLGVAKNASDEEIKKAYRKLAMKHHPDRNPGDHAAEDKFKEAKQAYEILSDSDKRAAYDQFGHAGVDPQSGMGGGGFGGGGFSDAFSDIFGDIFGGGGGNRRDRVYRGADLRYNLEIGLEEAARGTETKIRIPTLEECGTCHGSGAKPGTQPTTCSACGGHGQVRVQQGFFSVQQTCPRCGGTGKMVSDPCPSCHGEGRVKKHKTLSVKIPAGVDSGDRIRLAGEGEAGVNGGPSGDLYVVIHLKDHPVFKRDGDDLHCEMPISFATAALGGEVEIPTLDGHAKIKIPAETQSGKVFRLRGKGIKGVRSHAPGDLLCHMLVETPVNLSERQRELLREFEALSPGRNNNPRAQSFMDKVKSFFGT

SEQ ID NO: 63875 - DNA, 1116 bp, Streptococcus agalactiae A909
  CDS (1)..(1116): transl_table=11
atgaacaatacagaattttatgatcgtcttggcgtttcaaaagatgcttctcaggacgaaataaaaaaagcttaccgtaggatgtctaagaaataccatccagatattaataaggaagcgggagcagaggaaaaatataaagaggttcaagaagcttatgaaaccttgagtgatacacaaaaacgtgctgcctatgatcaatatggcgctgctggggcaaatggcggttttggtggcttcgatggtggtggctttggtggttttgaagacatcttctcaagcttttttggtggaggagggatgcgcaatcctaatgcaccacgtcaaggagatgacctacaatatcgtgttaatttaagttttgaagaagctatctttggagctgaaaaagaagtatcttataatcgggagtcatcatgtcatacttgttcaggaagtggagctaagccaggtactagccctgtgacttgtcaaaagtgtcatggttcgggtgtgattaatgttgatacacaaacacctctaggaacaatgcgtcgccaagtgacttgtgatgtttgtcagggtagtggtcaagaaatcaaagagaaatgtccaacatgtcatggaactggtcatgagaagaagacgcataaagtatcagttaaaatacctgcaggagttgaaactgggcaacaaattcgtttaacaggacaaggtgaagctggcttcaatggtgggccttatggtgatctctttgttattattaacgttctcccaagccaacagtttgagcgtaatggatcaacaatttattatactttgaatattagctttgtccaagctgctttgggtgatacaattgatatacctactgtccatggagcggtagaaatgtcaattcctgctggtactcagacaggaaaaacattccgtcttcgcggaaaaggtgcccctaaacttcgagggggtggacaaggtgatcagcatgttactgttaacatcgtaactcctactaaattgaatgatgctcaaaaagaggcattgcacgcttttgcagaggcaagtggagataagatggtacatccgaagaagaaaggtttctttgataaagtcaaagatgctttagatgttgattaa

SEQ ID NO: 63876 - protein, 371 aa, Streptococcus agalactiae A909
MNNTEFYDRLGVSKDASQDEIKKAYRRMSKKYHPDINKEAGAEEKYKEVQEAYETLSDTQKRAAYDQYGAAGANGGFGGFDGGGFGGFEDIFSSFFGGGGMRNPNAPRQGDDLQYRVNLSFEEAIFGAEKEVSYNRESSCHTCSGSGAKPGTSPVTCQKCHGSGVINVDTQTPLGTMRRQVTCDVCQGSGQEIKEKCPTCHGTGHEKKTHKVSVKIPAGVETGQQIRLTGQGEAGFNGGPYGDLFVIINVLPSQQFERNGSTIYYTLNISFVQAALGDTIDIPTVHGAVEMSIPAGTQTGKTFRLRGKGAPKLRGGGQGDQHVTVNIVTPTKLNDAQKEALHAFAEASGDKMVHPKKKGFFDKVKDALDVD

SEQ ID NO: 63877 - DNA, 1119 bp, Geobacter metallireducens GS-15
  CDS (1)..(1119): transl_table=11
ttggcagaaaaacgcgactactacgaggttctcgaggtccaccgcaacgcgtcggacaccgagatcaagaaggcattccgcaagctggccatccagtaccacccggacaagaaccccggcgacaaggagtccgaggagaagttcaaggaaattaccgaggcttacgaggttctctccgactcccagaagcgggcccagtacgatcagttcggtcatgccggcctcggggccggcggcttttcctctggcggcttcggtggtttcggcgccggaactccctttggcgacatctttggggacatcttcggcgatatcttcggggggcgtccccgggggagccggggacggcggggggacgatctccagtacaacctggagctctccttcgaggaggccgccttcggggtggagaaggagatcctggtacccttcggcaagcggtgcgacgaatgcggcggcagcggcgccaagcccggcaccgagcccaaggtctgccccacctgccgcggcgccggccaggtccggttccagcaggggtttttcagcgtcagcaagacctgcagccactgcaatggcgagggacgcgtggtggagaacccgtgtcccacctgtcgggggaacggcatggtgcgggacaccaagaccctctcggtgaaagtaccggctggcgtcgaaaccggcacccgcctcaagatgaccggagagggggggcaggggaccaaaggggggggcaacggcgacctttacgtggccattgccgtgaaggagcatccaatcttcacccgggaggataacgacgtcatctgcgagatccccatcagcttcgtccaggcggccctgggatgcgagatggaggtgccgacccttgacggcaaggtttccatgaaagtccccgagggtacccagtcggggaggatattccgcctcaggggcaagggggttccccaactccaggggtacggtcggggcgaccagatggtggtcgtcaaggtggagaccccctcaaatctcaacaagcgccagagggagctccttgaagaattcgcccgcatcagcggcgaagacgcccaccccatgaagaagaacttcttcgacaaggtcatggacctctttagctga

SEQ ID NO: 63878 - protein, 372 aa, Geobacter metallireducens GS-15
MAEKRDYYEVLEVHRNASDTEIKKAFRKLAIQYHPDKNPGDKESEEKFKEITEAYEVLSDSQKRAQYDQFGHAGLGAGGFSSGGFGGFGAGTPFGDIFGDIFGDIFGGRPRGSRGRRGDDLQYNLELSFEEAAFGVEKEILVPFGKRCDECGGSGAKPGTEPKVCPTCRGAGQVRFQQGFFSVSKTCSHCNGEGRVVENPCPTCRGNGMVRDTKTLSVKVPAGVETGTRLKMTGEGGQGTKGGGNGDLYVAIAVKEHPIFTREDNDVICEIPISFVQAALGCEMEVPTLDGKVSMKVPEGTQSGRIFRLRGKGVPQLQGYGRGDQMVVVKVETPSNLNKRQRELLEEFARISGEDAHPMKKNFFDKVMDLFS

SEQ ID NO: 63879 - DNA, 1149 bp, Anaplasma phagocytophilum HZ
  CDS (1)..(1149): transl_table=11
atgggaagtaatgactattacgatttactaggagtaagtaggggtgctagtgaagaagagataaagaagtcttatagaaaaaaagtttttgagtaccatcctgatagaaatcctggaaataaagaagccgaggagaagtttaagaagattagcgaagcatacgatgttctaacggatagtgataagagagcagcgtatgatcggtatgggcacagtgcctttgccaacggtatgggtggaaatcagggttttactggaggctttgacggagggttctctactgatttttctgacatatttaatgacttcttcggaggagggtttggtaaaacctcacgccagagcagtcgtgagaatatgcgtggctctgatttaagatacgatattgaagtaaccttggaagatgcgtttaagggagtgaaggttcctatcagctatgtaacccatgtgcagtgtagccattgtagtggtagtggcggtgagggaactgcaaagtctgttaaatgtggaacatgtaatggtgctggaaggatacggacacggaaagggttccttacaatagaagaattatgccacacatgcagtggtgaaggagaggtagtaaaaaataagtgcaaacgttgcgctggaagtggaagagttagaaatgaagttggaatcctagttactgttccgaggggaatagaaaatggaaacaaagtaagggtaaacggtaagggagaagctggttatagaggagctagaagcggagatctatacgtttacgttgtggtaaaagatcacaagttttttacaagaaggggaatggacttgtattgtaatgtaccaattaagatgactttagctgccttaggtggagaaattgagatgccttccattgatggaacgtggacgaagctcaagatacctgaggggacgcagagtaatgataaactgcgtatgcgtggtaagggtatgcctgacatacaaggtggggaaagacgtggagatatgtatgtacaggtgacagtagagactcctgtaaagttaacaaagaaacaagaagagcttctcaagcagtttgaagatgagtctaatgcgaatagcagtccaaaattctcaggattctttcaaaagataaaaggaatttggaaggatataagctcttag

SEQ ID NO: 63880 - protein, 382 aa, Anaplasma phagocytophilum HZ
MGSNDYYDLLGVSRGASEEEIKKSYRKKVFEYHPDRNPGNKEAEEKFKKISEAYDVLTDSDKRAAYDRYGHSAFANGMGGNQGFTGGFDGGFSTDFSDIFNDFFGGGFGKTSRQSSRENMRGSDLRYDIEVTLEDAFKGVKVPISYVTHVQCSHCSGSGGEGTAKSVKCGTCNGAGRIRTRKGFLTIEELCHTCSGEGEVVKNKCKRCAGSGRVRNEVGILVTVPRGIENGNKVRVNGKGEAGYRGARSGDLYVYVVVKDHKFFTRRGMDLYCNVPIKMTLAALGGEIEMPSIDGTWTKLKIPEGTQSNDKLRMRGKGMPDIQGGERRGDMYVQVTVETPVKLTKKQEELLKQFEDESNANSSPKFSGFFQKIKGIWKDISS

SEQ ID NO: 63881 - DNA, 1134 bp, Desulfitobacterium hafniense Y51
  CDS (1)..(1134): transl_table=11
atgaaacgggattattatgaagtacttggtgtctctaaaagcgcagacgaacaagaaatcaaaaaggcctatcgaaaactggcccgccaatatcatcctgatgtgaacccgggagataaagacgcggaagaaaaattcaaagaggcaactgaagcctatgatgttttaagcgatactgaaaaacgtgcccgctacgatcaaatgggccattccgccttcgatcccaaccaacaaggttttggcgggttcggcggagatttcggcggctttggggatatcttcgatatgtttttcggcggcggcggtggcggtggtcagcggcggcagggtcctacccgggggaatgaccttcgctatgacttaaccattacttttgaagaggctgcctttggtaccgagaaagagattcaggttccccgtcaagaaacctgcacggaatgccatggctccggttcagcccccggcacccatcctaccacctgttcccaatgtcacggaacagggcaggttaaagctacccaacggactccttttggcgcgattcaaacagcaagaacttgccctgcctgcaatggctcaggtcaatttatatcttctccatgtaaggaatgcagtggcaagggaaccacacggaaggtcaaaaccattaaagtcactgtccccccagggtcggaggatggccttaaccttcgtttcagcggcaatggggaagcagggctgcggggaggcccatcaggagacctttatgtggtcctcaatgtgaaagcccataaattctttgaaagagaagggaacgacgtctattgcgagattcccataacctttgtacaggccgccctcgggtcggagctcgatgttcccaccttggatggcaaagtcaaaatgaagatacccgaaggcacccagactgctacggtgttccggctgaggggtcatggcattccttaccgccgcggcaacgggagaggggatcagcatgtgagagtagttgtggccactccgactaaactcaccgaccgccaaaaggagctgctgcgtgagttcggggaagtcaccagcgatcagcagcagatgggcaaaaaatccttcttcgagaaggtcaaagaaaatatccgggacgctatagatctgtag

SEQ ID NO: 63882 - protein, 377 aa, Desulfitobacterium hafniense Y51
MKRDYYEVLGVSKSADEQEIKKAYRKLARQYHPDVNPGDKDAEEKFKEATEAYDVLSDTEKRARYDQMGHSAFDPNQQGFGGFGGDFGGFGDIFDMFFGGGGGGGQRRQGPTRGNDLRYDLTITFEEAAFGTEKEIQVPRQETCTECHGSGSAPGTHPTTCSQCHGTGQVKATQRTPFGAIQTARTCPACNGSGQFISSPCKECSGKGTTRKVKTIKVTVPPGSEDGLNLRFSGNGEAGLRGGPSGDLYVVLNVKAHKFFEREGNDVYCEIPITFVQAALGSELDVPTLDGKVKMKIPEGTQTATVFRLRGHGIPYRRGNGRGDQHVRVVVATPTKLTDRQKELLREFGEVTSDQQQMGKKSFFEKVKENIRDAIDL

SEQ ID NO: 63883 - DNA, 1122 bp, Methylobacillus flagellatus KT
  CDS (1)..(1122): transl_table=11
atggcaaaaagagattattacgaggtactcggtgtcaaccgggacgctacggatgaagaaatcaagaaggcttaccgcaagctggcgatgaaatatcatccggaccggaacccggacaacccaaaagccgaagaacacttcaaggaagccaaggaggcctatgaagtgctttctgacgaccagaagcgcgcggcatacgatcaatacggtcatgcgggcgtagacccgagcgctgctgctggcgcgggagcaggtggtttcggcaatttcgccgatgccttcggcgacatctttggcgatattttcggtgggggcggaggcggccgacgctccaatgtctaccgtggtgcagatctgcgctacaacatggaaatctccctggaagaagccgcacggggtacagaaaccaagatccgtatccccgtcatggcagagtgtgaaacttgccacggctcaggcgcacgccctggcacccagcccgttacctgctccacttgcggcggccatggccaggtgcgcatgcagcaaggcttcttctccgtgcaacagacctgccccaagtgccatgggtccggcaagatggtcaaggacccctgccccacctgccatggtggtggacgcgtcaagcagcacaagacgctgtcggtcaagattccggctggcgtggacgagggcgaccgcatccgcctctctggcgaaggcgaagctggtgtcaatggcggaccacctggggatctctatgttgtggtgcacctgaagaagcatccaatctttgagcgcgacggtgccaacctgcattgcgaaatgccgatcagcttcacgacagcagccctgggcggcgaaattgaaatcccgaccctggacggtcacgccaagatgaaggtgccgccggagacccagaccggtgctgtgttccgcctgcgtggcaagggcatcaagccattgcgcagcaacgagcatggcgacttgttttgccatgtcatcgtagaaacaccggtcaagctgacggaacgccagaaagagttgttacgggaactggaggatatcaaccagcaggactccgggaaacacagccccagagagaaatcctggatgaccaaggtgaaagatttctttcagtaa

SEQ ID NO: 63884 - protein, 373 aa, Methylobacillus flagellatus KT
MAKRDYYEVLGVNRDATDEEIKKAYRKLAMKYHPDRNPDNPKAEEHFKEAKEAYEVLSDDQKRAAYDQYGHAGVDPSAAAGAGAGGFGNFADAFGDIFGDIFGGGGGGRRSNVYRGADLRYNMEISLEEAARGTETKIRIPVMAECETCHGSGARPGTQPVTCSTCGGHGQVRMQQGFFSVQQTCPKCHGSGKMVKDPCPTCHGGGRVKQHKTLSVKIPAGVDEGDRIRLSGEGEAGVNGGPPGDLYVVVHLKKHPIFERDGANLHCEMPISFTTAALGGEIEIPTLDGHAKMKVPPETQTGAVFRLRGKGIKPLRSNEHGDLFCHVIVETPVKLTERQKELLRELEDINQQDSGKHSPREKSWMTKVKDFFQ

SEQ ID NO: 63885 - DNA, 1140 bp, Cytophaga hutchinsonii ATCC 33406
  CDS (1)..(1140): transl_table=11
atggcaaagagagattattacgaagtactggaaattacaaaatcagcttctgcagacgagattaaaaaagcgtaccgtaagttagcgattaaatttcacccggataaaaatccagacaatcctgaagcagaagaaaaatttaaagaagctgctgaggcatatgaagtattaagtacgccggaaaaacgtcagcgttacgatcaatacggtcatcaggctgctggcggcggcggttacggcggcggtatgaatatggatgacatattctcacaattcggggatgtatttggcagcggcggctctccgtttgaaagtttctttggcggcggtggcggcggcagaggacgtggtgttcgtaaaggttccaacctgcgcattaagttgaaactaaacttagaagaaattgcaaatggttgtgaaaagaaaataaaagttaagcgccaggttgcctgcgacgagtgcagcggtaccggagctaaaaatggtgccgtacagaagtgtggtacatgtaacggcacaggccaggtgaagcgtgtggtaaatacgatgcttggacagatgatgtctgcaactacctgccctacgtgtaatggcgaaggcacaacgattaaagataaatgtaccagctgccacgggcaaggtacggttgagaaagaagaaacaatcacgatcaaaatacctgcaggtgttgtagatggcatgcagctgtctatgagcggaaaagggaacatgcctccaagaggcggtgttgccggcgacttgttaatcctgatcgaagaaattgaagacgaacaattaaaacgggatggtttaaatatcatctacgaactatatgtaaccttctttgatgcggtattcggcaccagtgttgaagtaccaacggttgatggtaaagtgaagatcaaaattgaaccgggaacacaaagcggaaagattttacgtctgcgttctaaagggttaaaagatgtaaacagctaccagaaaggtgaccaactgatctacgttaatgtgtggacaccacaaactttatcaaaagaagaaaaagaattattggcaaccattaaagaatctgaaaacttcaaacccaatccgggtaagaatgacaaatcattcttcgaacgtatgaaagaattcttttaa

SEQ ID NO: 63886 - protein, 379 aa, Cytophaga hutchinsonii ATCC 33406
MAKRDYYEVLEITKSASADEIKKAYRKLAIKFHPDKNPDNPEAEEKFKEAAEAYEVLSTPEKRQRYDQYGHQAAGGGGYGGGMNMDDIFSQFGDVFGSGGSPFESFFGGGGGGRGRGVRKGSNLRIKLKLNLEEIANGCEKKIKVKRQVACDECSGTGAKNGAVQKCGTCNGTGQVKRVVNTMLGQMMSATTCPTCNGEGTTIKDKCTSCHGQGTVEKEETITIKIPAGVVDGMQLSMSGKGNMPPRGGVAGDLLILIEEIEDEQLKRDGLNIIYELYVTFFDAVFGTSVEVPTVDGKVKIKIEPGTQSGKILRLRSKGLKDVNSYQKGDQLIYVNVWTPQTLSKEEKELLATIKESENFKPNPGKNDKSFFERMKEFF

SEQ ID NO: 63887 - DNA, 1185 bp, Rhodococcus sp. RHA1
  CDS (1)..(1185): transl_table=11
gtgagccaacgggagtggatcgaaaaggacttctacaaggagctgggcgtctcgtcccacgcatccgcggacgagatcaagaaggcgtaccgcaaactcgcccgcgaccttcatcccgacgcgaaccccggcgacacgaaggccgaggagcgtttcaagtccgtcagcgaagcacacgccgtgctctcggaccctgccaagcgcaaggaatacgacgaggcccggcgactgttcgcgagcggcggtttcgggcagggcggcggcggattcaaccccggagccggtggtttcggccagggcggattcgacatcaacgacctgttcggtggcggcggcgcggcggccggtgacggcggcttcggcgacatcttcggtggcctgttcaatcgcggcgccggtggcggcggcgcgacccgcacgaccaaccgtccccgtcgtggcagcgacgtcgagacggagaccaccctcgaattccgcgaagccacgctcggcgtcacggttccgctgcgtctgaccagcccgtcgccgtgcaccacctgccacggcagcggtgccaagccgggaaccagcccgcgagtctgcccgcgttgcaacgggaccggaatcgtcagccgcaaccagggcgcgttcgggttcagtgagccgtgcgacgactgccgcggtaccggctccatcatcgactcgccgtgcgaggtgtgccacggcaacggcgtcaccaaccggactcgcaccatcaccgtccgcgtccccgcgggtgtcagtgacggacagaagatccggctggcaggccagggtgaggccggcctgcgcggcgcaccgtccggcgacctgttcgtcacggtccgggtgcgtcccgacaaggtgttcggccgcaacggcgacgacctcacgctcgtcgttcccgtcagttacggtgagctcgtgctcggaaccaccgtctccgtccccaccttggaggggcgtgtcggtgtgaagattcctgcgggcaccgccgacggccgggttctgcgggttcgcgggcgaggcgtccccaagcgtgccggtggcgccggtgacctactggtcacggtcaaggtcgccgttccgcagaagctcgacgacccggccaccgaagcattgaagacctatctggaagcagagaaggccagcggattcgatccgagggccgggtgggcgggtgcttga

SEQ ID NO: 63888 - protein, 394 aa, Rhodococcus sp. RHA1
MSQREWIEKDFYKELGVSSHASADEIKKAYRKLARDLHPDANPGDTKAEERFKSVSEAHAVLSDPAKRKEYDEARRLFASGGFGQGGGGFNPGAGGFGQGGFDINDLFGGGGAAAGDGGFGDIFGGLFNRGAGGGGATRTTNRPRRGSDVETETTLEFREATLGVTVPLRLTSPSPCTTCHGSGAKPGTSPRVCPRCNGTGIVSRNQGAFGFSEPCDDCRGTGSIIDSPCEVCHGNGVTNRTRTITVRVPAGVSDGQKIRLAGQGEAGLRGAPSGDLFVTVRVRPDKVFGRNGDDLTLVVPVSYGELVLGTTVSVPTLEGRVGVKIPAGTADGRVLRVRGRGVPKRAGGAGDLLVTVKVAVPQKLDDPATEALKTYLEAEKASGFDPRAGWAGA

SEQ ID NO: 63889 - DNA, 1125 bp, Trichodesmium erythraeum IMS101
  CDS (1)..(1125): transl_table=11
atggcccgcgattattacgaaattctaggtgtttctcgtagtgcagataaagaggaactaaagcgtgcctaccgtcgcttggctcgtaagtaccacccagatgtgaataaagaaccaggatcagaagagcgctttaaagagataaatcgagcttacgaaattctttcagatccagaaatgaaggcccgttttgatcgctttggagaagctggggtatcaggaggagcagcatcaggtttttcaacagacttttcagatagcttcgctgatatatttgaaagctttttcagtgggtttggaggagcgggaactcaaggacgtaggcgaacaggtccagtaagaggagatgacttacgtttagacttgaatctggagtttatcgaagctatatttggtggtgataaagaactaacaattaaacacctggaaacttgtggaacctgtaatggttcaggggctaaaccaggtacaaaacctcaaacttgctctacttgtgggggtacgggtcaagttcgccgagcgacaagaactccttttagtagtttcactcaagtttcagtttgtccctcatgtaacggtagtggacagataatagaagaaaaatgtgttgattgtggaggccgtggacagaaagaggctacaaaaaaaataaaaattactatcccagggggggtagacaatggtactaggttacgagtatctaatgaaggagatgcaggtcggatgggtggcccaccaggagacttgtatgtttttctatccgtaaaaaatcacccagagtttcaaagagatggaattaatattatctcccaaataaaaattagctatttacaagcaattctgggttgttgtttggaaataaatacagttgatggtaagacggaattaacaattccatcaggaactcagcctaatgcaattttaactttggaagataagggagtacctagactaggtaattcagtaagtcgtggggctcatctgattactatcgaaattgatattcccacaaaaattactccagaagaaaaagagttattggaaaaattggcaaagattaaaggtgaacgtactggaaaaggaggtatagaagggtttctgggaagttggtttcaacaaaagtga

SEQ ID NO: 63890 - protein, 374 aa, Trichodesmium erythraeum IMS101
MARDYYEILGVSRSADKEELKRAYRRLARKYHPDVNKEPGSEERFKEINRAYEILSDPEMKARFDRFGEAGVSGGAASGFSTDFSDSFADIFESFFSGFGGAGTQGRRRTGPVRGDDLRLDLNLEFIEAIFGGDKELTIKHLETCGTCNGSGAKPGTKPQTCSTCGGTGQVRRATRTPFSSFTQVSVCPSCNGSGQIIEEKCVDCGGRGQKEATKKIKITIPGGVDNGTRLRVSNEGDAGRMGGPPGDLYVFLSVKNHPEFQRDGINIISQIKISYLQAILGCCLEINTVDGKTELTIPSGTQPNAILTLEDKGVPRLGNSVSRGAHLITIEIDIPTKITPEEKELLEKLAKIKGERTGKGGIEGFLGSWFQQK

SEQ ID NO: 63891 - DNA, 1128 bp, Rhizobium leguminosarum bv. viciae 3841
  CDS (1)..(1128): transl_table=11
atggcaaaagcggacttttacgaaactctgggtgtagccaagtcggcggacgagaaagagctgaagagcgcctttcgcaaactggcgatgaaataccatccggacaagaacccggatgacaaggacgccgagcggaagttcaaggaaatcaacgaagcctacgagatgctcaaggacccgcagaagcgggcggcctatgatcggtatggtcatgcggccttcgagcatggcggcatgggcggcggcggcggcggatttgccggcggcggtttctccgatattttcgaagatatcttcggcgagatgatgggtggagggcgcgcgcgccagcgctcgtcgggcggccgcgaacgtggcgccgatcttcgctacaatatggaaataacgctggaagagtctttctccggcaagacggcgcagatccgcgttccgacgtcgatcacctgcgacgtctgttcgggttcaggcgccaagcccggcacgcagccgaagaactgcggcacctgccagggaacggggcgcgtgcgcgcggcacagggcttcttctcgatcgaacggacctgcccgacctgccacggccgcggccagatcattcccgatccgtgcccgaagtgccacggccagggccgggtgacggaagagcgttcgctctcggtcaatattcccgccggcatcgaggacggcacccgcatccggctgcagggcgaaggcgaggccggcgcccgtggcggaccggcaggcgacctctatatcttcctgtccgtcaaaccgcatgaattctaccagcgcgacggagccgatctctattgcgccgttccgatctcgatgacgacggccgcgctcggcggcaccttcgacgtggcgacgctcgacggcaccaagtcgcgcgtcaccgtgcccgagggcacccaggtcggcaaacagttccgcctcaagggcaagggcatgccggtgctgcgttcggtgcagacgggcgacctctacatccagatccagatcgagacgccgcaaaagctcaccaagcgccagcgcgaattgcttcaggaattcgagcagctttcctccaaggagaacaatcccgaatcgacgggcttctttgcccgcatgaaggaattcttcgaaggctga

SEQ ID NO: 63892 - protein, 375 aa, Rhizobium leguminosarum bv. viciae 3841
MAKADFYETLGVAKSADEKELKSAFRKLAMKYHPDKNPDDKDAERKFKEINEAYEMLKDPQKRAAYDRYGHAAFEHGGMGGGGGGFAGGGFSDIFEDIFGEMMGGGRARQRSSGGRERGADLRYNMEITLEESFSGKTAQIRVPTSITCDVCSGSGAKPGTQPKNCGTCQGTGRVRAAQGFFSIERTCPTCHGRGQIIPDPCPKCHGQGRVTEERSLSVNIPAGIEDGTRIRLQGEGEAGARGGPAGDLYIFLSVKPHEFYQRDGADLYCAVPISMTTAALGGTFDVATLDGTKSRVTVPEGTQVGKQFRLKGKGMPVLRSVQTGDLYIQIQIETPQKLTKRQRELLQEFEQLSSKENNPESTGFFARMKEFFEG

SEQ ID NO: 63893 - DNA, 1125 bp, Pediococcus pentosaceus ATCC 25745
  CDS (1)..(1125): transl_table=11
atggctgcaaataaagattattatgacattctaggcgttagtaaggatgcgtctgatgatgaaattaagaaggcctatcgtaagctttctaaaaagtatcatccagatatcaataaagcacctgatgccgaacagaagtttaaagacgtcaatgaggcgtatgaagtcttaggtgactctcaaaaacgtgctcaatatgatcaatttggttcagctgatccgaatgctggctttggtggcggtggatttggcggccaaggtggttttagtgactttggtggtggattcgaagatatctttggttcattctttggtggtggacaacgccaatcaccaaatcaaccacgccagggagaagatttgcaataccaaatgagccttaaatttgaggaagctatctttggtaagaagacgaccatcaagtactctcgtgaagccctatgtaaaacttgtggtggatctggtgctaaagaaggtacttctcccgtaacttgtcataagtgtaatggtacgggtacgattcaagtaacccaaaatacgccacttggtagaatggttcgccaacaaacttgtgatgtatgtaatggtacgggtaaggaaattaaagaaaaatgtcctacttgtggtggtacaggtcatacttctcaacaacacgaagttaaggtatcggttcctgctggggttgaagatggtcaacaaatgcgtcttcaaggccaaggagaagctggatttaatggaggtccttatggggacttatacattattttccaagttcaaccaagcgatatgtatgaacgagatggttcagaaatttattacaaccaaacgatttcatttgttcaggcagctttgggtgacgaaattgaagtaccaaccgtacatggtaaggttaaattaaaggttccagctggtacccaaacgggaactaacttccgtttgaaaggtaagggagcaccacgtttacgtggtaatggaactggtgaccagcatgttaaagttaaggtcactgtacctaagaagcttaacagcggacaaaaggaagctttgaaacaatttgctaaagctagtggtgaagaaccttctggtcatggtaagagtggtttctttgataagtttatgaattag

SEQ ID NO: 63894 - protein, 374 aa, Pediococcus pentosaceus ATCC 25745
MAANKDYYDILGVSKDASDDEIKKAYRKLSKKYHPDINKAPDAEQKFKDVNEAYEVLGDSQKRAQYDQFGSADPNAGFGGGGFGGQGGFSDFGGGFEDIFGSFFGGGQRQSPNQPRQGEDLQYQMSLKFEEAIFGKKTTIKYSREALCKTCGGSGAKEGTSPVTCHKCNGTGTIQVTQNTPLGRMVRQQTCDVCNGTGKEIKEKCPTCGGTGHTSQQHEVKVSVPAGVEDGQQMRLQGQGEAGFNGGPYGDLYIIFQVQPSDMYERDGSEIYYNQTISFVQAALGDEIEVPTVHGKVKLKVPAGTQTGTNFRLKGKGAPRLRGNGTGDQHVKVKVTVPKKLNSGQKEALKQFAKASGEEPSGHGKSGFFDKFMN

SEQ ID NO: 63895 - DNA, 1137 bp, Magnetococcus sp. MC-1
  CDS (1)..(1137): transl_table=11
atgtccaaggatctctacgaaattctgggtgtgtcaaagggtgcgaatgacgctgaaatcaaggcagcctatcgcaagttggcgatgaagctgcaccctgaccgcaatccgggtaatgatgcagcagaagcgcagtttaaggaggtcaatgcagcctatgaggtgttgaaagatcctcaaaagcgcaccatctatgaccagtatggtcatgccggtttggggcagggtggccccggtggacctggcggctttggtggacagggcggcgcaggctttggggatatttttgaagagtttttcggggatatttttgggggcggtcgacaaacccgtgggggggggcgtagtggggcccgtcagggtgaagattatcgctacgacctgcgggtgacgttagaagaggtggcgcggggggtggaaaagcgggtacgcattccctccatgagcacctgtgatacctgtcacggcagtggcgcgcgctcgggcagtaagcccaccacctgtaccacctgtgggggggccgggcagatacgcactcagcaaggctttttccaggtgcaacgggcctgtcatgtctgtcacggtaagggacagattatctcagatccctgtcccgattgtgggggcgcgggtcggcagaagaaggaaaaaaccctcaccgtaaaaattccaccaggggtggataccggtacgcgcattcgtctctctggcgaagggggggcaggcattcagggtggcccggcgggggatctgtatattatcaccgaggttgaaccccatagcatgtttgagcgctatggggtggatctattgtgtgtggtgcccattaccttcccgcaggcagcgttgggggccaagctggaggtgcccaccctcaacggcaaggcccgtattaccttgccagcgggcagtcagaccggtaagcgtttggtgttgcgcagtaaaggtttgccccatttgaaccgccccggcatgttgggcgatctggtggtggaggtgcgggtagagacgccggtcaaactgaccaccaagcagaaagagctgcttgaagagtttgaccgttgcggcgatcccgactcgcagcccgattctgtgggcttttttgacaaggttaaagagtttctaggcggcaattaa

SEQ ID NO: 63896 - protein, 378 aa, Magnetococcus sp. MC-1
MSKDLYEILGVSKGANDAEIKAAYRKLAMKLHPDRNPGNDAAEAQFKEVNAAYEVLKDPQKRTIYDQYGHAGLGQGGPGGPGGFGGQGGAGFGDIFEEFFGDIFGGGRQTRGGGRSGARQGEDYRYDLRVTLEEVARGVEKRVRIPSMSTCDTCHGSGARSGSKPTTCTTCGGAGQIRTQQGFFQVQRACHVCHGKGQIISDPCPDCGGAGRQKKEKTLTVKIPPGVDTGTRIRLSGEGGAGIQGGPAGDLYIITEVEPHSMFERYGVDLLCVVPITFPQAALGAKLEVPTLNGKARITLPAGSQTGKRLVLRSKGLPHLNRPGMLGDLVVEVRVETPVKLTTKQKELLEEFDRCGDPDSQPDSVGFFDKVKEFLGGN

SEQ ID NO: 63897 - DNA, 1128 bp, Azoarcus sp. BH72
  CDS (1)..(1128): transl_table=11
atgtccaaaagggattactacgaggtgctcggcgtcaaccgcgacgccggggacgacgagatcaagaaggcctatcgcaagctggccatgaagtaccacccggaccgcaatccggacagcaaggaagccgaggaaaagttcaaggaagcgaaggaagcctacgaggttctttccgacgcccagaagaagggtgcctacgaccgctacggtcacgccggggttgatccgtcgatgggcggtggcggcggcgggcagggcttcgagggctttgccgacgccttcggcgacatcttcggcgacctgttcggcggccgcggcggtggcggcgggcgctccaacgtctatcgcggcgccgacctgcgctacaacctggaaatctcgctggaagaagccgcgcgcggcgcggagaagacgatccgcattcccaccgtggaagagtgcggcacctgccacggcagcggcgccaagcccggcacccagccgaagacctgccccacctgcggcggcgccggccaggtgcgcatccagcagggtttcttctccatccagcagacctgccccaagtgtcacggcaccgggcgcatcatccccgacccctgcggcgactgcggcggcgcgggccgggtgaagaagcagaagacgctggaagtgaagattcccgccggcatcgacgaaggcatgcgcctgcgccactccggccatggcgagcccggcgtgaacggtggccctccgggcgacctctacgtcgagatccacatccgccagcacccggtgttcgaacgcgaccacgacgatctccactgcgagatgccgatcagcttcgccaccgcggcgctgggcggcgagatcgagatcccgacactggaaggcatggcacggatcaagattcctgccgagacccagagcggcaaggtcttccgcctgcgcggcaagggcatcaagaacgtgcgttcgcacacgcacggcgacctgatgtgccacgtggtggtggaaaccccggtgaacctcaccgagcgccagaaggagttgctgcgcgagttcgaggaagtctcgaagggcgacgccgaacggcacaacccgaaggccaagtcctggatggacaaggtgcgcgacttcttcgccacctga

SEQ ID NO: 63898 - protein, 375 aa, Azoarcus sp. BH72
MSKRDYYEVLGVNRDAGDDEIKKAYRKLAMKYHPDRNPDSKEAEEKFKEAKEAYEVLSDAQKKGAYDRYGHAGVDPSMGGGGGGQGFEGFADAFGDIFGDLFGGRGGGGGRSNVYRGADLRYNLEISLEEAARGAEKTIRIPTVEECGTCHGSGAKPGTQPKTCPTCGGAGQVRIQQGFFSIQQTCPKCHGTGRIIPDPCGDCGGAGRVKKQKTLEVKIPAGIDEGMRLRHSGHGEPGVNGGPPGDLYVEIHIRQHPVFERDHDDLHCEMPISFATAALGGEIEIPTLEGMARIKIPAETQSGKVFRLRGKGIKNVRSHTHGDLMCHVVVETPVNLTERQKELLREFEEVSKGDAERHNPKAKSWMDKVRDFFAT

SEQ ID NO: 63899 - DNA, 1149 bp, Haemophilus influenzae R2846
  CDS (1)..(1149): transl_table=11
atggcaaaaaaagattactacgaagtccttggcctacaaaaaggggcgagtgaggacgacatcaaacgtgcgtataaacgtttagcgtctaaacatcaccccgataaaaaccaaggcagtaaagaagcagaagaaaaattcaaagaaattaatgaagcttatgaagtattaggcgacgatcaaaaacgcgcagcctacgatcaatatggccacgcagcctttgaacaaggtggtggcactggtggcttcggtggcggctttggcggtgctgattttggtgatatgttcggtgatatttttggcgatattttcggcggtggtggacgtggtcgtcagcgcgttgttcgtggcgaagacttacgttatgacttagaaattagcctagaagaagccgtaaaaggtacaaccaaagatattcaaatcaatactcttgcacattgtgatagctgtggtggctctggggcagaaaaaggctctaaagtggaaacttgtccgcattgccacggttctggtcgaattcgtcgtcagcaaggtttctttgtatctgaaagtatctgtccaacttgtcacggtagcggtaagaaaattgaaaaaacttgtcgcagttgtcatggagaaggacgagttcataagaaagaaaatctttcagtaaaaattcctgcaggcgtagatacgggcaaccagcttcgcttagctggtaaaggtgcagcgggcgaaaatggcgcaccagctggagatttatatgttgtgattcacgtgagagaacataatatttttgaacgtgatggctctaatctttactgtgaagtaccaatcagctttgctactgcagcgcttggcggtgaaattgaagtgccaactttagatggcagagtgaaactcaaaatccctgctgaaacgcaaacaggaaaattattccgcatgcgaggaaaaggtgtcacctctacacgtagtggctatgcgggcgatttaatttgccgtatcgtggtagaaacgccagttaatttaaccagcgagcaaaaagaattacttcaaaaacttgaggaaagtttacaaggtaaagatttaagtaaacatgcaccaaaatcttcaggatttttagacggtgtgaaaaaattctttgataatttgggtaaatctgacaaataa

SEQ ID NO: 63900 - protein, 382 aa, Haemophilus influenzae R2846
MAKKDYYEVLGLQKGASEDDIKRAYKRLASKHHPDKNQGSKEAEEKFKEINEAYEVLGDDQKRAAYDQYGHAAFEQGGGTGGFGGGFGGADFGDMFGDIFGDIFGGGGRGRQRVVRGEDLRYDLEISLEEAVKGTTKDIQINTLAHCDSCGGSGAEKGSKVETCPHCHGSGRIRRQQGFFVSESICPTCHGSGKKIEKTCRSCHGEGRVHKKENLSVKIPAGVDTGNQLRLAGKGAAGENGAPAGDLYVVIHVREHNIFERDGSNLYCEVPISFATAALGGEIEVPTLDGRVKLKIPAETQTGKLFRMRGKGVTSTRSGYAGDLICRIVVETPVNLTSEQKELLQKLEESLQGKDLSKHAPKSSGFLDGVKKFFDNLGKSDK

SEQ ID NO: 63901 - DNA, 1116 bp, Bacillus anthracis str. A2012
  CDS (1)..(1116): transl_table=11
  misc_feature (58)..(58): r is g or a
  misc_feature (307)..(307): k is g or t
  misc_feature (330)..(330): w is a or t
  misc_feature (331)..(331): w is a or t
atgagtaaacgagactattatgaggtccttgggcttagcaagggtgcttcaaaagatraaataaaaaaagcgtatcgtcgtttggctaaaaaataccatccagacgtaagtaaagaagaaaatgcaattgaaaagtttaaagaagtacaagaagcatatgaagtattaagcgacgatcaaaagcgtgcgcaatatgatcaatttggtcatgctggtgcaaatcaaggttttggtggctttggcggcggaggagacttcggcggtggcttcggttttgaagatatctttagttcattctttggcggckgtggcggcagacgtcgtgatccwwatgctccgcgtcaaggtgctgacttacaatatcaagtcactttagagtttgaagaagcgatttttggtaaagagttaaatgtcgaaattccagtagaagatccatgtgatacttgtaaaggtagcggagcaaaaccaggaacttcaaaagaaacatgtaaacattgttcagggtcaggtcaagtaagtgtagaacaaaatacaccgtttggtcgtatcgtaaaccgtcaagcttgtagtcattgttcaggaactggtcaaatgattaaagaaaaatgtacgacatgtcacggttctggtaaagtacgtaaacgtaaaaaaatcaacgttaaaatcccagcaggtattgataatggtcaacaaatccgtgtatctggaaaaggtgaagcgggcgtaaacggcggaccagcaggagatttatatgttgttgttcatgtaagaagtcatgaattctttgagcgtgaaggagatcacattatttgcgaaatgccattaacgtttgcgcaaatggcacttggtgctgaagtagaagttcctactgttcatggtaaagtgaagttgaaaattccagcaggaacacaaactggaacggaattccgattaaaaggaaaaggtgctccgaatgtacgtggatatggtcaaggagatcaatatgtagtcgttcgtgttgttgtaccgacgaaattaacttcacatcaaaaagatttattacgtgaatttgcagggcaagaagagcaggatgatagtttattcggaaagcttaaacgtgctttcaaaggggaataa

SEQ ID NO: 63902 - protein, 371 aa, Bacillus anthracis str. A2012
  misc_feature (20)..(20): The Xaa at location 20 stands for Glu, or Lys.
  misc_feature (103)..(103): The Xaa at location 103 stands for Cys, or Gly.
  misc_feature (111)..(111): The Xaa at location 111 stands for Asn, or Tyr.
MSKRDYYEVLGLSKGASKDXIKKAYRRLAKKYHPDVSKEENAIEKFKEVQEAYEVLSDDQKRAQYDQFGHAGANQGFGGFGGGGDFGGGFGFEDIFSSFFGGXGGRRRDPXAPRQGADLQYQVTLEFEEAIFGKELNVEIPVEDPCDTCKGSGAKPGTSKETCKHCSGSGQVSVEQNTPFGRIVNRQACSHCSGTGQMIKEKCTTCHGSGKVRKRKKINVKIPAGIDNGQQIRVSGKGEAGVNGGPAGDLYVVVHVRSHEFFEREGDHIICEMPLTFAQMALGAEVEVPTVHGKVKLKIPAGTQTGTEFRLKGKGAPNVRGYGQGDQYVVVRVVVPTKLTSHQKDLLREFAGQEEQDDSLFGKLKRAFKGE

SEQ ID NO: 63903 - DNA, 1188 bp, Prosthecochloris aestuarii DSM 271
  CDS (1)..(1188): transl_table=11
atgaagagagattactacgaggttctcggcgttggacgttcagcaaccaaggacgagatcaagaaggcatatagaaagcttgccatgaagtaccatccggacaagaacccggataacagcgaagctgaagagaaattcaaggaagcaaacgaggcttacgaggtactcagcaatgacgataaacgcaggcgttacgatcagtttggacatgcaggcgttggatcgtcggcatcttcacagggtggtccgtttggtggcggcggtactggagatttaggcgatattttcagtgcattcaacgatatgttcggcggcggggcaagaggcggcggatcgccttttggttttgaggatgtgtttagcggcggtggcggcagacgttcccgttcagccggtgtttcgggcagcgatctgaaaatccgtttgaaactttcccttgaggagattgccaaaggcgttgaaaaaacgctgaagatcaaaaagcaggtggcctgtgatgtttgtaacggcaccggatcgaagaccggggagcttgagacctgcccgacctgccagggaacaggggaggttcgtcaggcatcgaaaaccatgtttggccagttcgtcaatattgcagcctgtcctacatgcggcggtgaaggccgtgtggtcaaggagcgctgtacagcatgccacggagagggcattaaacagggggaaaccactgttaaggtcaatattcctgccggtgtggaagatggcaactaccttaccttgagaggacagggaaatgccggccctcgcggagggatgaacggtgaccttattgttgtcattgaagaggtggaacacaaaattttcgcccgtcggggtgatgatgttgtctataatcttacgctgagttacgccgatatggtccttggtaccaaggttgatataccgacgcttgagggaagggtgaaaatgacggttccccctgcaacacagccaaataccgtgcttcgtatcagcgctaaagggattggccatcttaaagccccgggaaggggagatcatcttgtccgcgtcaatgtgttcgtcccaaaagatccgtcacatcaggataaagaactgctgaaggagctcaataaatctgtccatatggtcccggacgaaaaaaaagagcatgagaagggcttttatgaaaaagtgaaagacattttcagttga

SEQ ID NO: 63904 - protein, 395 aa, Prosthecochloris aestuarii DSM 271
MKRDYYEVLGVGRSATKDEIKKAYRKLAMKYHPDKNPDNSEAEEKFKEANEAYEVLSNDDKRRRYDQFGHAGVGSSASSQGGPFGGGGTGDLGDIFSAFNDMFGGGARGGGSPFGFEDVFSGGGGRRSRSAGVSGSDLKIRLKLSLEEIAKGVEKTLKIKKQVACDVCNGTGSKTGELETCPTCQGTGEVRQASKTMFGQFVNIAACPTCGGEGRVVKERCTACHGEGIKQGETTVKVNIPAGVEDGNYLTLRGQGNAGPRGGMNGDLIVVIEEVEHKIFARRGDDVVYNLTLSYADMVLGTKVDIPTLEGRVKMTVPPATQPNTVLRISAKGIGHLKAPGRGDHLVRVNVFVPKDPSHQDKELLKELNKSVHMVPDEKKEHEKGFYEKVKDIFS

SEQ ID NO: 63905 - DNA, 1137 bp, Streptococcus suis 89/1591
  CDS (1)..(1137): transl_table=11
atgaacaatactgaattttacgatcgtctgggggtttctaagaatgcttcgccagacgagattaagaaggcttatcggaagctttcgaaaaaataccatccagatattaataaggatccgggtgcggaggataaatacaaggaggtccaggaggcttatgagactctaagcgaccctcaaaaacgttctgcctatgaccagtatggtcctgctggtgccaatggaggcttcggcggaggagcaggtggctttggtggtttcgacggagcaggtttcggtggctttgaagacattttctctagcttctttggtggaggtggtgcgacgcgcaatcctaatgcacctcgtcaaggggatgacttgcaatatgcggtcaatttgaaatttgaagaagcgatttttggtgtggaacgtgaagtttcctataaccgtgaggcaacttgtcgaacctgtacaggttccggtgccaaacctggaacaagtccggtaacctgtgggcgttgtcatggttctggagtgatcaatgtggacacccaaactccacttggaaccatgcgtcgtcaaatgacctgtgatgtctgtcatggtcgcggaaaacaaattaaagatccatgtgcaacctgtcatggaactggtcatgaaaaacaagcccatacggtaacggttaaggtgccagctggtgttgagactggtcaacgtattcgcttggcaggtcaaggtgaagctggtttcaatggaggtccatacggagatctctacgttgtcattcaggtccaaccttcagacaagtttgaacgtgaaggaaccactattcactataaactgaacctcaactttgtccaagcagcacttggagatacagttcatgtgccaacagttcacggtgatgtggatatggtcattcctgaaggtactcagactggtaagaccttccgactcaaaggaaaaggtgcaccaagtgttcgtggtggagctattggtgatcaatatgtcacagtaaatatcgtcactccgacaggtttgaatgaccgccaaaaagcagctcttaaagaatttgcggcagctggaaatattgatgtcaaaccccataaaaaaggattttttgacaaggtaaaagatgcctttgaggatttataa

SEQ ID NO: 63906 - protein, 378 aa, Streptococcus suis 89/1591
MNNTEFYDRLGVSKNASPDEIKKAYRKLSKKYHPDINKDPGAEDKYKEVQEAYETLSDPQKRSAYDQYGPAGANGGFGGGAGGFGGFDGAGFGGFEDIFSSFFGGGGATRNPNAPRQGDDLQYAVNLKFEEAIFGVEREVSYNREATCRTCTGSGAKPGTSPVTCGRCHGSGVINVDTQTPLGTMRRQMTCDVCHGRGKQIKDPCATCHGTGHEKQAHTVTVKVPAGVETGQRIRLAGQGEAGFNGGPYGDLYVVIQVQPSDKFEREGTTIHYKLNLNFVQAALGDTVHVPTVHGDVDMVIPEGTQTGKTFRLKGKGAPSVRGGAIGDQYVTVNIVTPTGLNDRQKAALKEFAAAGNIDVKPHKKGFFDKVKDAFEDL

SEQ ID NO: 63907 - DNA, 1155 bp, Roseovarius nubinhibens ISM
  CDS (1)..(1155): transl_table=11
atggccaaacgtgattattacgaggtattgggcgtagctcgcggggcctccgcggacgagatcaagaaagcctaccgtcgcaaggcgaaagagctgcatcccgaccgcaacaaggacaatcccgaggcggaaacccaattcaaggaagccggcgaagcctatgacgtcctgaaggacgccgacaaaaaggccgcctatgaccgcttcggtcatgccgccttcgaaggtggcatgggcggcggcccgcgccccggtggcggcggccatggtcagggcgatttcgccagcgccttctccgatgtgttcgacgacctctttggcgatttcatgggcgggcgcggcgcgccgggcggcgggcggcaacgggcctcgcgcggctcggacctgcgctataatctgcgggtcacgctcgaagaggccttctcgggcctgcaaaagaacatcaccgtgccgacctcggtgcaatgcggctcctgcaacggctccggtgccgaaggcggcggcgagccgaccacatgcccgacctgttccggcatgggcaaggtccgagcgcaacagggcttcttcaccgtcgaacgcacctgtccgacctgctcgggcatgggccagacgatcaagaacccctgcaagaactgcggcggcgcaggccgggtcgaaaaggaccgcgcgctcaatgtgaacatccccgccggtgtcgaaaccggcacccgcattcgcctctcgggcgagggcgaggcggggctgcgcggcggcccctcgggcgatctctacatcttcatcgaggtctccaagcacaagctgttcgaacgcgacgacatgcatctcttctgtcatgtgccggtctcgatgtcggtggcggcgctcggcggcgacatcgaagtgccgaccatcgacggcggccgctcgcgggtgaaaatcccggcagggagccaatccggtcgccagatgcgcctgcgcggcaaaggcatgccagcgctgcgcagcaacacccgcggcgacatgttcatcgaactggcggtcgaaaccccggtcaacctgaccgcccggcaaaaggaactgctcaaggagttcgacagcctctccgaggacaacaaccccgaaagcaagagcttcttttcctcggtgaaaaccttctgggacagcatgaagagctga

SEQ ID NO: 63908 - protein, 384 aa, Roseovarius nubinhibens ISM
MAKRDYYEVLGVARGASADEIKKAYRRKAKELHPDRNKDNPEAETQFKEAGEAYDVLKDADKKAAYDRFGHAAFEGGMGGGPRPGGGGHGQGDFASAFSDVFDDLFGDFMGGRGAPGGGRQRASRGSDLRYNLRVTLEEAFSGLQKNITVPTSVQCGSCNGSGAEGGGEPTTCPTCSGMGKVRAQQGFFTVERTCPTCSGMGQTIKNPCKNCGGAGRVEKDRALNVNIPAGVETGTRIRLSGEGEAGLRGGPSGDLYIFIEVSKHKLFERDDMHLFCHVPVSMSVAALGGDIEVPTIDGGRSRVKIPAGSQSGRQMRLRGKGMPALRSNTRGDMFIELAVETPVNLTARQKELLKEFDSLSEDNNPESKSFFSSVKTFWDSMKS

SEQ ID NO: 63909 - DNA, 1119 bp, delta proteobacterium MLMS-1
  CDS (1)..(1119): transl_table=11
atgaaaatcgattattataaaaccctgggggtcggcaccgacgcctcgatggaggagatcaaaaaggcctatcgtaaactggccttgcaatatcaccccgatcgcaatcccggcgaccaggaagccgaagagaaattcaagaccgccaccgaggcctacgaggttttgggcgatctggaaaagcgtaagatttatgatcgctacggggtggacggcctgcgcgacagcggctatcagggccccggcggctttgatgatatcttctccagcttcagcgatatcttcggtgatcttttcggcttcggcggagcccggggcggctcccggcgcgcctcgggcggcccgatccccggcaacgacctgcgttacgacctggtgatcagcttcatggaagcggcccacggggtggaaaaggaggtcgaaatcagcaagggcgagacctgctggacctgcgaaggcagcggcgcccgtcccggccatcccccggagagctgctccacctgcaatggcatcggccaggtgctccacgcccaggggccgttccgggtacaaagcgcctgcccccactgccggggccagggccgggtggtcaccgagccctgccaggattgccagggtcaggggctggtcaagcgcagcaagaaggtttcgctgaaaattcccgccggggtggactccggcgcccggatgcggttgaaaggcgagggcgaagggggccgccggggcgggcccgccggtgatctttacgtgatcatccacgtccagccccacgatttttttcagcgggaaggttatgacatcgtctgctccctgcccctttccttcacccaggccgctctgggctgcagcctggaggtccccaccatttacggctcccacaagctcaagatcccggccggcacccaaccgggccagcacttcaccatcaatgagatgggggttgccaagttgcggggcggcggctacggcgatatgatctgcgaggtccgggtggtggtccccaagcgcttgactaaaaaacagaaaaagctgctcaaggagtttgccgacagcgaagaggaccccagcgatgacgcagcaaaaggtgatggttttttgaaaaagttctttcatttatag

SEQ ID NO: 63910 - protein, 372 aa, delta proteobacterium MLMS-1
MKIDYYKTLGVGTDASMEEIKKAYRKLALQYHPDRNPGDQEAEEKFKTATEAYEVLGDLEKRKIYDRYGVDGLRDSGYQGPGGFDDIFSSFSDIFGDLFGFGGARGGSRRASGGPIPGNDLRYDLVISFMEAAHGVEKEVEISKGETCWTCEGSGARPGHPPESCSTCNGIGQVLHAQGPFRVQSACPHCRGQGRVVTEPCQDCQGQGLVKRSKKVSLKIPAGVDSGARMRLKGEGEGGRRGGPAGDLYVIIHVQPHDFFQREGYDIVCSLPLSFTQAALGCSLEVPTIYGSHKLKIPAGTQPGQHFTINEMGVAKLRGGGYGDMICEVRVVVPKRLTKKQKKLLKEFADSEEDPSDDAAKGDGFLKKFFHL

SEQ ID NO: 63911 - DNA, 1644 bp, Aspergillus niger
  CDS (1)..(1644)
atgagtgctgcttccgccgcaatgcccaaagccgcggctattcccgctcgtttactgcggacttcgcgacaatgctccaagcagaacccggccgccagtgtccgatcatccaccacagttcggacttatcatgtgtcggctgcttctccaacaagccagcgcctgcgggatggtgttcgtagcaagaacagtccggcattcctgtcgtcaagggttttccatacgaccgctcctcttggagccatgtctgacccgtataaagttttaggagtcgacaagggtgcttctgcaggcgacatcaagaaagcttactatggaatggccaagaaataccacccggataccaacaaagaccctggcgccaaggaaaagtttgcggaagctcagtcggcctacgaacttctatccgatccgaagaagcgcgagaatttcgaccgattcggctcagctgcttttgaccagaacggcggcttcgatcccagtggcggtaacccatttgccggcgccggtggtttccacggcttcggtggaggatttggtggtggattccctggaggattctcgggtgacatcaacttcgaagacttgttcggcgcatttaccggcggcgctcgccgtgcgggtcgaggacgccgaagcccgttccaggagatcttggttggcgaagatatcgaggttcagaccaacatttccttcatggaagctgcgaagggtacttccaaggatatagtcatcactcccctgaaggagtgtggcacctgtgatggagatggactgaagaagggtgctaaacgaacgcaatgccgtcagtgcaacggttctggcacccgggtacacttcatgcagggaggattccaagttgcggctacctgcgatgcctgtggaggtgcgggaatgactgttccccgcggatccgaatgtggcgggtgtaaaggaagtggtgtggtcagagatcgcaagactgtccaggtcgacatccccggcggtgtcgaggatggcatgcgtctgagagtgtccggagaaggtgacgcccctcctacgggcaccgcagcagcccctggctcccgtacgcagcgtggtgacttgtacgtctccattcgggtctcccccgatcaccgcttcagccgctccggctccgatattctctacacagcctctattcctctcaccactgctctgcttggcggtgaggtgacggtcccgactttggacggcgaggtcaaggtcaaggttggaacgggtaccggcacgggtgaccgcattactctctcgggcatgggcatgaagaaactcagtggccgttctagagccttcactcctaccggtgacttgaaggttgagttcaaggttgccatgccgaagtatttgactagcaaccagcggacaatcctcgaggttctagcggatgaaatgggtgacaagacggccagacgcatcatggacatccccaaggatggatcaactcctgactccggcgccacctccgattcttccaagaacgagggattccttaaatcggcctggcacaagctcatgaaccactcgaaacaatcgggatcggaaggctcgggtagcgagtcaggcaagaaggaccgcagcgacagcaacaaatccgacgatgagaagaagtccggctccagctaa

SEQ ID NO: 63912 - protein, 547 aa, Aspergillus niger
MSAASAAMPKAAAIPARLLRTSRQCSKQNPAASVRSSTTVRTYHVSAASPTSQRLRDGVRSKNSPAFLSSRVFHTTAPLGAMSDPYKVLGVDKGASAGDIKKAYYGMAKKYHPDTNKDPGAKEKFAEAQSAYELLSDPKKRENFDRFGSAAFDQNGGFDPSGGNPFAGAGGFHGFGGGFGGGFPGGFSGDINFEDLFGAFTGGARRAGRGRRSPFQEILVGEDIEVQTNISFMEAAKGTSKDIVITPLKECGTCDGDGLKKGAKRTQCRQCNGSGTRVHFMQGGFQVAATCDACGGAGMTVPRGSECGGCKGSGVVRDRKTVQVDIPGGVEDGMRLRVSGEGDAPPTGTAAAPGSRTQRGDLYVSIRVSPDHRFSRSGSDILYTASIPLTTALLGGEVTVPTLDGEVKVKVGTGTGTGDRITLSGMGMKKLSGRSRAFTPTGDLKVEFKVAMPKYLTSNQRTILEVLADEMGDKTARRIMDIPKDGSTPDSGATSDSSKNEGFLKSAWHKLMNHSKQSGSEGSGSESGKKDRSDSNKSDDEKKSGSS

SEQ ID NO: 63913 - DNA, 1272 bp, Medicago sativa
  CDS (1)..(1272)
atgtttgggcgcggaccaacaaggaagagtgataacaccaaatattacgatattcttggtgtttcaaaaagtgctagtgaagatgaaatcaagaaagcctatagaaaggcagcgatgaagaaccatccagataagggtggggatcctgagaagttcaaggagttgggccaagcatatgaagtgttgagcgatcctgaaaagaaagaactgtatgatcaatatggtgaagatgcccttaaagaaggaatggggggaggcgcaggaagctcatttcataatccgtttgatattttcgaatcattttttggtgcaggctttggtggtggtggtccttcacgcgcaagaagacagaagcaaggagaagatgtggtgcattctataaaggtttccttggaggatgtgtataacggcactacaaagaagctatcactttctaggaatgcactgtgctcaaaatgtaaagggaaaggttcaaaaagtggaactgctggaaggtgttttggatgccagggcacaggtatgaagattaccagaaggcaaattggactgggcatgattcaacaaatgcaacacgtctgtcctgactgcaaaggaacaggcgaggtcattagtgagagagatagatgccctcaatgcaagggaaacaagattactcaagaaaagaaggtgctggaggtgcatgtggaaaaggggatgcagcagggtcacaagattgtattcgaaggacaagctgatgaactccctgatacaatcacaggagacatagtttttgtcttgcaagtaaagggacatccgaagtttcggagggagcgtgatgaccttcacattgaacacaatttgagcttaactgatgctctctgtggcttccagtttaatgtcacacatcttgatggaaggcaactattggtcaaatcgaaccccggcgaagtcatcaagccaggtcaacataaagctataaatgatgagggaatgccacaacatggtaggccgttcatgaagggacgcctatacatcaagtttagtgttgatttcccggattcgggttttctttccccaagccaaagcctggaattagaaaagatattacctcaaaagacaagcaagaacttgtcccaaaaggaggtagatgattgtgaggagaccaccctgcatgatgtcaatattgcagaggagatgagtcgaaagaagcaacaataccgtgaggcatatgatgacgatgatgatgaagatgatgagcactcgcagcctcgggtgcaatgcgctcaacagtag

SEQ ID NO: 63914 - protein, 423 aa, Medicago sativa
MFGRGPTRKSDNTKYYDILGVSKSASEDEIKKAYRKAAMKNHPDKGGDPEKFKELGQAYEVLSDPEKKELYDQYGEDALKEGMGGGAGSSFHNPFDIFESFFGAGFGGGGPSRARRQKQGEDVVHSIKVSLEDVYNGTTKKLSLSRNALCSKCKGKGSKSGTAGRCFGCQGTGMKITRRQIGLGMIQQMQHVCPDCKGTGEVISERDRCPQCKGNKITQEKKVLEVHVEKGMQQGHKIVFEGQADELPDTITGDIVFVLQVKGHPKFRRERDDLHIEHNLSLTDALCGFQFNVTHLDGRQLLVKSNPGEVIKPGQHKAINDEGMPQHGRPFMKGRLYIKFSVDFPDSGFLSPSQSLELEKILPQKTSKNLSQKEVDDCEETTLHDVNIAEEMSRKKQQYREAYDDDDDEDDEHSQPRVQCAQQ

SEQ ID NO: 63915 - DNA, 2692 bp, Pisum sativum
  CDS (860)..(2356)
ttttttttgaatatatatagttttttttcccataatcaaacaagtcattgaaatcggatacaaccatgaacataaataatatcacaattattaacttgttgaaagggggaagccaattccatgtctttcagtaggaaatgcaacaaaaagcatgctgcagaaaacgcccaattgccacaggcaatgccgttaagatttcctgtatctcatttgatccttctggaaaaaagcaattcaccacattctgatcaaataatgcaattgctgcaaataccaaaatcgacatcattgcatgcatgaagtctataaaccgtatgcgatacttttcagaaacttgtggtggaagtttggttgatccatcaatgatccacaagcctttaaaagtggcaaaaccataacatatattccccttgctgtctctaaagctatcagtaaagtttagcaggaagcatgaagcaccacagagagtcacaagtacagaagtcatggacttgctgacagagtcacagttgccaatatttgtaaaaattggtgacagaagttggaaagctagaacagtgccggtaggtagaaggtttgccaagtgcgcggtactttgaaatgttgaacttatagctttctgtatcaggttcctctccgcttctggaacctccgcgtttcgcagaaggggttgcttttgttcatcattatttgcagaagcatcgttgatttctaaattgatgtccattgcgtatacaacctcgtttcaccttcctttgatattgtgtttttttttttctcccacaatacaagcgtgcgttaatatcatgaacaagccatatttttaaattcaatttcaatttcatttcaatttcaatcaatggcagttctttccctctctcttcttcctcctccttctactactcattcttgcttctgtgcctccggaatccatttccgttcccacaccaccaccaacaatttcctttccattcattctccttctccttttccttctactttctctaactctaattctaaattctccgctagaagaaaacgatttcacactgtttttgccgcttcttctgattattacgctactctcggagttcccaaatccgccaccgtcaaagatatcaaagccgcttatcgaaggttagctcgtcagtatcatcctgatgtgaacaaagagcctggtgcaacggataagtttaaagagattagtaatgcttatgaggtgctatcagatgacaaaaagagggctttgtatgatcaatatggcgaggcaggggttaagagctcagtgggaggaggatcaagtgcctatgcgacaaatccatttgacttatttgagacattttttgggtcaaatatgggcggctttggtggcatggatccaactggatttggcacacggcgtcgtagtacagttactaagggcgaagacatccggtatgatttctccttggagttttctgaggcaattttcggagcagagaaagaattcgagcttttccatttagaaacatgtgaagtctgtactggtactggtgcaaagttaggatccaagatgagagtatgttcaacttgtggtggcaggggtcaggtgatgaggaccgaacaaacaccttttgggttgttctcacaggtttcagtatgtccaaactgtggaggtgatggtgaagtcatatctgaaaattgccgtaaatgcagtggtgcaggacgcatacgggttaagaaaaatatgaaagttaaagttcctcccggggttagctcaggcagtatcttaagagtcactggagagggtgatgctggaccaagagggggtcctccaggagatctttacgtatatcttgacgtgcttgagataccaggaattcaaagagatgacattaatctccgctcaacaatatcaatcacttatctagatgctatattggggtctgtagtgaaggtaaagacagttgaaggcacttctgaactacaaatcccttctggtactcaacctggagatgtcctcgtccttgcaaagaagggtgtaccaaaattaaacagaccatcaatacgtggtgaccacttatttactgttaaagttacaataccaaaacgtatcagttcaaaggagcgtgaggtgcttgaagaacttgcttctctaggtggcacaagcagtcattcaagatcccgtcctaggacccaaccttccaccggaagtaaggaagctcctgcagctcaaagggccgaaagtccaacagaaacagtcacagaaaaaccagagaaatcagaagaagaagatgatgacttatggaacaaactaaagaacatggctgggtctgtggcaaatggagctctaaagtggtttaaagataatctctagctcaatgggattaataagtgatcaacagtctccagaatatagcttatcttaatagggctagagagttgtaatgtttgaaacagctgccagccgaagggtagggactatgcagacattttcttcaaatgctacaactgaaaattgttagaggaaagcagcaaagtgaaacaaatgatgcatattcttttatttgttgtacttgtaaattttggcacgaggcagtttatacagaataacttgttggagaatgaatcttttgtacccattaagcaggttgcactagagaaagctagtgtatacctcatatgaagtctaaggtccatttcagtgaaaaaa

SEQ ID NO: 63916 - protein, 498 aa, Pisum sativum
MAVLSLSLLPPPSTTHSCFCASGIHFRSHTTTNNFLSIHSPSPFPSTFSNSNSKFSARRKRFHTVFAASSDYYATLGVPKSATVKDIKAAYRRLARQYHPDVNKEPGATDKFKEISNAYEVLSDDKKRALYDQYGEAGVKSSVGGGSSAYATNPFDLFETFFGSNMGGFGGMDPTGFGTRRRSTVTKGEDIRYDFSLEFSEAIFGAEKEFELFHLETCEVCTGTGAKLGSKMRVCSTCGGRGQVMRTEQTPFGLFSQVSVCPNCGGDGEVISENCRKCSGAGRIRVKKNMKVKVPPGVSSGSILRVTGEGDAGPRGGPPGDLYVYLDVLEIPGIQRDDINLRSTISITYLDAILGSVVKVKTVEGTSELQIPSGTQPGDVLVLAKKGVPKLNRPSIRGDHLFTVKVTIPKRISSKEREVLEELASLGGTSSHSRSRPRTQPSTGSKEAPAAQRAESPTETVTEKPEKSEEEDDDLWNKLKNMAGSVANGALKWFKDNL

SEQ ID NO: 63917 - DNA, 1170 bp, Ostreococcus tauri
  CDS (1)..(1170)
atgaagagaccgacgccgcgagtgggtggacggatgtccacggtgacgcgggctggaagggattattacgacgtcttgggggtgtcgcggtcggcggattcgaaggagctgaagcgggcgtacaggcagttggcgcgcaagtttcaccccgacgtgaacaaagatccgggggcggaggataagtttaaggagatatccaacgcgtacgaagtgctgagcgatgatcaaaagaaggcgatttacgatcgtttcggcgaggacggattaaagggtggcatgggcggcatgggcggcatgggcggcatgggcggcatgggcggcatgagcgacccgttcgacctgttcgagtcgctctttggcggcggcggcatgggcggcatgggcggcatgggcggcatgggcggcatgggtggtcgatcgcaagcgcgtaaccgaccgacgcaaggtgacgatgagcgctacgacctcgagatcgacttcctcgaagccgtgttcggggtggagaaggagctcgacacgatgcgactcgaaaactgtgacaagtgctcggggagcggcgtcaaggcgggtaccaagccgacgacgtgtggcacgtgtggcggccagggtcaagttgtcgccaccgtgcgcacgcctctcggtaattttcagcaagtcaccggctgccaagcgtgcggggggactggtcagtcgtccacgccgtgcccgagctgcggcggcgacggtcgcgtgcgccgcagcaagaaaattcagctgcgcgtgccgccgggcgtggacaagggttctcgtctgcgcgtccgcggtgaaggcaacgccggtcgccgaggcggcccgccgggtgatctttacgtcttcatcaacgttcgcgacgatccggagctgaagcgtttcgacaacgtcaacatcagctccacggtgaccgttccgtacacaaaagccatcctgggctccaccgtcaaggtgcgcacggtagacggaccggtcgatctgaagatcccggccggggtccagccgcaagcgacgcttctcatggccaagcgcggcgtccccagactcggcaacgactccgctcgcggcgaccactacgtcaccgtcaaggtcaccatcccctccaagctctccgacgaggaacgcgcgatgatcgaaaaattggatgaaaagcaaaaataa

SEQ ID NO: 63918 - protein, 389 aa, Ostreococcus tauri
MKRPTPRVGGRMSTVTRAGRDYYDVLGVSRSADSKELKRAYRQLARKFHPDVNKDPGAEDKFKEISNAYEVLSDDQKKAIYDRFGEDGLKGGMGGMGGMGGMGGMGGMSDPFDLFESLFGGGGMGGMGGMGGMGGMGGRSQARNRPTQGDDERYDLEIDFLEAVFGVEKELDTMRLENCDKCSGSGVKAGTKPTTCGTCGGQGQVVATVRTPLGNFQQVTGCQACGGTGQSSTPCPSCGGDGRVRRSKKIQLRVPPGVDKGSRLRVRGEGNAGRRGGPPGDLYVFINVRDDPELKRFDNVNISSTVTVPYTKAILGSTVKVRTVDGPVDLKIPAGVQPQATLLMAKRGVPRLGNDSARGDHYVTVKVTIPSKLSDEERAMIEKLDEKQK

SEQ ID NO: 63919 - DNA, 1278 bp, Ostreococcus tauri
  CDS (1)..(1278)
atgttcggtcgacaagggtccggacgcaagtcggatgataccaagctgtacgatgtgctcggggtgagtaagagcgcgacgccggcggagatcaaaaaggcgtaccgcaagatggcggtgaaacatcacccggataaaggcggggatgaacacgtgttcaaggaaatctcggcggcgtatgaagtgttgagcgatgagaataaacgggcgatgtacgatcagtacggtgaggaggcgctgaaggatggcgggatgggcggcggcggaggggggtcgccgtttgacatttttgaagccatgttcggcgggaacccgtttgggggaccgggcggtggacgcggcggtggacgctctcgcgtgcgaaagggcgaagatgtcgtgcacgcgcttaaccttagtttggaggagttatacggcggcgtgacgaagaagctgagcttgtctaagaacatcatctgcccaaagtgcgacggtaaggggagcaagtcgggggcgagcggcacgtgtaacggctgccgaggcgccggcgtcaaggttgtcgttcgacagatcgctccgggcatggtacagcagatgcaaaccgtctgtaacgactgccgaggcaccggacagacgatcagcgagaaggacaagtgcgagcagtgccgcgccgctaaggttgtgcaagagaagaaggttctcgaagtgcacatcgaaaagggcatgagacacaaccaaaagattgctttccaaggcgaagcggatgaagcgccggacacggtcccgggcgacattatctttgtcgtccaacaaaaggaccacgcggttttctctcgcaagggagacgatttattcatggagaaggaaattaccctcgtcgaggctttgtgcggtatgaagatgaccgtcgatcacctcgacggacgtcagctcgtcgtcaccacagccgagggcgaggtcatcaaacctggccaggttaaggcggtttacgacgagggcatgcccaaggctggcaaccctttccaaaagggacgtctcttcatccacttcaccgtcaagttcccggtgtcgggtgatttgtccgatgacgctctcgccgcgctcgaaaagcttttgccgccgcgtccggagctcagcatcaacatggagagcgaaaatgtcgaggaagttaccatgcacgaggtcgacatggagcaagagaagcgccgacgcgagcacgagcacaagcacagtcgccaatacgaggattccgacgacgaaggcgccggcggtccgggcgtgcaatgcgctcagcaataa

SEQ ID NO: 63920 - protein, 425 aa, Ostreococcus tauri
MFGRQGSGRKSDDTKLYDVLGVSKSATPAEIKKAYRKMAVKHHPDKGGDEHVFKEISAAYEVLSDENKRAMYDQYGEEALKDGGMGGGGGGSPFDIFEAMFGGNPFGGPGGGRGGGRSRVRKGEDVVHALNLSLEELYGGVTKKLSLSKNIICPKCDGKGSKSGASGTCNGCRGAGVKVVVRQIAPGMVQQMQTVCNDCRGTGQTISEKDKCEQCRAAKVVQEKKVLEVHIEKGMRHNQKIAFQGEADEAPDTVPGDIIFVVQQKDHAVFSRKGDDLFMEKEITLVEALCGMKMTVDHLDGRQLVVTTAEGEVIKPGQVKAVYDEGMPKAGNPFQKGRLFIHFTVKFPVSGDLSDDALAALEKLLPPRPELSINMESENVEEVTMHEVDMEQEKRRREHEHKHSRQYEDSDDEGAGGPGVQCAQQ

SEQ ID NO: 63921 - DNA, 1257 bp, Allium porrum
  CDS (1)..(1257)
atgtttggaagagctcctaagaaaagcgacaataccaagtactatgagattctcggagttcccaaaaacgcgtcaccagacgatttgaagaaggcatatcgaaaggctgcgattaagaatcatcctgataaaggtggcgatcccgagaagtttaaggagttggctcaagcttatgatgttctaagtgaccctgaaaagcgtgagatatatgatcagtatggcgaggatgctcttaaggaaggaatgggtggaggcggtggagaccatgatcctttcgacatctttcagtcgttctttggtggtggaggttttggaggtggtggtagcagcaggggccgcagacaaaggagaggtgaagatgtggttcatcctctcaaagtatctctcgaggaactttacaatggaacttctaagaaactctctttgtctagaaatgttatctgctcaaagtgcaatggcaaaggatcaaaatcaggtgcttcaatgagatgtgcatcttgccaaggttctggtatgaaagtttctattcgccagttgggtcctggaatgattcagcagatgcagcatccttgcaatgactgtaaaggcacaggagaaatgataaatgataaggataggtgtccattgtgcaaaggtgaaaaggtcgtgcaagagaagaaggttttagaagtgcatgttgagaaagggatgcagaatgggcagagaattacattccctggcgaagctgatgaagcgccagatacagttactggggacattgtctttgttctacagcagaaagaacatcccaaattccaaaggaaaggggatgatttattttataaacataccctttctctcactgaggccctttgcggtttccagtttgtgttaactcacttggatggcaggcaactccttatcaagtctaaccctggagaggtggttaagccagatcaattcaaggcgatcaatgacgaaggaatgccaatgtatcaaaggccattcatgagggggaagttgtacatccagttcttggttgatttccccgattcgcttaccccagaccagtgcaaagtgattgaaagcgtgcttcctagaagtgcctcttctcagctaacagacatggagatcgatgaatgtgaagaaacgaccatgcatgatgtgaacatagaagaggagatgaggaggaagcaacatcagcacgcacaggaggcttacgatgaggatgatgaaggtcatggcggtggtcagagggtgcaatgtgctcagcagtga

SEQ ID NO: 63922 - protein, 418 aa, Allium porrum
MFGRAPKKSDNTKYYEILGVPKNASPDDLKKAYRKAAIKNHPDKGGDPEKFKELAQAYDVLSDPEKREIYDQYGEDALKEGMGGGGGDHDPFDIFQSFFGGGGFGGGGSSRGRRQRRGEDVVHPLKVSLEELYNGTSKKLSLSRNVICSKCNGKGSKSGASMRCASCQGSGMKVSIRQLGPGMIQQMQHPCNDCKGTGEMINDKDRCPLCKGEKVVQEKKVLEVHVEKGMQNGQRITFPGEADEAPDTVTGDIVFVLQQKEHPKFQRKGDDLFYKHTLSLTEALCGFQFVLTHLDGRQLLIKSNPGEVVKPDQFKAINDEGMPMYQRPFMRGKLYIQFLVDFPDSLTPDQCKVIESVLPRSASSQLTDMEIDECEETTMHDVNIEEEMRRKQHQHAQEAYDEDDEGHGGGQRVQCAQQ

SEQ ID NO: 63923 - DNA, 1257 bp, Ricinus communis
  CDS (1)..(1257)
atgtttggaagagcaccaaagaaaagcgacaacacaaagtactatgagattctgggagtctctaagaacgcatcacaagatgatctaaagaaagcttatagaaaagcagccatcaagaaccatcctgataagggtggcgatcctgaaaagtttaaagagttggcacaagcttatgaggttttaagtgatccagaaaagcgtgagatatatgatcagtatggcgaggatgccctcaaggaaggaatgggtggtggtggtggtggcggccatgatccattcgatattttccaatctttctttggtggcagtccattcggtggtggcggcagcagcagaggccgaaggcagaggaggggtgaggatgtgattcatcctctcaaggtttctttggaagatctctacaatggcacctccaaaaaactctctctttctcgcaatgttatctgctcgaagtgcaaaggtaaagggtctaaatccggtgcatcaatgaaatgttctggttgccaaggttctggaatgaaggtttcaataagacatcttggaccctctatgatccagcaaatgcagcatccctgcaatgagtgcaagggtactggtgagaccattaatgacaaggaccgctgccctcaatgcaagggtgaaaaggttgttcaagagaagaaagtgctggaagttattgttgagaagggtatgcaaaatgggcagaagattacatttcctggagaagctgatgaagctcctgatactatcactggggacattgtttttgtcctacagcaaaaggagcaccctaagttcaagcgaaagggagatgacctagttgttgagcacacactttctctcacagaggcactctgtggcttccagtttatattgacccatttagatggaaggcagctcctcataaaatcccaacctggggaagtagtgaaaccagatcaattcaaggccattaatgatgaaggaatgccaatgtatcaaaggccattcatgagggggaaattgtacattcatttctctgttgatttcccagactctctgcccccagatcagtgcaaagccttggagactgtgcttccctcaaggacttcagtccagctgtctgacatggagctggatgaatgtgaagagaccactttacatgatgtgaactttgaagaggagatgaggcggaaacagcagcaggcccaggaagcatatgatgaggacgaagatatgcatggtggtgcccaaagggtgcaatgcgctcaacaataa

SEQ ID NO: 63924 - protein, 418 aa, Ricinus communis
MFGRAPKKSDNTKYYEILGVSKNASQDDLKKAYRKAAIKNHPDKGGDPEKFKELAQAYEVLSDPEKREIYDQYGEDALKEGMGGGGGGGHDPFDIFQSFFGGSPFGGGGSSRGRRQRRGEDVIHPLKVSLEDLYNGTSKKLSLSRNVICSKCKGKGSKSGASMKCSGCQGSGMKVSIRHLGPSMIQQMQHPCNECKGTGETINDKDRCPQCKGEKVVQEKKVLEVIVEKGMQNGQKITFPGEADEAPDTITGDIVFVLQQKEHPKFKRKGDDLVVEHTLSLTEALCGFQFILTHLDGRQLLIKSQPGEVVKPDQFKAINDEGMPMYQRPFMRGKLYIHFSVDFPDSLPPDQCKALETVLPSRTSVQLSDMELDECEETTLHDVNFEEEMRRKQQQAQEAYDEDEDMHGGAQRVQCAQQ

SEQ ID NO: 63925 - DNA, 1263 bp, Triticum aestivum
  CDS (1)..(1263)
atgttcgggcgcgcgccgaagaagagcgacagcacgcgctattacgagatcctgggcgtgcccaaggacgcctcccaggacgacctcaagaaggcctaccgcaaggccgccatcaagaaccaccccgacaagggcggcgaccccgagaagttcaaggagctagcccaggcttatgaggtcctgagtgatcctgagaagagagaaatttatgaccagtatggtgaggatgccctcaaggagggaatgggaggtggaggaatgcatgatcctttcgacatcttccagtcattctttggtggtggcggcaacccctttggaggtggcgggagcagtaggggcaggaggcagcgcaggggtgaggatgtggttcatcctctcaaggttagccttgaggagttgtacaatggaacatcaaagaagctctctcttgcccgcaatgtgctctgctccaagtgcaatggcaagggttcaaagtctggggcttccatgaagtgtgccggctgccaaggtgctggttacaaggtgcagataaggcagctgggaccaggaatgattcagcaaatgcagcagccttgcaacgagtgcaggggaagtggggagaccatcagcgataaggatcgctgtgggcagtgcaaaggtgagaaggtggtgcacgagaagaaagtcctggaggtggtggttgagaagggaatgcagcatggacagaagatcaccttccccggcgaggcggatgaagcgcctgataccgttactggagacataatcttcgtcctccagcagaaggagcaccccaaattcaagcggaagggtgatgacctcttctacgagcacaccctgaccctgactgaggccctgtgtggcttccagtatgtcctggctcatttggacggcaggcagctgctcatcaagtccaaccctggcgaagtggccaagcctgattcattcaaggcgatcaacgatgagggcatgcccatgtaccagaggccgttcatgaagggcaagctgtacatccacttcacggtggatttccccgactcgctgaacctggaccagtgcaaggcgctcgagactgtcctcccgcccaagccggcgtcgcagtacacggacatggagctggacgagtgcgaggagacgatggcctatgacatcgacattgaggaggagatgcggaggcggcaacagcagcaggcacaggaggcctacgacgaggatgaggacatgcccggcggcggcggccagcgggtgcagtgcgcgcaacagtaa

SEQ ID NO: 63926 - protein, 420 aa, Triticum aestivum
MFGRAPKKSDSTRYYEILGVPKDASQDDLKKAYRKAAIKNHPDKGGDPEKFKELAQAYEVLSDPEKREIYDQYGEDALKEGMGGGGMHDPFDIFQSFFGGGGNPFGGGGSSRGRRQRRGEDVVHPLKVSLEELYNGTSKKLSLARNVLCSKCNGKGSKSGASMKCAGCQGAGYKVQIRQLGPGMIQQMQQPCNECRGSGETISDKDRCGQCKGEKVVHEKKVLEVVVEKGMQHGQKITFPGEADEAPDTVTGDIIFVLQQKEHPKFKRKGDDLFYEHTLTLTEALCGFQYVLAHLDGRQLLIKSNPGEVAKPDSFKAINDEGMPMYQRPFMKGKLYIHFTVDFPDSLNLDQCKALETVLPPKPASQYTDMELDECEETMAYDIDIEEEMRRRQQQQAQEAYDEDEDMPGGGGQRVQCAQQ

SEQ ID NO: 63927 - DNA, 1140 bp, Pseudoalteromonas sp
  CDS (1)..(1140): transl_table=11
atgtcaaaacgcgattattacgaagtcctcggcgtaagcaaagatgcgagtgagcgagacataaaaaaagcgtataaacgcttagcgatgaaatatcaccccgatcgtaccgccggtgataaagaccttgaaactaaattcaaggaagttaaagaagcttacgaaatactgactgatgcgcaaaagcgtcaaatgtatgaccaatacggccatgcagccttcgaacaaggtggtggcggtggtcacggtggctttggcggcggccaaggtgattttggtgatatttttggagacgtatttggtgatatttttggtggcggcggtggtcgacgtcaatcacgccagcaacgtggctcagatttacgttacaacatggacttaagcttagaagaagcggttcgtggtaaagacgttgagattaaagtacctacttgggttagttgtgaaccatgtgatggcagtggtgctaaagcgggttcaaagccaaagacatgtacaacctgtcatggtgcaggccaagtacaaatgcgccaaggtttttttgccgtacagcaaacctgtccgacgtgtcatggacaaggtcagatcatttcagatccttgtaataaatgtcatgggcaaggccgtgtagaaaaaactaaaacgctatcggttaaaatcccggcaggcgtagatactggcgatcgtattcgcttatcaggtgaaggcgaagcaggcatgcatggtgcaccagcaggtgacttgtatgtgcaagtatctgttcgtgaacacaaaatatttgttcgtgaagctaataatttatattgtgaagtaccaataagctttaccaccgcaggccttggcggtgaaattgaagtgccaacgcttgatgggcgtgcaaaacttaaaataccgtcagaaacacaaacgggcaaaatgttccgtatgcgtggcaaaggtgttaagtcagtacgcagtggtgctcaaggcgatttaatttgtaaggttgtgattgaaacgccagttaatttaaacgagcgtcaacgtgacttacttaaagaattagatgaaagtatgggcaaagacagctcaaaaaaccgtcctaaagagcaaggcttttttgatggggttaaaaagttttttgatgacttaactaagtaa

SEQ ID NO: 63928 - protein, 379 aa, Pseudoalteromonas sp
MSKRDYYEVLGVSKDASERDIKKAYKRLAMKYHPDRTAGDKDLETKFKEVKEAYEILTDAQKRQMYDQYGHAAFEQGGGGGHGGFGGGQGDFGDIFGDVFGDIFGGGGGRRQSRQQRGSDLRYNMDLSLEEAVRGKDVEIKVPTWVSCEPCDGSGAKAGSKPKTCTTCHGAGQVQMRQGFFAVQQTCPTCHGQGQIISDPCNKCHGQGRVEKTKTLSVKIPAGVDTGDRIRLSGEGEAGMHGAPAGDLYVQVSVREHKIFVREANNLYCEVPISFTTAGLGGEIEVPTLDGRAKLKIPSETQTGKMFRMRGKGVKSVRSGAQGDLICKVVIETPVNLNERQRDLLKELDESMGKDSSKNRPKEQGFFDGVKKFFDDLTK

SEQ ID NO: 63929 - DNA, 1614 bp, Aspergillus oryzae
  CDS (1)..(1614)
atgagcgctacttccgccgcaatgcccaaggccgcggctattcccgcccgtttactccggagtacatcgcgacaatattcgaagagcccggcaaccagtgttcgagcttaccatgcctcaccgacttcatcaactgacaggcgtgtgcgatgcgatgcaactaataagaaacaacctgtgttctcttcgtcaaggatcttccatactactgctccccttgccgcgattcccgacccatataaagtattaggagtggaaaagaatgcatccgcaggcgacatcaagaaggcctactatggaatggccaaaaaataccacccggataccaacaaggaggcgaatgccaaggaaaagttcgcggaggcccagtcagcttatgagttactttccgaccccaagaagcgtgagaactacgatcgatttggctccgcagcgttcgaccaaaacggtggcttcgatcccagcgcagccggcggtaacccgttcgcaggtgccggtgggttccacggatttggcggtggctttgggggtggtttccctggtggttttgggggagcagatatcaatttcgaggatcttttcggtgctttcgcaggcggcgcacgtcgtgccggtcgaggccgacggggcccattccaggagattctggtaggcgaagatatcgaagtccagaccaacatctcctttatggaagccgcgaagggtacaacaaaagatatcgttatcacgcctttgactccatgcggtacatgtagcggtgacggacttaagaaaggcgccaaacgcacccagtgccgtcagtgcaacggctctggaactcgtgtgcactttatgcagggaggctttcaggtggcagccacttgtgatgcctgtggaggtgcaggcatgtctgtcccaaggggctcggagtgtggctcctgcaatggcaacggtgtggtcaggggcaagaagactgtacaggttgacattccaggtggtgtagaggatggcatgcgcttgcgagtgagcaacgaaggagatgcaccacccaccggaacatctgccgcacccggagcccgcacacaacgaggcgacctgtacgtgtccatccgggtctctcctgaccatcgattcagccgttccggttccgatatcctctatacggctcagattcccctcacgactgctcttttaggtggtgaagttaccgtaccgaccctcgatggtgaagttaagattaaggttggcacgggtactggtaccggcgataaggtcacactgtctggaatgggtatgaagcggcttggtagtcgtacgagtcgcttcagccccactggtgatctcaaggttgagttcaaggttgccatgcccaagtacctgacaggtaaccagcggactatcctggaagttcttgcagatgagatgggtgacaagaccgccaagcgagtcatgaatgtcggaaaggatagcccaccatccggaggagacgcttccacaggaggttccaataatgaaggatttctcaaatccgcttggcacaaactcgtgaacaagtgtgagaactcccccgaagaatcgaataagaaggaatcaggcaacagcagcaagaacgacggcgaaaagaagtcgaactga

SEQ ID NO: 63930 - protein, 537 aa, Aspergillus oryzae
MSATSAAMPKAAAIPARLLRSTSRQYSKSPATSVRAYHASPTSSTDRRVRCDATNKKQPVFSSSRIFHTTAPLAAIPDPYKVLGVEKNASAGDIKKAYYGMAKKYHPDTNKEANAKEKFAEAQSAYELLSDPKKRENYDRFGSAAFDQNGGFDPSAAGGNPFAGAGGFHGFGGGFGGGFPGGFGGADINFEDLFGAFAGGARRAGRGRRGPFQEILVGEDIEVQTNISFMEAAKGTTKDIVITPLTPCGTCSGDGLKKGAKRTQCRQCNGSGTRVHFMQGGFQVAATCDACGGAGMSVPRGSECGSCNGNGVVRGKKTVQVDIPGGVEDGMRLRVSNEGDAPPTGTSAAPGARTQRGDLYVSIRVSPDHRFSRSGSDILYTAQIPLTTALLGGEVTVPTLDGEVKIKVGTGTGTGDKVTLSGMGMKRLGSRTSRFSPTGDLKVEFKVAMPKYLTGNQRTILEVLADEMGDKTAKRVMNVGKDSPPSGGDASTGGSNNEGFLKSAWHKLVNKCENSPEESNKKESGNSSKNDGEKKSN

SEQ ID NO: 63931 - DNA, 1515 bp, Solanum tuberosum
  CDS (96)..(1427)
ccggtggcggcgctctagaactagtggatcccccgggctgcaggtctcgccgcgctttatcatcgttcaattttgactaaattaagcgatcgaagatgtttgggagggcaccgaagaagagcgacaacacaaagtactatgagatcttaggtgtccctaagactgctgcaccggaagatctcaagaaagcttaccgtaaagctgctattaagaatcatcctgataagggaggtgatcctgaaaagtttaaagagcttgcacaagcttatgaggttctgagtgatcccgagaagcgtgagatatatgatcagtatggagaagatgctctcaaggaaggaatgggcggtggaggtggtggacacgacccatttgacattttctcatctttctttggtggcagcccatttggtggaggtggtggaagcagcagaggaagaagacaaagaagaggagaggatgttgtacaccctctcaaagtttctctggaggatctgtacaatggaacatcaaagaagctgtcactatctcgcaatgtattgtgctcgaagtgcaaggggaaaggatctaaatcaggtgcttcaatgaagtgttctggctgtcaagggtctgggatgaaagtcactattagacaacttggcccatccatgatccagcagatgcagcacccttgcaacgagtgtaagggtactggtgagatgatcaatgataaagataggtgtgggcagtgtaaaggtgagaaggttgtgcaggagaagaaggtgttggaagttgttgtcgagaagggtatgcagaacggacagaagataacattcccgggcgaagctgatgaagcacctgataccgtcactggggacatagtttttgtcttgcaacagaaggaacatcccaagtttaagcgaaagggagatgatctctttgtagagcacaccttgagcttaaccgaggccctgtgtggtttccagttcatcttgactcacctagataataggcagctgatcatcaagccccaacccggagaagttgtcaagcctgatcaatttaaagccataaatgatgaaggaatgcctatgtaccaaaggccatttatgagaggaaaactatacattcactttactgtagaattccccgacacattatcccccgagcaatgcaagaaccttgaagcagtattgccaccaaaaccgaaaacacaaatgactgatatggaattggacgagtgcgaggagaccaccttacatgatgttcacatcgaagaggagatgcggaggaagcagcaacaggcccaagaggcatatgacgaagatgatgaagacatgcatggaggtgcacagagaagttcaatgtgcacaacagtaatttggcatcacggaagttgcactaaagaattaacgtcacgattcaactcttgttttcacgtatttgtatgacaagataatgatattgtctgaagaaatatttcctctgccgtaagatatattatagtttactagcttaaaaaaaaaaaaaaaaaaaaaa

SEQ ID NO: 63932 - protein, 443 aa, Solanum tuberosum
MFGRAPKKSDNTKYYEILGVPKTAAPEDLKKAYRKAAIKNHPDKGGDPEKFKELAQAYEVLSDPEKREIYDQYGEDALKEGMGGGGGGHDPFDIFSSFFGGSPFGGGGGSSRGRRQRRGEDVVHPLKVSLEDLYNGTSKKLSLSRNVLCSKCKGKGSKSGASMKCSGCQGSGMKVTIRQLGPSMIQQMQHPCNECKGTGEMINDKDRCGQCKGEKVVQEKKVLEVVVEKGMQNGQKITFPGEADEAPDTVTGDIVFVLQQKEHPKFKRKGDDLFVEHTLSLTEALCGFQFILTHLDNRQLIIKPQPGEVVKPDQFKAINDEGMPMYQRPFMRGKLYIHFTVEFPDTLSPEQCKNLEAVLPPKPKTQMTDMELDECEETTLHDVHIEEEMRRKQQQAQEAYDEDDEDMHGGAQRSSMCTTVIWHHGSCTKELTSRFNSCFHVFV

SEQ ID NO: 63933 - DNA, 1134 bp, Lactobacillus sanfranciscensis
  CDS (1)..(1134): transl_table=11
atggctgataaaaattattatgatattttaggaatttctaaagatgccaccgataaagatattagtcacgcatatcgacatctatcaaagaaatatcatccagatattaataaagaacctggagcagaagcaaaatttaaagaaattacagaagcttatgaagctttaagcgataaacaaaaacgggctaactatgatcaatacggttcagccgatggtcctcaaggatttggtggcggaggtcaaggtggcggttttggcggtggtgctaactatggtgacttctccgacatctttagtgatctttttggcggaggtcgtcgtcaacgtcaagatccaactgctcccagacgaggagaagatttacaataccaactaaatctaacctttgacgaagctatttttggggctaaaaagacaattacctatcatcgccaagctcaatgtcctgattgtcatggaactggtgctaaaccaggaacgcatccggaaacttgtcctgactgttatggttctggagttgtgatgagaacagttaatacgccaatgggacaaatgcaaacccagactgcttgtcctaagtgtcacggaactggtaaaatcattaaggaaaaatgtcctaaatgtggtggaatcggtaaaattgaagaagaacataaagttgaggttaatgttcctgctggagttgaagaaggtcaacaaatgcggcttcaaggccaaggaaatgctggagaaaatggtggaccttatggtgatctttacattatctttagtgtttcaccaagtaaagaattcagacgaaatggttcaaccatttactatgacaagaccatctcatttacagatgctgcgcttggtaacgaaatcgatgttaagacggtttacggtgatggtaaattgaagattccggctggaacgcaaactggcactgtcttcaaattgcgtgggaaaggtgctcctcgtttacacagtgaaagtaagggtgatgaattagttaaagtaatgattgatacccctaaaaaacttaatgctgatcaaaaattagcattgcgagcatttgcagaagctagtggagacaaatcacaagaaaataaaggtttctttgagaaattgaaagacaaattgaataaatag

SEQ ID NO: 63934 - protein, 377 aa, Lactobacillus sanfranciscensis
MADKNYYDILGISKDATDKDISHAYRHLSKKYHPDINKEPGAEAKFKEITEAYEALSDKQKRANYDQYGSADGPQGFGGGGQGGGFGGGANYGDFSDIFSDLFGGGRRQRQDPTAPRRGEDLQYQLNLTFDEAIFGAKKTITYHRQAQCPDCHGTGAKPGTHPETCPDCYGSGVVMRTVNTPMGQMQTQTACPKCHGTGKIIKEKCPKCGGIGKIEEEHKVEVNVPAGVEEGQQMRLQGQGNAGENGGPYGDLYIIFSVSPSKEFRRNGSTIYYDKTISFTDAALGNEIDVKTVYGDGKLKIPAGTQTGTVFKLRGKGAPRLHSESKGDELVKVMIDTPKKLNADQKLALRAFAEASGDKSQENKGFFEKLKDKLNK

SEQ ID NO: 63935 - DNA, 1257 bp, Chlamydomonas reinhardtii
  CDS (1)..(1257)
atgctcgcaaaccttcgtagcggtattcaggggcgcaccacgagtgcgcctcaaaaggcggcgtttgcgcctacgcggagaggctgcgcccacgcccgcactggcggtcggaggacgaccgtggttgtgcgggccgacggtgacttctacgacctgctgggcgttcctcgcactgccgataagaagacaatcaagcaggcatatcgccaaaaagcgcgcaagtatcatccggatgtgaacaaggagccgggcgcagaggacctcttcaagaagattggcgaggcgtatgaggtgctgtcggatgacaacaagaaggccatctatgacaagtacggcgaggcagggctacgaggcggcatgggcggcatgggcggcggcccgggcgtggagttcaccaaccccttcgacctgttcgagtcgttcttcggcggcggcatgggaggcatgggcggcatgggtggcatgggcggcggcttctcgcagcgctcgcgcacccgggccgtgccgggcgaggacgacaaggttgacctgcagctggacttcctggaggcggtgttcgggtgcagccgcgagctggacgtggacaggctcaccggctgcgacgagtgcgagaccacgggcgtgcgcaagggcaccacgccctccacctgcccgcagtgccagggcacgggccaggtggtgtcggcggtgcgcacgccgctgggcaccttccagcaggtgtcgctctgtccgcgctgcgagggcagcggccagatctcccagccctgcaccaagtgccagggcgacggccgcgtgcgcgagacgaaacgcatctcgctcaaggtgcccgccggtgtggacgcgggctcgcggctgcgcgtgcgcggcgagggcaacagcgggcggcgcggcggcgagccgggcgacctgtacgtgtacatcaccatcaaggaccaccccgagctgcgccgcgacggcatcaccatccactcggacgtggagatcagctacgtggacgccatcctgggcacgcaggtcaaggtgaccacggtggacggccccgtggagctcaagatcccgcccggcacgcagcccggcaccacgctgctcatggccaagcgcggcgtgccgcggctgggctcgcccaacgtgcgcggcgaccacatggtgcacgtgcgcgtgcgcatccccaaggcgctgtcggcggacgagcgcaagctggtggaggagctcaaggagctgcagagcaagaccaaggtggggcccttccgcttctag

SEQ ID NO: 63936 - protein, 418 aa, Chlamydomonas reinhardtii
MLANLRSGIQGRTTSAPQKAAFAPTRRGCAHARTGGRRTTVVVRADGDFYDLLGVPRTADKKTIKQAYRQKARKYHPDVNKEPGAEDLFKKIGEAYEVLSDDNKKAIYDKYGEAGLRGGMGGMGGGPGVEFTNPFDLFESFFGGGMGGMGGMGGMGGGFSQRSRTRAVPGEDDKVDLQLDFLEAVFGCSRELDVDRLTGCDECETTGVRKGTTPSTCPQCQGTGQVVSAVRTPLGTFQQVSLCPRCEGSGQISQPCTKCQGDGRVRETKRISLKVPAGVDAGSRLRVRGEGNSGRRGGEPGDLYVYITIKDHPELRRDGITIHSDVEISYVDAILGTQVKVTTVDGPVELKIPPGTQPGTTLLMAKRGVPRLGSPNVRGDHMVHVRVRIPKALSADERKLVEELKELQSKTKVGPFRF

SEQ ID NO: 63937 - DNA, 1371 bp, Arabidopsis thaliana
  CDS (1)..(1371)
atggtcccttccaatggcgcaaaggttcttcgcttgttgagtcgtcgatgtctctcttcatcgcttattcaagatttagccaatcagagactgagaggagtatgtattgggagttataggagattgaatacgagtgttggcaatcatgctaacgtgattggagattacgcttcaaaatctggacatcataggaaatggatcaactttggaggttttaatactaattttggttctacaaggtcttttcatggaacaggttcttcgtttatgtctgctaaggactactatagtgttcttggagtgagtaagaatgctcaagaaggtgaaatcaagaaggcttattatgggcttgctaagaaactccatcctgatatgaataaagatgatccagaagctgagacgaagttccaggaagtctcaaaagcatatgaaattttgaaagataaggagaagcgtgacctttatgaccagtttggtcatgaagcatttgagcaaaatgctagtggtggatttccaaattatcaaggcttcggtggtggtggtggtggtgggtttaacccatttgatatctttgggagcttcaatggcgatattttcaacatgtaccggcaagatattggaggtcaagatgtcaaggttttgcttgatctttctttcatggaagctgttcaaggatgctccaaaactgtgacttttcaaaccgagatggcttgtaatacttgtggtgggcaaggtgttcctcctggtaccaaacgagagaaatgcaaagcctgtaatggctctgggatgacctcattgaggaggggtatgttaagcatccaaacaacttgccagaagtgtggtggagctggtcaaacgttctcaagtatttgcaaatcctgtagaggggctagagtggttcgaggacagaagtcagtgaaagtcaatattgatccaggggttgacaatagtgatacattaaaggtggcaagggtgggtggggctgatcctgaaggtgaccagcctggagatctttatgttactctcaaggttcgtgaagatcctgtgttccgcagagaaggatcggatattcatgtggacgcggttctcagtgttacccaggccattcttggaggaaccattcaagttccaaccctcaccggtgatgttgtcgtgaaggtccgtcctggaacccaacctggtcacaaagtagtgctaagaaataaaggtattagagcaagaaagtcgactaaatttggggatcagtatgtgcatttcaacgtcagcatccctgcaaatataacgcagagacagcgtgaactgcttgaggaatttagtaaagcagaacaaggtgaatacgagcagcgcacagcaactggatcttcccagtga

SEQ ID NO: 63938 - protein, 456 aa, Arabidopsis thaliana
MVPSNGAKVLRLLSRRCLSSSLIQDLANQRLRGVCIGSYRRLNTSVGNHANVIGDYASKSGHHRKWINFGGFNTNFGSTRSFHGTGSSFMSAKDYYSVLGVSKNAQEGEIKKAYYGLAKKLHPDMNKDDPEAETKFQEVSKAYEILKDKEKRDLYDQFGHEAFEQNASGGFPNYQGFGGGGGGGFNPFDIFGSFNGDIFNMYRQDIGGQDVKVLLDLSFMEAVQGCSKTVTFQTEMACNTCGGQGVPPGTKREKCKACNGSGMTSLRRGMLSIQTTCQKCGGAGQTFSSICKSCRGARVVRGQKSVKVNIDPGVDNSDTLKVARVGGADPEGDQPGDLYVTLKVREDPVFRREGSDIHVDAVLSVTQAILGGTIQVPTLTGDVVVKVRPGTQPGHKVVLRNKGIRARKSTKFGDQYVHFNVSIPANITQRQRELLEEFSKAEQGEYEQRTATGSSQ

SEQ ID NO: 63939 - DNA, 1519 bp, Arabidopsis thaliana
  CDS (131)..(1459)
aagaaacaagaggtaggctcttctagcgaactcctttcatacgttttctctctactctcatcgcttttcttatctctctcggagctcttccgtcgtccaccattgattacgggagtgtattgagctaaatatggctataatacaacttggaagtacatgtgttgctcaatggagtattcgtcctcaatttgcagtcagagcttattatcccagcagaatcgaatcaactcgccatcaaaattccagtagccaagtaaattgtttgggagcttcaaagtcgagtatgttctcacatgggtcattgcccttcttgtccatgacgggaatgtccagaaatatgcatcctcctcgcagaggatctcgcttcactgttagagctgatgcagattactattcggtactcggagtttcgaaaaatgcaaccaaagctgagattaaaagcgcttatcggaagctggctaggaattaccatccggatgtgaacaaggatcctggcgcagaagagaaattcaaagaaataagtaacgcatatgaggttttatcagatgatgaaaagaaatctctttacgataggtatggtgaggccggacttaaaggcgctgctggatttggcaatggggattttagtaatccgttcgatctattcgactcattattcgaaggcttcggtggtgggatgggtagaggttcaagaagcagagctgtggatggtcaagacgagtattacacgctaatcttaaacttcaaagaagcggttttcggaatggagaaagaaatagagatatcccggctcgagagctgtgggacatgtgaaggttcaggtgcaaaacctggaaccaaaccgaccaaatgcaccacgtgtggcggacaaggccaagtggtttcagcagctagaactcctctgggcgtgttccaacaagtcatgacttgctcgtcctgtaatggcactggagagatctcgacgccgtgtggtacttgctctggagacggacgcgtgaggaagacaaaacggataagtctcaaagtaccagccggggttgattcaggtatccggttgagagtgagaggagaaggcaatgccgggaagagaggcggatcaccaggcgatctgtttgttgttatagaagttatcccagacccgattttgaaacgagacgatacaaatgttctctacacttgcaagatatcgtatatcgatgcgattttagggacgacactgaaagtaccaacagtggatgggacagtagatttgaaagttccagctgggacacaacctagcacgacgcttgtgatggccaaaaaaggagttccggtattgaacaagagtaatatgagaggagatcagttggtgagagtacaagtggagatacctaagagattgagcaaagaggagaaaaaacttattgaagagcttgctgatatgagcaagaacaagactgctaatagcaccagtagatgattagaaacacgaaaattttgacattgaaattatgaatctctctatacatatacatttttc

SEQ ID NO: 63940 - protein, 442 aa, Arabidopsis thaliana
MAIIQLGSTCVAQWSIRPQFAVRAYYPSRIESTRHQNSSSQVNCLGASKSSMFSHGSLPFLSMTGMSRNMHPPRRGSRFTVRADADYYSVLGVSKNATKAEIKSAYRKLARNYHPDVNKDPGAEEKFKEISNAYEVLSDDEKKSLYDRYGEAGLKGAAGFGNGDFSNPFDLFDSLFEGFGGGMGRGSRSRAVDGQDEYYTLILNFKEAVFGMEKEIEISRLESCGTCEGSGAKPGTKPTKCTTCGGQGQVVSAARTPLGVFQQVMTCSSCNGTGEISTPCGTCSGDGRVRKTKRISLKVPAGVDSGIRLRVRGEGNAGKRGGSPGDLFVVIEVIPDPILKRDDTNVLYTCKISYIDAILGTTLKVPTVDGTVDLKVPAGTQPSTTLVMAKKGVPVLNKSNMRGDQLVRVQVEIPKRLSKEEKKLIEELADMSKNKTANSTSR

SEQ ID NO: 63941 - DNA, 1656 bp, Paracoccidioides brasiliensis
  CDS (1)..(1656)
atgagtgcgggtgctccaagcatacccaaggtggccctgctcccggctcgtctcctccatacgtcacgacactgctccacgcaatgtgctgtgatacgccctcagattcagccaaaattcttccagaatgactgcagagcttaccatgataggcgtccccgtatagaacccttaaatgaccgtagccgtcatccgttttgcaaggcctttcacgcatcttctccctcccaagctacacgcgacccgtaccgtgtactcggagtagggaagaatgcatctgccgcagaaattaaacgggcatactacggactggccaaaaaatatcacccagatacgaacaaggatgctaatgcgaaggaaaaatttgcagaagcccagtcagcgtacgagctgctttcagatgcagaaaagagacaagcatacgatcgttatggctccgcggcattcgaccaaaatggcggtttcaatcctggcgcccatgacggtactggtggtccattctccggagcagccaccggtggattccacgggtttggcggcgggttccctggtggtgggttctctgcgaatataaatttcgaggatctttttggtgcctttgcgggtggttcggggcggaggggtcggtcgaagggtgggccgttccggtctacagtggttgaaggtgatgatattgaagtacagacaaatatctcattcatggatgcggccaaaggaacgacgaaggaagttttcataactccccttgttcagtgccgtacttgtgacggcgaggggacaaaacagggtacaaagcgggcacaatgcaaaacatgcaatggtacggggtcacaagttcatttcatccagagtggatttcatatggaaagtacctgttcctcgtgcggcggtgcaggtgtttccataccccggggatccgaatgcaatatatgcggcggtgatggcgttatccgggaacgaaaaacggtgcatgtcaatatcccagggggcgtggaggatggaatgcggttgcgagtgcctggagagggagatatgcctccagtagaacccggtgctcaaatgcggcgtggtgatctttatgtctttatcaaggtagcccctgattcccgattcagcaggtctggttcggatgtcctgtacacagcgcagattcctctcacaacggcactgcttggtggcgaagtcacagtccccacgcttgacaacgaagttaaagtgaaggtggccacgggaacgggcaccggagacaaaatcaccctatctggaatgggaatgcggaagcttgagggtcggcgtggccagcagggtgacctcaagattgaattcaaggttgccatgccgaaatacctgactgcgaaccagcgaaccattctggaagtgcttgctgacgagatgggcgacgacaccgctcgacgcatgatgaacgtccacaaatacgacaagccttcctctcccggctcttcctcgtcgggcaaaaaagatagcagcaacagcagcactgccagcagtgactcacacaaaaatgaaggcttcctcaagtctgcatggcacaaactcatgcaacacaataacggcaacaaggacacagggtctgatggcaataccagcgacgggaacaagaccgacgaatcgaagaaagcctccggctcggggtga

SEQ ID NO: 63942 - protein, 551 aa, Paracoccidioides brasiliensis
MSAGAPSIPKVALLPARLLHTSRHCSTQCAVIRPQIQPKFFQNDCRAYHDRRPRIEPLNDRSRHPFCKAFHASSPSQATRDPYRVLGVGKNASAAEIKRAYYGLAKKYHPDTNKDANAKEKFAEAQSAYELLSDAEKRQAYDRYGSAAFDQNGGFNPGAHDGTGGPFSGAATGGFHGFGGGFPGGGFSANINFEDLFGAFAGGSGRRGRSKGGPFRSTVVEGDDIEVQTNISFMDAAKGTTKEVFITPLVQCRTCDGEGTKQGTKRAQCKTCNGTGSQVHFIQSGFHMESTCSSCGGAGVSIPRGSECNICGGDGVIRERKTVHVNIPGGVEDGMRLRVPGEGDMPPVEPGAQMRRGDLYVFIKVAPDSRFSRSGSDVLYTAQIPLTTALLGGEVTVPTLDNEVKVKVATGTGTGDKITLSGMGMRKLEGRRGQQGDLKIEFKVAMPKYLTANQRTILEVLADEMGDDTARRMMNVHKYDKPSSPGSSSSGKKDSSNSSTASSDSHKNEGFLKSAWHKLMQHNNGNKDTGSDGNTSDGNKTDESKKASGSG

SEQ ID NO: 63943 - DNA, 1987 bp, Oryza sativa
  CDS (176)..(1486)
  misc_feature (31)..(31): s is g or c
  misc_feature (98)..(98): k is g or t
actatcccccacccagcaggcctccctcgcsgtcacgccgcacgaccgggcccgacagtgccgccgcttcttgccctactgccgcgttctttaagagktgttgtcctgatttgctgcaacccagtagctagtatattgaaggttgaagctttgtgggtatccagcaagtatttcaatggcgctgctacagtttggaggtaccttggctcccaaacttggggaaaaacctcagctgttgcccaggtcacctgcacttacaagagttatttatgctgatccaagatttctggtgtcgaaaagtggtagtggaggcaggcttaaacaccttgtatcacctactgctagtttacaatcacggacatcttctcgactatttaaccatgcaccatcaccgagatttcgccatcgaaggagttcaaggttcattgtcagagctgatgctgatttctattccacacttggtgtttcaagaaatgctagtaaatctgaaatcaagagtgcctatcggaagcttgctaggagctaccatcctgatgtgaacaaagatcctggtgctgaacaaaagttcaaggatattagcaatgcttatgaggttttgtctgatgatgagaagcgatcaatctatgataaatatggagaagctggtttgaagggtgctggaatgggagcaggagattactcaaacccattcgatctctttgaatcattactcgaaggctttggtggaatggggggaatgggaggccgtgctgctcggaacagaccaatgcagggtgatgatgaggcctacaatctggtactcaatttcaaggaagcggtgtttggtgtagagaaagaaattgagatcaccagactggaaggctgtaatacatgtgatggaactggtgccaagcctggaacgaaaccaaccacatgcaaaacatgtggaggacagggacaagtggtctcctcaacaagaacgccacttggaatattccagcaggtctccacctgcaatacttgcggaggcactggtgaattctctaccccgtgcaacacttgtgggggtgatggccgagtgcggaaaacaaaaaggatcagtctaaaggttcctgctggtgttgattctggaagcagattgagggtccggtctgaggggaatgctgggcggagaggaggccctcctggagatctttatgtgtttattgatgttctctctgatcctgttcttaagcgagatgggacaaacattctatacacatgcaaagtttcatatattgacgcaattcttgggacaaccgtcaaggttcccactgttgatgggatggttgacctgaagatcccctccggtacccagccaggcacaacgttagtgatgtccaagaaaggtgtcccgctcctcgggaagtcaaatgctcgtggagaccagctagtgcgtgtgcaggtcgagattccaaagcgtctgagcagcgacgagaggaagctgattgaagaacttgcaaactaaacaaggctcaaacagcaaacagcaggagataattccatgaggcttcattggacaaaatgcttttgcaatatgcaattttaacgcaaattgcagtgactaagtgagcatgaactggtaaatcacttcacaaactgtacactcatctgcgccgtaccatcggtgggaactgtgaattctcatgtctgtaacttcatttttaagccatagaaatctagttccatccaaaacaccaaaacggatggtgttttacagtagcttgtcatatgcttttaggcgagcttattagtctatttttcataatactttttcacaattttgaaaggcctagggagaaatatttaatggtgcaaaagggacgagttttgaaacatttgtttgtcgcagaagcaccagaccattctgattgttattgtaagctgtaacatcaaagttttggcagcaggttttcatgtgctcttaagcgttgggggttgttccgttgatagtatcaaaaaaaaaaaa

SEQ ID NO: 63944 - protein, 436 aa, Oryza sativa
MALLQFGGTLAPKLGEKPQLLPRSPALTRVIYADPRFLVSKSGSGGRLKHLVSPTASLQSRTSSRLFNHAPSPRFRHRRSSRFIVRADADFYSTLGVSRNASKSEIKSAYRKLARSYHPDVNKDPGAEQKFKDISNAYEVLSDDEKRSIYDKYGEAGLKGAGMGAGDYSNPFDLFESLLEGFGGMGGMGGRAARNRPMQGDDEAYNLVLNFKEAVFGVEKEIEITRLEGCNTCDGTGAKPGTKPTTCKTCGGQGQVVSSTRTPLGIFQQVSTCNTCGGTGEFSTPCNTCGGDGRVRKTKRISLKVPAGVDSGSRLRVRSEGNAGRRGGPPGDLYVFIDVLSDPVLKRDGTNILYTCKVSYIDAILGTTVKVPTVDGMVDLKIPSGTQPGTTLVMSKKGVPLLGKSNARGDQLVRVQVEIPKRLSSDERKLIEELAN

SEQ ID NO: 63945 - DNA, 1503 bp, Arabidopsis thaliana
  CDS (1)..(1503)
atggctgccctcgcttctccctccctcatcccctcttctctctgcttcgctgccgccgccgatggtccccgttccctctcttctaatttctctgccttttccgacggcggttccaatttcaggtatcacaagagcttcttgtcgctttcatcttcgtcttcttcgtctacgccttatcgaaatcgacggggccgttccctcgtcgtatttgctacttccggagactactacgccactctcggtgtctctaaatctgccaataacaaggagattaaagctgcttatcgacggctcgctcgtcagtatcatcccgatgtgaacaaggaacccggagcaactgaaaaattcaaggaaatcagtgctgcctatgaggtgctatcagacgagcaaaagagagcattatatgatcaatatggtgaagccggtgtcaagagtacagtaggaggagcttctggtccttacacgtcaaatccctttgaccttttcgagacattctttggtgcaagtatgggtggatttcccgggatggaccaagctgattttgggagaacccgccgcagtagggttaccaaaggtgaagatttacggtatgacatcaccttagaactttcggaggctatttttggatctgagaaagaatttgatcttacgcatctggagacatgtgaagcttgtgctggcaccggggcaaaagcaggatccaagatgagaatatgctccacttgtggtgggcggggtcaagttatgagaactgagcaaacaccatttggcatgttttcacaggtttctatatgtccaaactgtggtggagatggtgaggtgatttctgaaaattgccggaaatgttctggagaagggcgtgtgcgtataaaaaaaagcatcagagtcaaaattcccccgggagttagtgcaggtagcatccttagagtcgccggagaaggtgattctggtcccagaggtggccctccaggagatttgtatgtatatcttgatgttgaagatgtccggggaattgaaagagatggcataaacctattatctaccctttcgatcagttaccttgatgctatactgggtgctgttgttaaggtgaaaacagttgaaggagacactgaactgcagatacctccaggtacacaacctggtgatgtgctagtcctggcaaagaaaggagtaccgaaactgaatagaccgtctatccgcggtgaccacttgtttacagtcaaagtttctgtaccaaatcaaataagtgctggagaacgggagttgctggaggaacttgcatctctgaaggacacgtccagcaaccgctcacgaactcgtgctaagcctcagcaacccagtactctgagcactgcacccagtggctcagaaaacaagaaagatgaagttaaggaggaaaatgaagaaccggagcaagaaaactacttgtggaataacatcaaagaatttgcagggtctgtcgcaaatggagctctaaaatggctgagagataacctctag

SEQ ID NO: 63946 - protein, 500 aa, Arabidopsis thaliana
MAALASPSLIPSSLCFAAAADGPRSLSSNFSAFSDGGSNFRYHKSFLSLSSSSSSSTPYRNRRGRSLVVFATSGDYYATLGVSKSANNKEIKAAYRRLARQYHPDVNKEPGATEKFKEISAAYEVLSDEQKRALYDQYGEAGVKSTVGGASGPYTSNPFDLFETFFGASMGGFPGMDQADFGRTRRSRVTKGEDLRYDITLELSEAIFGSEKEFDLTHLETCEACAGTGAKAGSKMRICSTCGGRGQVMRTEQTPFGMFSQVSICPNCGGDGEVISENCRKCSGEGRVRIKKSIRVKIPPGVSAGSILRVAGEGDSGPRGGPPGDLYVYLDVEDVRGIERDGINLLSTLSISYLDAILGAVVKVKTVEGDTELQIPPGTQPGDVLVLAKKGVPKLNRPSIRGDHLFTVKVSVPNQISAGERELLEELASLKDTSSNRSRTRAKPQQPSTLSTAPSGSENKKDEVKEENEEPEQENYLWNNIKEFAGSVANGALKWLRDNL

SEQ ID NO: 63947 - DNA, 1257 bp, Daucus carota
  CDS (1)..(1257)
atgtttgggagagcaccaaagaagagtgacaatacaaagtactatgaaattcttggtgtcccaaaaacagcatcacctgatgatctgaagaaagcttacaggaaggctgctatcaagaatcatcctgataagggtggcgatcctgaaaagtttaaagagcttgcgcaagcatatgaggttctgagtgacccagagaagcgtgaaatctatgatcagtatggagaggatgctctcaaggagggaatgggtggtggtggaggtggtggccatgacccatttgacattttccaatccttctttggtggcagcccgtttggtggaggtggcagcagcagaggacgaaggcaaagaaggggggaggatgtcattcatccccttaaggtttcactggaagatctttgcaatgggacttccaagaagctttccctttcacgtaatgtaatttgttctaaatgcaagggaaaggggtccaagtcgggtgcttcaatgacatgtcctggctgccagggttctggaatgaaggtttctatcaggcacttgggcccatctatgatccagcagatgcagcatccctgcaatgactgcaagggtactggagaaacaatcaacgacaaggatcgctgccctcaatgcaaaggtcaaaaggttgtgcaggagaagaaagcaatagaagttattgtggagaagggtatgcaaaacggacagaagattacattccctggagaagctgatgaagcgcctgacacggttactggggacatagtgtttgtgttgcaacaaaaggagcaccccaagtttaagaggaagggtgatgatctttttgttgaacattcattaactctcagtgaagcactttgtggcttccaatttactttgactcacctggacggcaggcagcttcttattaaatcccagccaggagaagttatcaagccagatcaatttaaggggataaatgatgaaggaatgccaatgtatcagaggccatttatgcgaggaaagctttacattcactttagtgtagatttcccagagtccttgacccctgagcagtgcaaagctcttgaagctgtgttacctccgaggccttcaattcagatgacagacatggaactggatgaatgtgaagaaacaacactgcatgatgtgaatattgaagaggagatgcgtcggaaacagcaagctgcccaagaggcatatgacgaagacgaagatatgcatggcggtgctcagagggtgcagtgtgctcaacaatga

SEQ ID NO: 63948 - protein, 418 aa, Daucus carota
MFGRAPKKSDNTKYYEILGVPKTASPDDLKKAYRKAAIKNHPDKGGDPEKFKELAQAYEVLSDPEKREIYDQYGEDALKEGMGGGGGGGHDPFDIFQSFFGGSPFGGGGSSRGRRQRRGEDVIHPLKVSLEDLCNGTSKKLSLSRNVICSKCKGKGSKSGASMTCPGCQGSGMKVSIRHLGPSMIQQMQHPCNDCKGTGETINDKDRCPQCKGQKVVQEKKAIEVIVEKGMQNGQKITFPGEADEAPDTVTGDIVFVLQQKEHPKFKRKGDDLFVEHSLTLSEALCGFQFTLTHLDGRQLLIKSQPGEVIKPDQFKGINDEGMPMYQRPFMRGKLYIHFSVDFPESLTPEQCKALEAVLPPRPSIQMTDMELDECEETTLHDVNIEEEMRRKQQAAQEAYDEDEDMHGGAQRVQCAQQ

SEQ ID NO: 63949 - DNA, 1386 bp, Arabidopsis thaliana
  CDS (1)..(1386)
atggtcccttccaatggcgcaaaggttcttcgcttgttgagtcgtcgatgtctctcttcatcgcttattcaagatttagccaatcagaaactgagaggagtatgtattgggagttataggagattgaatacgagtgttggcaatcatgctaacgtgattggagattacgcttcaaaatctggacatgatcggaaatggatcaactttggaggttttaatactaattttggttctacaaggtcttttcatggaacaggttcttcgtttatgtctgctaaggactactatagtgttcttggagtgagtaagaatgctcaagaaggtgaaatcaagaaggcttattatgggcttgctaagaaactccatcctgatatgaataaagatgatccagaagctgagacgaagttccaggaagtctcaaaagcatatgaaattttgaaagataaggagaagcgtgacctttatgaccaggttggtcatgaagcatttgagcaaaatgctagtggtggatttccaaatgatcaaggcttcggtggtggtggtggtggtgggtttaacccatttgatatctttgggagcttcaatggcgatatttttaacatgtaccggcaagatattggaggtcaagatgtcaaggttttgcttgatctttctttcatggaagctgttcaaggatgctccaaaactgtgacttttcaaaccgagatggcttgtaatacttgtggtggacaaggtgttcctcctggtaccaaacgagagaaatgcaaagcctgtaatggctctgggatgtttcatttttcagacctcactgaggaggggtatgttaagcatccaaacaacttgccagaaagtatttgcaaatcctgtagaggggctagagtggttcgaggacagaagtcagtgaaagtcactattgatccaggggttgacaatagtgatacattaaaggtggcaagggtgggtggggctgatcctgaaggtgaccagcctggagatctttatgttactctcaaggttcgtgaagatcctgtgttccgcagagaaggatcggatattcatgtggacgcggttctcagtgttacccagcatctattttggacttctggtgcagtatccgccattcttggaggaaccattcaagttccaaccctcactggtgatgttgtcgtgaaggtccgtcctggaacccaacctggtcacaaagtagtgctaagaaataaaggaattagagcaagaaagtcgactaaatttggggatcagtatgtgcatttcaacgtcagcatccctgcaaatataacgcagagacagcgtgaactgcttgaggaatttagtaaagcagaacaaggtgaatacgagcagcgcacagcaactggatcttcccagtga

SEQ ID NO: 63950 - protein, 461 aa, Arabidopsis thaliana
MVPSNGAKVLRLLSRRCLSSSLIQDLANQKLRGVCIGSYRRLNTSVGNHANVIGDYASKSGHDRKWINFGGFNTNFGSTRSFHGTGSSFMSAKDYYSVLGVSKNAQEGEIKKAYYGLAKKLHPDMNKDDPEAETKFQEVSKAYEILKDKEKRDLYDQVGHEAFEQNASGGFPNDQGFGGGGGGGFNPFDIFGSFNGDIFNMYRQDIGGQDVKVLLDLSFMEAVQGCSKTVTFQTEMACNTCGGQGVPPGTKREKCKACNGSGMFHFSDLTEEGYVKHPNNLPESICKSCRGARVVRGQKSVKVTIDPGVDNSDTLKVARVGGADPEGDQPGDLYVTLKVREDPVFRREGSDIHVDAVLSVTQHLFWTSGAVSAILGGTIQVPTLTGDVVVKVRPGTQPGHKVVLRNKGIRARKSTKFGDQYVHFNVSIPANITQRQRELLEEFSKAEQGEYEQRTATGSSQ

SEQ ID NO: 63951 - DNA, 1257 bp, Nicotiana tabacum
  CDS (1)..(1257)
atgtttgggagaggaccaaagaagagtgataatacgaggtactatgaaatattgggtgtgtcaaagaatgcatcagatgatgaaatcaagaaagcttatagaaaagctgctatgaagaatcaccctgataagggtggtgaccctgaaaagtttaaggagcttgctcaagcttatgaggtgttgagtgactcacagaagcgtgagatttatgatcagtatggagaagatgcattaaaagaaggaatgggtggcggcggcggaatgcatgatccatttgacatctttgaatctttctttggtggcaatccatttggaggtggtggtagcagcagaggaagaagacagagaaggggtgaggatgtagtgcatccactgaaggtctctctcgaggacctttacagtgggataaccaaaaaactctccctttcgcgcaatgtcatttgctccaagtgcagtgggaaaggatcgaagtctggtgcttcaatgaagtgttctggttgtaaaggtagtggtatgaaggtttcaattagacaacttggcccttcaatgatccagcaaatgcagcacgcttgtaatgaatgcaagggtactggagagactattgacgataaggatcggtgccctcggtgcaaaggtgaaaaagtggttcaggagaagaaagtccttgaagttcatgttgagaaaggcatgcaaaatggacagaaaattacattccctggaaaggctgatgaaacccctgatgcaattactggagatatagtttttgtgctccagcagaaagacacccgaggttccaagagaaagggcgacgatctgtttgtagatcacacattgagtctaactgaggctttatgtggcttccagttcataatgacacacttggatggcagacaactcctcataaaatcaaatctcggggaagttgttaaacctgatcaattcaaggcaatcaatgatgagggaacgccaatgtatcagaggccatttatgaggggcaaattgtacattcgtttcgtcgttgaattcccagattcattgaacacagaacaggtgaaggctctggaggcaatcttaccaccaagacctcagtcacagtacacagacatggaattggatgagtgtgaggagacttctttacatgatgtgaatattgaggaggaaatgagaaggaaacaggcagctcaacaagaggcatatgatgaggatgatgagatgcatggtggtggaggacagagagtacaatgtgcacagcagtaa

SEQ ID NO: 63952 - protein, 418 aa, Nicotiana tabacum
MFGRGPKKSDNTRYYEILGVSKNASDDEIKKAYRKAAMKNHPDKGGDPEKFKELAQAYEVLSDSQKREIYDQYGEDALKEGMGGGGGMHDPFDIFESFFGGNPFGGGGSSRGRRQRRGEDVVHPLKVSLEDLYSGITKKLSLSRNVICSKCSGKGSKSGASMKCSGCKGSGMKVSIRQLGPSMIQQMQHACNECKGTGETIDDKDRCPRCKGEKVVQEKKVLEVHVEKGMQNGQKITFPGKADETPDAITGDIVFVLQQKDTRGSKRKGDDLFVDHTLSLTEALCGFQFIMTHLDGRQLLIKSNLGEVVKPDQFKAINDEGTPMYQRPFMRGKLYIRFVVEFPDSLNTEQVKALEAILPPRPQSQYTDMELDECEETSLHDVNIEEEMRRKQAAQQEAYDEDDEMHGGGGQRVQCAQQ

SEQ ID NO: 63953 - DNA, 1317 bp, Arabidopsis thaliana
  CDS (1)..(1317)
atggctgcaatggctcgctgtgctttgattccatctataaacccagctcatagcttccgtcatcagtttccgcaacccaatgcgtcattctatttacctcccactcttccgattttttcgcgtgttcggagatttggaatttccggcggatatcgccgccgtgtgatcaccatggccgccggaactgatcactactcgactttgaatgtgaaccgcaatgccaccttgcaggagatcaagagctcgtatagaaaactcgctcgcaagtatcacccagatatgaacaagaaccctggtgcagaagataagttcaaacagataagtgctgcttacgaggtattatctgatgaggagaagagatctgcctatgatcggttcggcgaggctggtttagaaggtgattttaatggatcacaggatacttcaccaggggtggatccatttgacttgtacagtgcattctttggaggttctgatggattctttgggggaatgggtgaatcaggagggatgggttttgatttcatgaataagagaagcctagaccttgacattcgatatgacctgcggttgagctttgaagaggcagtttttggagtaaaacgggagattgaggtttcttatttagaaacatgtgatggttgtggaggaactggtgctaaatccagtaactccattaaacagtgtagtagttgtgatggtaaaggacgtgtgatgaattctcagagaacaccctttggaatcatgtctcaggtgtccacttgctccaaatgtggtggtgaaggaaaaactatcactgataagtgtcgaaagtgcattggcaacgggagactacgggctaggaaaaagatggatgttgtagtccctcctggtgtcagcgatagagccacaatgcgaattcaaggagaaggtaacatggacaagagaagtggaagagctggtgacttgttcatcgtacttcaagttgatgagaagcgtggaattcggcgggaagggcttaatttatactccaatatcaacatagatttcacagatgctatacttggggcgaccacaaaggtagaaacggttgagggatcaatggatcttcggattccgccaggaactcaacctggcgacaccgtaaaattacctaggaaaggagttccagacacggatagaccttcaatccggggagaccattgctttgtagtgaaaatttcgatccccaaaaaactgagcgagagggagcgcaagttggtagaggaattctcgtcgctcagaagatctagtagtagtactggacctactggtacaatgctatcccaatctaattga

SEQ ID NO: 63954 - protein, 438 aa, Arabidopsis thaliana
MAAMARCALIPSINPAHSFRHQFPQPNASFYLPPTLPIFSRVRRFGISGGYRRRVITMAAGTDHYSTLNVNRNATLQEIKSSYRKLARKYHPDMNKNPGAEDKFKQISAAYEVLSDEEKRSAYDRFGEAGLEGDFNGSQDTSPGVDPFDLYSAFFGGSDGFFGGMGESGGMGFDFMNKRSLDLDIRYDLRLSFEEAVFGVKREIEVSYLETCDGCGGTGAKSSNSIKQCSSCDGKGRVMNSQRTPFGIMSQVSTCSKCGGEGKTITDKCRKCIGNGRLRARKKMDVVVPPGVSDRATMRIQGEGNMDKRSGRAGDLFIVLQVDEKRGIRREGLNLYSNINIDFTDAILGATTKVETVEGSMDLRIPPGTQPGDTVKLPRKGVPDTDRPSIRGDHCFVVKISIPKKLSERERKLVEEFSSLRRSSSSTGPTGTMLSQSN

SEQ ID NO: 63955 - DNA, 1257 bp, Euphorbia esula
  CDS (1)..(1257)
atgtttggaagagcaccgaagaaaagcgataactcaaagtattatgagattctcggagtctcaaagagcgcttcgcaggatgatctaaagaaggcttatagaaaagctgccatcaagaaccatcctgacaagggtggtgatccagaaaagttcaaggagttggcccaggcttatgaagttttaagtgacccagaaaagcgtgatatatatgatcagtatggtgaggatgcccttaaggaaggaatgggcggtggtggcggtggccatgatccatttgacatattccaatccttctttggtggcagtccatttggtggcggtggtagtagcagaggccggaggcagaggaggggtgaggatgtgactcatcctctcaaagtttccttggaagatctctacaatggcacctccaagaagctatctttatcccgaaatgtaatctgctcaaagtgcaaaggtaaaggctccaagtcaggtgcatcaatgaaatgttcaggttgccaaggatctggaatgaaggtttccattagacaccttggtccctctatgatccagcaaatgcagcatccttgcaatgaatgtaagggtactggggagaccattaatgacaaggatcgggtgcccccagtgcaagggcgaaaagggttattcaagagaagaaaagtcttggaagtccatgttgagaagggtatgcaaaatggacagaagatcacattccccggagaagctgatgaagctcctgatactgttacaggagatatagtttttatccttcagcaaagggagcatcctaagtttaaaagaaggggagatgatctagttgtggagcacaccttgtctctaactgaggctctctgtggtttccagttcatattgacccatttagatggaaggcaactcctcataaagtcccagcctggggaagttgtgaagcctgatcaattcaaggctataaatgatgaggggatgccaatgtaccagaggccatttatgaggggtaagttgtacattcacttcaatgttgaattcccggattctcttccaccggatcaatccaaagccctagaggctgtgcttccatcgagaacttccgtacaattgtcggacatggaggtggatgaatgcgaagaaaccactttgcatgatgtcaattttgaggaagagatgaggagaaagcaacagcagagtgcagaggcttatgatgaagatgaagatatgccaggtggtgcccagagagtgcaatgcgcccagcagtaa

SEQ ID NO: 63956 - protein, 418 aa, Euphorbia esula
MFGRAPKKSDNSKYYEILGVSKSASQDDLKKAYRKAAIKNHPDKGGDPEKFKELAQAYEVLSDPEKRDIYDQYGEDALKEGMGGGGGGHDPFDIFQSFFGGSPFGGGGSSRGRRQRRGEDVTHPLKVSLEDLYNGTSKKLSLSRNVICSKCKGKGSKSGASMKCSGCQGSGMKVSIRHLGPSMIQQMQHPCNECKGTGETINDKDRVPPVQGRKGLFKRRKVLEVHVEKGMQNGQKITFPGEADEAPDTVTGDIVFILQQREHPKFKRRGDDLVVEHTLSLTEALCGFQFILTHLDGRQLLIKSQPGEVVKPDQFKAINDEGMPMYQRPFMRGKLYIHFNVEFPDSLPPDQSKALEAVLPSRTSVQLSDMEVDECEETTLHDVNFEEEMRRKQQQSAEAYDEDEDMPGGAQRVQCAQQ

SEQ ID NO: 63957 - DNA, 1260 bp, Solanum lycopersicum
  CDS (1)..(1260)
atgtttggaagagcaccgaagaagagcgataatacaaagtattatgagatcttaggagttcctaaggctgcttctcaggaagatctcaaaaaggcttatcgtaaagctgctatcaaaaatcaccctgataagggaggcgatcctgagaagtttaaagagcttgctcaagcttatgaggttctgagtgacccggagaagcgtgagatatatgatcagtatggagaggatgctctaaaggaaggaatgggtggtggaggtggtggacatgaaccatttgatatatttcaatcattcttcggtggtggtggaaacccctttggtggtggtggaagcagcagagtccgaagacagagaagaggagaggatgttatccacccgctcaaggtttctttagaggatctttacaatgggacatcaaagaagctttcactatctcgcaatgtgttgtgctcaaagtgcaagggcaaaggttccaagtcaggtgcttcaatgaaatgttctggctgtcaagggtctggaatgaaagtttctatcagacagctcggtccatccatgatccagcagatgcagcacccttgcaatgagtgcaagggtactggagagacgatcagtgacaaagataggtgccctcagtgcaagggtgagaaggttgtgcaggagaagaaggtgttggaagttcacgtggagaagggtatgcagaatgggcaaaagataacatttccaggcgaggcagatgaagcgccagataccatcactggagacattgtttttgtcttgcaacaaaaggaacatcctaagttcaagcgaaagggagatgatctttttgttgagcacacattgagccttgacgagtctctatgtggtttccagtttgttctgactcacctagacaacagacagctgctcattaagtcccaacctggcgaagttgtcaagcctgatcagtttaaggctatcaacgatgaaggaatgccgatgtaccaaaggccgttcatgaagggcaaaatgtacattcacttcactgttgatttccccgagtcattacacgcagagcagtgcaagaaccttgaggctgtgctgcctcccaaaaccaaattgcagatatcagatatggaattggacgagtgggaggagactactttgcacgatgtcaacattgaggaggagatgcgaaggaagcagcaagctgcccaagaggcacaggacgaagatgacgatatgcctggtggtgcacagagagtccaatgtgcacagcagtaa

SEQ ID NO: 63958 - protein, 419 aa, Solanum lycopersicum
MFGRAPKKSDNTKYYEILGVPKAASQEDLKKAYRKAAIKNHPDKGGDPEKFKELAQAYEVLSDPEKREIYDQYGEDALKEGMGGGGGGHEPFDIFQSFFGGGGNPFGGGGSSRVRRQRRGEDVIHPLKVSLEDLYNGTSKKLSLSRNVLCSKCKGKGSKSGASMKCSGCQGSGMKVSIRQLGPSMIQQMQHPCNECKGTGETISDKDRCPQCKGEKVVQEKKVLEVHVEKGMQNGQKITFPGEADEAPDTITGDIVFVLQQKEHPKFKRKGDDLFVEHTLSLDESLCGFQFVLTHLDNRQLLIKSQPGEVVKPDQFKAINDEGMPMYQRPFMKGKMYIHFTVDFPESLHAEQCKNLEAVLPPKTKLQISDMELDEWEETTLHDVNIEEEMRRKQQAAQEAQDEDDDMPGGAQRVQCAQQ

SEQ ID NO: 63959 - DNA, 1344 bp, Arabidopsis thaliana; identical to SEQ ID NO: 63821
  CDS (154)..(1344)

SEQ ID NO: 63960 - protein, 396 aa, Arabidopsis thaliana
MFAQGSLPFLSLTGVSPNTHSRRGARFTVRADTDFYSVLGVSKNATKAEIKSAYRKLARSYHPDVNKDAGAEDKFKEISNAYEILSDDEKRSLYDRYGEAGVKGAGMGGMGDYSNPFDLFESLFEGMGGMGGMGGGMGSRGSRSRAIDGEDEYYSLILNFKEAVFGIEKEIEISRLESCGTCNGSGAKAGTKPTKCKTCGGQGQVVASTRTPLGVFQQVMTCSPCNGTGEISKPCGACSGDGRVRRTKRISLKVPAGVDSGSRLRVRGEGNAGKRGGSPGDLFAVIEVIPDPVLKRDDTNILYTCKISYVDAILGTTLKVPTVDGEVDLKVPAGTQPSTTLVMAKKGVPVLNKSKMRGDQLVRVQVEIPKRLSKEEKMLVEELADMSKNKVANSRR

SEQ ID NO: 63961 - DNA, 1500 bp, Arabidopsis thaliana
  CDS (1)..(1500)
atggctgccctcgcttctccctccctcatcccctcttctctctgcttcgctgccgccgccgatggtccccgttccctctcttctaatttctctgccttttccgacggcggttccaatttcaggtatcacaagagcttcttgtcgctttcatcttcgtcttcttcgtctacgccttatcgaaatcgacggggccgttccctcgtcgtatttgctacttccggagactactacgccactctcggtgtctctaaatctgccaataacaaggagattaaagctgcttatcgacggctcgctcgtcagtatcatcccgatgtgaacaaggaacccggagcaactgaaaaattcaaggaaatcagtgctgcctatgaggtgctatcagacgagcaaaagagagcattatatgatcaatatggtgaagccggtgtcaagagtacagtaggaggagcttctggtccttacacgtcaaatccctttgaccttttcgagacattctttggtgcaagtatgggtggatttcccgggatggaccaagctgattttgggagaacccgccgcagtagggttaccaaaggtgaagatttacggtatgacatcaccttagaactttcggaggctatttttggatctgagaaagaatttgatcttacgcatctggagacatgtgaagcttgtgctggcaccggggcaaaagcaggatccaagatgagaatatgctccacttgtgttaattcgagtcgatgtcagaaatggcatctgattggagcatcagagttgatgtcaatgtgtagtttactcaaactaatctgtttgtggttagtagtttctatatgtccaaactgtggtggagatggtgaggtgatttctgaaaattgccggaaatgttctggagaagggcgtgtgcgtataaaaaaaagcatcaaagtcaaaattcccccgggagttagtgcaggtagcatccttagagtcgccggagaaggtgattctggtcccagaggtggccctccaggagatttgtatgtatatcttgatgttgaagatgtccggggaattgaaagagatggcataaacctattatctaccctttcgatcagttaccttgatgctatactgggtgctgttgttaaggtgaaaacagttgaaggagacactgaactgcagatacctccaggtacacaacctggtgatgtgctagtcctggcaaagaaaggagtaccgaaactgaatagaccgtctatccgcggtgaccacttgtttacagtcaaagtttctgtaccaaatcaaataagtgctggagaacgggagttgctggaggaacttgcatctctgaaggacacgtccagcaaccgctcacgaactcgtgctaagcctcagcaacccagtactctgagcactgcacccagtggctcagaaaacaagaaagatgaagttaaggaggaaaatgaagaaccggagcaagaaaactacttgtggaataacatcaaagaatttgcagggtaa

SEQ ID NO: 63962 - protein, 499 aa, Arabidopsis thaliana
MAALASPSLIPSSLCFAAAADGPRSLSSNFSAFSDGGSNFRYHKSFLSLSSSSSSSTPYRNRRGRSLVVFATSGDYYATLGVSKSANNKEIKAAYRRLARQYHPDVNKEPGATEKFKEISAAYEVLSDEQKRALYDQYGEAGVKSTVGGASGPYTSNPFDLFETFFGASMGGFPGMDQADFGRTRRSRVTKGEDLRYDITLELSEAIFGSEKEFDLTHLETCEACAGTGAKAGSKMRICSTCVNSSRCQKWHLIGASELMSMCSLLKLICLWLVVSICPNCGGDGEVISENCRKCSGEGRVRIKKSIKVKIPPGVSAGSILRVAGEGDSGPRGGPPGDLYVYLDVEDVRGIERDGINLLSTLSISYLDAILGAVVKVKTVEGDTELQIPPGTQPGDVLVLAKKGVPKLNRPSIRGDHLFTVKVSVPNQISAGERELLEELASLKDTSSNRSRTRAKPQQPSTLSTAPSGSENKKDEVKEENEEPEQENYLWNNIKEFAG

SEQ ID NO: 63963 - DNA, 1254 bp, Glycine max
  CDS (1)..(1254)
atgtttgggagggcaccgaagaagagcgataatacgaggtactacgaaatcctcggcgtctccaagaacgcttcgcaggatgatctgaagaaggcttacaagaaagccgccattaagaatcaccccgacaagggcggtgatcccgagaagtttaaagagctggcgcaagcttatgaggttctgagtgaccctgagaagcgtgagatatatgatcagtatggtgaagatgcgcttaaggaaggaatgggtggtggcggtggccatgatccatttgatatcttttcatctttctttggcggtgggagtccctttggatcaggtggaagtagtcgaggtaggaggcagaggcgcggagaagacgtggttcaccctctcaaggtctctttggaggacctttatcttggaacttccaagaagctctccctctccagaaatgttatatgctccaagtgcagtggcaagggttctaagtctggtgcttcgatgaagtgtgctggttgtcaaggaactggtatgaaggtttctataagacatcttggcccatccatgattcagcagatgcagcatgcctgcaatgaatgtaagggtactggagaaactatcaatgacagagatcgctgcccacagtgcaagggagagaaggttgtgcaggagaagaaagtccttgaagttattgtagaaaaggggatgcagaatgggcagaagataacattccctggcgaagctgatgaagcgccggacacaattactggggatatcgtctttgtccttcagcagaaggaacatcccaaattcaaaagaaaggctgaagatctttttgtagagcacactttgtcccttaccgaggccttgtgtggcttccaatttgtgctgactcacttggatagccgtcagcttcttattaaatcaaatcccggggaagttgtgaagcctgattcatacaaggctataaatgatgagggaatgcccatgtatcagaggccattcatgaaggggaaactttacattcacttcactgtggagtttccagattctctaaaccctgatcaagttaaggccttggaggctgttctgccaccaaagccttcttcacaattgacagacatggagctggatgaatgtgaggaaactacactccatgatgtcaacatggaggaggagactaggaggaagcagcaacaagctcaggaggcatatgatgaggatgatgacatgcctggtggtgcacagagggtacagtgcgcccagcagtaa

SEQ ID NO: 63964 - protein, 417 aa, Glycine max
MFGRAPKKSDNTRYYEILGVSKNASQDDLKKAYKKAAIKNHPDKGGDPEKFKELAQAYEVLSDPEKREIYDQYGEDALKEGMGGGGGHDPFDIFSSFFGGGSPFGSGGSSRGRRQRRGEDVVHPLKVSLEDLYLGTSKKLSLSRNVICSKCSGKGSKSGASMKCAGCQGTGMKVSIRHLGPSMIQQMQHACNECKGTGETINDRDRCPQCKGEKVVQEKKVLEVIVEKGMQNGQKITFPGEADEAPDTITGDIVFVLQQKEHPKFKRKAEDLFVEHTLSLTEALCGFQFVLTHLDSRQLLIKSNPGEVVKPDSYKAINDEGMPMYQRPFMKGKLYIHFTVEFPDSLNPDQVKALEAVLPPKPSSQLTDMELDECEETTLHDVNMEEETRRKQQQAQEAYDEDDDMPGGAQRVQCAQQ

SEQ ID NO: 63965 - DNA, 1248 bp, Hevea brasiliensis
  CDS (1)..(1248)
atgtttggaagagcacccaaaaaaagcgataacaccaagtactatgagattcttggggtctcaaagaacgcttcacaggatgatctaaagaaggcttatagaaaagctgccatcaagaaccatcctgacaagggtggtgatcctgaaaagtttaaagagttggcccaagcttatgaggttttgagtgatccagagaaacgtgagatatatgatcaatatggagaggacgccctcaaggagggaatgggcagtggaggtggtgctcatgacccatttgacattttccaatccttctttggtggcaacccatttggtggtggtggtagcagcagaggccgtaggaaggagggagaggatgttatccatcctctcaaggtttctttggaagatctctacaatggcacctcaaagaagctgtctctttcccgtaatgttatctgctcaaagtgcaaaggtaaagggtccaaatcaggtgcatcaatgaaatgttcgggttgccaaggttctggaatgaaggtctccataagacaacttggtccctctatgatccagcaaatgcagcatccttgtaatgaatgtaagggtactggtgagaccattaatgataaggatcgttgccctcaatgtaaaggtgaaaaggttgttcaggagaagaaagtgctggaagttattgttgagaagggtatgcaaaatggacagaggattactttccctggagaagctgatgaagctcctgatactattacaggggacattgtttttgtccttcagcaaaaggagcatcctaagttcaagcgaaagggtgatgacctaattgttgatcacactttatctcttacagaggcactttgtgcctcccagtttatattaacccatctagatggagacctcctcataaaatcccaacctggggaggtagtgaagcctgatcaattcaaggccataaatgatgaagggatgccaatgtatcagaggccattcatgagggggaaactgtacattcatttcagtgttgatttcccagactctctgccccctgatcagtgcaaagccctagaggcagttcttccctcaagaacatcagtccagctgtctgacatggagctggatgaatgtgaggagacaactttacacgatgtgaactttgacgaggagatgcgaaggaagcaacaacaggcccaagaggcatatgatgaagatgatgatatgcatggtggtggccagagggtgcaatgtgctcagcaataa

SEQ ID NO: 63966 - protein, 415 aa, Hevea brasiliensis
MFGRAPKKSDNTKYYEILGVSKNASQDDLKKAYRKAAIKNHPDKGGDPEKFKELAQAYEVLSDPEKREIYDQYGEDALKEGMGSGGGAHDPFDIFQSFFGGNPFGGGGSSRGRRKEGEDVIHPLKVSLEDLYNGTSKKLSLSRNVICSKCKGKGSKSGASMKCSGCQGSGMKVSIRQLGPSMIQQMQHPCNECKGTGETINDKDRCPQCKGEKVVQEKKVLEVIVEKGMQNGQRITFPGEADEAPDTITGDIVFVLQQKEHPKFKRKGDDLIVDHTLSLTEALCASQFILTHLDGDLLIKSQPGEVVKPDQFKAINDEGMPMYQRPFMRGKLYIHFSVDFPDSLPPDQCKALEAVLPSRTSVQLSDMELDECEETTLHDVNFDEEMRRKQQQAQEAYDEDDDMHGGGQRVQCAQQ

SEQ ID NO: 63967 - DNA, 1263 bp, Salix gilgiana
  CDS (1)..(1263)
atgtttgggagagcaccaaagaaaagcgacaacaccaagtactatgaggttcttggagtctcaaagagtgcttcacaggatgatctaaagaaggcttataggaaagcagctatcaagaaccatcctgataagggcggtgatcctgaaaagttcaaggagttggcgcaagcatatgaggttctgagtgaccctgagaagcgtgagatatatgatcagtatggagaggatgccctcaaggaaggaatgggtagcggcggcagcggcgctcacgatccattcgatatcttccaatccttctttggtggtggcaatccattcggtggtggaggtagcagcaggggccgaaggcaaagaaggggcgaggatgtgatccaccctctgaaagtttcttttgaagacctttataatggcacatccaagaagctttctctttcacgaaatgtaatctgctccaagtgcaagggcaaaggttccaaatccggagcatcatcaaaatgtgctggttgccaaggttctggaatgaaggtctccataagacacctcggtccttctatgatccagcaaatgcagcatgcctgcaatgaatgcaagggcactggcgagacaattaacgataaggaccgatgccctcaatgcaagggtgagaaggttgtccaggagaagaaagtgttggaagtagttgttgagaagggcatgcaaaatgggcagaaggtaacatttcctggagaagctgatgaggcgcctgacactgttacaggggacatagtcttcgtcctgcagcaaaaggatcaccctaagtttaagagaaagggtgatgacctatttgttgagcacacactatctcttactgaggcactatgtggcttccaattcgtcttgacccatttggatggaaggcagctcctgataaaatctcaacccggggaagtagtcaagcctgatcaattcaaggctataaatgatgaaggaatgccgatgtaccaaaggccatttatgagagggaaactctacattcatttcagtgttgaattcccagactccctgtcccctgatatgtgcaaggcgttggaggccgtgcttcctccgcgagcctctgttcagctgactgacatggagcttgatgaatgcgaggaaactactttacatgatgtgaacatcgatgaggagatgaggaggaaacagcaacagcaggcccaagaagcgtatgatgaagatgatgagatgcctggtggtgcccagagggtgcagtgtgctcagcaataa

SEQ ID NO: 63968 - protein, 420 aa, Salix gilgiana
MFGRAPKKSDNTKYYEVLGVSKSASQDDLKKAYRKAAIKNHPDKGGDPEKFKELAQAYEVLSDPEKREIYDQYGEDALKEGMGSGGSGAHDPFDIFQSFFGGGNPFGGGGSSRGRRQRRGEDVIHPLKVSFEDLYNGTSKKLSLSRNVICSKCKGKGSKSGASSKCAGCQGSGMKVSIRHLGPSMIQQMQHACNECKGTGETINDKDRCPQCKGEKVVQEKKVLEVVVEKGMQNGQKVTFPGEADEAPDTVTGDIVFVLQQKDHPKFKRKGDDLFVEHTLSLTEALCGFQFVLTHLDGRQLLIKSQPGEVVKPDQFKAINDEGMPMYQRPFMRGKLYIHFSVEFPDSLSPDMCKALEAVLPPRASVQLTDMELDECEETTLHDVNIDEEMRRKQQQQAQEAYDEDDEMPGGAQRVQCAQQ

SEQ ID NO: 63969 - DNA, 1191 bp, Streptomyces avermitilis
  CDS (1)..(1191): transl_table=11
atgagtaccaaggacttcatcgagaaggactactacaaggtcctcggcgtccccaaggacgccaccgaggccgagatcaagaaggcgtaccggaagctcgcccgcgagttccacccggacgccaacaagggcaacgccaaggcggaggagcgcttcaaggagatctccgaggccaatgacattctcggcgacaccaagaagcgcaaggagtacgacgaggcacgcaccctcttcggcaacggcggcttccgtcccggccccggcgctcagggcggctccttcaacttcgacctgggcgacctcttcggaggcggcgcgcagcagggcggcggcgcggggggcggcttcggcggcgggatcggtgacgtcttcggcggcctgttcaaccgtggcggcgccggccccggcaccggcacgcgtacccagccgaggcgcggccaggacatcgagtccgaggtcacgctgagcttcacggaggcggtggacggtgccacggtgccgctgcgcatgtcctcccaggccccctgcaaggcctgttcgggcaccggcgacgccaacggcacaccgcgcgtgtgcccgacgtgcgtcggcaccggacaggtggcgcggggctcgggcggcggcttctcgctgaccgacccctgcccggactgcaagggccgcggcctgatcgccgagaacccctgcgagatctgcaagggcagcggccgcgccaagtcctcccggacgatgcaggtacgcatccccgcgggggtcagcgacagccagcgcatcaggctccgcggcaagggcgccccgggtgaacggggcggaccggcgggcgatctgtacgtcgtcgtgcatgtcgacgcccacccggtcttcggccgcaagggcgacaacctcacggtgaccgtgcccgtcacgttcgcggaggcggccctcggcggcgaggtgaaggtgcccaccctgggcggccccgccgtcaccctgaagctgccgccgggcacgcccaacggtcgtacgatgcgggcccgcggcaagggcgcggtccgtaaggacggcacccgcggagacctgctggtcacggtcgaggtcaccgtgcccaaggacgtgtcgggcaaggctcgtgacgccctggaggcgtatcgcgaggcgaccgcgggcgaggacccgcgggcggagctgttccaggccgcgaagggagcatga

SEQ ID NO: 63970 - protein, 396 aa, Streptomyces avermitilis
MSTKDFIEKDYYKVLGVPKDATEAEIKKAYRKLAREFHPDANKGNAKAEERFKEISEANDILGDTKKRKEYDEARTLFGNGGFRPGPGAQGGSFNFDLGDLFGGGAQQGGGAGGGFGGGIGDVFGGLFNRGGAGPGTGTRTQPRRGQDIESEVTLSFTEAVDGATVPLRMSSQAPCKACSGTGDANGTPRVCPTCVGTGQVARGSGGGFSLTDPCPDCKGRGLIAENPCEICKGSGRAKSSRTMQVRIPAGVSDSQRIRLRGKGAPGERGGPAGDLYVVVHVDAHPVFGRKGDNLTVTVPVTFAEAALGGEVKVPTLGGPAVTLKLPPGTPNGRTMRARGKGAVRKDGTRGDLLVTVEVTVPKDVSGKARDALEAYREATAGEDPRAELFQAAKGA

SEQ ID NO: 63971 - DNA, 1260 bp, Arabidopsis thaliana
  CDS (1)..(1260)
atgtttggaagaggaccttcaaggaagagcgataacacaaagttctacgagatccttggtgttcctaagaccgcagcaccagaagatctcaagaaagcttataagaaagccgctatcaaaaaccatcctgataagggtggtgatcccgaaaagtttaaagagttagcacaggcttatgaagttttaagtgatcctgagaagcgtgagatctatgatcaatatggggaagatgcactcaaggaaggaatgggtggtggaggtggtggacacgatccatttgatatcttctcttccttctttggtagtggtggacacccattcggaagtcatagccggggaaggaggcagaggcgtggtgaagatgttgttcatcccttgaaggtttccttagaggatgtttatctcggaacaacaaagaagctctcactttctaggaaggctttgtgctcaaagtgtaacggcaagggttcaaagtctggagcttcaatgaaatgtggtggctgtcaaggttcgggaatgaagatctcgatcaggcagtttggacctggaatgatgcagcaggtgcagcatgcttgtaatgattgcaaaggcacaggagagaccatcaatgatcgggacaggtgtccacaatgcaaaggagagaaggttgtctctgagaagaaggtgcttgaagtaaatgtggagaagggaatgcaacacaatcagaagatcacattcagtggacaagccgatgaagcgcctgatactgtcaccggagatatagtgtttgtcattcagcagaaggagcacccaaagttcaaaagaaagggtgaggatctctttgtggagcacaccatctctctaaccgaggccttgtgtggcttccagtttgtcttgacccatttggacaaaagacagcttctcatcaaatccaagcccggagaggtcgtcaaacctgattcatacaaggcgataagtgatgagggaatgccaatataccaaaggccgttcatgaagggtaagctatacattcacttcacggttgaattcccggaatcgctgagcccggatcagacaaaggccattgaagcagttttgccaaagccaaccaaggcagctataagcgatatggaaatagacgactgcgaagagacgactctgcatgatgtgaacattgaggatgagatgaaaaggaaggcgcaagctcaaagagaggcttatgatgacgatgaggaagatcacccaggcggtgctcagcgtgtgcaatgtgcccagcagtga

SEQ ID NO: 63972 - protein, 419 aa, Arabidopsis thaliana
MFGRGPSRKSDNTKFYEILGVPKTAAPEDLKKAYKKAAIKNHPDKGGDPEKFKELAQAYEVLSDPEKREIYDQYGEDALKEGMGGGGGGHDPFDIFSSFFGSGGHPFGSHSRGRRQRRGEDVVHPLKVSLEDVYLGTTKKLSLSRKALCSKCNGKGSKSGASMKCGGCQGSGMKISIRQFGPGMMQQVQHACNDCKGTGETINDRDRCPQCKGEKVVSEKKVLEVNVEKGMQHNQKITFSGQADEAPDTVTGDIVFVIQQKEHPKFKRKGEDLFVEHTISLTEALCGFQFVLTHLDKRQLLIKSKPGEVVKPDSYKAISDEGMPIYQRPFMKGKLYIHFTVEFPESLSPDQTKAIEAVLPKPTKAAISDMEIDDCEETTLHDVNIEDEMKRKAQAQREAYDDDEEDHPGGAQRVQCAQQ

SEQ ID NO: 63973 - DNA, 1131 bp, Azoarcus sp
  CDS (1)..(1131): transl_table=11
atggcaaaaagggattactacgaggtgctgggtgtcaaccgcgacgcctcggacaacgagatcaagaaggcctaccgcaagctggccatgaagcatcacccggaccgcaatccggacaacaaggactccgaggaccacttcaaggaagcgaaaaacgcgtacgagatcctgtccgatgcgcaaaagcgcgctgcgtacgaccgctacggacatgccggggtcgatccctctgcgggtgccgggcctggcgggcagggtttcgatgggttcgcggatgcgttctccgacatcttcggcgatattttcggcggtgcgggcggggccggacgcgggcgctcgaacgtgtatcgcggcgctgatcttcgctacaacctcgaaatctccctcgaagaagcggcccgcggcgccgacaagacgatccgcatcccgaccgtcgaggaatgcgaaacctgtcatggcagcggcgcgaaacccggcacgcagccgaagccctgccccacctgcggtggcgccggccaggtgcgcatccagcaaggcttcttctcgatccagcagacctgcccgaaatgccacggcaccgggcgaatcattcccgatccgtgccgcgactgcggcggcgccggccgggtaaagcggcagaagacgctggaagtgaagatcccggcgggaatcgacgaaggaatgcgcctgcgacacgccggtcacggcgaaccgggtgtcaatggcgggccaccgggagacctgtatgtcgagatccatatccgcgcccacccggtattccagcgcgaccacgacgacctgcattgcgagatgccgatcagcatcacgaccgcggcgctcggcggcgagatcgaaatcccgacgctcgaaggcatggcccgactgaaaattcccgccgagacgcagagcggcaaggtgttccggctgcgtggaaagggaatccgcaacgtccgctcgcaggcccacggcgacctgatgtgccatgtagtcgtcgaaaccccggtcaatctcacggaacgtcagaaagagctattgcgcgaattcgaggaggtttccagctcggacgccgaccgccacaaccccaaagccaaatcctggatggacaaggtcaaggactttttcggtgcctga

SEQ ID NO: 63974 - protein, 376 aa, Azoarcus sp
MAKRDYYEVLGVNRDASDNEIKKAYRKLAMKHHPDRNPDNKDSEDHFKEAKNAYEILSDAQKRAAYDRYGHAGVDPSAGAGPGGQGFDGFADAFSDIFGDIFGGAGGAGRGRSNVYRGADLRYNLEISLEEAARGADKTIRIPTVEECETCHGSGAKPGTQPKPCPTCGGAGQVRIQQGFFSIQQTCPKCHGTGRIIPDPCRDCGGAGRVKRQKTLEVKIPAGIDEGMRLRHAGHGEPGVNGGPPGDLYVEIHIRAHPVFQRDHDDLHCEMPISITTAALGGEIEIPTLEGMARLKIPAETQSGKVFRLRGKGIRNVRSQAHGDLMCHVVVETPVNLTERQKELLREFEEVSSSDADRHNPKAKSWMDKVKDFFGA

SEQ ID NO: 63975 - DNA, 1173 bp, Corynebacterium diphtheriae
  CDS (1)..(1173): transl_table=11
atggcagcgaaaaacgagtgggctgagaaagactactatgccgacctaggagtctcctcgtccgcaactgaagcggaaattaaaaaggcgtatcgcaagctggcgcgagaaaaccaccccgattctcacccaggggatgccgcagccgaagagcgttttaaaaaggtcgctgaggcctatgacgtcgtgggtgatgagacgaagcggaaagagtatgacgagttccgctctatgatcgcttctggcgggttcggaggcgccggattccccggcgggtttcggacgcaagaaggcttcgacttcgacctcggagacatctttggatctggagcgggtcgaggccacgctccgcaaggtggttttggggatatcttcggtggcattttcaaccgcggcggtggtgctcgcaacgcagctcggccgacgcgggggtccgacgtcgaaacggaaataaccctcgaatttcgtgaagcggccaagggcaccacgattcccttgcagctgactggcgacgccccctgccacacctgccacggctccggttcgcgttccggcgcacccaccacgtgcaccgagtgcaatggaacgggctttacctcggaaaacaagggtgcctttggattctctgcaccgtgtacgcagtgcggcggcaccggcaagatgatctctgatccgtgccctgattgctcgggtactggaacgcagcgtcgtactcgctcgattactgtgcgcatccctgctggtgtggtcgatggccaaaaggtgcgtctggctggccaaggtgaggccggtcctaatgggctgccggctggtgatctgtatgtcacggtgcatgtgaaaaacgaccgagtgtttacccgttcgggcgatgacctcgaggtgacggtgccggtgtcctatgcggagttggcgttgggcgatactatttcggtgcctacgctcgaccttccggtccgagttcgtattccttccggcacgcctaatggtcgtgtgctgagggtgcgcggtaagggcgtgcctaagcgtggcggttctgcgggagatctgctggtcaaggtagaagtgacggtgccgtcgagtttggatgcggcgtcggcaagcgcgctgcgcgcctatgttcaagccgagcgggacgcgggttttgatccgcgtgctggctgggcaggaaaataa

SEQ ID NO: 63976 - protein, 390 aa, Corynebacterium diphtheriae
MAAKNEWAEKDYYADLGVSSSATEAEIKKAYRKLARENHPDSHPGDAAAEERFKKVAEAYDVVGDETKRKEYDEFRSMIASGGFGGAGFPGGFRTQEGFDFDLGDIFGSGAGRGHAPQGGFGDIFGGIFNRGGGARNAARPTRGSDVETEITLEFREAAKGTTIPLQLTGDAPCHTCHGSGSRSGAPTTCTECNGTGFTSENKGAFGFSAPCTQCGGTGKMISDPCPDCSGTGTQRRTRSITVRIPAGVVDGQKVRLAGQGEAGPNGLPAGDLYVTVHVKNDRVFTRSGDDLEVTVPVSYAELALGDTISVPTLDLPVRVRIPSGTPNGRVLRVRGKGVPKRGGSAGDLLVKVEVTVPSSLDAASASALRAYVQAERDAGFDPRAGWAGK

SEQ ID NO: 63977 - DNA, 1158 bp, Nocardia farcinica
  CDS (1)..(1158): transl_table=11
gtgagccaacgggagtggatcgagaaggactactacaaggagctgggcgtctcctccaccgcctcgcaggacgagatcaagaaggcctaccgcaagctggcccgtgacctgcacccggacgccaatccgggggacagcaaggccgaggagcgcttcaaggcggtgagcgaggcgcacgcggtgctctccgatccggccaagcgcaaggagtacgacgagacccgcaggctcttcgccggcggcggctacccgcgcggcggcttcggtcccggtggggcgggcggcttttcgcagggtttcgacatcggcgacatcttcggcggcaccgccgccggggacggcgggctcggtgacatcctcggtggcctgttcaaccggggcggcacccgcaccacgagcaggccccgccgcggcgcggacgtggagaccgagaccaccctgggcttccgcgaggccgcccagggcgtcacggtgccgctgcggatgaccagcccgtcgccgtgtaccacctgtcacggcagcggcgcgaagccggggaccagtccccgggtctgcccgatctgcaacggcacgggcgtggtcagccgcaaccagggcgcgttcggcttcagcgagccctgcgacggctgccggggcaccggctcgatcatcgacgacccgtgtgtcgactgccacggcagcggcatccagaaccggacccgcaccatcacggtgcggattccgccgggcgtcagcgacggccagcggatccggttggcgggccagggcgaggcgggcctgcgcggcgcgccgtcgggcgacctgtacgtcaccgtgcacgtcagccaggacaaggtcttcggccgcaacggcgacgacctgaccctggtgctgccggtgagctacgccgaactggtgctcggtaccacggtctcggtgccgaccctggacggccgggtcggggtgaaggtgccgccgggcaccgccgacggacgcaccctgcgggtgcgcggccgcggcgtccccaagcgcgggggcggcgccggtgacctgctggtcacggtgaaggtggcggtaccgcagaaactggacgacgatgctctggaagcgctcgagcgctaccgggaagcggagaaggccagcggattcgatccgcgtgcgggatgggcaggtgcgtga

SEQ ID NO: 63978 - protein, 385 aa, Nocardia farcinica
MSQREWIEKDYYKELGVSSTASQDEIKKAYRKLARDLHPDANPGDSKAEERFKAVSEAHAVLSDPAKRKEYDETRRLFAGGGYPRGGFGPGGAGGFSQGFDIGDIFGGTAAGDGGLGDILGGLFNRGGTRTTSRPRRGADVETETTLGFREAAQGVTVPLRMTSPSPCTTCHGSGAKPGTSPRVCPICNGTGVVSRNQGAFGFSEPCDGCRGTGSIIDDPCVDCHGSGIQNRTRTITVRIPPGVSDGQRIRLAGQGEAGLRGAPSGDLYVTVHVSQDKVFGRNGDDLTLVLPVSYAELVLGTTVSVPTLDGRVGVKVPPGTADGRTLRVRGRGVPKRGGGAGDLLVTVKVAVPQKLDDDALEALERYREAEKASGFDPRAGWAGA

SEQ ID NO: 63979 - DNA, 1263 bp, Arabidopsis thaliana
  CDS (1)..(1263)
atgttcggtagaggaccctcgaagaagagcgacaacactaagttctacgagatcttaggtgttcctaagagcgcttcaccagaagatctcaagaaagcttacaaaaaagccgctatcaagaatcatcctgataagggtggagatcccgagaagtttaaggagttagcacaagcttatgaagtgcttagtgacccggagaagcgtgagatttatgaccagtatggagaggatgcactcaaggaaggaatgggtggtggaggaggtggacatgatccatttgatattttctcatccttctttggtggaggcccctttggaggtaataccagccggcaaaggaggcagaggcgtggtgaggatgttgttcatcccttgaaggtatctcttgaggatgtgtaccttggtacaatgaagaagctttcactttctaggaatgctctctgctctaagtgtaacggaaagggatcaaaatctggagcctccttgaaatgtggagggtgtcagggatctggtatgaaggtgtctattaggcagcttggacctggaatgatccagcagatgcagcatgcatgtaatgaatgcaaagggacaggtgagaccatcaatgatcgggacaggtgtccacaatgcaaaggagacaaggtcattcctgagaagaaggtgcttgaagtgaatgtggagaagggaatgcaacacagtcagaagatcacatttgaaggacaagcagatgaagcgcctgacactgtcactggagatatagtgtttgtccttcagcagaaagagcacccaaagttcaagagaaagggagaagacctctttgtggagcacacactttctctaaccgaagctttgtgtggcttccaatttgttctgactcacttggatggcagaagtcttctcattaaatctaatcctggggaggtcgtgaaacctgattcatacaaggcaataagcgatgaaggaatgccgatataccagaggccattcatgaagggtaagctctacatccacttcacagtggagttcccggactcgttgagcccagatcagaccaaagcactggaagctgttctacctaagccgtcaacagctcagttgagtgacatggagatagatgaatgcgaggagaccacgctccacgatgtcaacattgaggatgagatgaggaggaaggcacaagctcaaagagaggcttatgatgatgacgatgaagatgatgaccatccgggtggtgctcaaagggtgcaatgtgcccagcagtaa

SEQ ID NO: 63980 - protein, 420 aa, Arabidopsis thaliana
MFGRGPSKKSDNTKFYEILGVPKSASPEDLKKAYKKAAIKNHPDKGGDPEKFKELAQAYEVLSDPEKREIYDQYGEDALKEGMGGGGGGHDPFDIFSSFFGGGPFGGNTSRQRRQRRGEDVVHPLKVSLEDVYLGTMKKLSLSRNALCSKCNGKGSKSGASLKCGGCQGSGMKVSIRQLGPGMIQQMQHACNECKGTGETINDRDRCPQCKGDKVIPEKKVLEVNVEKGMQHSQKITFEGQADEAPDTVTGDIVFVLQQKEHPKFKRKGEDLFVEHTLSLTEALCGFQFVLTHLDGRSLLIKSNPGEVVKPDSYKAISDEGMPIYQRPFMKGKLYIHFTVEFPDSLSPDQTKALEAVLPKPSTAQLSDMEIDECEETTLHDVNIEDEMRRKAQAQREAYDDDDEDDDHPGGAQRVQCAQQ

SEQ ID NO: 63981 - DNA, 1110 bp, Acholeplasma laidlawii
  CDS (1)..(1110): transl_table=11
atggcaaaaagagattattatgatgtgctaggtatatcaaaaagtgcatctcaagacgaaattaaaaaagcttacagaagtttagctaaaaaatatcaccctgacgtttcaaaggaaaaagatgctgaaacaaaatttaaagaagttcaagaagcctatgatgtcttaaatgattcaaataaaaaagcacaatacgatagatttggtcatgctggtactggacaagatccatttggtggtgctggtggtggttttggcggatttggtggctttgatgacattattagccaattctttggtggtggacaaacacgtagaacacgtcaaacatcaaatgttggtgaagacttaaatatgcgtatgaccatcgattttatggaagcagttttaggtacaacaaaaaatgtttctgtagatatcactcaagattgtggtcactgtcatggctctggtgcagaaagttcaaaagacgttcatacctgtagcaaatgtcatggtcaaggatttattaacgtagaccaacgtaccatgtttggtacaatgagaagtcaacaagtatgtccacaatgtcaaggtgaagggcaaacaattgataacaaatgtcatgtttgttccggtgctggacgtgttaaggctaaaaagacagtggatgtgaaagtacctgctggtgtcgataatgaaatgacattacgcgtaccaggttatggtaatggtggtagaaaaggtgctgaatcaggtgacctatacatcacatttagagtgaaaccacataaaatatttaaacgtcgtggttcagatatcattttagatgtacctattacatttacgcaagctgcacttggagacaaaattgatataccaactatttatggtgaagtagagttaaccatacctgcaggtattcaatctggtactgaacttaaattaaaaaataagggaacaaaagatccaagaactggtaagacaggtgatcaacatgttatcgtcaatattgagacacctaaaaacttatctagtgaggaaaagaaattatttgaacagttaagtaaactggattccccaagaaagaaatctggttgggataaattcaaatcattctttacaaattaa

SEQ ID NO: 63982 - protein, 369 aa, Acholeplasma laidlawii
MAKRDYYDVLGISKSASQDEIKKAYRSLAKKYHPDVSKEKDAETKFKEVQEAYDVLNDSNKKAQYDRFGHAGTGQDPFGGAGGGFGGFGGFDDIISQFFGGGQTRRTRQTSNVGEDLNMRMTIDFMEAVLGTTKNVSVDITQDCGHCHGSGAESSKDVHTCSKCHGQGFINVDQRTMFGTMRSQQVCPQCQGEGQTIDNKCHVCSGAGRVKAKKTVDVKVPAGVDNEMTLRVPGYGNGGRKGAESGDLYITFRVKPHKIFKRRGSDIILDVPITFTQAALGDKIDIPTIYGEVELTIPAGIQSGTELKLKNKGTKDPRTGKTGDQHVIVNIETPKNLSSEEKKLFEQLSKLDSPRKKSGWDKFKSFFTN

SEQ ID NO: 63983 - DNA, 1107 bp, Acinetobacter sp
  CDS (1)..(1107): transl_table=11
atggctaaacgagattattatgaggttttaggggtttcgaaaaccgcaagtgatgatgagatcaaaaaagcctaccgcaagttggcgatgaaatatcatccagaccgtaaccctgataacgccgaagctgaagataagtttaaagaagcttcagaagcctatgaagtactgtctgacagtgaaaagcgcagtatgtatgaccgcatgggtcataatgcgtttgaaggcggcggcggtggaggctttggcggatttagtgccgaggatatcttcagtcagtttggtgacatttttggtggtgcgttcggtggcggtggccgtcagcagcagcgtcaacgtcgcggttcagatttacgttatgtcatggaactttcgcttgaagaagcggttcgtggcgtcaagaaaaccattacttttactgcgcctgcaccttgtgaggtatgtgacggtaaagggtctaaaaatccgaatgatgtcgaaacctgtcgtacttgtcatggtacgggtcaagtccgcatgcaacagggtttcttctctgttcagcaaacctgtggtacctgtcgcggacaaggtaaaatcattaagaacccatgtcagtcttgtcatggttcaggtgtggcagatcgtcaacaaacgcttgaagtgaccatccctgcgggggtcgataatggtgaccgcgttcgcctaagtggtaaaggggaagccgttcgtgatggacaggcaggtgacttgtacgttgaagtggtggtgcgtgagcacgaaatcttccagcgtgatggtgccgacttgtatatggacgttcctgtgagcattgctgatgctgcattgggtaaagaaattgaaattccgacacttgaaggccgtgtcagtttgaagattccagagggaactcaaacaggcaagcttttccgcttacgtggtaaaggggttcgtccagtacgcagtagtatggtgggagatttgctgtgccgtgttgtggttgaaacgccagtcaacctgaccagtcgtcagcgtgaattgtttaaagagttgcaagccacgctcgatggggacgaacatagctcatctccaaagaaaaaatcattctttgatcgtttgttcgattaa

SEQ ID NO: 63984 - protein, 368 aa, Acinetobacter sp
MAKRDYYEVLGVSKTASDDEIKKAYRKLAMKYHPDRNPDNAEAEDKFKEASEAYEVLSDSEKRSMYDRMGHNAFEGGGGGGFGGFSAEDIFSQFGDIFGGAFGGGGRQQQRQRRGSDLRYVMELSLEEAVRGVKKTITFTAPAPCEVCDGKGSKNPNDVETCRTCHGTGQVRMQQGFFSVQQTCGTCRGQGKIIKNPCQSCHGSGVADRQQTLEVTIPAGVDNGDRVRLSGKGEAVRDGQAGDLYVEVVVREHEIFQRDGADLYMDVPVSIADAALGKEIEIPTLEGRVSLKIPEGTQTGKLFRLRGKGVRPVRSSMVGDLLCRVVVETPVNLTSRQRELFKELQATLDGDEHSSSPKKKSFFDRLFD

SEQ ID NO: 63985 - DNA, 1128 bp, Actinobacillus actinomycetemcomitans
  CDS (1)..(1128): transl_table=11
atggcaaaacaagactactacgaactcctcggcatctcccgatccgccgatgaaaaagaaatcaaacgtgcttataaaaagctcgcgatgcagtatcaccctgacagaaccaagggcgataaagagaaagaagaaaaattcaaagaaattcaagaagcctatgaagtgctaaacgataaagaaaaacgcgctgcctatgatcaatatgggcacgcggcgtttgaacaaggaactggctttggtggcggcagttttggcggtgcggatttcggggatattttcggcgatatgttcggagatattttcggtggtggcggacgtgggcgccaacgcgtcgtgcgtggtgacgatttgcggtacgacattgaaattacgctggaagaagctgtaaaaggcactacaaaagacataaaaattcataccttagccccatgtgatacttgtcacggcacaggcgctgaagcgggttcgaaagtcgaaacctgtccgcattgccatggtgccggtcgtttacgtcgtcaacagggcttctttgtaacagaacaaccttgtcatttctgtcatggcaccggtaagaaaattgagaaaccatgtaaaacctgccatggtgacggcagagtcaataaagcgaaaaatctttccgttaaaatcccggcgggcgtggacacaggcaatcaactacgtctttcaggtgaaggcgctgcaggtgaaaacggcgccccggcaggcgatttatatgtggtgattcatgttaaagaacaccatatttttgaacgtgacggcagcaacctctattgtgaagtaccgatcagttttaccatggctgcccttggtggagaaattgaagtgccgacactggatggtcgtgtgaagttaaaaatcccggaagaaacccaaaccggaaaattattccgtatgcgcgggaaaggtgtcacgtcaacccgaagcggctacgcaggggatttaacttgccgaattattgtagaaaccccggttaaattaaacgaggagcaaaaagaattattacgcaaactggaggaaagcctggaaggacaaaccaagcaacgtccgaaatcctccagcttcttagatggcgtaaaacgtttctttgatgatctgacgaagtaa

SEQ ID NO: 63986 - protein, 375 aa, Actinobacillus actinomycetemcomitans
MAKQDYYELLGISRSADEKEIKRAYKKLAMQYHPDRTKGDKEKEEKFKEIQEAYEVLNDKEKRAAYDQYGHAAFEQGTGFGGGSFGGADFGDIFGDMFGDIFGGGGRGRQRVVRGDDLRYDIEITLEEAVKGTTKDIKIHTLAPCDTCHGTGAEAGSKVETCPHCHGAGRLRRQQGFFVTEQPCHFCHGTGKKIEKPCKTCHGDGRVNKAKNLSVKIPAGVDTGNQLRLSGEGAAGENGAPAGDLYVVIHVKEHHIFERDGSNLYCEVPISFTMAALGGEIEVPTLDGRVKLKIPEETQTGKLFRMRGKGVTSTRSGYAGDLTCRIIVETPVKLNEEQKELLRKLEESLEGQTKQRPKSSSFLDGVKRFFDDLTK

SEQ ID NO: 63987 - DNA, 1134 bp, Agrobacterium tumefaciens
  CDS (1)..(1134): transl_table=11
atggcgaaagcagacttttacgaaacacttggcgtcagcaagaccgcggacgaaaaagagctgaaaagcgccttccgcaaactcgcgatgaagttccatccggacaaaaaccctgatgatgccgattccgaacggaaattcaaagaaatcaacgaagcctacgaaacgctgaaggacccgcagaagcgcgcggcctatgaccgtttcggccacgccgcctttgaaaatggcggcatgggtggcggtggcatgggcggcggcggtttcgccaatggcggtttttccgatattttcgaagacatcttcggcgagatgatgggcggcggccgtgcgcgccggtcctccggcggacgcgaacgcggcgccgaccttcgctacaatatggaaatcacgctggaagaagcctttgccggcaagaccgcacagatcagggttccgacctcgatcacctgcgacgtctgttccggctccggcgccaagcctggcacgcagcccaagacatgcgcaacctgccagggctccggccgcgtgcgcgccgcgcagggcttcttctcggtggaacgcacctgcccgacctgccacggccgcgggcagacgatctccgacccctgcggtaagtgccatggtcagggccgtgtgacggaagagcgttcgctgtccgtcaacattccctcgggcatcgaggatggcacgcgcattcgcctgcagggcgaaggcgaagccggtatgcgtggcgggccggcgggcgatctctatatcttcctgtccgtgcgtccgcatgagttcttccagcgcgacggcgccgatctttattgcaccgtgccgatctcgatgaccacggcagcgcttggcggcactttcgatgtcacgacacttgatggcacgaaatcgcgcgtcacggttccggaaggcacccagccgggtaagcagttccgtctgaagggcaagggcatgccggtgctgcgttcagcgcagacgggtgatctctacatccagattcagatcgagacaccacagaagctcagcaagcgccagcgtgagctgttgcaggagttcgagcagctatcctccaaggagaacaatccggaatcgacgggcttctttgcccggatgaaggaattcttcgacggctga

SEQ ID NO: 63988 - protein, 377 aa, Agrobacterium tumefaciens
MAKADFYETLGVSKTADEKELKSAFRKLAMKFHPDKNPDDADSERKFKEINEAYETLKDPQKRAAYDRFGHAAFENGGMGGGGMGGGGFANGGFSDIFEDIFGEMMGGGRARRSSGGRERGADLRYNMEITLEEAFAGKTAQIRVPTSITCDVCSGSGAKPGTQPKTCATCQGSGRVRAAQGFFSVERTCPTCHGRGQTISDPCGKCHGQGRVTEERSLSVNIPSGIEDGTRIRLQGEGEAGMRGGPAGDLYIFLSVRPHEFFQRDGADLYCTVPISMTTAALGGTFDVTTLDGTKSRVTVPEGTQPGKQFRLKGKGMPVLRSAQTGDLYIQIQIETPQKLSKRQRELLQEFEQLSSKENNPESTGFFARMKEFFDG

SEQ ID NO: 63989 - DNA, 1185 bp, Bacteroides fragilis
  CDS (1)..(1185): transl_table=11
atggcagaaaaaagagattattacgaagtgctggaagtcacgaaagagtcaacagtcgaagaaataaagaaagcataccggaaaaaagccatccaatatcatccggacaaaaatccgggtgacaaggaagcggaagaaaagtttaaagaagcagccgaagcttacgatgtactgagcaacccggataaacgtgcccgctacgaccagtttggtcatgcaggaatgagcggagcagccggaaacggtggaccattcggcggattcagcggcggaatgtctatggatgacattttctctatgttcggtgatatttttggcggccatagcggcggcggattcggtggtggtttcggaggctttggcggatttggaggcggaggttctcaacagagaaaattccgtggctcggacctcagagtgaaagtaaagctgaatttgaaagaaatctctacaggagttgaaaagaaatttaagctaaaaaaatatataccttgttcgcattgccatggaaccggggcggaaggaaacagcggttctgagacttgcccgacctgcaaaggaagcggatcggtcatccgcaaccaacagacgatcttgggaactatgcagacgcgtaccacatgtccgacttgtaatggtgaaggtaagatcattaaagacaagtgtaaggtttgtggaggagaaggcatcgaatatggcgaagaagtagtaaccgtaaagattcctgccggagtagcagaaggtatgcaactctctatggggggtaaaggaaatgccggaaagcacaacggtataccgggtgacctgctgattctggtagaagaagaaccacatccggaactgattcgtgatgaaaatgacctggtgtacaacctattgctaagcttccccacagcagctatcggaggtgcggtagaaataccgaccattgacggcaaagtaaaagtgaaaatagaagcaggtacacaaccgggtaaagtgctccgcctgcgtggcaaaggtctgccaagcgtaaacggctatggtacaggagatttattggtcaacgttagtgtatatgtgcccgaaacgttgagtaaagaggaaaaaagcactctggagaaactggaggaatcaaagaactttaaaccgagtacttcaatcaaagaaaagatattcaagaagttcagaagcctctttgactaa

SEQ ID NO: 63990 - protein, 394 aa, Bacteroides fragilis
MAEKRDYYEVLEVTKESTVEEIKKAYRKKAIQYHPDKNPGDKEAEEKFKEAAEAYDVLSNPDKRARYDQFGHAGMSGAAGNGGPFGGFSGGMSMDDIFSMFGDIFGGHSGGGFGGGFGGFGGFGGGGSQQRKFRGSDLRVKVKLNLKEISTGVEKKFKLKKYIPCSHCHGTGAEGNSGSETCPTCKGSGSVIRNQQTILGTMQTRTTCPTCNGEGKIIKDKCKVCGGEGIEYGEEVVTVKIPAGVAEGMQLSMGGKGNAGKHNGIPGDLLILVEEEPHPELIRDENDLVYNLLLSFPTAAIGGAVEIPTIDGKVKVKIEAGTQPGKVLRLRGKGLPSVNGYGTGDLLVNVSVYVPETLSKEEKSTLEKLEESKNFKPSTSIKEKIFKKFRSLFD

SEQ ID NO: 63991 - DNA, 1191 bp, Bacteroides thetaiotaomicron
  CDS (1)..(1191): transl_table=11
atggcagaaaaaagagactattatgaagtgctggaggtgacaaaaaccgccacagtagaagagattaaaaaagcctaccgcaaaaaagcgatccaatatcaccccgacaaaaatccgggtgacaaggaagcggaagagaaattcaaggaggctgccgaagcgtatgacgtgttgagcaatccggacaagcgttcgcgttacgaccagttcggtcatgcgggagtaagcggtgcggcgggcaacggaggtccgttcggtggtttcggtggcgaaggaatgtctatggatgatatcttctccatgttcggtgacatcttcggaggtcgcggcggtggtttcagcggcggcttcggagggttcagcggtttcggtggcggtggcggtggttcacagcaacgtcgctatcggggcagtgatctacgtgtcaaggtaaagatgactttgaaagaaatctcgacaggagtagaaaagaaattcaaactgaaaaaatatgtgccgtgtaatcactgtcatggcacgggggccgaaggcgacggcggttcggagacttgtccgacctgtaaaggtagcggttcggtgatccgtaaccagcagacgattttgggtacgatgcagacccgcaccacttgtcctacttgtaacggtgaaggtaagatcatcaagaacaagtgtaaagagtgtggcggcgacggtatcgtatatggcgaagaggtagtgacggtgaagattcctgccggagtggcagaaggtatgcagctctcaatgggcggcaagggtaatgccggaaagcataatggtgtgccgggcgacttgctgattctcgtagaggaagaaccgcatccggacttaatccgcgacgagaatgatctgatctataacttgctgctgagtttcccgactgctgcactgggcggtgccgtggagattccgacaatcgacggaaaagtgaaagtgaagatcgactcgggtactcaaccgggaaaagtgctgcgtctgcgcggcaaaggtctgccgaatgtcaatggttacggtacgggagatttgctggttaatatcagcatttatgtgccggaagcattgaacaaggaggaaaagagcacgctggaaaagatggaggcttcggacaacttcaagccgagtacgtcggtgaaggagaagatcttcaagaagttcaagagcttctttgactag

SEQ ID NO: 63992 - protein, 396 aa, Bacteroides thetaiotaomicron
MAEKRDYYEVLEVTKTATVEEIKKAYRKKAIQYHPDKNPGDKEAEEKFKEAAEAYDVLSNPDKRSRYDQFGHAGVSGAAGNGGPFGGFGGEGMSMDDIFSMFGDIFGGRGGGFSGGFGGFSGFGGGGGGSQQRRYRGSDLRVKVKMTLKEISTGVEKKFKLKKYVPCNHCHGTGAEGDGGSETCPTCKGSGSVIRNQQTILGTMQTRTTCPTCNGEGKIIKNKCKECGGDGIVYGEEVVTVKIPAGVAEGMQLSMGGKGNAGKHNGVPGDLLILVEEEPHPDLIRDENDLIYNLLLSFPTAALGGAVEIPTIDGKVKVKIDSGTQPGKVLRLRGKGLPNVNGYGTGDLLVNISIYVPEALNKEEKSTLEKMEASDNFKPSTSVKEKIFKKFKSFFD

SEQ ID NO: 63993 - DNA, 1143 bp, Bacillus thermoglucosidasius
  CDS (1)..(1143): transl_table=11
atggcgaaacgagattattatgaaattctcggagttagcaaaaacgcgacaaaagaagagataaaaaaagcgtatcggaaactttcgaaaaaatatcatccagatattaataaagaaccggatgcggcagaaaagttcaaagaaattaaagaagcgtacgaagtgctaagcgatgaccaaaagcgggcgcattacgatcagtttgggcatgcggatccgaaccaaggtttcggcgggtttcgcagcgatgattttgactttggcggtttcagcggtttcagtggcttcgatgatattttcagcaccttttttggcggcgggcgccggcgtgatccaaatgcgccaagagctggcgccgatttgcaatatacgatgacattgacgtttgaagaggcggtattcggcaaagaaacggatattgaaattccaagggaagaaacatgcaatacttgccatggcacaggagctaagccaggcacgaaaaaagaaacatgttcatattgccatggaacagggcaaatcagcacagagcaatcgacaccgtttggccgcatcgtcaatcgccgcacatgcccatattgcggcggaaccgggcaatacattaaggaaagatgcacaacatgcggcggcactggccgcgtaaaacggcggaaaaaaatccatgtgaaaattccggctggaatcgatgatggtcagcaattacgtgtcgctggccaaggagaaccgggcattaacggcgggcctccgggggatttatatatcgttttccacgtagagccgcatgaattttttgagcgcgatggcgacgacatttattgtgaaatcccgcttacatttgctcaagctgcgcttggcgacgaaattgaagtgccgacacttcatggaaaagtgagactgaaaataccggcaggcacgcaaacaggcacaaaattccgcttgaaaggaaagggagtgccgaatgtccgcggctacggctatggcgaccagcatgtgattgtccgtgttgtgacaccgacaaaactgacggaaaagcagaagcaattgttgcgcgaatttgatcaattaggcggttcaagcatgcatcaaggaccacacggccgcttttttgaaaaagtaaaaaaagcgtttaaaggggaatcatga

SEQ ID NO: 63994 - protein, 380 aa, Bacillus thermoglucosidasius
MAKRDYYEILGVSKNATKEEIKKAYRKLSKKYHPDINKEPDAAEKFKEIKEAYEVLSDDQKRAHYDQFGHADPNQGFGGFRSDDFDFGGFSGFSGFDDIFSTFFGGGRRRDPNAPRAGADLQYTMTLTFEEAVFGKETDIEIPREETCNTCHGTGAKPGTKKETCSYCHGTGQISTEQSTPFGRIVNRRTCPYCGGTGQYIKERCTTCGGTGRVKRRKKIHVKIPAGIDDGQQLRVAGQGEPGINGGPPGDLYIVFHVEPHEFFERDGDDIYCEIPLTFAQAALGDEIEVPTLHGKVRLKIPAGTQTGTKFRLKGKGVPNVRGYGYGDQHVIVRVVTPTKLTEKQKQLLREFDQLGGSSMHQGPHGRFFEKVKKAFKGES

SEQ ID NO: 63995 - DNA, 1134 bp, Bradyrhizobium japonicum
  CDS (1)..(1134): transl_table=11
atgtccacgtccaccaagcgctgctactacgagaccctcgaagtcgaacgtgacgccgacgaatccaagttgaagtcgtcgttccgcaagctggcgatgaagttccatcccgaccgcaatccgggggacgacaccagcgaggtcaagttcaaggaaatcaacgaggcctacgaggtcctgaaggacaaggacaagcgcgcggcctatgaccgtttcggccatgcggccttcgagcagggcggtcctggcggcggcgccggtttcggcgcgggcttcgcctcctccttctccgatattttcgaggacctgttcggcatggccggacagcgcggccgcggcggccgcgagcgcggcgccgacctgcgctacaacatggaaatcacgctcgaggaagcctttggcggcaagaccgcgcagatcgagatcccggtctcggtcacctgcgaggcctgctcgggcatcggcgccaaggccggcaccaagccgaagacctgctcgacctgcggcggcgccggccgcgtgcggcagtcgcagggcttcttcaccctggagcggacctgtccgggttgccagggccgcggccagatgatcgaggacgcctgcccgtcctgctcgggtcagggccgtgtgacccgcgagcggacgctgtcggtcaacattccccagggcgtcgaggacggtacgcggatcaggctcgccggcgaaggcgaggccggtgtccgcggcggcccgcccggcgacctctacatcttcctgtcgctggcccagcaccagttcttccagcgcgacggcgccgatctgcattgccgggtgccgatctcgatggtgacggccgcccttggcggcgaattcgaggtgccgaccatcgagaagggcaaggccaaggtgaaggtgccggccgggacccagtccaaccgtcgattccgcattgcatcaaaaggcatgccggtgctgcgctcgcgccagaccggcgacatgtacgttcaggtcgtggtcgagaccccgcagaatctcaccaagaagcagcaggaattgctggccgagttcgaaaagctctcttccggcaacacccagccggaatccgagggtttcttcaccaaggtcaaggatttcttcggcagtcgggcgaattga

SEQ ID NO: 63996 - protein, 377 aa, Bradyrhizobium japonicum
MSTSTKRCYYETLEVERDADESKLKSSFRKLAMKFHPDRNPGDDTSEVKFKEINEAYEVLKDKDKRAAYDRFGHAAFEQGGPGGGAGFGAGFASSFSDIFEDLFGMAGQRGRGGRERGADLRYNMEITLEEAFGGKTAQIEIPVSVTCEACSGIGAKAGTKPKTCSTCGGAGRVRQSQGFFTLERTCPGCQGRGQMIEDACPSCSGQGRVTRERTLSVNIPQGVEDGTRIRLAGEGEAGVRGGPPGDLYIFLSLAQHQFFQRDGADLHCRVPISMVTAALGGEFEVPTIEKGKAKVKVPAGTQSNRRFRIASKGMPVLRSRQTGDMYVQVVVETPQNLTKKQQELLAEFEKLSSGNTQPESEGFFTKVKDFFGSRAN

SEQ ID NO: 63997 - DNA, 1134 bp, Brucella melitensis
  CDS (1)..(1134): transl_table=11
atgaagatcgactattacgaagcactgggtgtcaccagaaccgcagatgacaaaacgctgaaggcagcgtttcgcaagctcgccatgcagtatcatccggaccgtaacccggatgatcccgaagccgaacgcaagttcaaggaaatcggcgaggcttacgaaaccctgaaagacccgcaaaagcgcgccgcttatgatcgcttcggccatgcagcctttgaaaatggcggtatgggcggtggtttcggcaatggctttggcggtgcgggcggttttgccgatattttcgaggatattttcggcgagatgatgggcggcggtcgccgccgcagcaatggtggccgcgagcgcggcgccgatctgcgctacaatatggaagtgacgctggaggaagcctatgcgggcaagaccgcgcaaatccgcgtgccgacctccattacctgcgatgaatgctccggctccggcgccaagcccggttcgcagcccaccacctgtaccatgtgctccggctccggccgtgtgcgtgccgcgcagggtttcttctcggtggaacgtacctgcccaggctgtaacggtcgcggccagatcatcaaggatccgtgcgagaagtgccatgggcagggccgggtgacgcaggagcgttcgctttcggtcaatattcccgcaggtatcgaggacggaacccgtatccgtctggctggtgaaggcgaggcgggcctgcgcggcggaccggcgggtgatctctatatcttcctgtcggtgaagccgcacgaattcttccagcgtgatggcgcggacctttattgcaaggtgccgatctcaatgaccacggcggctctgggcggccagttcgaggtttcgacacttgatggtacccagacccgcgtgaaggtgccggaaggcacgcagaacggcaagcagttccgcctgaaaggcaaggggatgccggtgctgcgccagtctgttaccggcgatctctatatacagatcgacatcgaaacgccgcagaatctctccaagcgccagcgcgagcttcttgaggagtttgaaaagctttcctcgcaggagaacagcccgaaatcggcgggcttcttctcccggatgaaggagttttttgaaggaatcggcgaatag

SEQ ID NO: 63998 - protein, 377 aa, Brucella melitensis
MKIDYYEALGVTRTADDKTLKAAFRKLAMQYHPDRNPDDPEAERKFKEIGEAYETLKDPQKRAAYDRFGHAAFENGGMGGGFGNGFGGAGGFADIFEDIFGEMMGGGRRRSNGGRERGADLRYNMEVTLEEAYAGKTAQIRVPTSITCDECSGSGAKPGSQPTTCTMCSGSGRVRAAQGFFSVERTCPGCNGRGQIIKDPCEKCHGQGRVTQERSLSVNIPAGIEDGTRIRLAGEGEAGLRGGPAGDLYIFLSVKPHEFFQRDGADLYCKVPISMTTAALGGQFEVSTLDGTQTRVKVPEGTQNGKQFRLKGKGMPVLRQSVTGDLYIQIDIETPQNLSKRQRELLEEFEKLSSQENSPKSAGFFSRMKEFFEGIGE

SEQ ID NO: 63999 - DNA, 1137 bp, Buchnera aphidicola subsp
  CDS (1)..(1137): transl_table=11
atggcaaaaaaagattactatcaaattttaggcattccaaaatcagctgaagaacgagaaattaaaaaagcttataaacgattagcaatgaaataccaccctgatcgtaatcaaggagataaaaatgctgaaaataaatttaaggaaataaaagaagcatatgaaattttaattaatgaagaaaaacgaactgcatatgatcaatatggacatgctgcttttgaaaacggttacaatcaaaataatacttatagtacttttactagttctacagattttggcgatatttttggagatgtttttggtgatattttcggaggaagcagaaatcaaagagtgaaaaaaggagccgatttatgctataatatggaaatctcactagaagaagccgtgaaaggaacaacaaaagaaatccgtattccaacttttcaaaaatgcaaaacctgttatggtatgggaacaagtactggaactaaacctaatggatgttcaacatgtcatggcaaaggtcaaattcatattagaaagggattttttactgttcaacaatcatgtcctacatgcaatggaataggtacagtaattaaaaatccatgccgtatgtgtcgaggacaaggaagaataaaaacaaataaaacattatcggtaaaaattccacctggtattgatactaatgataaaattcgattgagtaaagaaggtgaagcaggaacaaatggtgcacaaccaggtgatctttatgtacaaatgaaggtcaataaacatcctatttttgaaagagaagagaataacctttactgtgaagtaccaatcaattttactatggctgcattgggtggagaaatcgaggtacctactctagatggtagagttaatttaaagataccgtctgaaactcaatcaggaaaactttttcgcattagaggaaagggagtaaaatcagtacaaagtagaagtcgaggcgatctattatgtcgcgtggtagtagaaactccagttaatctcaacgaaaaacaaaagtatcttttaagtgaactagggaatagttttaatggatttagaggagataaaaacagcccacgttcgaaaagattttttgatggtgtcaaaagattttttgatgatttaacaaaataa

SEQ ID NO: 64000 - protein, 378 aa, Buchnera aphidicola subsp
MAKKDYYQILGIPKSAEEREIKKAYKRLAMKYHPDRNQGDKNAENKFKEIKEAYEILINEEKRTAYDQYGHAAFENGYNQNNTYSTFTSSTDFGDIFGDVFGDIFGGSRNQRVKKGADLCYNMEISLEEAVKGTTKEIRIPTFQKCKTCYGMGTSTGTKPNGCSTCHGKGQIHIRKGFFTVQQSCPTCNGIGTVIKNPCRMCRGQGRIKTNKTLSVKIPPGIDTNDKIRLSKEGEAGTNGAQPGDLYVQMKVNKHPIFEREENNLYCEVPINFTMAALGGEIEVPTLDGRVNLKIPSETQSGKLFRIRGKGVKSVQSRSRGDLLCRVVVETPVNLNEKQKYLLSELGNSFNGFRGDKNSPRSKRFFDGVKRFFDDLTK

SEQ ID NO: 64001 - DNA, 1179 bp, Chlamydia pneumoniae
  CDS (1)..(1179): transl_table=11
atggattattattcaattttaggcatttctaaaactgcttccgcagaagaaattaaaaaagcctatcgcaaattagctgttaaatatcatccggataaaaatcctggggatgctgcagcggaaaaacgcttcaaagaagtttccgaagcttatgaagttctcagtgatcctcagaagcgcgactcttacgatcgtttcggtaaggacggtccttttgctggagccggtggctttggtggcgctggaggcatggggaacatggaagatgccttgcgcactttcatgggagcctttggcggagagttcggaggtggaagcttctttgatggtctttttggtgggcttggtgaagcttttggaatgcgctcagatcctgcaggcgctcgtcaaggagccagtaagaaagttcatattaatttgacttttgaagaagcagctcatggtgttgagaaggaacttgtagtttctggatataaatcttgtgaaacctgttctggtcaaggagctgtaaaccctcaagggattaaatcctgcgaacgttgcaaaggttcgggacaagtggtacagagtcgtggatttttctccatggcctctacatgtccagaatgcggtggcgaaggccgtattatcacagacccttgttcttcatgtcgcggccaaggaagagttaaagataaacgtagtgtccatgtgcatatccccgcaggtgtggattctggaatgcgcttgaagatggaaggctatggagatgcaggccaaaatggagctccctccggagatctctatgtctttattgatgtagagtctcatcccgtatttgagcgtcgtggagatgacttgatcctagagcttcccattggttttgtagatgctgctctcggtatgaagaaagaaattcctacgttattgaagacagaaggatcgtgtcgtcttacggttcctgaaggaattcaaagtggaaccattttaaaagtaagaaatcagggctttcctaatgttcatgggaaaggtcgtggagatcttttagttcgcatttctgtagaaactcctcaaaatttatcagaagagcaaaaagaacttttacgtacttttgcttctacagaaaaagcagagaactttcctaagaagcgtagctttttagataaaatcaaaggttttttttctgacttcacagtataa

SEQ ID NO: 64002 - protein, 392 aa, Chlamydia pneumoniae
MDYYSILGISKTASAEEIKKAYRKLAVKYHPDKNPGDAAAEKRFKEVSEAYEVLSDPQKRDSYDRFGKDGPFAGAGGFGGAGGMGNMEDALRTFMGAFGGEFGGGSFFDGLFGGLGEAFGMRSDPAGARQGASKKVHINLTFEEAAHGVEKELVVSGYKSCETCSGQGAVNPQGIKSCERCKGSGQVVQSRGFFSMASTCPECGGEGRIITDPCSSCRGQGRVKDKRSVHVHIPAGVDSGMRLKMEGYGDAGQNGAPSGDLYVFIDVESHPVFERRGDDLILELPIGFVDAALGMKKEIPTLLKTEGSCRLTVPEGIQSGTILKVRNQGFPNVHGKGRGDLLVRISVETPQNLSEEQKELLRTFASTEKAENFPKKRSFLDKIKGFFSDFTV

SEQ ID NO: 64003 - DNA, 1125 bp, Clostridium acetobutylicum
  CDS (1)..(1125): transl_table=11
atggcaaacaaagattattatgaagtgcttggattagaaaagggtgcgagtgatgatgagataaagaaagcttttagaaagctcgctataaaatatcatcctgataaaaaccgcggaaataaagaggcagaagaaaaatttaaagaaataaatgaagcttatcaggtattatctgatcctgataaaaaggctaattatgatagatttggaactgcagactttaatggtggtggaggttttggagacttctctggaggtttcggagactttggagatttaggtgatatatttaactcatttttcggtggtggtttttcaggtggctcctcgagagctagaaaagatgctcctcaaagaggaaatgatatggaatattccataagtttaacctttgaagaggctgtttttggcgtagagaaatctattaatataactagaagtgaaaactgtgaaacatgcggtggtacaggcgcaaagaaaggcacatctcctaaaacttgtgataagtgtggaggaacaggtactataagagttcagaggaatactcctctcggaagctttgttactcaatcaagttgtgataaatgcggaggacgcggaactataatttctgatccatgtcatgagtgtcatggtgcaggccatgttaggaagaagagaaagataagcgttaaaattccagcaggtgtagatacaggtaatgtaattcctttaagaggtcaaggtgaacatggaaaaaatggaggaccagcaggggatctttatataagtataaaggttactcctcataaaaagtttaagagagagggttttgatatttatatcgatactcatataagctttcctaaggccgcacttgggactgatatgacagttcctactatagatggtgatgtaaaatatactattccagcaggaactcaatcgggaactgtatttagattaaaaggaaaaggtgttcaaagagtcaatggcggcggaagaggaaatcagtacgtcaaggtaatagtagatacacctaaggctttaaatgataaacaaagggaagccttgaagatgtttatggaagcaagtggagaagcaaagtcagaaaaaaaatcgggttttaaaagattttttgaataa

SEQ ID NO: 64004 - protein, 374 aa, Clostridium acetobutylicum
MANKDYYEVLGLEKGASDDEIKKAFRKLAIKYHPDKNRGNKEAEEKFKEINEAYQVLSDPDKKANYDRFGTADFNGGGGFGDFSGGFGDFGDLGDIFNSFFGGGFSGGSSRARKDAPQRGNDMEYSISLTFEEAVFGVEKSINITRSENCETCGGTGAKKGTSPKTCDKCGGTGTIRVQRNTPLGSFVTQSSCDKCGGRGTIISDPCHECHGAGHVRKKRKISVKIPAGVDTGNVIPLRGQGEHGKNGGPAGDLYISIKVTPHKKFKREGFDIYIDTHISFPKAALGTDMTVPTIDGDVKYTIPAGTQSGTVFRLKGKGVQRVNGGGRGNQYVKVIVDTPKALNDKQREALKMFMEASGEAKSEKKSGFKRFFE

SEQ ID NO: 64005 - DNA, 1125 bp, Coxiella burnetii
  CDS (1)..(1125): transl_table=11
atggcaaaacgcgattattacgaagttcttggcgtcaacctaaacgcgacggaagccgaagttaaaaaggcctttcgccgtttggcgatgaaataccatccggatcgcaaccccggcgataaagacgctgaggtaaaatttaaagaagcgcgagaagcgtatgaggtcctttgtgattcacgcaaacgtgcttcctacgatcaattcggccatgcgggtgtcgagcaaacctttggtggcgctggtgctggcggtttcggttttggcgatcttggcgatattttcggcgacatctttggggatatttttggcggcgctcgtggcggccaggcacgcgaacagcgcggtgctgatcttgcctatgaacttgtcttgagcttggaagaagctgttcatggtcttagccgaacgattaaagtaccgacctggatcaactgcaaaacttgcaatggcagcggtgcgaaaggcagcagccccgctacttgtccgcgctgtaatgggtcgggccagatgcgaatgcagcacggttttctgcaagttcaacaaacttgctccgtttgtcggggtaggggtcaggtgattaaagatccctgcacagattgtcacgggcaaggccgccaacagcaaacaaaaaccttatcggtaaagattcctcctggcatcgacacgggcgatcgtattcgtttggcgggtgaaggtgaagccggattatttggagcgccgcccggcgatctctacgtccaggttcgtgtcaaacctcatcctcttttccatcgcgagggcaacgatttacactccgaagtgccgattgattttactaccgctgcgttaggcggcgaaatggaaattcctactctcgatggaagcgtccgattaacgatcccccctgaaacccaaggcggaaaacaatttcgcttgcgaggaaagggcgtcaaggctttacgcagtggcgctgtcggcgatttaatttgccatatcgtcgtcgaaactcccgtaaaactaagccctgagcaaaaagattatctcaaacaattcgccgaactcctaaaaaaagacgaaaaaaaccatagcccgcgcacgcgaaactggtttgacagtgtgaaagatttcttcacttccaaataa

SEQ ID NO: 64006 - protein, 374 aa, Coxiella burnetii
MAKRDYYEVLGVNLNATEAEVKKAFRRLAMKYHPDRNPGDKDAEVKFKEAREAYEVLCDSRKRASYDQFGHAGVEQTFGGAGAGGFGFGDLGDIFGDIFGDIFGGARGGQAREQRGADLAYELVLSLEEAVHGLSRTIKVPTWINCKTCNGSGAKGSSPATCPRCNGSGQMRMQHGFLQVQQTCSVCRGRGQVIKDPCTDCHGQGRQQQTKTLSVKIPPGIDTGDRIRLAGEGEAGLFGAPPGDLYVQVRVKPHPLFHREGNDLHSEVPIDFTTAALGGEMEIPTLDGSVRLTIPPETQGGKQFRLRGKGVKALRSGAVGDLICHIVVETPVKLSPEQKDYLKQFAELLKKDEKNHSPRTRNWFDSVKDFFTSK

SEQ ID NO: 64007 - DNA, 1170 bp, Enterococcus faecalis
  CDS (1)..(1170): transl_table=11
atggcgacgaaacgagattattatgaagtgctaggattagcaaaaggtgcttcagatgatgaaattaaaaaagcataccgcaaactttccaaaaagtaccatccagatattaacaaagaagccgatgcggaagaaaaatttaaagaagtttctgaagcgtatgaagtattaagtgatccacagaaaaaagcggcctatgaccaatatggccatgcaggaactgatcctaattacggtggcggcgctggtggctttggcggtttcggtggcggcggatttagcagtagtggttttggtggattcgaagatattttcgattcattctttggcggcggcggtggccgttctgttgatccaaatgcaccaagacaaggcgccgatttacaatatacaattcaattgaaatttgaagaagctattttcggtgtcgaaaaagagattaagtacaatcgagaagatacttgtgcaacctgtggcggtaatggcgccaaaccaggcacacacccagaaacttgtcataaatgtcatggctctggaacaatcaatgttgaacgtcaaacgccattaggtcgtatgatgagtcgtcaaacttgtgatgtgtgtcatggcacagggaaagaaatcaaagaaccatgtccaacttgtcatggcacaggtcatgagaaaaaagcacatactgtcaaagtaaatgtgcctgctggagtagaagacggtcaacaaatgcgcttagctaaccaaggagaagcgggtaccaatggtggaccttatggtgatttatatgtagtctttcgtgttgaagatagtgatattttcgatcgagatggcgcagaaatctactatgatttaccagtaagtttcgtccaagcggctctaggggacgaagtaactgtcccaactgttcatggtgacgtgaaattaaaaattccggctggaacacaaactggcacaaacttccgcttaagaggcaaaggtgcgccacgtttacgtggtgggggcaatggtgatcaacacgtgaaagtgaaattaataacaccaaaaaatcttaatgaagaacaaaaggatgccctacgagcttttgcaaaagctggcggacaaaatgtaactgaacaacaagaagaaggcttctttgataaaatgaaagatgcgtttggcggtaagaagaaaaaataa

SEQ ID NO: 64008 - protein, 389 aa, Enterococcus faecalis
MATKRDYYEVLGLAKGASDDEIKKAYRKLSKKYHPDINKEADAEEKFKEVSEAYEVLSDPQKKAAYDQYGHAGTDPNYGGGAGGFGGFGGGGFSSSGFGGFEDIFDSFFGGGGGRSVDPNAPRQGADLQYTIQLKFEEAIFGVEKEIKYNREDTCATCGGNGAKPGTHPETCHKCHGSGTINVERQTPLGRMMSRQTCDVCHGTGKEIKEPCPTCHGTGHEKKAHTVKVNVPAGVEDGQQMRLANQGEAGTNGGPYGDLYVVFRVEDSDIFDRDGAEIYYDLPVSFVQAALGDEVTVPTVHGDVKLKIPAGTQTGTNFRLRGKGAPRLRGGGNGDQHVKVKLITPKNLNEEQKDALRAFAKAGGQNVTEQQEEGFFDKMKDAFGGKKKK

SEQ ID NO: 64009 - DNA, 1140 bp, Erwinia carotovora subsp
  CDS (1)..(1140): transl_table=11
atggcgaagcaagattattacgaaagcctgggcgttgctaaaagcgcggacgatcgcgaaataaagaaagcgtacaagcgtctggcgatgaagtaccacccggatcgtaatcctggtgatagcgaggcagaagccaagttcaaagagatcaaagaagcttacgaaatccttatcgactcgcaaaaacgcgcagcctacgatcagtacggtcacgcggcgtttgagcaaggtggtatgggcggaggcggcggtggtggctttggcggcggcggtgccgattttggtgatatttttggcgacgtattcggggacatttttggcggtggtcgccgtcagcgtgcgagccgtggatccgatttacgctacaacatggagttgtcgctggaagaagcggtacgtggcgtcaccaaagagatccgtattcccgcactggaagagtgtgatgtgtgccacggcaacggtgcgaagccgggtagctcgccgatcacctgtccaacctgtcatggcaacggtcaggtgcagatgcgtcagggcttctttaccgtgcagcaggcgtgtccgcactgtcatgggcgcggtaagatcattaaagatccgtgtatcaaatgccacggtcatggtcgcgtagagaaaagcaaaacgctgtcggtgaaaattccggcgggtgtggacacgggcgaccgtatccgcttgtctggcgagggcgaagcaggcgatcacggtgcaccgtcaggtgatttgtacgttcaggtgcaggttaaagcgcacccgatcttccagcgtgaagaaaacaatctgtactgcgaagtgccgatcaactttgcgatggcagcattaggcggcgagattgaagtcccgacgctggatggtcgcgtgaagctgaaagtgcctgcagaaacgcaaaccgggaaattgttccgtatgcgtggaaaaggtgtgaaatcggttcgcggcggtgcgcagggcgatctgctgtgtcgtgtggttgtggaaaccccagttaatctgaacgaacgccagagacaactgctgcaagaacttgacgagagcttcggtggcccgtctggcgaaagaaacagcccgcgctcgaaaaacttttttgatggcgtgaagaagtttttcgacgacttgacccgttaa

SEQ ID NO: 64010 - protein, 379 aa, Erwinia carotovora subsp
MAKQDYYESLGVAKSADDREIKKAYKRLAMKYHPDRNPGDSEAEAKFKEIKEAYEILIDSQKRAAYDQYGHAAFEQGGMGGGGGGGFGGGGADFGDIFGDVFGDIFGGGRRQRASRGSDLRYNMELSLEEAVRGVTKEIRIPALEECDVCHGNGAKPGSSPITCPTCHGNGQVQMRQGFFTVQQACPHCHGRGKIIKDPCIKCHGHGRVEKSKTLSVKIPAGVDTGDRIRLSGEGEAGDHGAPSGDLYVQVQVKAHPIFQREENNLYCEVPINFAMAALGGEIEVPTLDGRVKLKVPAETQTGKLFRMRGKGVKSVRGGAQGDLLCRVVVETPVNLNERQRQLLQELDESFGGPSGERNSPRSKNFFDGVKKFFDDLTR

SEQ ID NO: 64011 - DNA, 1113 bp, Erysipelothrix rhusiopathiae
  CDS (1)..(1113): transl_table=11
atggcagataaaagagatttttatgaaatacttggagtaagtaaatctgccacagatgcagaaattaagaaagcctatcgccagttagcgaagaagtaccatcctgatattaacaaagaggatggtgctgaagctaaatttaaagaagtccaagaagcctatgaagtccttagtgattctcaaaaacgtgcgaactatgatcagtttggccatgctgcctttgatcaaggagccggcgggtttggaggcggctttagcggtggatttgatgatttcggtgatatctttagttcattcttcggcggcggaggcggaggccaacgtcgtaatcctaatggacctatgaagggtcaagatcgctttatgagtatgcgaattgactttatggaggctgtgtttggtgccaacaaatccgtgactttaaatgtcgatgaagaatgtacatcgtgtcatggttcgggtgcacacagcaaagatgatatcaagacatgttcacgttgtggtggaacgggtcaaacggtaacgcaacaacgtacaccttttggagttttccaatctcaagcaacatgtccggactgtggtggttcaggtaaaacaattacaaaacgctgtggtgaatgtcatggtaaaggatttaatacaaaacgtgtcgaagtcgatattaaaattcctgcgggaatcgttacgggacaacaattacgtgtttccggtaagggtgaacgtggggcaaatggtggaccgaacggtgatctctttatcgagattgtagtcggaacgcataaacacttcagacgtgagggtaatgatatccatattaatattcctttgtcggtaatcgatgccacattgggtacagaaattgaagttccaaccgtgcatggtgatgttaaattaacgattccagcaggtacacaacccaatactaaatttagacttcgtgaaaaaggggttcaagaccttcgttccggacgtatgggagaccaatacgttgaagttaaattagaagtaccaactaaattatcacgtcaacaacgtgaacatttagaagcgttaaaagaaacagaagtaaaaggtgatagtgtctttgaccgctttaaaaaagcgttcaagtga

SEQ ID NO: 64012 - protein, 370 aa, Erysipelothrix rhusiopathiae
MADKRDFYEILGVSKSATDAEIKKAYRQLAKKYHPDINKEDGAEAKFKEVQEAYEVLSDSQKRANYDQFGHAAFDQGAGGFGGGFSGGFDDFGDIFSSFFGGGGGGQRRNPNGPMKGQDRFMSMRIDFMEAVFGANKSVTLNVDEECTSCHGSGAHSKDDIKTCSRCGGTGQTVTQQRTPFGVFQSQATCPDCGGSGKTITKRCGECHGKGFNTKRVEVDIKIPAGIVTGQQLRVSGKGERGANGGPNGDLFIEIVVGTHKHFRREGNDIHINIPLSVIDATLGTEIEVPTVHGDVKLTIPAGTQPNTKFRLREKGVQDLRSGRMGDQYVEVKLEVPTKLSRQQREHLEALKETEVKGDSVFDRFKKAFK

SEQ ID NO: 64013 - DNA, 1125 bp, Francisella tularensis subsp
  CDS (1)..(1125): transl_table=11
atgcaacagaaatgctactatgaaattctaaatgtatctaaaactgcctcaggtgttgaaattaaacgagcttatagaaagcttgcaatggaatatcatccggatcgtaatccaggtgataaagaggcagagatcaagtttaaagaaatatctgaagcctatgaaatcttaagtgatgatagtaaaagatctcgttatgatcaattcggccatgctggtgttaatcagcaatctggttttggaggaactggtggatttggtggctttgaagatatctttgatactttctttggtggaggaacttcacgtggttctaataggtctagggcatcccgaggtagtgatctagagtacactttagaaataactttagaagaagctttctttggtgttgagaaagagataactataccacggatggagtcttgtgatagttgtgatggtacaggctctaaatccagaagcaaaactacttgtcatgcttgtcatggccaaggtactattcgtagacaacaaggtttttttgcttttgaacagacatgtccagtatgtaatggtactggctatagtattactgatccttgtgatgcttgttatggtaatggtaaagtcaagaaacaaaagactctcaaagttaaaataccagaaggtgttgataatggtgatagaatcagactacaaggtgagggtgattctggctctaatggtgctatgaacggtgatttgtatgttcaaatcataattaaagagcataagattttcgaaagaagagatattaatctttattgtgaaatgccaataagctttaccaaagcttgtctaggtggtgatatcaaagtcccaacacttgatggagaagttgtcttaaaagttgttcctgaaactcaaactggcaaagttttccgcttacgtgaaaaaggtatgaaatctttgagaggtcatagaagaggtgacttattatgtaaggttgtggtagaaacaccagtaaacttaagtgctgagcaaaaggaattattagaaaaatttgctgatagtttaggtgaagattatcaaagtaagcatgctccaaagagtaaaacatggtttgacaatgttaaagattacgctaaaaaattctttgagtaa

SEQ ID NO: 64014 - protein, 374 aa, Francisella tularensis subsp
MQQKCYYEILNVSKTASGVEIKRAYRKLAMEYHPDRNPGDKEAEIKFKEISEAYEILSDDSKRSRYDQFGHAGVNQQSGFGGTGGFGGFEDIFDTFFGGGTSRGSNRSRASRGSDLEYTLEITLEEAFFGVEKEITIPRMESCDSCDGTGSKSRSKTTCHACHGQGTIRRQQGFFAFEQTCPVCNGTGYSITDPCDACYGNGKVKKQKTLKVKIPEGVDNGDRIRLQGEGDSGSNGAMNGDLYVQIIIKEHKIFERRDINLYCEMPISFTKACLGGDIKVPTLDGEVVLKVVPETQTGKVFRLREKGMKSLRGHRRGDLLCKVVVETPVNLSAEQKELLEKFADSLGEDYQSKHAPKSKTWFDNVKDYAKKFFE

SEQ ID NO: 64015 - DNA, 1116 bp, Francisella tularensis
  CDS (1)..(1116): transl_table=11
atgcaacagaaatgctactatgaaattctaaatatatctaaaactgcctcaggtgttgaaattaaacgagcttatagaaagcttgcaatgaaatatcatccggatcgtaatccaggtgataaagaggcagagatcaagtttaaagaaatatctgaagcctatgaaatcttaagtgatgatagtaaaagatctcgttatgatcaattcggccatgctggtgttaatcagcaatctggttttggaggaactggtggatttgaagatatctttgatactttctttggtggaggaacttcacgtggttctaataggtctagggcatcccgaggtagtgatctagagtacactttagaaataactttagaagaagctttctttggtgttgagaaagagataactataccacggatggagtcttgtgatagttgtgatggtacaggctctaaatccagaagcaaaactacttgtcatgcttgtcatggccaaggtactattcgtagacaacaaggtttttttgcttttgaacagacatgtccagtatgtaatggtactggctatagtattactgatccttgtgatgcttgttatggtaatggtaaagtcaagaaacaaaagactctcaaagttaaaataccagaaggtgttgataatggtgatagaatcagactacaaggtgagggtgattctggctctaatggtgctatgaacggtgatttgtatgttcaaatcataattaaagagcataagattttcgaaagaagagatattaatctttattgtgaaatgccaataagctttaccaaagcttgtctaggtggtgatatcaaagtcccaacacttgatggagaagttgtcttaaaagttgttcctgaaactcaaactggcaaagttttccgcctacgtgaaaaaggtatgaaatctttgagaggtcatagaagaggtgacttattatgtaaggttgtggtagaaacaccagtaaacttaagtgctgagcaaaaggaattattagaaaaatttgctgatagtttaggtgaagattatcaaagtaagcatgctccaaagagtaaaacatggtttgacaatgttaaagattacgctaaaaaattctttgagtaa

SEQ ID NO: 64016 - protein, 371 aa, Francisella tularensis
MQQKCYYEILNISKTASGVEIKRAYRKLAMKYHPDRNPGDKEAEIKFKEISEAYEILSDDSKRSRYDQFGHAGVNQQSGFGGTGGFEDIFDTFFGGGTSRGSNRSRASRGSDLEYTLEITLEEAFFGVEKEITIPRMESCDSCDGTGSKSRSKTTCHACHGQGTIRRQQGFFAFEQTCPVCNGTGYSITDPCDACYGNGKVKKQKTLKVKIPEGVDNGDRIRLQGEGDSGSNGAMNGDLYVQIIIKEHKIFERRDINLYCEMPISFTKACLGGDIKVPTLDGEVVLKVVPETQTGKVFRLREKGMKSLRGHRRGDLLCKVVVETPVNLSAEQKELLEKFADSLGEDYQSKHAPKSKTWFDNVKDYAKKFFE

SEQ ID NO: 64017 - DNA, 1134 bp, Haemophilus ducreyi
  CDS (1)..(1134): transl_table=11
atggcaaaaaaagactactatgaagtccttggcttacagaaaggcgcaacagaaaaagatattaaacgtgcttacaaacgtttagcggcaaaataccaccctgataaaaaccaaggcagcaaagattcagaagaaaaatttaaacaaattactgaagcatacgaaatattaaccgatgatcaaaaacgtgccgcttacgatcaatatggtcacgctgcttttgagcaaggtagcagtaacggtggttttaatggcttcggtggcgggtttggtggctttgaagatatctttagtgaaatgtttggtggtgggtttggtggcggaagtcgccgtcaacacgtagtacgtggtcaagacttacgttacgatattgaaatttcacttgaagaagccgtcaaaggctgtaaaaaagatatccgcctttctaccctagcagaatgtgataattgtcacggcacaggagcagaagcgggaactaaagtagaaaattgtccgcattgtcacggtgccggtcgtattcgtcgtcaacaaggcttctttgtcactgaagcagtctgtccaagctgtcatggcacaggtaagaaaattgagaaaccttgccattcttgccacggcgatggtcgggtacaaaaagcgaaaaatttatccgtgactattcctgccggtgtagatacaggtaaccaattacgcttatcaggcgaaggagaagcgggtgaaaatggtgcgcctgctggcgatttatatgttgtgattcacgtacgtgaacataatattttcacacgcgatggtgccaacctctattgtgaagtaccgattagttttagcatggccgcattaggtggtgaaattgaagtgccaactttagatggtaagctcaaactcaaaattcctacagaaacacaaacgggtaaattattccgtgtacgaggaaaaggcgtcgtgagcccgcgtggtggatatgctggcgatttaatttgtaaagttgtagtggaaactccagttcaattgaatgaagaacaaaaagagttactacgccaacttgaaataagtttggacggtaaagcaaatcatcgcccgcaacaagccggttttttagacagtgttaaaaactttttcactcatctcggtaaataa

SEQ ID NO: 64018 - protein, 377 aa, Haemophilus ducreyi
MAKKDYYEVLGLQKGATEKDIKRAYKRLAAKYHPDKNQGSKDSEEKFKQITEAYEILTDDQKRAAYDQYGHAAFEQGSSNGGFNGFGGGFGGFEDIFSEMFGGGFGGGSRRQHVVRGQDLRYDIEISLEEAVKGCKKDIRLSTLAECDNCHGTGAEAGTKVENCPHCHGAGRIRRQQGFFVTEAVCPSCHGTGKKIEKPCHSCHGDGRVQKAKNLSVTIPAGVDTGNQLRLSGEGEAGENGAPAGDLYVVIHVREHNIFTRDGANLYCEVPISFSMAALGGEIEVPTLDGKLKLKIPTETQTGKLFRVRGKGVVSPRGGYAGDLICKVVVETPVQLNEEQKELLRQLEISLDGKANHRPQQAGFLDSVKNFFTHLGK

SEQ ID NO: 64019 - DNA, 1155 bp, Halobacterium mediterranei
  CDS (1)..(1155): transl_table=11
atgagcgaggacttctacgacgtgctcggggtctcgcgggacgcctcgaaagaccaaatcaagaacgcgtaccgcaagaaggccgcgaaataccaccctgacgtgtccgacgaagaggacgccgaagagaagttcaagaaggttcagaaggccaaggaggtcctcacggatgacgaaaagcgccagatgtacgaccaacttggccacgaacgcttccagcaggcccaaaagcgcggggccggtggcggcggcggtggccgcggtcagggcaatcccttcggaggcggcggaaaccccttcggcgggatgggcggtggcggcttcgaagacatctttaacaacctcttcaacggcggtggcggtcaacgacgtagccgcccgcaacagggccgcgacgtcgcccagcgcatcaccatcgacctcgaagacgcgtaccacggcgtcgagcgcgatgtgacgattcgtcgccgcgaggtctgtcccgaatgtgacggcgagggtcaccccgccgatgctgacgtgaacacctgttccgagtgtaacggctccggccagcagacgaccgtccagcagacgccgttcggccgcgttcagcagacgacgacctgtcgcgcctgcggcggcgagggcaagacctacagtgaagactgttccgagtgtcgcggcagcgggcgcgtccgccgcacccgcgacgtgaccatcaccatcccggccgggttccgcgacgggcagcgcctccggtaccgcggcgagggtgaacccggagagaacggcgggccgaacggcgaccttttcgtcgaagtcaacgtccgcgaccacgaggagttcgaccgcgacggcgacgacctacagtacacgcacccgatttccttcccgcaagccgtcttcggcgcgactgtcgaagtgccgacgctcgacggcgaagcggaactgaaggttccggcaggcacccaaagcgggtcgacctttacggtctccggcgcggggatgccgcacctcgacggtcgcggcaacggcgaccttcacgtcgaaattcacgtcgtcacacccgaagacctcaacagcgaacagcgcgaggcgctcaagcagttcgccgaggcgggcggcgaagaggtcaaagagagcctcttccagaagctcaagaactcgctgtaa

SEQ ID NO: 64020 - protein, 384 aa, Halobacterium mediterranei
MSEDFYDVLGVSRDASKDQIKNAYRKKAAKYHPDVSDEEDAEEKFKKVQKAKEVLTDDEKRQMYDQLGHERFQQAQKRGAGGGGGGRGQGNPFGGGGNPFGGMGGGGFEDIFNNLFNGGGGQRRSRPQQGRDVAQRITIDLEDAYHGVERDVTIRRREVCPECDGEGHPADADVNTCSECNGSGQQTTVQQTPFGRVQQTTTCRACGGEGKTYSEDCSECRGSGRVRRTRDVTITIPAGFRDGQRLRYRGEGEPGENGGPNGDLFVEVNVRDHEEFDRDGDDLQYTHPISFPQAVFGATVEVPTLDGEAELKVPAGTQSGSTFTVSGAGMPHLDGRGNGDLHVEIHVVTPEDLNSEQREALKQFAEAGGEEVKESLFQKLKNSL

SEQ ID NO: 64021 - DNA, 1155 bp, Idiomarina loihiensis
  CDS (1)..(1155): transl_table=11
atggcgacgcaagatttttatcaggttctgggcgtatcgaaagacgccaatgaacgtgacattaaaaaagcctacaaacgtatggcaatgaagtatcacccggacagaaccgagggtgataaagatatggaaattaagtttaaagagattaagcaggcgtacgaagttctttctgatcctcagaaacgccagatgtatgatcaatatgggcatgaagctttcgaacaggcacgccagggcggagctggccatggtgcaggcggattcggcggtggcggtgctgattttgctgatatctttggtgatgtcttcggtgatatttttggcggcggcagacgtcagcaagcccgcgcgcaacgtggcgcagatttgcgctacaacctggatatgtcgctggaagaagcggttcggggtaaaaccgttgagctagaaattccaacgctggtagaatgtcgcgactgtaatggtagtggtgcgaaaaaaggtagtaagccgcaaacctgtggtcattgtcatggctcaggtcaaattcagatgcgccagggcttttttgccgtgcagcaaacttgtcctcaatgtcgtggaaccggcacgattattaaagatccttgtcgcacatgtcatggtcatggccgtaaagaagagactaaaaccttgtcggttaaaattccggcgggggtcgataccggtgaccgcattcgtttagcgaatgaaggtgaagcgggcgaacatggcgcaccggcaggtgatttatacgttcaggttcacgtacgggagcatcctatttttgcccgcgacggcaataatttgttctgtgaagtccctgtaagctttactaaagcggctcttggtggtgacattgaggttccaactctggaaggcaaagtaaaactgaaagtgcctaaagagacacaaacgggtaaacatttccggttacgtggtaaaggcgttaagtcagttcgcacgggggaagtcggcgacctgatttgcaaagtgatgattgaaacccctgtaaatctgtcatctaagcaacgtgacatgttggaagagcttgaagattcaatgggtaccggtgatgaagccgcaaaattccgacccaaagaaaaaggttttttcgacggcgtgaaacaattctttgatgacttacgtagctag

SEQ ID NO: 64022 - protein, 384 aa, Idiomarina loihiensis
MATQDFYQVLGVSKDANERDIKKAYKRMAMKYHPDRTEGDKDMEIKFKEIKQAYEVLSDPQKRQMYDQYGHEAFEQARQGGAGHGAGGFGGGGADFADIFGDVFGDIFGGGRRQQARAQRGADLRYNLDMSLEEAVRGKTVELEIPTLVECRDCNGSGAKKGSKPQTCGHCHGSGQIQMRQGFFAVQQTCPQCRGTGTIIKDPCRTCHGHGRKEETKTLSVKIPAGVDTGDRIRLANEGEAGEHGAPAGDLYVQVHVREHPIFARDGNNLFCEVPVSFTKAALGGDIEVPTLEGKVKLKVPKETQTGKHFRLRGKGVKSVRTGEVGDLICKVMIETPVNLSSKQRDMLEELEDSMGTGDEAAKFRPKEKGFFDGVKQFFDDLRS

SEQ ID NO: 64023 - DNA, 1167 bp, Lactobacillus johnsonii
  CDS (1)..(1167): transl_table=11
atggcacaacgtgattattatgatgtgctgggtgttgataaaaatgctagtgaaagtgagattagtaaggcatatcgtaaactagcaaaaaaatatcacccagacttaaaccatgaacctggtgctgaagaaaaatacaaggaagtaaatgaagcatatgaggttctccatgataaacagaaaagagctcagtatgaccaatttggccaagcaggtgtaaatggtcaaggtggctttggtggtcaaggctttggcggttttggcggccaaggtggatactcatctcaaggctttggtgattttggcgatattttcggtgatatctttggttcagcatttggcggaggcagaagtcgtgtagatccaactgcaccgcaaaaaggtcaagatttagattatacaatgacgattgactttatggatgcaatcaagggtaaaaagaccgatattacctatactagaagtgaagtttgtcctacttgtgacggctctggtgctgaaaaaggtactcatccaattacgtgtgataaatgtcatggaagtggggtaatgacggtaactcgtcaaacaccactcggtgttattcaacaacaaactacttgtgacaagtgcggaggacgcggaacaattattgaacatccatgtcaaacttgccatggtcagggcaccgtcgacaaaaagcagactcttcaagttactgttccagctggtattgataatggacaacagattcgtttaagtggtcaaggcgaagctggaaaaaatggtggtccttacggtgacttgtacattgtatttagagttaaaccaagcaaagaatttagaagaaatggtacaactatctatactgaagctccaatttcatttgctcaagcagctttaggagataaaattcgtgtaaatacagttcatggtccagttgatttaacgattccggcaggaactcaacctaatactaactttaaattacgtggtcaaggtgtaccaaagataaatggtacaggcaatggagaccaagaagtaacagttaaagtagttattccaaagaagattaatgataagcagaaggaagctttggttgattacgttaaagctggtggcggtaatatttccccacaagaaaagaatttcttcgaacgtttaaaagataagttaaacggagaataa

SEQ ID NO: 64024 - protein, 388 aa, Lactobacillus johnsonii
MAQRDYYDVLGVDKNASESEISKAYRKLAKKYHPDLNHEPGAEEKYKEVNEAYEVLHDKQKRAQYDQFGQAGVNGQGGFGGQGFGGFGGQGGYSSQGFGDFGDIFGDIFGSAFGGGRSRVDPTAPQKGQDLDYTMTIDFMDAIKGKKTDITYTRSEVCPTCDGSGAEKGTHPITCDKCHGSGVMTVTRQTPLGVIQQQTTCDKCGGRGTIIEHPCQTCHGQGTVDKKQTLQVTVPAGIDNGQQIRLSGQGEAGKNGGPYGDLYIVFRVKPSKEFRRNGTTIYTEAPISFAQAALGDKIRVNTVHGPVDLTIPAGTQPNTNFKLRGQGVPKINGTGNGDQEVTVKVVIPKKINDKQKEALVDYVKAGGGNISPQEKNFFERLKDKLNGE

SEQ ID NO: 64025 - DNA, 1140 bp, Lactococcus lactis subsp
  CDS (1)..(1140): transl_table=11
atgaataatactgaatattatgaacgactaggtgtcgataaaaatgccagtcaagatgaaataaaaaaagcttatcgtaaaatgtccaaaaaatatcaccccgatttaaataaagaagagggtgctgaagaaaaatataaagaagttcaagaagcatacgaaacgctttcggatgaacaaaagcgtgctgcttatgaccaatatggtgaagctggagccaatggcggctttggtggcggtggcttcggcggagcttctggtttctctggtttcggcggtggctcaggtggctttggtggttttgaagatatattctcaagtttctttggaggaggtggtgcacaagttaaccctaatgcaccccgtcaaggagatgacttacagtatcggataaacttaaaatttgaagaagctatttttggcgtggaaaaacaagtcaaatataatcgtgaagaactctgtcacacttgtggaggttctggagcgaaagctggcacacatccagaaacttgtcataaatgtggtggtcgtggacaaattaatgtcgttcgtgatacaccacttggacggatgcaaacacaagtaacatgtgatgtttgtaacggaacaggtaaagaaatcaaagagaaatgtgaaacttgtcatggttcaggtcatgaaaaagtggcacatactgttaaggttactgtacctgctggtgttgaaactggacaaaaaatgcgtttgcaaggacaaggtgatgctggtgtaaatggtggaccttatggtgatttgtatgttgttttccaagtggaagcttcagacaaatttgagcgtgatggtgcagaaatttactacaagatgccaatggactttgttcaagctgctttaggtgatgaaattgaagttccgactgttcatgggaatgtgaagttgaaaattcctgctggaacacaaacaggggctaatttccgtctaaaaggtaaaggtgcgccaaaactccgtggttctggtaatggtgaccaatatgttattatcaatattgtcactcctaagaatttgaatcaagctcaaaaagaagcgctccaagcttttgctaaagcaagtggtgttgaagtttctggttcaggaaaaaaaggtttctttgataagtttaaataa

SEQ ID NO: 64026 - protein, 379 aa, Lactococcus lactis subsp
MNNTEYYERLGVDKNASQDEIKKAYRKMSKKYHPDLNKEEGAEEKYKEVQEAYETLSDEQKRAAYDQYGEAGANGGFGGGGFGGASGFSGFGGGSGGFGGFEDIFSSFFGGGGAQVNPNAPRQGDDLQYRINLKFEEAIFGVEKQVKYNREELCHTCGGSGAKAGTHPETCHKCGGRGQINVVRDTPLGRMQTQVTCDVCNGTGKEIKEKCETCHGSGHEKVAHTVKVTVPAGVETGQKMRLQGQGDAGVNGGPYGDLYVVFQVEASDKFERDGAEIYYKMPMDFVQAALGDEIEVPTVHGNVKLKIPAGTQTGANFRLKGKGAPKLRGSGNGDQYVIINIVTPKNLNQAQKEALQAFAKASGVEVSGSGKKGFFDKFK

SEQ ID NO: 64027 - DNA, 1143 bp, Lactobacillus plantarum
  CDS (1)..(1143): transl_table=11
atggcagagcaagacttatataaggttctgggtgttgaaaaggatgccagtcaggacgaaatcaagaaggcgtaccgcaagctttcgaagaagtatcatcctgatttgaatcatgaacctggcgcggaagaaaagtttaaagctgtcaatgaagcgtacgaaacgttaggcgatgcccagaagcgggcacagtatgatcaattcggatcgactggtggccagcaaggcttcggtggcgccggcggtttcggcggtcaagactttggtggcttcggcggcggtggcggctttgaagatattttcagttccttcttcggtggtggcgctggtggttcacggcgttctaacccaacggccccgcaacaaggccgagacttacagtatgagatgacactgaagtttgaagatgcgatctttggtaagaagacgaccatcacctacaatcgtgaggaacagtgtgagacttgtggtggttctggtgccaagccaggaacgtcaccagtgacctgttcgaaatgtcatggtgctggctatattcaggtacagactaatacgccactcggtcgaatgatgagccaacaagtttgtgacgtttgtcatggaactggtaaagaaatcaaggacaagtgtgccacttgtggtggctctggtcatactgaacaaagtcattccatcaaagtgacggttcctgctggagttgaagaaggccaacaaatgcggcttcaaaatcaaggtgaagcgggaacgaatggtggcccttatggtgatttattcattatcttcagagttgagccaagtaaggactttgaacgggatggcgcgacgatttacttcaagttgccgatcgacttcgttcaggccgctcttggtgatgaagttcaagttaagacggttcacggggacgttaagttgaagatcccagctggtactcagacggggacaactttccggttacgtggtaaaggcgcaccacgattacgtggcaatggcaacggcgacgaacgcgttaccgttaatattgaaacgccaacgcacttgaacaagggtcaaaaagaagctttgaagacctttgctaaagctagcggcaaatcagttgctggcaatggcaagagttcgttatttgacaagcttcggggtgtttaa

SEQ ID NO: 64028 - protein, 380 aa, Lactobacillus plantarum
MAEQDLYKVLGVEKDASQDEIKKAYRKLSKKYHPDLNHEPGAEEKFKAVNEAYETLGDAQKRAQYDQFGSTGGQQGFGGAGGFGGQDFGGFGGGGGFEDIFSSFFGGGAGGSRRSNPTAPQQGRDLQYEMTLKFEDAIFGKKTTITYNREEQCETCGGSGAKPGTSPVTCSKCHGAGYIQVQTNTPLGRMMSQQVCDVCHGTGKEIKDKCATCGGSGHTEQSHSIKVTVPAGVEEGQQMRLQNQGEAGTNGGPYGDLFIIFRVEPSKDFERDGATIYFKLPIDFVQAALGDEVQVKTVHGDVKLKIPAGTQTGTTFRLRGKGAPRLRGNGNGDERVTVNIETPTHLNKGQKEALKTFAKASGKSVAGNGKSSLFDKLRGV

SEQ ID NO: 64029 - DNA, 1152 bp, Lactobacillus sakei
  CDS (1)..(1152): transl_table=11
atggctgaaaaaagagattattacgacgtcttaggtgtcggacgcgatgcttctgacgatgagattaaaaaagcctatcgtaaactttctaaaaaatatcatccagatatcaataaagcacctgatgcagaagcaaaatttaaagaagttactgaagcatacgaagcattaagcgatcctcaaaaacgagcagcctatgatcaatatggtcatgcgggcatgaatggcggttttggtggcggcgctggtgctggtcaaggctttggtggctttggcggtggcgcagaaggtttcggcggattcgacgatatcttcagttcattcttcggtggcggggctcgtcaacaacctaatggcccacgtcaaggttctgatttacaatatcgaatggacttgaagtttgaagaagctgtctttggtaaggaaacaaagatttcttacagccgtgaagccgaatgtcatacttgtcacggttcaggtgctaagcctggcacaagtgctgaaacgtgtcataaatgtcacggtgctggtcaaatccaagtggaacgtcaaacaccacttggccgtatgatgtcacgcgaaacatgtgatgtctgtggtgggactggtaaggaaattaagtcaaaatgtgatacttgtcatgggacaggtcgcgaagaagaacgtcataccgttaaggtgaaagtccctgccggtgttgaagatggacaacaaatgcgtcttcaaggtcaaggtgaagccggttcaaatggtggcccttatggggacctatttatcgtcttccgcgttgcacctagtgatgagttcgaacgtgatggtgctcagatttttgttgaagtaccaatttcattcgtccaagctgctttaggggatgaaatcgaagttaacacggtccatggtccagttaagttgaagattcctgctggtacacaaacgaacactgttttccgtctacgtggtaagggtgcgcctaaacttcacggcacaggcaatggtgatcaaaaagtgacagtcaacgtggtaacaccaaagtccttaaacagcaaacaacgtgatgccttaaaagcatttgcggtggctagtggtgactcagttaacccacaagacaacaacttgttcgacaagattttgaataaaaaacataaaaaataa

SEQ ID NO: 64030 - protein, 383 aa, Lactobacillus sakei
MAEKRDYYDVLGVGRDASDDEIKKAYRKLSKKYHPDINKAPDAEAKFKEVTEAYEALSDPQKRAAYDQYGHAGMNGGFGGGAGAGQGFGGFGGGAEGFGGFDDIFSSFFGGGARQQPNGPRQGSDLQYRMDLKFEEAVFGKETKISYSREAECHTCHGSGAKPGTSAETCHKCHGAGQIQVERQTPLGRMMSRETCDVCGGTGKEIKSKCDTCHGTGREEERHTVKVKVPAGVEDGQQMRLQGQGEAGSNGGPYGDLFIVFRVAPSDEFERDGAQIFVEVPISFVQAALGDEIEVNTVHGPVKLKIPAGTQTNTVFRLRGKGAPKLHGTGNGDQKVTVNVVTPKSLNSKQRDALKAFAVASGDSVNPQDNNLFDKILNKKHKK

SEQ ID NO: 64031 - DNA, 1131 bp, Listeria innocua
  CDS (1)..(1131): transl_table=11
atggcaaaacgagattactatgaagtgcttggtatttccaaaagcgcctcagcggacgaaataaaaaaagcttaccggaaactgtccaaacagtatcatccggacataaataaagaagcaggcgctgatgaaaaatttaaagaaatatcagaggcttatgaagctttaagtgacccacaaaaacgtgcgcaatatgatcaatatggacacgtagatccaaaccaaggcttcggcggcggtgcaggtggtggctttggcggaggcggattctccggatttgaagacatctttgacacattcttcggtggaggaggacgtcaacaagaccctaacgcaccaagacaaggtagcgatttacaatatacaatgcgtcttaaattcaaagaggctatttttggtaaagatgcggaaatcgaaattcctcgcgaagaaaactgtgatacttgtcacggctctggcgcaaaacctggaactacaccagaaaaatgtagccattgtggaggtaaaggttctattaacgtggaacaaaataccccattcggtcgcgtagtcaataaacgcacatgtcaatactgtaatggtactggtaaagaaatcaaagaaaaatgtccaacttgtcacggtaaaggccgcgtaactaaaacgaaaaaaatcaaagtgaaagttccggctggtgtgaatgacggacaacaaatgcgcgtatctggcgaaggggaagctggtattaatggcggacctaacggcgatttatatgtagtattcgttgtgattccagatgagtttttcgaacgagaagctgacgacatttatgtggaagtgccaatcacgttcgtacaagctaccctaggtgacgaaatcgatgtaccaactgtgcacggtaaagttcgcctcaaaatccctagtggtacacaaacagggacaaccttccgcttacgaggtaaaggtgttccgcatcttcgtggaaacggaacaggtgatcaacatgtaatcgtcaaagtaatcgttccgaaaaaactagatgataaacaaaaagaaatcttacgagaatttgcttcaactacaggagacaaagtagacgaacaaacatctggattttttgacaaaatgaaacgagcttttaaaggcgattga

SEQ ID NO: 64032 - protein, 376 aa, Listeria innocua
MAKRDYYEVLGISKSASADEIKKAYRKLSKQYHPDINKEAGADEKFKEISEAYEALSDPQKRAQYDQYGHVDPNQGFGGGAGGGFGGGGFSGFEDIFDTFFGGGGRQQDPNAPRQGSDLQYTMRLKFKEAIFGKDAEIEIPREENCDTCHGSGAKPGTTPEKCSHCGGKGSINVEQNTPFGRVVNKRTCQYCNGTGKEIKEKCPTCHGKGRVTKTKKIKVKVPAGVNDGQQMRVSGEGEAGINGGPNGDLYVVFVVIPDEFFEREADDIYVEVPITFVQATLGDEIDVPTVHGKVRLKIPSGTQTGTTFRLRGKGVPHLRGNGTGDQHVIVKVIVPKKLDDKQKEILREFASTTGDKVDEQTSGFFDKMKRAFKGD

SEQ ID NO: 64033 - DNA, 1134 bp, Listeria monocytogenes
  CDS (1)..(1134): transl_table=11
atggcaaaacgagattactatgaagtgcttggtatttccaaaagcgcctcagcggacgaaataaaaaaagcttaccggaaactgtccaaacagtatcatccggacataaataaagaagcaggcgctgatgaaaaatttaaagaaatatcagaggcttatgaagcattaagtgacccacaaaaacgtgcacaatatgatcaatatgggcatgtagatccaaaccaaggcttcggcggaggtggtgcaggtggcggctttggcggaggaggattctctggatttgaagatatctttgacacattcttcggtggcggcgggcgtcaacaagatccaaatgccccaagacaaggtagcgatttacaatatacaatgcgccttaaattcaaagaagctattttcggtaaggatgcagaaatcgaaattcctcgtgaagaaaactgtgatacatgtcacggttccggcgcaaaaccagggacaacacctgaaaaatgtagccattgtggtggtaaaggttccattaacgtggaacaaaataccccatttggtcgtgtagttaataaacggacatgccaatactgtaatggtactggtaaagaaatcaaagagaaatgcccaacttgtcacggtaaaggccgtgtaactaaaacgaaaaaaatcaaagtgaaagttccagctggcgtgaacgacgggcaacaaatgcgtgtatctggtgaaggagaagctggtattaacggcggacctaacggcgatttatatgtggtgtttgtcgttattccagatgagtttttcgaacgtgaagcagacgatatttacgtagaagtcccaatcacatttgtacaagctacattaggtgacgaaattgatgtgccaactgttcacggtaaagttcgtttgaaaattccaagtggtactcaaacaggaacaactttccgcttacgtggtaaaggcgtgccgcatcttcgaggaaatggaactggcgaccaacatgtaatcgtcaaagtcatcgttccgaaaaaactagatgataaacaaaaagaaatcttgcgagaatttgcttccactactggagacaaagtagacgaacaaacctccggattttttgacaaaatgaaacgagcttttaaaggcgattga

SEQ ID NO: 64034 - protein, 377 aa, Listeria monocytogenes
MAKRDYYEVLGISKSASADEIKKAYRKLSKQYHPDINKEAGADEKFKEISEAYEALSDPQKRAQYDQYGHVDPNQGFGGGGAGGGFGGGGFSGFEDIFDTFFGGGGRQQDPNAPRQGSDLQYTMRLKFKEAIFGKDAEIEIPREENCDTCHGSGAKPGTTPEKCSHCGGKGSINVEQNTPFGRVVNKRTCQYCNGTGKEIKEKCPTCHGKGRVTKTKKIKVKVPAGVNDGQQMRVSGEGEAGINGGPNGDLYVVFVVIPDEFFEREADDIYVEVPITFVQATLGDEIDVPTVHGKVRLKIPSGTQTGTTFRLRGKGVPHLRGNGTGDQHVIVKVIVPKKLDDKQKEILREFASTTGDKVDEQTSGFFDKMKRAFKGD

SEQ ID NO: 64035 - DNA, 1170 bp, Mannheimia succiniciproducens
  CDS (40)..(1170): transl_table=11
gtgggcgagcgagcccaccctacattagtgacgaaaattatggcaaaacaagattattacgaaacgcttggcgtacaaaaaggggcggatgaaaaagaaatcaaacgcgcctataaacgccttgcgatgaaatatcaccccgacagaacaaacggtgataaagcggcggaagaaaaattcaaggaagtcaatgaagcctatgaaattctgatggacaaagaaaaacgcgccgcttatgaccaatacggacatgccgcttttgaacaaggcggattcggtggcggtgccggtggatttggcggcggctttggtggctttggcggttttgaagatattttcagtgaaatgttcggtggcggtgcaagtcgtcaacgtgtggttcgaggcgaagatttacgctacgacattgaaattacattggaagaagcggtacgcggcaccacaaaagatattaaaattaataccttagccgcttgtgatcattgcgacggcagcggtgcggaaaaaggttcgaaagtagaaacctgtccgacttgccacggacacggacgagttcgccgtcagcaaggtttctttatgacggaaactacctgcccgacctgtcagggtagcggtaagaaaattgagaaaccttgtaaacattgccatggtgacggacgggttcataaaaagaaaaatctttcggttaaaattccggcaggtgtggatacgggcaatcaattgcgcttatccggtgaaggtgcggcgggtgaaaacggtgcgccggcaggggatttatatgttgtgattcatgtaaaagatcaccatattttcgaacgtgacggcagcaatttgtattgcgaagtgccgatcagttttactatggcggcattaggcggtgaaattgaagtgccgactttggacggacgagtgaaattaaaaattccggctgaaacgcaaaccggcaaattattccgtatgcgcgggaaaggggttacctcaacaagagccggttatgcaggcgatttaatttgtaagattattgtggaaacgccggtaaaattaaacgaagaacaaaaagaactgttgagaaaatttgaagagagtttagaaggacagtctaaacaacgccctaaatcatcaagttttttagacggcgtgaaaaaattctttgataatttaggtaagtag

SEQ ID NO: 64036 - protein, 376 aa, Mannheimia succiniciproducens
MAKQDYYETLGVQKGADEKEIKRAYKRLAMKYHPDRTNGDKAAEEKFKEVNEAYEILMDKEKRAAYDQYGHAAFEQGGFGGGAGGFGGGFGGFGGFEDIFSEMFGGGASRQRVVRGEDLRYDIEITLEEAVRGTTKDIKINTLAACDHCDGSGAEKGSKVETCPTCHGHGRVRRQQGFFMTETTCPTCQGSGKKIEKPCKHCHGDGRVHKKKNLSVKIPAGVDTGNQLRLSGEGAAGENGAPAGDLYVVIHVKDHHIFERDGSNLYCEVPISFTMAALGGEIEVPTLDGRVKLKIPAETQTGKLFRMRGKGVTSTRAGYAGDLICKIIVETPVKLNEEQKELLRKFEESLEGQSKQRPKSSSFLDGVKKFFDNLGK

SEQ ID NO: 64037 - DNA, 1125 bp, Mesoplasma florum
  CDS (1)..(1125): transl_table=4
atggcaaaaagagattattatgaagttttaggtgtttctaaaacttcaacagaacaagaaataaaaagcgcatacagaaaacttgctaaaaagtatcaccccgatatgaataaagagagcggtgctgaagaaaaatttaaagaagttaatgaagctgcaagcgttttacttgacgctgataaaaaagctaaatatgatcaatttggtcatgcagcttttgatggtagttcaggttttggtggatcaggctttggtggatttgaagatttcttctcaaacatgggtggaggaatggactttggtgacatattctctgatttattcggtgggggaagaagcgggcgttcttctagaagaggaccttcaaaaggtcaagacattggattagaagcaacactaacttttaaagaattagtttttggagtaaataaaaaaacaattttaaatttagttaaaacttgtacaaaatgtgatggtgtaggtgctgaaaacccttctgatgttcatatttgtacaaaatgtaatggtgctggacaaattattgttaataaacaaatgggacctttccaagttcaaaaccaagttacttgtgataaatgtaatggagttggaaaagaatttaaaagcaaatgtaaaaattgtcatggtaaaggtgttgaatctaaaagagaagaagttgaaatacctcttccaaaaggtttatgacctggtcaacaatttgttatgcgaggaaaaggacatgcatcactagaaggtggaattccaggtgatctttacataactataggtattgtgaaaagcgatgtatttgaattgattccaaattcaaatgatttaataatgaattataatatttcataccttgatgctattttaggaaatgaagttatcattaaaacattagatggacctgtaagattaaaaataccaaaaggtgtttattctggtcaactaataaaagtacatgataaaggattatacaaaaatcaaacttctgataagcgtggagatttattaattaaaataagtatttctattccaacatcagtttctaaagaagagaaaaaaatacttaaagagttagaacaactttctaattttgagcctaaaaatattattgattaa

SEQ ID NO: 64038 - protein, 374 aa, Mesoplasma florum
MAKRDYYEVLGVSKTSTEQEIKSAYRKLAKKYHPDMNKESGAEEKFKEVNEAASVLLDADKKAKYDQFGHAAFDGSSGFGGSGFGGFEDFFSNMGGGMDFGDIFSDLFGGGRSGRSSRRGPSKGQDIGLEATLTFKELVFGVNKKTILNLVKTCTKCDGVGAENPSDVHICTKCNGAGQIIVNKQMGPFQVQNQVTCDKCNGVGKEFKSKCKNCHGKGVESKREEVEIPLPKGLWPGQQFVMRGKGHASLEGGIPGDLYITIGIVKSDVFELIPNSNDLIMNYNISYLDAILGNEVIIKTLDGPVRLKIPKGVYSGQLIKVHDKGLYKNQTSDKRGDLLIKISISIPTSVSKEEKKILKELEQLSNFEPKNIID

SEQ ID NO: 64039 - DNA, 1149 bp, Methanosarcina acetivorans
  CDS (1)..(1149): transl_table=11
atggctaccaaacgtgattattacgaaattctcggactacctaaagatgcctcagtcgaagatataaagaaaacctaccggaaacttgcactgcagtaccatcctgacagaaacaaggatcccggagctgaggacaaattcaaggaaatatccgaggcttacgccgttctttcagacacggaaaaacgggctcagtacgaccgcttcgggcatgccggaatagataatcaatacagtgcagaggacatcttcagaggcgcggactttggcgggttcggagacatttttgaaatgtttttcggaggcggcagaagaggtgggcccatgggtccgaggagaggttcggacctccagtatgacctctatataaccttcgaggaagctgctttcggtgtccgtaaggatatagatatcccaaggacagaaaggtgttccacctgttcaggcacaggagcaaaaccgggaacaagcccgaagcgctgcccgacctgcggcggtacaggacaggtccgcaccacccgttcaactttggggatgcagttcataagcaccaccacctgtagtacctgtcacggcagaggccagataattgagtccccatgtcctgtttgcggcggggcgggcagagtccggaataagagaacaataacagttaacgtacctgcaggagctgactcaggcatgagcctcaggctcagcggagaaggtgattcaggagagccgggggcaccctcaggagacctttatattatcatccacgtgatggaacacaggcatttcaagcgggtcgattacgatgtaatctccgaactgtcaataaccttcacccaggccgcactcggagccgatgttatggttgataccctttacggcaaggtcaaaatgaacatcccggcagggactcagacccattccgttttcaggctcagggacaaaggcatacagcgcctccatggacacggcaaaggggaccagctcgtaagagtgataattaagactcctacaaagctcaatcaggaacagaaagagctgctccgccagtttgagaatctgagcaaaggaaagaagccccaagaggaggaaaaaagtaaagccgaaaagcataaaaaagggatttttgaaaaagtaaaagatgcctttgaaagttga

SEQ ID NO: 64040 - protein, 382 aa, Methanosarcina acetivorans
MATKRDYYEILGLPKDASVEDIKKTYRKLALQYHPDRNKDPGAEDKFKEISEAYAVLSDTEKRAQYDRFGHAGIDNQYSAEDIFRGADFGGFGDIFEMFFGGGRRGGPMGPRRGSDLQYDLYITFEEAAFGVRKDIDIPRTERCSTCSGTGAKPGTSPKRCPTCGGTGQVRTTRSTLGMQFISTTTCSTCHGRGQIIESPCPVCGGAGRVRNKRTITVNVPAGADSGMSLRLSGEGDSGEPGAPSGDLYIIIHVMEHRHFKRVDYDVISELSITFTQAALGADVMVDTLYGKVKMNIPAGTQTHSVFRLRDKGIQRLHGHGKGDQLVRVIIKTPTKLNQEQKELLRQFENLSKGKKPQEEEKSKAEKHKKGIFEKVKDAFES

SEQ ID NO: 64041 - DNA, 1167 bp, Mycoplasma penetrans
  CDS (1)..(1167): transl_table=4
atgtcatctaaaagagattactatgaagtattgggtgtcagtaaagatgcaactgatgatcagataaaatctgcctttagaaaaaaagcaatgcaatatcaccctgatagaaataaagaaccagatgctgaagaaaaatttaaagaagtaaatcaagcatatgaggttttatcagatcctgataaaagagctaattatgatagatttggtcatgaaggtgtagatggacaatttggtggtggagctggatttgatccatttgatatctttaatcaattctttggtggaggaagaggtggtggagcccacttcgaacaaagctttggaggttctggatttgaagacatcttttcaaatttctttggtggtggtagaagaggtgcatcttctcaacaaagagaagctaatttagttgtttcaatagttttaacttttgttgaatctgtagttggtgttaaaaagacaattgaatacaagatagaaaaagattgtgaatcttgtcatggtagtggtgctgacaacagtgaaggttctatttctacatgtagtaactgtaatggttctggtgttgaaattactcaaaaaagaacaattatgggaattattcaatctcaaaacatctgtagtagatgtaacggagaaggtaaagaaatccataagaaatgtaattcttgtaaaggaagaaaagttcatgaagaaagagttgaaatagatgttgaaattccaggtggtgtttcaaatgatgaacatttgaaagttagtggaaaaggatcagtggttggtggaaaaactggtgacttatacattaatattcaaatcaaacctagtaagatattttctagaaaagggaatgacatttatgtgattttaaaggttgatccaattctagcaatagtaggtggtgaagctaatatcccaactccttttggaatcaaatcaataaaaatgaaaccgggaactagaaatggtgagattattactgttccttctcacggtgttaaatcaacaaaaagatttggtagcaatggtgatttatttgcagttgtagaatatacatcagctaaaagatttagtagtgcagaattaaaatccttatctaagtttgcacaagaaacaaatgatgaaattgagaaatatttaaaagaagctagaaaggaaattaattag

SEQ ID NO: 64042 - protein, 388 aa, Mycoplasma penetrans
MSSKRDYYEVLGVSKDATDDQIKSAFRKKAMQYHPDRNKEPDAEEKFKEVNQAYEVLSDPDKRANYDRFGHEGVDGQFGGGAGFDPFDIFNQFFGGGRGGGAHFEQSFGGSGFEDIFSNFFGGGRRGASSQQREANLVVSIVLTFVESVVGVKKTIEYKIEKDCESCHGSGADNSEGSISTCSNCNGSGVEITQKRTIMGIIQSQNICSRCNGEGKEIHKKCNSCKGRKVHEERVEIDVEIPGGVSNDEHLKVSGKGSVVGGKTGDLYINIQIKPSKIFSRKGNDIYVILKVDPILAIVGGEANIPTPFGIKSIKMKPGTRNGEIITVPSHGVKSTKRFGSNGDLFAVVEYTSAKRFSSAELKSLSKFAQETNDEIEKYLKEARKEIN

SEQ ID NO: 64043 - DNA, 1122 bp, Neisseria meningitidis serogroup A
  CDS (1)..(1122): transl_table=11
atgagtaatcaagatttttatgcgacgctgggtgtggcaagaacagctaccgatgatgagattaaaaaagcctaccggaaattggcgatgaaataccatcccgaccgcaatcctgacaataaagaggcggaagagaagtttaaagaagtacaaaaggcgtatgaaactttgtccgacaaggaaaagcgcgctatgtacgaccagtatggtcatgcggcgtttgaaggcggcggacaggggggcttcggagggtttggcggatttggcggtgcgcagggttttgactttggggatattttcagccaaatgtttggaggcggttcggggcgcgcccagcctgattatcagggtgaggacgttcaagtcggtatcgaaatcacgcttgaagaagccgcaaaaggtgtgaagaaacgcatcaatattccgacttatgaagcgtgtgatgtctgtaacggcagtggcgcgaaaccggggacatccccggaaacctgcccgacttgcaaaggttcgggtacggtgcacatccagcaggcgattttccgtatgcagcagacttgtccgacctgccacggtgcgggcaaacacattaaagaaccttgcgtcaaatgccgtggcgcggggcggaataaggcggtcaagacggtggaagtcaatattcccgccggtatcgatgacgggcagcgtatccgtttgagcggcgaaggcggaccgggtatgcacggtgcgcctgctggcgacctgtatgtaaccgtccgcattcgggcgcataagattttccaacgcgacggtctggacttgcattgcgaactgccgatcagttttgccacggctgctttgggcggggagttggaagtgccgaccttggacggaaaggtcaagctcaccgtccccaaagaaacccaaaccggcaggaggatgcgcgtgaagggtaagggtgtcaaatctttacgcagcagcgcgaccggcgatttgtactgccatattgttgtcgaaacgcctgtcaatttgaccgaccgtcaaaaagagcttttggaagaatttgagcggatttctaccggcttggaaaaccaaacaccgcgcaagaaatcgtttttagacaagctgcgcgatttgtttgattga

SEQ ID NO: 64044 - protein, 373 aa, Neisseria meningitidis serogroup A
MSNQDFYATLGVARTATDDEIKKAYRKLAMKYHPDRNPDNKEAEEKFKEVQKAYETLSDKEKRAMYDQYGHAAFEGGGQGGFGGFGGFGGAQGFDFGDIFSQMFGGGSGRAQPDYQGEDVQVGIEITLEEAAKGVKKRINIPTYEACDVCNGSGAKPGTSPETCPTCKGSGTVHIQQAIFRMQQTCPTCHGAGKHIKEPCVKCRGAGRNKAVKTVEVNIPAGIDDGQRIRLSGEGGPGMHGAPAGDLYVTVRIRAHKIFQRDGLDLHCELPISFATAALGGELEVPTLDGKVKLTVPKETQTGRRMRVKGKGVKSLRSSATGDLYCHIVVETPVNLTDRQKELLEEFERISTGLENQTPRKKSFLDKLRDLFD

SEQ ID NO: 64045 - DNA, 1128 bp, Oceanobacillus iheyensis
  CDS (1)..(1128): transl_table=11
atgggcaaaagagattattatgagattctagggattgataaatctgcatctcaagatgaaataaagaaaaactatcgtaaattagctcgtaagtaccatccagacgtgaataaagaagcggatgcagcagaaaagtttaaagaagtaaaagaagcttacgaagtacttagcgatgaccaaaagcgtgctcaatatgatcaatttggacattcaggaccacaaagccaaggcttcggaggatttggcggtggagcacaagactttggaggcttcggagatatatttgatatgttctttgggggtggaggtcgttctcgtgatcccaatgctccgcaacaaggtaatgatttacaatatacaatgattttagactttgaagaagcggtatttggtaaagagaccgatattgaaattccaaaagaggaatcttgtgatacatgtaatggatcaggtgcaaaaccaggaacaaaacccgaaacatgttcgcattgtcatggatctggtcaattaaaccaagaacaaaatacgccatttggacgtgttgtgaatcgcagagtatgtaactattgtcaaggaactggtaaaattatacctgataaatgtaatacttgtggtggctcaggaacagtacaaaagaataagaaaatccatatctccattccagccggaattgacgaaggtcaacaaattagagtggcaggcaaaggggaatctggaaaaaatggtggaccagcaggagatttatttgtggtaattaaggttagaccacatgatttcttcgtacgtgaaggggatcatattttctgtgaattgcctctaacctatgctcaggctgcattgggagatgaattagaagttcctacagtacatggaaaagtaaaagtcaaagtaccagctggaacacaaactggaaaaactttcagaatcaaaggaaaaggtgcaccaaatgtacgtggcagaggccatggcgatcagcatattaagatcaaagtgatgacacctacaaacctttcagaaaaacaaaaagatttactccgagagtttaatgaacttggaggaaatgaatcaacagatgaacaagatgataatattttccaacgatttcgtagagcttttaaaggagaataa

SEQ ID NO: 64046 - protein, 375 aa, Oceanobacillus iheyensis
MGKRDYYEILGIDKSASQDEIKKNYRKLARKYHPDVNKEADAAEKFKEVKEAYEVLSDDQKRAQYDQFGHSGPQSQGFGGFGGGAQDFGGFGDIFDMFFGGGGRSRDPNAPQQGNDLQYTMILDFEEAVFGKETDIEIPKEESCDTCNGSGAKPGTKPETCSHCHGSGQLNQEQNTPFGRVVNRRVCNYCQGTGKIIPDKCNTCGGSGTVQKNKKIHISIPAGIDEGQQIRVAGKGESGKNGGPAGDLFVVIKVRPHDFFVREGDHIFCELPLTYAQAALGDELEVPTVHGKVKVKVPAGTQTGKTFRIKGKGAPNVRGRGHGDQHIKIKVMTPTNLSEKQKDLLREFNELGGNESTDEQDDNIFQRFRRAFKGE

SEQ ID NO: 64047 - DNA, 1074 bp, Picrophilus torridus
  CDS (1)..(1074): transl_table=11
atggcaaaggattactatgccattcttggcgttgacagaaacgcttcgcaggatgatataaaaaaggccttcagggagcttgcaaagaaataccatcctgatgcaaatcctggaaacaaggaggccgaggaaaagttcaaggagatagcagaggcctacgaggttctatcagacccgcagaagagaaaacagtacgatgaaaccggaacaacggatttcaatgccggttcaggattcaactggcaggatttcacgcatttcgatgatataaatgatatattcaaccaattttttggtggcaatttcggtgatacattcttcggcggttatacaaaccagccggatcttgacatatatttaagggtgaacatatcacttgaggatgcatactacggtgcatccaaaaacgtaaaatatagaagaaatgcaatgtgcgagcactgctctggtactggtgcagagaacaaggttcttatcacatgcccgacatgtcacggctccggacaggagaggattaccaggggtcagggatttttcagaatggttacagtaacagagtgcagaacatgtcatggacgcggaaagataccgcaaaagccatgcaccgtctgtcatggaacaggtacagtatcaaagaacgaggatatctctgttaacataccaaaaggcgcggatacaaaccttaagctcaggctaaagaacatgggcaactcctatggtggtgttacaggcgatctatacatagtacttattgtaaataatccgcctggcataagaagatccggccaggacatatacgttgagcacacaattgattttcctgaggccgcacttggcggtgaggaggaaataaaattatttagggaaagctacaatctcaagattcctgcaggaacccagccaggtgagatccttaagataaagggtgccggcatgccaagaataaacggacatggctcaggggatcttaatgtgataataaaaattgaggttccaaagcatttaacatcaaggcagaaggaactattagaagaatttagaaatgaaaagaaaaaatcgtggttccatttttaa

SEQ ID NO: 64048 - protein, 357 aa, Picrophilus torridus
MAKDYYAILGVDRNASQDDIKKAFRELAKKYHPDANPGNKEAEEKFKEIAEAYEVLSDPQKRKQYDETGTTDFNAGSGFNWQDFTHFDDINDIFNQFFGGNFGDTFFGGYTNQPDLDIYLRVNISLEDAYYGASKNVKYRRNAMCEHCSGTGAENKVLITCPTCHGSGQERITRGQGFFRMVTVTECRTCHGRGKIPQKPCTVCHGTGTVSKNEDISVNIPKGADTNLKLRLKNMGNSYGGVTGDLYIVLIVNNPPGIRRSGQDIYVEHTIDFPEAALGGEEEIKLFRESYNLKIPAGTQPGEILKIKGAGMPRINGHGSGDLNVIIKIEVPKHLTSRQKELLEEFRNEKKKSWFHF

SEQ ID NO: 64049 - DNA, 1152 bp, Porphyromonas gingivalis
  CDS (1)..(1152): transl_table=11
atggcagaaaaaagagactattacgaagtcctcggtgtatcgaagaatgccaccgacgatgaactgaaaaaagcatatcgcaagaaggctatccaataccatcctgataagaaccccggtgacaaggaggccgaagagcacttcaaagaggtagctgaagcctacgacgtattgagcgatccgcagaagcgcagtcaatatgaccagttcggccatgccggattgggcggagctgccggtggaggtttcagcggaggcggtatgtccatggaggatattttcagtcgcttcggtgatctattcggtgggttcggcggtttcggcggattctccgatatgggcggtggcagtcgcagacgtgttcgcagagggtctgacctgcgagtacgagtgaagctttctttggccgatataagtaaaggtgtggagaagaaagtgaaggtaaaaaagcaggtagtgtgcagcaaatgtcgtggcgatggcacggaagaagccaatggcaagactacctgccagacctgccatggaaccggcgtggttacacgtgtgagcaacactttccttggggccatgcagacccagagcacttgtcccacttgccacggagagggtgagatcatcacgaagccatgctccaagtgtaagggcgaaggtgtggagatcggcgaagaggtgatctcattccacatccctgccggtgtagccgaaggaatgcaaatgtccgtgaacggcaagggaaatgccgcgccccgaggaggcgtgaatggcgacttgatagtcgtgatcgccgaggaaccggatccgaatctgatccgcaatggcaacgatctgatatacaatctgcttatatccgttccgttggctataaaaggaggtagtgtggaagtgccgacgatagacggacgagccaagatccgcatcgaggcggggacacaacccggcaagatgctgcgtttgcgcaataaggggttgcccagcgtaaacggctatggcatgggagaccaactggtgaatgtcaatgtctatatccccgaatcgatcgatgccaaagatgagcaggctatcgcagcgatggaaaactcggacagcttcaaacctaccgatgctgctcgtaaggatatagacaagaaatacagagagatgctggattga

SEQ ID NO: 64050 - protein, 383 aa, Porphyromonas gingivalis
MAEKRDYYEVLGVSKNATDDELKKAYRKKAIQYHPDKNPGDKEAEEHFKEVAEAYDVLSDPQKRSQYDQFGHAGLGGAAGGGFSGGGMSMEDIFSRFGDLFGGFGGFGGFSDMGGGSRRRVRRGSDLRVRVKLSLADISKGVEKKVKVKKQVVCSKCRGDGTEEANGKTTCQTCHGTGVVTRVSNTFLGAMQTQSTCPTCHGEGEIITKPCSKCKGEGVEIGEEVISFHIPAGVAEGMQMSVNGKGNAAPRGGVNGDLIVVIAEEPDPNLIRNGNDLIYNLLISVPLAIKGGSVEVPTIDGRAKIRIEAGTQPGKMLRLRNKGLPSVNGYGMGDQLVNVNVYIPESIDAKDEQAIAAMENSDSFKPTDAARKDIDKKYREMLD

SEQ ID NO: 64051 - DNA, 1125 bp, Prochlorococcus marinus subsp
  CDS (1)..(1125): transl_table=11
atggccgacttttatcaaatacttggtgtttcaagagatgctgatgctaatactttaaagagtgcttatagaaagttagcaagacaatatcatcctgatgtcaataaagatccaggtgctgaagataaattcaaagagataggcaaggcatatgaggctttagctgatcccgaaactagagcgagatacgatcagtttggagaggctggaatagggggagctgctggtatgccggatatgggtgatatgggtggttttggagacttgtttgaaactttttttaatggctttgggggacaatcttcacaaggaggtagatcacaaagaaggggaccacaacaaggtgatgacttaaggtatgacttaaatattgactttaaagatgctatttttggacaacaaagagaaatcaatatacctcatttagaaacttgtgaagtatgtagaggcaccggagcaaaaaaaggcacaggtccaacaacttgcacaacatgtggcggaagtggacaggttagaagggctacaaggactccatttggtaattttacccaagtagcagaatgcccaacttgtaatggggttggacaaataatttcagatccatgcacaagttgtggtggtaatggtgtgaaacaagttagaaaaaaattacgtattaatattcctgcaggagttgattctggaactaaattgagagtttctggagagggaaacgttggtctaaaaggcggcccacctggagatctttatgtctttattaaagttaaaaatgactcaaatttaaaaagagaaggcattaatatttattcagaaatatcagtaagttatcttcaagctatccttggtgatactgtcgatatcattaccgttgatggtaaggttaatttaaagattccaagtgggacccagccaaatagcactttatctcttgagaataaaggagttcctagattaggaaatccagttgcaagaggcaatcatcaggttttagtaaaagttaaacttccaactcgaattacagaagatgaacgaaatcttttagaggatctagcttcaaaatatactgaacagaattcaagttctaacagtggtttgtttagtagattgtttggaaaggattcttga

SEQ ID NO: 64052 - protein, 374 aa, Prochlorococcus marinus subsp
MADFYQILGVSRDADANTLKSAYRKLARQYHPDVNKDPGAEDKFKEIGKAYEALADPETRARYDQFGEAGIGGAAGMPDMGDMGGFGDLFETFFNGFGGQSSQGGRSQRRGPQQGDDLRYDLNIDFKDAIFGQQREINIPHLETCEVCRGTGAKKGTGPTTCTTCGGSGQVRRATRTPFGNFTQVAECPTCNGVGQIISDPCTSCGGNGVKQVRKKLRINIPAGVDSGTKLRVSGEGNVGLKGGPPGDLYVFIKVKNDSNLKREGINIYSEISVSYLQAILGDTVDIITVDGKVNLKIPSGTQPNSTLSLENKGVPRLGNPVARGNHQVLVKVKLPTRITEDERNLLEDLASKYTEQNSSSNSGLFSRLFGKDS

SEQ ID NO: 64053 - DNA, 1128 bp, Pseudomonas putida
  CDS (1)..(1128): transl_table=11
atgtccaagcgtgattattatgaggtcctgggtgtcgagcgcggcgccactgaagcggacctcaagaaggcttaccgccgtttggcgatgaagtaccacccggaccgcaacccgggcgataaagaatcggaagacaagttcaaggaggccaacgaggcctacgaagtgctgtcagacgcgagcaagcgtgcggccttcgaccagtatggccatgcaggtgtcgacccaagcatgggtggcggtggtgccggctttggtggtgccaatttctccgacatcttcggcgatgtgttcagcgacttcttcggtggcggtggtcgcggtggtggtcgaggcggtgcccagcgcggcagcgacctgcgctacaccctggagctgaacctggaagaagcggtgcgtggcaccacggtcagtatccgcgtgcccaccctggtcaactgccagccttgcgacggttccggtgccaagaagggttcgaccccgtcgacctgcccgacatgtggcggcatcggccaggtgcgcatgcagcaaggcttcttctcggtgcagcagacctgcccgcgctgccatggccaaggcaagatcattaccgacccgtgcacttcgtgccatggtgaagggcgtgtcgaggaatacaagacgctgtcggtcaaggtgccggcaggtgtcgataccggcgaccgcatccgtctgtcgggtgagggcgaggccggtactcatggtggcccgactggcgacctgtacgtggtgatcagcgtgcgtgagcacgaaatcttccagcgcgatggcaagcatttgtactgtgaagtgccgatcagctacaccgatgctgccctgggtggcgagctggaagtgccgaccctggatggtcgcgtgaagctgaagattccggaaggcacccagaccggcaagcagttccgtctgcgtggcaagggtgttgccccggtgcgtggtggtggtgcgggtgacctgctgtgccgtgtggccgtagaaaccccggtcaatctcagtcgccgtcagcgcgagctgctcgaagagctgcgtgattcgctggaaggtgacagttcccactcgcccaaggccagcggctggttcgatggtgtgaagcgcttcttcggcgatctctga

SEQ ID NO: 64054 - protein, 375 aa, Pseudomonas putida
MSKRDYYEVLGVERGATEADLKKAYRRLAMKYHPDRNPGDKESEDKFKEANEAYEVLSDASKRAAFDQYGHAGVDPSMGGGGAGFGGANFSDIFGDVFSDFFGGGGRGGGRGGAQRGSDLRYTLELNLEEAVRGTTVSIRVPTLVNCQPCDGSGAKKGSTPSTCPTCGGIGQVRMQQGFFSVQQTCPRCHGQGKIITDPCTSCHGEGRVEEYKTLSVKVPAGVDTGDRIRLSGEGEAGTHGGPTGDLYVVISVREHEIFQRDGKHLYCEVPISYTDAALGGELEVPTLDGRVKLKIPEGTQTGKQFRLRGKGVAPVRGGGAGDLLCRVAVETPVNLSRRQRELLEELRDSLEGDSSHSPKASGWFDGVKRFFGDL

SEQ ID NO: 64055 - DNA, 1146 bp, Silicibacter pomeroyi
  CDS (1)..(1146): transl_table=11
atgtcaaaacgcgactattacgatgtgctcggcgtgtccaagggcgcttcggccgacgagatcaagaaagcctatcgcggcaaggccaaggagctgcatcccgaccgcaacaaggacaatccggatgccgagtcgctgttcaaggaagtgaacgaggcttatgaggtcctgaaggatgccgagaagaaggccgcctatgaccggttcggccatgccgcgttcgaaggcggcatgggcggcggtcagcgtcccggtggcggtttcgggtcgggcgatttttccagcgccttctcggatgtgttcgaggacctgttcggcgatttcatgggtggccagcggggtggcggtggccgccgcgctgcgcgcggctcggacctgcgatacaacctgcgggtcacgctggaagaggcgttctcgggcctgcaaaagaccatcaacgtgcccaccgcggttgcctgttcgtcctgcgagggcaccggtgccgaaggcggggtcgagccgaccacctgtccgacctgttcgggcatgggcaaggtgcgcgcacagcagggcttctttaccgtcgagcggacctgtccgacctgttcgggtctgggtcagatcatcaagaacccctgcaaatcctgccgcggtcagggtcgggtcgaaaaggaccgtgcgctgagcgtcaatatccccgccggggtcgaaaccggcacccgcattcgcctggccggtgaaggcgaggccgggatgcgcggtggcccgccgggcgatctctatatctttgtcgaggtcgccaagcacgagctgttcgaacgcgacggcgtgaacctctattgccgggtgccggtcagcatggctaaggcggcgctgggtggcgccatcgaggtgccgaccatcgacggcggccggggccgggtgcaggtgcccgccggcagccagtcaggccggcagatgcgcctgcgcagcaagggcatgccagccctgcgcggtggcggcatcggtgacatgttcatcgaactggcggtggaaactccggtcaacctgaccagcaagcagaaagatctgctgcgcgagttcgacgagctgagcgaggacaacaatcccgagaccaagagcttcttttcctcggtcaagtcgttctgggacgggatgaagggttag

SEQ ID NO: 64056 - protein, 381 aa, Silicibacter pomeroyi
MSKRDYYDVLGVSKGASADEIKKAYRGKAKELHPDRNKDNPDAESLFKEVNEAYEVLKDAEKKAAYDRFGHAAFEGGMGGGQRPGGGFGSGDFSSAFSDVFEDLFGDFMGGQRGGGGRRAARGSDLRYNLRVTLEEAFSGLQKTINVPTAVACSSCEGTGAEGGVEPTTCPTCSGMGKVRAQQGFFTVERTCPTCSGLGQIIKNPCKSCRGQGRVEKDRALSVNIPAGVETGTRIRLAGEGEAGMRGGPPGDLYIFVEVAKHELFERDGVNLYCRVPVSMAKAALGGAIEVPTIDGGRGRVQVPAGSQSGRQMRLRSKGMPALRGGGIGDMFIELAVETPVNLTSKQKDLLREFDELSEDNNPETKSFFSSVKSFWDGMKG

SEQ ID NO: 64057 - DNA, 1122 bp, Staphylococcus epidermidis
  CDS (1)..(1122): transl_table=11
atggccaaaagagactattatgaagtcttaggcgtaaacaaaagcgcttctaaagacgaaattaaaaaagcttatcgtaaattatcaaaaaaataccatccagatataaataaagaagaaggcgcagacgaaaaattcaaagaaatctccgaagcatatgaagttttaagtgatgaaaacaaacgtgcaaattatgatcaatttggtcatgacggaccacaaggcggatttggaagtcaaggctttggtggcagtgactttggtggatttgaagatattttcagctcattctttggtggcggttcacgtcaaagagatcctaatgcacctcgcaaaggtgatgaccttcaatacacaatgacaataacatttgaagaggctgtattcgggacaaaaaaagaaatatcaataaaaaaagatgtaacatgtcatacatgtaacggtgatggggctaaacctggtacaagtaaaaaaacttgtagctattgtaatggcgctggtcgtgtttctgttgaacaaaatactattttgggtagagtgagaactgaacaagtttgtcctaaatgtgaaggtagtggacaagaatttgaagaaccatgtccaacatgtaaaggaaaaggtactgaaaataaaacagttaaactagaagtaactgttcctgaaggcgtagataacgaacagcaagttcgtttagctggagaaggttcacctggtgttaacggaggaccacatggtgacctatatgtggtgttcagagttaaaccatctaatacatttgaacgtgatggagacgatatctactataatctagatattagcttttcacaggctgcactaggtgatgaaattaagatacctacattaaaaagtaatgttgttttaaccattccggcaggtacacaaacgggtaaacaattccgacttaaagataaaggtgtaaagaatgttcatggttatggccacggggacttatttgtcaacataaaagtggttacaccaacaaaattaaatgaccgtcaaaaagaattattaaaagaatttgctgaaattaatggtgaagatataaatgaacagtcatctaatttcaaagatagagcgaaaagattctttaaaggagaatag

SEQ ID NO: 64058 - protein, 373 aa, Staphylococcus epidermidis
MAKRDYYEVLGVNKSASKDEIKKAYRKLSKKYHPDINKEEGADEKFKEISEAYEVLSDENKRANYDQFGHDGPQGGFGSQGFGGSDFGGFEDIFSSFFGGGSRQRDPNAPRKGDDLQYTMTITFEEAVFGTKKEISIKKDVTCHTCNGDGAKPGTSKKTCSYCNGAGRVSVEQNTILGRVRTEQVCPKCEGSGQEFEEPCPTCKGKGTENKTVKLEVTVPEGVDNEQQVRLAGEGSPGVNGGPHGDLYVVFRVKPSNTFERDGDDIYYNLDISFSQAALGDEIKIPTLKSNVVLTIPAGTQTGKQFRLKDKGVKNVHGYGHGDLFVNIKVVTPTKLNDRQKELLKEFAEINGEDINEQSSNFKDRAKRFFKGE

SEQ ID NO: 64059 - DNA, 1140 bp, Streptococcus agalactiae serotype III
  CDS (1)..(1140): transl_table=11
atgaacaatacagaattttatgatcgtcttggcgtttcaaaagatgcttctcaggacgaaataaaaaaagcttaccgtaggatgtctaagaaataccatccagatattaataaggaaacgggagcagaggaaaaatataaagaggttcaagaagcttatgaaaccttgagtgatacacaaaaacgtgctgcctatgatcaatatggcgctgctggggcaaatggcggttttggtggcttcgatggtggcggttttggtggcttcgatggtggtggctttggtggttttgaagacatcttctcaagcttttttggtggaggagggatgcgcaatcctaatgcaccacgtcaaggagatgacctacaatatcgtgttaatttaagttttgaagaagctatctttggagctgaaaaagaagtatcttataatcgggagtcatcatgtcatacttgttcaggaagtggagctaagccaggtactagccctgtgacttgtcaaaagtgtcatggttcgggtgtgattaatgttgatacacaaacacctctaggaacaatgcgtcgccaagtgacttgtgatgtttgtcagggtagtggtcaagaaatcaaagagaaatgtccaacatgtcatggaactggtcatgagaagaagacgcataaagtatcagttaaaatacctgcaggagttgaaactgggcaacaaattcgtttaacaggacaaggtgaagctggcttcaatggtggtccttatggtgatctctttgttattattaacgttctcccaagccaacagtttgagcgtaatggatcaacaatttattatactttgaaaattagctttgtccaagctgctttgggtgatacaattgatatacctactgtccatggagcggtagaaatgtcaattcctgctggtactcagacaggaaaaacgttccgtcttcgcggaaaaggtgcccctaaacttcgagggggtggacaaggtgatcagcatgttactgttaacatcgtaactcctactaaattgaatgatgctcaaaaagaggcattgcacgcttttgcagaggcaagtggagataagatggtacatccgaagaagaaaggtttctttgataaagtcaaagatgctttagatgttgattaa

SEQ ID NO: 64060 - protein, 379 aa, Streptococcus agalactiae serotype III
MNNTEFYDRLGVSKDASQDEIKKAYRRMSKKYHPDINKETGAEEKYKEVQEAYETLSDTQKRAAYDQYGAAGANGGFGGFDGGGFGGFDGGGFGGFEDIFSSFFGGGGMRNPNAPRQGDDLQYRVNLSFEEAIFGAEKEVSYNRESSCHTCSGSGAKPGTSPVTCQKCHGSGVINVDTQTPLGTMRRQVTCDVCQGSGQEIKEKCPTCHGTGHEKKTHKVSVKIPAGVETGQQIRLTGQGEAGFNGGPYGDLFVIINVLPSQQFERNGSTIYYTLKISFVQAALGDTIDIPTVHGAVEMSIPAGTQTGKTFRLRGKGAPKLRGGGQGDQHVTVNIVTPTKLNDAQKEALHAFAEASGDKMVHPKKKGFFDKVKDALDVD

SEQ ID NO: 64061 - DNA, 1134 bp, Streptococcus mutans
  CDS (1)..(1134): transl_table=11
atgaacaatcaagaatattatgatcgtcttggtgtctcaaaggacgcttcacaagacgaaattaaaaaagcctatcgcaggatgtctaaaaaatatcatccagatattaataaagaaccaggtgcggaggaaaaatataaggaaattcaagaggcttatgatacactaggcgatgaacaaaaacgtgctgcttatgatcagtacggtccagctggagctaatggcggctttggtgatggtagtggttttagtggctttgatagttcgggctttggtggttttgaagatatcttttcaagcttctttggcggcggagcctctaggaatcctaatgcaccccgtcagggtgatgatcttcaatatcgtgttaatttacaatttgaagaagctgtttttggaacagaaaaagaagtgcactataatcgtgaagcaagctgtcatacttgtaatggctctggagctaaaccaggaactagtcctgttacttgtagcaaatgtcatggttcaggtgttatcaatatggatacccaaacgccacttggtatgatgcgtcgtcaagtaacctgtgatgtttgtcatggaacgggccaagaaattaaagagccttgtccaacttgtcatggaacgggtcatgaaaagcaaagccataaagtttctgtcaagattcctgctggtgttgaaacaggccagcaaattcggttggcaggacaaggggaagctggctttaatggcggcccttatggtgacctctttgtcattatcaatgtcctcaagagtgataaattcgaacgtgatggttcaaccatttactatagtatggacattaattttgttcaggctgcacttggtgatactgttgaagtaccaacagttcatggtaatgttgaactcgctattccagcaggtacccagacaggtaagacattccgtctcaaaggtaaaggagctccgcgtttgcgtggaaatggacagggagatcagcacgttactgttaatgttgttactccaacaaaacttaatgatgcccaaaaagaggccctgcaagattttgctaaggctagtggtataaatcctgttcatcctaagaaaaaaggtttctttaataaagtcaaggacgcttttgatgagatgtag

SEQ ID NO: 64062 - protein, 377 aa, Streptococcus mutans
MNNQEYYDRLGVSKDASQDEIKKAYRRMSKKYHPDINKEPGAEEKYKEIQEAYDTLGDEQKRAAYDQYGPAGANGGFGDGSGFSGFDSSGFGGFEDIFSSFFGGGASRNPNAPRQGDDLQYRVNLQFEEAVFGTEKEVHYNREASCHTCNGSGAKPGTSPVTCSKCHGSGVINMDTQTPLGMMRRQVTCDVCHGTGQEIKEPCPTCHGTGHEKQSHKVSVKIPAGVETGQQIRLAGQGEAGFNGGPYGDLFVIINVLKSDKFERDGSTIYYSMDINFVQAALGDTVEVPTVHGNVELAIPAGTQTGKTFRLKGKGAPRLRGNGQGDQHVTVNVVTPTKLNDAQKEALQDFAKASGINPVHPKKKGFFNKVKDAFDEM

SEQ ID NO: 64063 - DNA, 1137 bp, Streptococcus pneumoniae
  CDS (1)..(1137): transl_table=11
atgaacaatactgaattttatgatcgtctgggggtatccaaaaacgcttcggcagacgaaatcaaaaaggcttatcgtaagctttccaaaaaatatcacccagatatcaacaaggagcctggtgctgaggacaagtacaaggaagttcaagaagcctatgagactttgagtgacgaccaaaaacgtgctgcctatgaccagtatggtgctgcaggcgccaatggtggttttggtggagctggtggtttcggcggtttcaatggggcaggtggcttcggtggttttgaggatattttctcaagtttcttcggcggaggcggttcttcgcgcaatccaaacgctcctcgccaaggagatgatctccagtatcgtgtcaatttgacctttgaagaagctatcttcggaactgagaaggaagttaagtatcatcgtgaagctggctgtcgtacatgtaatggatctggtgctaagccagggacaagtccagtcacttgtggacgctgtcatggcgctggtgtcattaacgtcgatacgcagactcctcttggtatgatgcgtcgccaagtaacctgtgatgtctgtcacggtcgaggaaaagaaatcaaatatccatgtacaacctgtcatggaacaggtcatgagaaacaagctcatagcgtacatgtgaaaatccctgctggtgtggaaacaggtcaacaaattcgcctcgctggtcaaggtgaagcaggctttaacggtggaccttatggtgacttgtatgtagtagtttctgtggaagctagcgacaagtttgaacgtgaaggaacgactatcttctacaatctcaacctcaactttgtccaagcggctcttggtgatacagtagatattccaactgttcacggtgatgttgaattggttattccagagggaactcagactggtaagaaattccgcctacgtagtaagggggcaccgagccttcgtggcggtgcagttggtgaccaatacgttactgttaatgtcgtaacaccgacaggcttgaacgaccgccaaaaagtagccttgaaagaattcgcggctgctggtgacttgaaagtaaatccaaagaaaaaaggcttctttgaccatattaaagatgcctttgatggagaataa

SEQ ID NO: 64064 - protein, 378 aa, Streptococcus pneumoniae
MNNTEFYDRLGVSKNASADEIKKAYRKLSKKYHPDINKEPGAEDKYKEVQEAYETLSDDQKRAAYDQYGAAGANGGFGGAGGFGGFNGAGGFGGFEDIFSSFFGGGGSSRNPNAPRQGDDLQYRVNLTFEEAIFGTEKEVKYHREAGCRTCNGSGAKPGTSPVTCGRCHGAGVINVDTQTPLGMMRRQVTCDVCHGRGKEIKYPCTTCHGTGHEKQAHSVHVKIPAGVETGQQIRLAGQGEAGFNGGPYGDLYVVVSVEASDKFEREGTTIFYNLNLNFVQAALGDTVDIPTVHGDVELVIPEGTQTGKKFRLRSKGAPSLRGGAVGDQYVTVNVVTPTGLNDRQKVALKEFAAAGDLKVNPKKKGFFDHIKDAFDGE

SEQ ID NO: 64065 - DNA, 1158 bp, Vibrio harveyi
  CDS (1)..(1158): transl_table=11
atgtcaaaacgtgatttttacgaagtattaggcgtaagccgtgatgcctctgagcgcgatatcaaaaaggcgtacaagcgtctagcaatgaaataccacccagaccgtaaccagggtgatgaatctgctgcagataagtttaaagaagtaaaagaaagctacgaaattctcactgaccctcaaaagaaagcggcgtacgatcagtatggtcatgctgcttttgaacaaggcggtggcggcttcggcggcggcggttttggtggcggtggtgctgatttcggcgacatctttggtgacgtttttggcgatatctttggcggtggtcgtcgtggcggtggtcagcaacgtgcacaacgtggcgcagacctacgttacaacatggaactgtcgctagaagaagctgttcgtggcgtatcgaaagaaatcgaagtaccaacgcttgttcattgtgatacctgtgacggtagcggtgcgaagaaaggttcttcagctgagacttgtggaacctgtcatggtcacggtcaagttcaaatgcgccaaggtttctttgctgtgcagcaaacctgtcctacctgtcatggtaaaggtaagatcataagaccatgtaacgaatgtcatggtcaaggtcgcaaacagaaaactaagacacttaacgttaagatcccagcaggtgttgatactggcgatcgcattcgtctatctggcgaaggcgaacgtggagaaatgggtgcaccagcaggtgacctatacgtacaagttcacgtgaaagagcaccatatcttcgaacgtgaaggcaacaacttgtattgtgaagtgccagttagctttctgatggcctgctctatggctgctctaggtggagaagttgaagttccgacactagatggtcgtgtgaaccttaaagtaccaacagaaacgcgggcaggacgtatgttccgtatgcgcggtaaaggggtgaaaggcgttcgtggtggcggtgttggtgacctaatcgttaagcttgtagtagagactccagttaacttgagcgctcgtcagaaagaattgcttaaagagtttgatgaatcttgtggtggcgatgcgcaactaagcacaaaccaaaatctgaaaggcttcttcaacggcgtgaagaagttctttgatgacctaacaagctaa

SEQ ID NO: 64066 - protein, 385 aa, Vibrio harveyi
MSKRDFYEVLGVSRDASERDIKKAYKRLAMKYHPDRNQGDESAADKFKEVKESYEILTDPQKKAAYDQYGHAAFEQGGGGFGGGGFGGGGADFGDIFGDVFGDIFGGGRRGGGQQRAQRGADLRYNMELSLEEAVRGVSKEIEVPTLVHCDTCDGSGAKKGSSAETCGTCHGHGQVQMRQGFFAVQQTCPTCHGKGKIIRPCNECHGQGRKQKTKTLNVKIPAGVDTGDRIRLSGEGERGEMGAPAGDLYVQVHVKEHHIFEREGNNLYCEVPVSFLMACSMAALGGEVEVPTLDGRVNLKVPTETRAGRMFRMRGKGVKGVRGGGVGDLIVKLVVETPVNLSARQKELLKEFDESCGGDAQLSTNQNLKGFFNGVKKFFDDLTS

SEQ ID NO: 64067 - DNA, 1146 bp, Vibrio parahaemolyticus
  CDS (1)..(1146): transl_table=11
atgtcaaaacgtgatttttacgaagtattaggcgtaagccgtgatgcctcagagcgtgatatcaaaaaggcgtacaagcgcctagcgatgaaattccacccagacagaaaccagggtgatgagtctgcggcggacaagtttaaagaagtaaaagaagcgtacgaagttctaaccgactctcagaaaaaagcggcttatgaccaatatggccatgctgcttttgaacaaggtggcggtggtttcggcggcggctttggtggaggcggcgctgacttcggcgacatctttggtgatgtgtttggcgatatcttcggtggcggtcgccgtggtggcggtggtcatcgtgcgcaacgtggtgccgacttacgttacaacatggagctaacgctagaagaagccgttcgtggtgtaactaaagagattgaagttccgacactggttcactgtgactcttgtgacggtagcggtgcgaagaaaggctcatcagcggaaacatgtggtacctgtcatggccatggccaagtgcaaatgcgtcaaggtttcttcgctgttcagcaaacctgtcctacctgtcatggtaaaggtaagatcattaaagacccttgtaatgagtgtcatggtcaaggtcgcaagcaaaaaacgaaaacacttaacgttaaaatcccagctggcgtggatactggcgatcgcattcgtctatctggcgaaggcgaagcgggagaaatgggtgcaccatcaggtgatctatacgtacaagtacacgtgaaagagcatcacattttcgagcgtgacggcaataacctctattgtgaagtgccagtaagctttgctatggctgcactcggcggcgaagttgaagttccaactcttgatggacgagtaagcctaaaagtgccgtcagaaacacaaactggccgtatgttccgtatgcgcggtaaaggtgtgaaaggcgtccgtggcggtggtattggtgacttgatcgttaaattggttgtagaaacgccagttaacttaagctctcgtcaaaaagaactgttgaaagagtttgaagagtcttgtggcggtgaagctgcaactaaacacaaaccaaaatctgaaggcttcttcaatggtgtgaagaagttctttgatgatttaaccagctaa

SEQ ID NO: 64068 - protein, 381 aa, Vibrio parahaemolyticus
MSKRDFYEVLGVSRDASERDIKKAYKRLAMKFHPDRNQGDESAADKFKEVKEAYEVLTDSQKKAAYDQYGHAAFEQGGGGFGGGFGGGGADFGDIFGDVFGDIFGGGRRGGGGHRAQRGADLRYNMELTLEEAVRGVTKEIEVPTLVHCDSCDGSGAKKGSSAETCGTCHGHGQVQMRQGFFAVQQTCPTCHGKGKIIKDPCNECHGQGRKQKTKTLNVKIPAGVDTGDRIRLSGEGEAGEMGAPSGDLYVQVHVKEHHIFERDGNNLYCEVPVSFAMAALGGEVEVPTLDGRVSLKVPSETQTGRMFRMRGKGVKGVRGGGIGDLIVKLVVETPVNLSSRQKELLKEFEESCGGEAATKHKPKSEGFFNGVKKFFDDLTS

SEQ ID NO: 64069 - DNA, 1119 bp, Wolbachia pipientis wMel
  CDS (1)..(1119): transl_table=11
atgagcaaaaaagactactatgatctgctggaagtaggcagaaatgccagtattgatgagataaaaaaagcgtataaaaaattagcattaagatatcatcctgatagaaatcctggcaatcaagaagcagaggaaaaatttaaagaagtaacagctgcatatgaagttctgtctgactctgagaaaagggcaggctatgaccgttatggccacgaaggtgcttctggtggatttcaaggctttagctctgcaggagattttagcgacatattcaatgacttctttggtggaggattcggtggtggtgcaagtagatcgagagcaaaaagaagtacaacaggagtatctggagcagacctacgttatgatcttgaaattaccttagaagatgcatttaaaggaatacaagcgcctatacattatgtgacaaatgtaaaatgtgatacatgccaaggcacaggtggcgaaggagcaattaaaccagttcagtgccacacatgccagggaagcggtaggattagaactcaacaaggcttttttaccatcgaaagaacatgtactacatgctatggggaaggagaaataatacaaaacaaatgtaagaaatgtggtggaagtggacgtagaagagatgaagtaaatatatccgtttcaattccaaaaggcatagaagaaggagctaaggtaaggataagtggtaaaggagaagctggaacaaaaggtggaaaaagtggagatttatacgtatacgtgaaaataattttccataaaatctttgctagaaataaagcagatttacactgtaaagtgcctataagaatgacactagcagtgcttggtggtgaaatcgatattcaatcaattgatggagctaaaataaaagtaaaggtccctgaaggcactcaaactggtaccaaactacgttgtagggaaaagggtatgccatatatgaactcacatgctcgtggtgatttatacgtacaggtaatagttgagactttaaatccaaaaaatttaactaaaaagcaaattgaactattaaaagcgcttgaagaagaggaaaatgcaagtgtacaacagcaatctgaagggttttttagtaaagtaaaaaaaaaataa

SEQ ID NO: 64070 - protein, 372 aa, Wolbachia pipientis wMel
MSKKDYYDLLEVGRNASIDEIKKAYKKLALRYHPDRNPGNQEAEEKFKEVTAAYEVLSDSEKRAGYDRYGHEGASGGFQGFSSAGDFSDIFNDFFGGGFGGGASRSRAKRSTTGVSGADLRYDLEITLEDAFKGIQAPIHYVTNVKCDTCQGTGGEGAIKPVQCHTCQGSGRIRTQQGFFTIERTCTTCYGEGEIIQNKCKKCGGSGRRRDEVNISVSIPKGIEEGAKVRISGKGEAGTKGGKSGDLYVYVKIIFHKIFARNKADLHCKVPIRMTLAVLGGEIDIQSIDGAKIKVKVPEGTQTGTKLRCREKGMPYMNSHARGDLYVQVIVETLNPKNLTKKQIELLKALEEEENASVQQQSEGFFSKVKKK

SEQ ID NO: 64071 - DNA, 1509 bp, Allium porrum
  CDS (81)..(1337)
agaaaatatagggagcaaaaccaaagttgcctataagccaattcaatttagggtttcgaaatcaacaataaagatctaagatgttcggtagagccccgaagaaaagcgataatactaagtattatgaggtcctcggagtttcgaaaaacgcaacgccagaagatttgaagaaggcgtacagaaaggccgcgattaaaaatcatcctgacaaaggtggtgaccctgaaaagtttaaagaaattggccaagcttatgaagttttaaatgaccctgagaaacgcgagatatatgaccaatatggcgaggaaggcctcaaagagggaatgggtggaggtggaggtgttcacgacccttttgacattttccaatcattctttggtggtggtggttttggaggtggtggtagcagccgaggtcgtagacaaaggagaggtgaagatgtagtccatcctctcaaagtatctcttgaagacctttacaatggaacttcaaagaagctttctctctccagaaacgttctctgcacaaaatgcaagggcaaaggatctaaatctggtgcttcaatgaattgtgcatcttgtcaaggatcaggcatgaaagtctccattcgccagcttgggcctggaatgattcagcaaatgcaacatccttgcaatgaatgcaaaggtactggggaaatgatcagcgacaaagacagatgtccacagtgtaaaggtgaaaaggttgtacaacaaaagaaggttcttgaagtgcatgttgagaaagggatgcagaatggacagaaaattacctttcctggtgaagctgatgaagcgcctgatacagttacaggggacattgtatttgtactgcaacaaaaagaacaccccaaattcaagaggaagggagatgatttattttatgagcattcgctctctctcactgaagctctctgcggttttcagtttgtgttgacacacttggataataggcaactcctaatcaagtcaaatcctggagaggttattaagccagatcaattcaaaggcataaacgacgaaggaatgccgatgtaccagaggccattcatgagaggaaagctttacattcacttctcagtcgacttcccagactcactgacgcccgatcagtgcaaggctttagaaagcgtgcttccgtccaggaacgcatccagactcacggacatggaaatcgacgaatgtgaagaaaccacgatgcatgacgtgaacatagaggaggagatgaggaggaagcagcaccagcaagctcaggaggcctacgatgaggatgatgaaggccatggtggggctcagagggtgcaatgtgcccagcagtgatgaccgatgatcagcatatttatttattggatctgctgtaacctgtgtggggggtgggggtatatactttccctgattatgttttatgctctctattttggcttgtgtgtttgatatttttttcaagacgtttatgtatcggtaattttttgctttgactcaaacctcgtgc

SEQ ID NO: 64072 - protein, 418 aa, Allium porrum
MFGRAPKKSDNTKYYEVLGVSKNATPEDLKKAYRKAAIKNHPDKGGDPEKFKEIGQAYEVLNDPEKREIYDQYGEEGLKEGMGGGGGVHDPFDIFQSFFGGGGFGGGGSSRGRRQRRGEDVVHPLKVSLEDLYNGTSKKLSLSRNVLCTKCKGKGSKSGASMNCASCQGSGMKVSIRQLGPGMIQQMQHPCNECKGTGEMISDKDRCPQCKGEKVVQQKKVLEVHVEKGMQNGQKITFPGEADEAPDTVTGDIVFVLQQKEHPKFKRKGDDLFYEHSLSLTEALCGFQFVLTHLDNRQLLIKSNPGEVIKPDQFKGINDEGMPMYQRPFMRGKLYIHFSVDFPDSLTPDQCKALESVLPSRNASRLTDMEIDECEETTMHDVNIEEEMRRKQHQQAQEAYDEDDEGHGGAQRVQCAQQ

SEQ ID NO: 64073 - DNA, 1254 bp, Atriplex nummularia
  CDS (1)..(1254)
atgtttggaagagcaccaaagaagagtgatagcaccagatattacgagatcttaggcgtaccaaaagatgcatctcctgaagatttgaagaaggcttataaaaaagctgccattaaaaatcatcctgacaagggaggtgatcccgagaagtttaaagagctagctcatgcttatgaggtcctcagtgatcccgaaaagcgtgagatctatgatcaatatggtgaggatgcacttaaggaaggaatgggtggaggtggcggtatgcatgatccattcgacatcttccaatccttctttggaggaagtccatttggtggtgttggttctagccgaggaagaaggcaaaggcggggagaagatgtagttcatcctcttaaggtttcactcgaggatctctttaccggtacaacaaagaagctctcactctctcgcaatgtaatttgttcaaagtgtactggcaaaggatcaaaatcgggagcttctatgaagtgttctggatgtcaaggtactggtatgaaggtttctatcagacatctgggaccctcaatgatccagcagatgcagcacccttgtaatgaatgcaaaggaactggagagacgattaatgacaaagatcgttgccctcagtgcaaaggtgagaaggttgtgcaggagaagaaggtcttagaggttgttgtggagaagggcatgcaacatggacagaaaattactttccctggagaggctgatgaagctcctgatactgtcactggagatatagtctttgtcctgcagcagaaagagcaccctaagttcaagagaaagggtgaagatctcttctacgagcacactctaagcctgactgaagctctttgcggctttagatttgtgctgactcaccttgatggaaggcaacttcttatcaaatcaaacctgggagaagttgtcaagcctgatcaattcaaggcaattgaggatgagggtatgcctatataccaaaggccgttcatgaagggcaagatgtacatccatttcacagtggagttccccgattcgttaaaccctgatcaagttaaatccttggaagcgatccttcctcctaagccatcaatgtctctcacatacatggagttagatgaatgtgaagagacaacactgcataatgtcaacattgaagaagagatgaaaaggaagcagacacaagcacagcaggaggcatacgatgaagatgacgaacctgccggtggtcagagggtccaatgtgctcaacagtga

SEQ ID NO: 64074 - protein, 417 aa, Atriplex nummularia
MFGRAPKKSDSTRYYEILGVPKDASPEDLKKAYKKAAIKNHPDKGGDPEKFKELAHAYEVLSDPEKREIYDQYGEDALKEGMGGGGGMHDPFDIFQSFFGGSPFGGVGSSRGRRQRRGEDVVHPLKVSLEDLFTGTTKKLSLSRNVICSKCTGKGSKSGASMKCSGCQGTGMKVSIRHLGPSMIQQMQHPCNECKGTGETINDKDRCPQCKGEKVVQEKKVLEVVVEKGMQHGQKITFPGEADEAPDTVTGDIVFVLQQKEHPKFKRKGEDLFYEHTLSLTEALCGFRFVLTHLDGRQLLIKSNLGEVVKPDQFKAIEDEGMPIYQRPFMKGKMYIHFTVEFPDSLNPDQVKSLEAILPPKPSMSLTYMELDECEETTLHNVNIEEEMKRKQTQAQQEAYDEDDEPAGGQRVQCAQQ

SEQ ID NO: 64075 - DNA, 1242 bp, Cucumis sativus
  CDS (1)..(1242)
atgtttggaaggccgaagaagagcgataataccaaatattatgagattcttggagtctcgaagaatgcgtcgcaagacgatctaaagaaggcttatagaaaggccgccatcaagaaccatcctgataaaggtggcgaccctgaaaaattcaaggagttagcacaagcctacgaggtgctgagtgatccagagaaacgtgagatatatgatcaatatggcgaggatgccctcaaggaaggaatgggaggtggcggtggtcatgatccatttgacatattccagtctttctttggtggaagcccgtttggtggtggtggaagcagcagaggccgaaggcagagaaggggagaggatgttatccatcctctcaaggtctcgttggaagatctctacaacggtacttcaaagaagctctctctttcacgtaatgtaatttgctcaaagtgcaagggtaagggttctaaatctggtgcttcaatgaagtgtcctggctgtcaaggttctggtatgaaagtttccatcagacaccttggcccctctatgattcagcaaatgcagcatccttgcaatgaatgtaaaggaactggtgagaccatcaatgataaagatcgctgctcacaatgcaagggtgaaaaggttgttcaggagaaaaaagttttggaagttattgtggagaagggtatgcaaaatgcacaaaagattacattccctggtgaagcagatgaagcgcccgacactgttactggggacattgtctttgtcctacaacaaaaagagcaccccaagtttaagagaaagggcgatgacctctttgtagagcataccttgtctctcgtcgagtctctgtgtggtttccaatttattctgactcatttggatggccgacagctactcatcaaatcacttcccggtgaagtagtgaagcctgaccaattcaaggccataaacgatgagggtatgcctatgtaccagaggccattcatgaagggcaaactttacatccacttcagtgttgagttcccagactccttgaaccccgaacagtgcaaggcgctggagggcgttctgcctcccaggacctcagtgcagctctcagatatggaattggatgaatgtgaagagaccactctccacgatgtcaacattgaagaggagatgcgcaggaagcaagcacaagaggcatacgatgaagatgaggatatgcacggtggtgcacagagagtgcagtgtgctcaacaatga

SEQ ID NO: 64076 - protein, 413 aa, Cucumis sativus
MFGRPKKSDNTKYYEILGVSKNASQDDLKKAYRKAAIKNHPDKGGDPEKFKELAQAYEVLSDPEKREIYDQYGEDALKEGMGGGGGHDPFDIFQSFFGGSPFGGGGSSRGRRQRRGEDVIHPLKVSLEDLYNGTSKKLSLSRNVICSKCKGKGSKSGASMKCPGCQGSGMKVSIRHLGPSMIQQMQHPCNECKGTGETINDKDRCSQCKGEKVVQEKKVLEVIVEKGMQNAQKITFPGEADEAPDTVTGDIVFVLQQKEHPKFKRKGDDLFVEHTLSLVESLCGFQFILTHLDGRQLLIKSLPGEVVKPDQFKAINDEGMPMYQRPFMKGKLYIHFSVEFPDSLNPEQCKALEGVLPPRTSVQLSDMELDECEETTLHDVNIEEEMRRKQAQEAYDEDEDMHGGAQRVQCAQQ

SEQ ID NO: 64077 - DNA, 1590 bp, Drosophila virilis
  CDS (1)..(1590)
atgatttcgtgtaaaaatttatgtgttttgcgtcaattgccgctcaaaaactgtcgccggcattacagtgccattcaatcaagtgccgcgctgctgtcagtgcggccaacgaaatggacaccgaaacctgccgctgctggtggcgccgtctctgcttggcaacagaggacgacggcgaagcagcatcaacagcagcaacgacgcagtctattcagctcgagtcgcatgcaggccaaggactactatgcgacgctgggagtggctaagaatgccaatgccaaggacattaagaaggcgtactatgagctggcaaagaaatatcacccggacaccaacaaggatgatccggatgcgagtaaaaagttccaggacgttagtgaggcctatgaggtccttagcgatgatcagaaacggcgggaatacgatacctatggccagacaacggagaacatgaatcgtcagggtgcgggcggtgccggcggcttcggtggcggcccctttgggcccgacggcttctcacagaattggcaattccgctccaccatcgatccggaggagctattccgcaagatctttggcgagggaaattttcgcagcaatagctttgacgactttgcagattccaaattcgggttcgggcaggcccaagagcttgtcatggacctaacctttgcccaggcggctcgtggcgtcaataaggatgttaatgtgaatgtagtggatcagtgtcccaaatgcgccggctccaagtgcgagcctggcaccaagcccggtcgctgccaatattgcaatggaacgggttttgagactatatccaccggcccctttgtaatgcgctccacgtgccgctattgccaaggtacgcggcaatatattaaatatccgtgcgcagagtgcgagggcaaggggcagacagtacagcggcgcaaggtgacggtgccggtaccggcaggcatcgagaatggtcaaacggtgcgcatgcaggtgggcagcaaggaactgtttgtcaccttccgtgtagagcgcagcgactacttccgtcgcgacggcgctgatgtccacacggatgccccgatctcgttggctcaggcggtgctgggcggtacagtacgcgttcagggcgtctacgaggatcaatggctgaacattgagccgggcacctcatcgcatcgaaagattgcgctgcgcggcaagggcctgaaacgtgtcaatgcccacggacacggcgatcactacgtgcacatcaagatcgaggtaccaaagaagctgagtcaggagcagcgcgccctgctggaggcgtacgctgaactcgaggaggacacgcccgggcagatacacggcatggcgcagaggaaagatggcagtaagaaagcaaccgcaggtgcgagtgaaaccaaaactgacgcccagccagcaggtagaacagcggacagcggtagtcaaggaacgagtagagcaggagcagaaacagaatcagcgaaaggccaacaaagcgaaaagtcggaaacacgcagaaaagatcagcaaaccggaggcgaaagtggaagcggcggaggcttcttgaacaaaatcaaatccatgttcaactaa

SEQ ID NO: 64078 - protein, 529 aa, Drosophila virilis
MISCKNLCVLRQLPLKNCRRHYSAIQSSAALLSVRPTKWTPKPAAAGGAVSAWQQRTTAKQHQQQQRRSLFSSSRMQAKDYYATLGVAKNANAKDIKKAYYELAKKYHPDTNKDDPDASKKFQDVSEAYEVLSDDQKRREYDTYGQTTENMNRQGAGGAGGFGGGPFGPDGFSQNWQFRSTIDPEELFRKIFGEGNFRSNSFDDFADSKFGFGQAQELVMDLTFAQAARGVNKDVNVNVVDQCPKCAGSKCEPGTKPGRCQYCNGTGFETISTGPFVMRSTCRYCQGTRQYIKYPCAECEGKGQTVQRRKVTVPVPAGIENGQTVRMQVGSKELFVTFRVERSDYFRRDGADVHTDAPISLAQAVLGGTVRVQGVYEDQWLNIEPGTSSHRKIALRGKGLKRVNAHGHGDHYVHIKIEVPKKLSQEQRALLEAYAELEEDTPGQIHGMAQRKDGSKKATAGASETKTDAQPAGRTADSGSQGTSRAGAETESAKGQQSEKSETRRKDQQTGGESGSGGGFLNKIKSMFN

SEQ ID NO: 64079 - DNA, 1266 bp, Oryza sativa
  CDS (1)..(1266)
atgtacggacgcatgccaaagaagagtaacaataccaagtattatgaggtgcttggtgtatctaagacagcaacccaggatgagctgaagaaagcgtaccgtaaagctgccattaaaaaccaccctgataagggtggagaccctgagaagtttaaagaattggctcaagcttacgaggttcttaatgatcctgaaaagagggaaatctatgaccaatatggcgaggatgcactcaaagaaggaatgggaggaggcagcagcagtgatttccatagtcccttcgatttatttgagcaaatttttcagaatcgtggtggctttggggtaggtagaggacacagacaaaagcgtggcgaagatgtggtacatactatgaaggtttctttagaagacctgtataatggtactaccaaaaaactgtctttgtcacggaatgctctgtgcacaaagtgcaagggtaaaggatccaagagtggggcagcagcaacttgccatggttgtcatggtgcaggaatgagaacaataacaagacaaattgggcttggcatgatccaacagatgaacactgtttgccctgaatgcagaggatcaggtgagatgataagtgacaaggataaatgcccgagttgtaagggaaacaaagtagtccagcagaagaaggtcttggaggttcatgttgagaagggaatgcaacatggccaaaagattgtattccagggtgaagctgatgaagctcctgatacagtgacaggagacatagtttttgtcttgcaacttaaagaccacccaaaatttaagaggaagtttgatgacctctttactgagcacacaatctccctgaccgaggctctgtgtggcttccagtttgttctaacccatcttgatggtcggcaactcctaatcaaatctaatccaggggaggttataaaacctggtcaacacaaggccatcaatgatgaaggcatgccccagcatggccgccctttcatgaaaggtcgtctttttgttgaattcaacgtggagtttcctgagcctggtgcactcactcctggccaatgccgatcgcttgagaagattttgccaccacgacccaggaatcaattgtcagacatggagctagatcaatgtgaggagaccaccatgcatgatgtcaacatagaagaggagatgaggcgcaggcagcagcacaggcggcaggaagcatatgatgaagacgacgacgaggatgctggagctggaccaagggtacagtgtgcccagcagtaa

SEQ ID NO: 64080 - protein, 421 aa, Oryza sativa
MYGRMPKKSNNTKYYEVLGVSKTATQDELKKAYRKAAIKNHPDKGGDPEKFKELAQAYEVLNDPEKREIYDQYGEDALKEGMGGGSSSDFHSPFDLFEQIFQNRGGFGVGRGHRQKRGEDVVHTMKVSLEDLYNGTTKKLSLSRNALCTKCKGKGSKSGAAATCHGCHGAGMRTITRQIGLGMIQQMNTVCPECRGSGEMISDKDKCPSCKGNKVVQQKKVLEVHVEKGMQHGQKIVFQGEADEAPDTVTGDIVFVLQLKDHPKFKRKFDDLFTEHTISLTEALCGFQFVLTHLDGRQLLIKSNPGEVIKPGQHKAINDEGMPQHGRPFMKGRLFVEFNVEFPEPGALTPGQCRSLEKILPPRPRNQLSDMELDQCEETTMHDVNIEEEMRRRQQHRRQEAYDEDDDEDAGAGPRVQCAQQ

SEQ ID NO: 64081 - DNA, 1254 bp, Oryza sativa
  CDS (1)..(1254)
atgttcgggcgcgcgccgaagaagagcgacaacacgcggtactacgaggtgcttggggtgcccaaggatgcgtcccaggatgacctcaagaaggcgtaccgcaaggccgccatcaagaaccaccccgacaagggcggagaccccgagaagttcaaggaattggctcaggcttatgaagtcctgagtgaccctgagaagcgtgaaatctatgatcagtacggtgaagatgctctcaaggaggggatgggtcctggtggtgggatgcatgacccatttgacattttttcctcattctttggaggtggctttggaggtggtagcagtaggggcaggagacagcgtaggggagaggatgtggttcaccctctgaaggtttctctggaggaattgtacaatggcacatcaaagaagctctccctttctcgcaatgtgctctgctccaagtgcaatggcaagggctcgaaatctggtgcttccatgaagtgctctggttgtcaaggttctggtatgaaggtccaaattcgccagttggggccaggaatgattcagcaaatgcaacatccctgcaatgagtgcaagggaactggtgagaccatcagcgacaaggatagatgcccaggctgcaagggtgagaaggtggcgcaggagaagaaggttcttgaggtggtggtcgagaagggcatgcagaatggacagaagatcaccttccctggtgaggctgatgaagcgcccgatactgtcactggagacattatcttcgtcctccagcagaaggagcatcccaagttcaagagaaagggagatgacctcttctacgagcacaccctgaacctcactgaggccctttgtggcttccagtttgttctcactcacttggacaacaggcagctgcttatcaagtccaagcccggtgaagttgtcaagcctgattcattcaaggctgtcaacgacgagggcatgccgatgtaccagcggccattcatgaaggggaagctctacatccacttctccgtggaattccccgactctttgaaccctgaccagtgcaaggccctggagaccgtcctcccgccaaggccggtgtcgcagtacaccgacatggagctcgacgagtgcgaggagaccatgccgtacgacgtgaacatcgaggaggagatgaggaggcggcagcaacagcagcagcaggaggcatacgacgaggacgaggacatgcacggcggcggcgcccagcgcgtgcagtgcgcgcagcagtaa

SEQ ID NO: 64082 - protein, 417 aa, Oryza sativa
MFGRAPKKSDNTRYYEVLGVPKDASQDDLKKAYRKAAIKNHPDKGGDPEKFKELAQAYEVLSDPEKREIYDQYGEDALKEGMGPGGGMHDPFDIFSSFFGGGFGGGSSRGRRQRRGEDVVHPLKVSLEELYNGTSKKLSLSRNVLCSKCNGKGSKSGASMKCSGCQGSGMKVQIRQLGPGMIQQMQHPCNECKGTGETISDKDRCPGCKGEKVAQEKKVLEVVVEKGMQNGQKITFPGEADEAPDTVTGDIIFVLQQKEHPKFKRKGDDLFYEHTLNLTEALCGFQFVLTHLDNRQLLIKSKPGEVVKPDSFKAVNDEGMPMYQRPFMKGKLYIHFSVEFPDSLNPDQCKALETVLPPRPVSQYTDMELDECEETMPYDVNIEEEMRRRQQQQQQEAYDEDEDMHGGGAQRVQCAQQ

SEQ ID NO: 64083 - DNA, 1506 bp, Brassica napus
  CDS (1)..(1506)
atggcagcagccctgggctctccctctctcatcccctcttctctctacttctccggcgatggtcccccgtccctctcttcgtcgtcgtcgtctttaagtttctcagtaggcggtaccaagaggagctacttatcggtttcctcttcttcatcttcaccttatggaagaaggggaatctctgggcggcgttcggtagtggtggtgtgtgctgcttcgggagactactacgctactctgggtgtgcctaaatctgccaacatcaaggagattaaatctgcctatcgccgcctcgcccgtcagtatcatcccgatgtgaacaaggaacctggcgcaaccgacaagttcaaggaaatcagtgctgcctatgaggtgttatcagatgatcaaaagagagcactctatgatcaatatggtgaagccggtctcaagacttctgttggaggaggaccttccgctacttacacgacaaatccctttgacctcttcgagacattctttggtgcgagtatgggcggatttcccgggatggaccaagctgactttggaacaactactcgccgctccagggtctccaaaggtgatgatttacggtatgacatcaccttacaactctcggaggctatttttggatctgagaaagaatttgatcttacgcatctggagacatgcgaagcttgtgctggcaccggtgctaaacctggatctaagatgagaatatgctccacttgtggtggccggggtcaagttatgagaactgagcaaaccccattcggcttgttttcacaggtttctgtatgtccaaactgtggtggagatggtgagatcatttcggaaaattgccgcaaatgctctggagaaggacgtgtgcgtattaaaaaaagtatcaaggtcaaaattcctccaggtgttagcgcaggtagcatccttagagttgccggggaaggtgattctggtcccagaggtggacctccaggagatttgtatgtatatcttgatgttgaagatgtccgtggaattcaaagggatggcataaacctcttatctactctttccatcacttaccttgatgctatactgggtgcggttgttaaggtgaaaacagtagaaggagacactgaactgcagatacctccaggtactcaacctggtgatgtgctggtcctggcaaagaaaggagcaccaaaactgaatagaccatctatccgcggtgaccacttgtttacagtcaaagttactataccaaatcaaataagtgctggagagcgggagttactggaggaacttgcttctctgagtgatacgtctagcaaccggctgcgaactcgtgctaagcctcagcaatccactactctaaacagtgcaactattagctcacaaaacagaacggatgaagttagggaggaaagccaagaaccggagcaagaaaacgacttgtggaagaacatcaaagattttgcaggatcggtcgcaaatggagccctgaaatggctgagagataacctctag

SEQ ID NO: 64084 - protein, 501 aa, Brassica napus
MAAALGSPSLIPSSLYFSGDGPPSLSSSSSSLSFSVGGTKRSYLSVSSSSSSPYGRRGISGRRSVVVVCAASGDYYATLGVPKSANIKEIKSAYRRLARQYHPDVNKEPGATDKFKEISAAYEVLSDDQKRALYDQYGEAGLKTSVGGGPSATYTTNPFDLFETFFGASMGGFPGMDQADFGTTTRRSRVSKGDDLRYDITLQLSEAIFGSEKEFDLTHLETCEACAGTGAKPGSKMRICSTCGGRGQVMRTEQTPFGLFSQVSVCPNCGGDGEIISENCRKCSGEGRVRIKKSIKVKIPPGVSAGSILRVAGEGDSGPRGGPPGDLYVYLDVEDVRGIQRDGINLLSTLSITYLDAILGAVVKVKTVEGDTELQIPPGTQPGDVLVLAKKGAPKLNRPSIRGDHLFTVKVTIPNQISAGERELLEELASLSDTSSNRLRTRAKPQQSTTLNSATISSQNRTDEVREESQEPEQENDLWKNIKDFAGSVANGALKWLRDNL

SEQ ID NO: 64085 - DNA, 1518 bp, Brassica napus
  CDS (1)..(1518)
atgtctcgctctactttgattccatctctaaacccagctcacagcttccgtcttcagttcccgctatccaatccttcattctcttcacctcccagttttctgcgtgttcggagatgcggaaatcgccgccgtggggtcaccatgtccgccggaaaggatcactacaaaactctgaatgtcgcccgcaacgccaccttgaaggagatcaaaagcgcgtacagggcactcgctcgcaagtatcatccggacatgaacaagaaccctggggctgaagataagttcaaacagattagtgctgcttatgaggtgttatctgatgaggagaagagatccgcgtatgatcgctttggcgaggctggtttagatggcaatttcaatgcttctcaggatgcttctcaaggagtggatccatttgatttgtatagtgcattctttggaggtggttctgatggattctttggagaaatgggtgattctggaggcatgggttttgatttcatgaataagagaagcatggaccttgacatccggtatgatatgcggttgagctttgaagagtctgtttttggagttaaacgtgagattgaggtttcttatttagcaacgtgtgatggctgtggaggcacaggtgctaaatctagtaaggacgttaaacagtgtagcaactgtggtggtaaagggcgtgtcatggacactcagagaacaccctttggaatcatgtctcaggtttccacttgctcaaaatgtggtggtgatgggagaatcataactgataaatgtcgaatgtgcaatggcaacgggagactacggtcttgtaaaaagatggatcttgttgtccctcctggtgtcagcgacagagccacaatgcggatgcgaggagaaggtaacgtggacaagagaagtggacgagctggagatctgttcatcgtgcttcaggttgctgagaagcgtgggatccggagggaagggcttaatctatactccaagatcaccatagatttcacagatgcaatacttgggacattcacaaaggtagaaacagttgaggggacaatggatcttcggattccgcctggaactcagccaggcgacacagtgaaactatataggaaaggtgttccagacacggatagaccttctgttcgaggtgatcattgctttgaagtgaaggttttgatccccaaaaacctaagcgagagggaacgcaagttggtagaggaattctcgtcgcttagaagatctagcagtagtactgaaactcgtcaagaggagcgtagatttgactcagagtccagagaaaaaccgtctttgtggcaaaaaatgaagagtttcataagaccagaagattcaaggacgaagtttgggacaatgagcttaaactcctcagtgccgctacaaagaatgaatgagacagggacgtcgattgttttccccttcttggctctgtgcgttatagcctcggctgttgcgttggttcagaaaaagggtaatcgcttgaaagaaaagaaagaaatctaa

SEQ ID NO: 64086 - protein, 505 aa, Brassica napus
MSRSTLIPSLNPAHSFRLQFPLSNPSFSSPPSFLRVRRCGNRRRGVTMSAGKDHYKTLNVARNATLKEIKSAYRALARKYHPDMNKNPGAEDKFKQISAAYEVLSDEEKRSAYDRFGEAGLDGNFNASQDASQGVDPFDLYSAFFGGGSDGFFGEMGDSGGMGFDFMNKRSMDLDIRYDMRLSFEESVFGVKREIEVSYLATCDGCGGTGAKSSKDVKQCSNCGGKGRVMDTQRTPFGIMSQVSTCSKCGGDGRIITDKCRMCNGNGRLRSCKKMDLVVPPGVSDRATMRMRGEGNVDKRSGRAGDLFIVLQVAEKRGIRREGLNLYSKITIDFTDAILGTFTKVETVEGTMDLRIPPGTQPGDTVKLYRKGVPDTDRPSVRGDHCFEVKVLIPKNLSERERKLVEEFSSLRRSSSSTETRQEERRFDSESREKPSLWQKMKSFIRPEDSRTKFGTMSLNSSVPLQRMNETGTSIVFPFLALCVIASAVALVQKKGNRLKEKKEI

SEQ ID NO: 64087 - DNA, 1266 bp, Linum usitatissimum
  CDS (1)..(1266)
atgtttgggagagctccgaagaaaagcgacaataccaaatactatgagatccttggggtttcccagagcgcatcgcaggatgatctgaagaaggcttatcgcaaagcagccatcaagaatcatcccgataagggtggtgaccccgagaagttcaaagagttggcacaagcttatgaagttcttagtgacccagagaaaagggagatatatgatcagtatggagaggatgccctcaaggaaggaatgggaggaggcggtggcggccacgatccatttgacatcttccagtcattctttggcggtgggggcggtaatccttttggtgctggtgggagcagtaggggccgaaggcagaggaggggtgaagatgtcgtccatcctctcaaggtttcattggaggatctctacaatggcacatctaagaagctatctctttctcgcaatgcactctgttccaagtgcaagggtaagggatccaagtcaggccagtcattgaagtgttctggttgccagggttcaggaatgaaggtttccattagacaactcggaccttccatgattcagcaaatgcagcatgcttgcaacgagtgcaaaggtaccggtgagaagatcaacgacaaagatcgatgcctgcaatgcaagggtgagaaggttatgcaggagaagaaagtcctggatgttgtcgttgagaagggaatgcaaaatggacagaggattaccttccctggtgaagctgatgaagctcctgacacagtcacaggagacattgttttcgtgctacaacagaaggaacatcctaagttcaagcgaaagggggatgatctgtttgttgagcacaccctatctcttacagaggctctatgtggcttccagtttgcattgactcatttggatggacgacagctcctaataaaatcccaacccggggaagtagtcaaacctgatcaattcaaggcaataaacgacgaagggatgccaatgtaccagcgtcccttcatgagaggcaagatgtacatccattttggcgttgattttccggactctctttctcctgaccagagcaaagccctggagggtgtccttcccgcaaggtcatcggttcagctctcggacatggagctggacgagtgcgaggagacaacactgcatgatgtgaacattgaagatgaaatgaggcggaagcaacaggcagcccaggaggcctacgatgaagatgatgaggatatgcatggaggagcgcagagggtgcaatgtgcccagcaataa

SEQ ID NO: 64088 - protein, 421 aa, Linum usitatissimum
MFGRAPKKSDNTKYYEILGVSQSASQDDLKKAYRKAAIKNHPDKGGDPEKFKELAQAYEVLSDPEKREIYDQYGEDALKEGMGGGGGGHDPFDIFQSFFGGGGGNPFGAGGSSRGRRQRRGEDVVHPLKVSLEDLYNGTSKKLSLSRNALCSKCKGKGSKSGQSLKCSGCQGSGMKVSIRQLGPSMIQQMQHACNECKGTGEKINDKDRCLQCKGEKVMQEKKVLDVVVEKGMQNGQRITFPGEADEAPDTVTGDIVFVLQQKEHPKFKRKGDDLFVEHTLSLTEALCGFQFALTHLDGRQLLIKSQPGEVVKPDQFKAINDEGMPMYQRPFMRGKMYIHFGVDFPDSLSPDQSKALEGVLPARSSVQLSDMELDECEETTLHDVNIEDEMRRKQQAAQEAYDEDDEDMHGGAQRVQCAQQ

SEQ ID NO: 64089 - DNA, 1272 bp, Brassica napus
  CDS (1)..(1272)
atgttcagaagaggaccttcgagcaagagcgacaacaccaagttctacgagatcctcggcgtccccaagaccgcctcacctgaagatctcaaaaaggcttacaagaaagccgccatcaaaaaccatcccgacaagggtggagatccagagaagttcaaggagctagctcaggcttatgaggttctcagcgatccggagaagcgtgagatctatgatcagtacggtgaggatgcgctcaaggaaggaatgggtggtggaggcggtggtcatgacccctttgacatcttctcctccttctttggtggtggtggtggacaccctttcggaggtggcagcagccgtggaaggaggcagaggcgtggtgaagatgttgttcaccctctgaaggtttctctagaggatctttatctcggaacaacgaagaagctctcgctttcaaggaaggctttgtgctcaaagtgtaacggaaagggttcgaagtctggagcttcgatgacatgcggtggatgccagggatcggggatgaaggtctccatcaggcagattggacctgggatgattcagcagatgcagcatccttgtcatgactgcaagggcactggagagaccatcaacgatcgggataggtgtccacagtgcaaaggagagaaggtcgtctccgagaagaaggtgcttgaagtagctgtggagaaggggatgcaacacagccagaagattacattcagaggacaagcagatgaagcgcctgatacagtcactggagatatagtcttcgtcattcagcagaaggagcactcaaccttcaagagaaagggagatgatctcttcgtggagcacaccctctctctaacggaagccctctgtgggttccagtttgtcttgacacacttggacacaaggcagcttctcatcaaatcgaatcccggggaggttgtgaagccagattcgtacagggcgataagtgacgaggggatgcctatacaccaaaggcccttcatgaagggtaagctgtacatccacttcactgtagagttcccggacagtctgagcctggaccagacaaaggccattgaagcggtcttgccaaggcgtgcaaatgcgactctgagcgacatggagatagacgagtgcgaggagacgacgctgcacgatgtgaacattgaggatgagatgaggaggaaggctcaagctcaaagagaggcttatgatgatgacgacgatgatgaggaaggcccaggcggtgctcagcgtgtgcaatgcgcccagcagtga

SEQ ID NO: 64090 - protein, 423 aa, Brassica napus
MFRRGPSSKSDNTKFYEILGVPKTASPEDLKKAYKKAAIKNHPDKGGDPEKFKELAQAYEVLSDPEKREIYDQYGEDALKEGMGGGGGGHDPFDIFSSFFGGGGGHPFGGGSSRGRRQRRGEDVVHPLKVSLEDLYLGTTKKLSLSRKALCSKCNGKGSKSGASMTCGGCQGSGMKVSIRQIGPGMIQQMQHPCHDCKGTGETINDRDRCPQCKGEKVVSEKKVLEVAVEKGMQHSQKITFRGQADEAPDTVTGDIVFVIQQKEHSTFKRKGDDLFVEHTLSLTEALCGFQFVLTHLDTRQLLIKSNPGEVVKPDSYRAISDEGMPIHQRPFMKGKLYIHFTVEFPDSLSLDQTKAIEAVLPRRANATLSDMEIDECEETTLHDVNIEDEMRRKAQAQREAYDDDDDDEEGPGGAQRVQCAQQ

SEQ ID NO: 64091 - DNA, 1266 bp, Brassica napus
  CDS (1)..(1266)
atgttcagaagaggacctccgagtaagagcgacaacaccaagttctacgagatcctcggcgtccccaagaccgcatcacccgaagatctcaaaaaggcttacaagaaagccgccatcaaaaaccatcccgacaagggtggagatcccgaaaagttcaaagagatagctcaggcttatgaagtcctaagtgatccggagaagcgtgagatctacgatcagtatggagaggatgcactcaaggagggaatgggcggtggaggcggtgggcatgatccgtttgatatcttctcgtccttctttggtggtggtggtagcccatttggaggtggcagcagccgtggaaggaggcagaggcgtggtgaagatgtggttcaccctctgaaggtttcactagaagacctttatctcggaacaacgaagaagctctcactttctaggaatactttgtgctccaagtgtaacggaaagggttcaaagtctggagcttcatcaacatgtagtggatgtcaaggatctggaatgaaggtttcgatcagacagcttggaccgggaatgattcagcagatgcagcacccttgtcatgattgcaaaggtacaggagagaccatcaatgaccgtgacaggtgtccacagtgcaaaggggataaggttgtatctgagaagaaggtgcttgaagtagctgtggaaaagggaatgcagcatagccagaagatcacattcagtggacaagcagatgaagcgcctgatacagtcactggtgatatcgtgttcgtcattcagcagaaggagcacccaaagttcaagagaaagggagatgatctctttgtggagcataccctctctcttacagaagccctctgtgggttccagtttgtcttgacccatttggacaaaaggcagcttctcatcaaatccagtcccggggaggttgtgaagccagattcatacagggcgataaccgatgagggaatgcctgtgcaccagagaccgttcatgaagggcaagctttacatccacttcacggtcgacttccctgactcgctgagccctgaccagacaaaggccattgaagcggttttgccgaagccaaaggcggatctgagcgacatggaaatagacgaatgcgaggagacgacgctgcacgatgtgaacattggggatgagatgagaaggaaggctcaagctcaaagagaggcttatgatgatgacgatgatgatgaagaaggcccaggtggtgctcagcgtgtgcaatgtgcccagcagtga

SEQ ID NO: 64092 - protein, 421 aa, Brassica napus
MFRRGPPSKSDNTKFYEILGVPKTASPEDLKKAYKKAAIKNHPDKGGDPEKFKEIAQAYEVLSDPEKREIYDQYGEDALKEGMGGGGGGHDPFDIFSSFFGGGGSPFGGGSSRGRRQRRGEDVVHPLKVSLEDLYLGTTKKLSLSRNTLCSKCNGKGSKSGASSTCSGCQGSGMKVSIRQLGPGMIQQMQHPCHDCKGTGETINDRDRCPQCKGDKVVSEKKVLEVAVEKGMQHSQKITFSGQADEAPDTVTGDIVFVIQQKEHPKFKRKGDDLFVEHTLSLTEALCGFQFVLTHLDKRQLLIKSSPGEVVKPDSYRAITDEGMPVHQRPFMKGKLYIHFTVDFPDSLSPDQTKAIEAVLPKPKADLSDMEIDECEETTLHDVNIGDEMRRKAQAQREAYDDDDDDEEGPGGAQRVQCAQQ

SEQ ID NO: 64093 - DNA, 1314 bp, Glycine max
  CDS (1)..(1314)
atggcaataacaccttttagtagtacatctgctgcacaatggggaattcatcctcagctgttactaagatccagtatcacgggcaaggttgcatcatccagccacaattctactggcagggtaagttttatggctgcaacaagttcaagctttttttctcaagattccacactactcaatgtgggtgcaccccaaacttttaatcatcgcaagggatcaaggttaattgttagagcaaatgctgattattattctgtccttggggtttcaagaaatgctagtaaatctgaaattaagagtgcatatcggaagcttgcccggaattatcatccagatgtcaacaaagaacctggagctgaacaaaaatttaaggaaattagcaacgcatatgaggtgttatcagatgatgagaaacgatccatatatgacagatttggagaggctgggcttaaaggttctggaatggggatgggggatttcagcaatccatttgatctgtttgaatcactgtttgagggcatgaatcgcggtgcaggttccagaggttcttggaatggagcaattgatggtgaagatgagtattacagtcttgttttgaattttaaagaagcagtttttggcatagaaaaagagatagagataagccgattagagagctgtggaacttgcaatggttcaggggctaaaccagggactacaccatccagatgtagcacttgtggaggtcaaggccgggttgtctcatcaacaagaactccattaggcatcttccagcagtcaatgacatgctcttcatgcaatgggactggagaaatttcaacaccttgcaatacatgttctggggatggtcggctgaggaaatcaaaacggataagcctgaaggtcccagctggtgtggactctggtagtcgtctaagggtccggaatgaggggaatgctggaaggaaaggtggttcccctggtgacctctttgtagttattgaggttatcccagatcccatccttaaacgtgatgacaccaacattttatacacctgcaaggtttcgtatattgatgcaatcctggggactacaattaaggttcctactgtagatggaacggtcgatttgaaaattcctgctgggacacaaccgaacacaacacttgttatggctaagaaaggtgttcccttcctgaataaagacaatatgaggggtgatcaattggttcgtgtgcaagttgaaatccctaaaagactgagcaatgatgagagaaagcttattgaagaacttgctgatttaagcaaaggcaagactgccacgggtaggagataa

SEQ ID NO: 64094 - protein, 437 aa, Glycine max
MAITPFSSTSAAQWGIHPQLLLRSSITGKVASSSHNSTGRVSFMAATSSSFFSQDSTLLNVGAPQTFNHRKGSRLIVRANADYYSVLGVSRNASKSEIKSAYRKLARNYHPDVNKEPGAEQKFKEISNAYEVLSDDEKRSIYDRFGEAGLKGSGMGMGDFSNPFDLFESLFEGMNRGAGSRGSWNGAIDGEDEYYSLVLNFKEAVFGIEKEIEISRLESCGTCNGSGAKPGTTPSRCSTCGGQGRVVSSTRTPLGIFQQSMTCSSCNGTGEISTPCNTCSGDGRLRKSKRISLKVPAGVDSGSRLRVRNEGNAGRKGGSPGDLFVVIEVIPDPILKRDDTNILYTCKVSYIDAILGTTIKVPTVDGTVDLKIPAGTQPNTTLVMAKKGVPFLNKDNMRGDQLVRVQVEIPKRLSNDERKLIEELADLSKGKTATGRR

SEQ ID NO: 64095 - DNA, 1332 bp, Glycine max
  CDS (1)..(1332)
atgctttgctcccatggcgtcaccctcattaatcgccttgctcgtcgatctttctgtcacgccaacgattctgtttatcaagcacttttccaaaagggttatagggcattgaactctgggccttgcagtccagctagagttgttggtacttttgcatccaatgttggagatgccgttaatttaaagaaatggttgctattgggagcggcaaataaatattggggggcatctagatcaattcatggctcggcatcattggcaagagactattatgatgttcttggtgtgagtaagaatgcaagttcttctgaaataaagaaagcttactatgggcttgcaaaaaagctccatccagatacaaacaaagatgatcctcaagctgaaaagaagtttcaagaagtttcaatagcatatgaggttttgaaggatgaggaaaggcgtcaacagtatgatcagcttggtcatgatgcttatgtaaaccaacaaagcactggttttggaggcgagggtggcttcaatccttttgagcagatattccgtgatcatgattttgtcaagagcttcttccatgagaatattggtggagaggatgtcaagacttttattgaactatcttttatggaagcagtacaagggtgcaccaaaactttgacatttcaaacggatgtgctttgtaatgcttgtggtggcagtggtgttcctcctggtactaggcctgaaacttgtaagccgtgtaaagggtccagagtgttatttgtacaagctggcatattcagaatggagagtacttgtggtacctgcaaaggaactggaaaaattgtatcggattactgcaagtcttgcaggggtgcaaagattgtcaaaggaatgaagtcgatcaagttggatattatgcctgggatagacagcaacgagaccataaaggtttatagaagtggtggagcagatcctgatggagatcaacctggtgatctttatgttactatcaaggttagagaagaccctgtttttcgcagagaaggatctgatattcatgtagatgctgttttaagtatcactcaggcaattttggggggaactattcaagtcccaactcttactggagatgttgtacttaaggttcgcccaggcacccaacctggtcagaaagtggttttgaaaaagaaaggggtcaagactaaaaattcttgcacatttggggatcaatatgttcattttaatgtcaacatcccaacaaacctgacacagagacagcgtgaattaattgaagagtttgccaaggaaggacaagaggaatgtgataaacggagagctgcttcggcttctggttga

SEQ ID NO: 64096 - protein, 443 aa, Glycine max
MLCSHGVTLINRLARRSFCHANDSVYQALFQKGYRALNSGPCSPARVVGTFASNVGDAVNLKKWLLLGAANKYWGASRSIHGSASLARDYYDVLGVSKNASSSEIKKAYYGLAKKLHPDTNKDDPQAEKKFQEVSIAYEVLKDEERRQQYDQLGHDAYVNQQSTGFGGEGGFNPFEQIFRDHDFVKSFFHENIGGEDVKTFIELSFMEAVQGCTKTLTFQTDVLCNACGGSGVPPGTRPETCKPCKGSRVLFVQAGIFRMESTCGTCKGTGKIVSDYCKSCRGAKIVKGMKSIKLDIMPGIDSNETIKVYRSGGADPDGDQPGDLYVTIKVREDPVFRREGSDIHVDAVLSITQAILGGTIQVPTLTGDVVLKVRPGTQPGQKVVLKKKGVKTKNSCTFGDQYVHFNVNIPTNLTQRQRELIEEFAKEGQEECDKRRAASASG

SEQ ID NO: 64097 - DNA, 1260 bp, Zea mays
  CDS (1)..(1260)
atgttcgggcgcgcgccgaagaagagcgacaacaccaagtactacgagatcctcggggtgcccaagtcggcgtcccaggacgatctcaagaaggcctaccgcaaggcagctatcaagaaccaccccgacaagggcggtgaccccgagaagttcaaggagctcgcacaagcctatgaggttttgagtgatccagagaaacgtgagatttatgatcagtatggtgaagatgcccttaaggaaggaatgggcggtggaggatcccatgttgatccatttgacatcttctcatcattttttggaccctcttttggaggaggtggtggaagcagcaggggaagaaggcaaaggaggggagaagatgtagtccacccacttaaagtttctctggaagatctttacaatggcacctcaaagaagctctctctttcgcgcaatgtcatctgctccaagtgcaagggcaagggctcgaagtctggtgcttcaatgaggtgccctggttgccagggctcaggcatgaaagtcactattcgtcagctgggcccttccatgatacagcagatgcagcagccttgcaatgagtgcaaggggactggagagagcatcaatgagaaggaccgctgcccagggtgcaagggtgagaaggtcgttcaagagaagaaggttcttgaggttcatgttgagaaggggatgcaacacaaccagaagatcaccttccctggtgaagctgatgaagcgcctgatactgtcactggagacattgtattcgtcctccagcagaaggatcactccaaattcaaaagaaagggtgaagatctcttctatgagcacaccttgtctctgaccgaagcactatgtgggttccaatttgttcttacacatctggacaacaggcagcttctcatcaaatcagaccctggtgaagttgttaaacctgaccaattcaaggcgattaatgatgaggggatgccaatttaccagaggcctttcatgaaggggaagctgtacatccatttcacggtggagttccctgactcgctggcaccagagcagtgcaaggctctcgagacagtacttccaccaaggccttcatccaagctgacagacatggagatagatgaatgcgaggagacgactatgcatgatgtgaacaacatcgaggaagagatgcgcaggaagcaagctcacgctgcccaggaggcgtacgaggaggacgacgagatgccgggcggagcccagagagtgcagtgcgcgcaacagtaa

SEQ ID NO: 64098 - protein, 419 aa, Zea mays
MFGRAPKKSDNTKYYEILGVPKSASQDDLKKAYRKAAIKNHPDKGGDPEKFKELAQAYEVLSDPEKREIYDQYGEDALKEGMGGGGSHVDPFDIFSSFFGPSFGGGGGSSRGRRQRRGEDVVHPLKVSLEDLYNGTSKKLSLSRNVICSKCKGKGSKSGASMRCPGCQGSGMKVTIRQLGPSMIQQMQQPCNECKGTGESINEKDRCPGCKGEKVVQEKKVLEVHVEKGMQHNQKITFPGEADEAPDTVTGDIVFVLQQKDHSKFKRKGEDLFYEHTLSLTEALCGFQFVLTHLDNRQLLIKSDPGEVVKPDQFKAINDEGMPIYQRPFMKGKLYIHFTVEFPDSLAPEQCKALETVLPPRPSSKLTDMEIDECEETTMHDVNNIEEEMRRKQAHAAQEAYEEDDEMPGGAQRVQCAQQ

SEQ ID NO: 64099 - DNA, 1254 bp, Zea mays
  CDS (1)..(1254)
atgttcgggcgcgcgccgaagaagagcgacaacacccggtactacgagatcctgggggtttccaaggacgcgtcacaggatgacctcaagaaggcctaccgcaaggccgccatcaagaaccaccccgacaagggcggcgaccccgagaagttcaaggagctagctcagggttatgaggtcctcagcgaccctgaaaagagagagatctatgaccaatatggtgaggatgccctcaaggagggaatgggaggcggtggtgggatgcatgatccctttgacatattccagtcattctttggtggtggaagcccttttggaggtggcagcagtaggggcagaaggcaacggcggggagatgatgtggttcatcctctgaaggtttctctggaggatttgtacaatggcacatcaaagaagctctctctgtcccgcaatgtcctctgctccaagtgcaatggtaagggttccaagtctggagcttcgtcgaggtgtgctggttgccaaggttctggctttaaggtccaaatccggcagttggggcctggaatgatccagcaaatgcagcatccttgcaacgagtgcaagggttctggagagacaatcagcgacaaggatagatgcccacagtgcaagggtgataaagttgtgcaggagaagaaggttcttgaagtgtttgtggagaaaggcatgcagaatgggcagaagatcacattccctggtgaagctgatgaagcgcctgacactgtcactggagatatcatttttgttctccagcagaaggagcatcccaagttcaagagaaagggcgatgacctcttctacgagcacaccctgaccttgactgaatctctgtgtggcttccagtttgttgtgactcacttggataacaggcagctgctgatcaaatcaaatccgggcgaagttgtgaagcctgattctttcaaggcgatcaacgacgaaggcatgcccatgtaccagaggccgttcatgaagggcaagctgtacatccacttctcggtggagttcccggactcgctgagcccggagcagtgcaaggccctggaggctgtgctcccgcccaagccggtgtcgcagtacaccgacatggagctggacgagtgcgaggagacgatgccctatgacgtgaacatcgaagcggagatgcggaggcggcagcagcagcaccaggaggcctacgacgaggatgaggacatgccgggcggcgcgcagagggtgcagtgcgcccagcagtag

SEQ ID NO: 64100 - protein, 417 aa, Zea mays
MFGRAPKKSDNTRYYEILGVSKDASQDDLKKAYRKAAIKNHPDKGGDPEKFKELAQGYEVLSDPEKREIYDQYGEDALKEGMGGGGGMHDPFDIFQSFFGGGSPFGGGSSRGRRQRRGDDVVHPLKVSLEDLYNGTSKKLSLSRNVLCSKCNGKGSKSGASSRCAGCQGSGFKVQIRQLGPGMIQQMQHPCNECKGSGETISDKDRCPQCKGDKVVQEKKVLEVFVEKGMQNGQKITFPGEADEAPDTVTGDIIFVLQQKEHPKFKRKGDDLFYEHTLTLTESLCGFQFVVTHLDNRQLLIKSNPGEVVKPDSFKAINDEGMPMYQRPFMKGKLYIHFSVEFPDSLSPEQCKALEAVLPPKPVSQYTDMELDECEETMPYDVNIEAEMRRRQQQHQEAYDEDEDMPGGAQRVQCAQQ

SEQ ID NO: 64101 - DNA, 1290 bp, Zea mays
  CDS (1)..(1290)
atgcgcctccccgccggcgcacgcctcgcgctcctgctcgcccgccgctccctctcctcctccccccgcatcccgcgggtgcacacagggatatggagcgaggcgccctcccggagctctcccttctctccgccgagcagcgcccgcaggtccttccacgggaccaggccggtggcggcaagggactactacgatgtgctcggcgtcagcaagagcgccagccaggcggagataaaaaaggcctattatgggcttgcaaagaagctccatccagacacaaataaaggtgatgcggatgcagaacgcaagtttcaagaggttcaacgagcttatgagactctaaaggatgaacaaaaaagatcattatatgatcaggttggccctgatcagtatgagaaaactgcttctggcggaggcggaactggcttcgagggtggttttggaaatccatttgaggatattcttggtggtggcggtggcggtggtggaatgaatgatttctttaggaacatttttggggatagggactttagaggacgagatgttaaggttgcactcgaactatcatttatggaagcagttcaagggtgcagcaaaacggtcaccttccaaacgtctgtaacatgtgaaatctgtggtggagccggtgtgcctcctggaaccacacctgaaacatgtctatcttgcaggggttcaggatttatattcatgcaaaccgggcccttcaggatgcaatcaacctgcacaaaatgtggtggttctgggaaaactgtgaaggaattctgcaaggcatgcagaggaaacaaagttgtgcctggaaggaaatcagtccgccttgacatactgcctggtttggataatgaggataccataaaggtggttcgatcaggtggagaagacccagatggccgtccaggtgatctttatgtgaccctcgaggttcgtgaggatcctgttttccgaagagagaaaggtgatattcatgttgatgctgtcctgaatgtgactcaggcaattttgggagggacagttcaagtcccaactctcagtggagacgttgttctaaaggtcaagcccggtactcaacctggtcagaaggtagttctgagaggaaaagggatcaagacaagaaactcaccgtactacggagatcaatatgtccatttcaatgtcaacatccccgaaaatttgacgtctagacagcgggagctgatcgaggaattcgcgaaggaggagcaaggcgaagacgagaaggacgccaaggcagcagctggagcatcggggggatag

SEQ ID NO: 64102 - protein, 429 aa, Zea mays
MRLPAGARLALLLARRSLSSSPRIPRVHTGIWSEAPSRSSPFSPPSSARRSFHGTRPVAARDYYDVLGVSKSASQAEIKKAYYGLAKKLHPDTNKGDADAERKFQEVQRAYETLKDEQKRSLYDQVGPDQYEKTASGGGGTGFEGGFGNPFEDILGGGGGGGGMNDFFRNIFGDRDFRGRDVKVALELSFMEAVQGCSKTVTFQTSVTCEICGGAGVPPGTTPETCLSCRGSGFIFMQTGPFRMQSTCTKCGGSGKTVKEFCKACRGNKVVPGRKSVRLDILPGLDNEDTIKVVRSGGEDPDGRPGDLYVTLEVREDPVFRREKGDIHVDAVLNVTQAILGGTVQVPTLSGDVVLKVKPGTQPGQKVVLRGKGIKTRNSPYYGDQYVHFNVNIPENLTSRQRELIEEFAKEEQGEDEKDAKAAAGASGG

SEQ ID NO: 64103 - DNA, 1269 bp, Zea mays
  CDS (1)..(1269)
atgtttggacgcatgccaaggaagagtagtaacaataccaagtattacgaggttcttggtgtgtctaagaccgcaagtcaggatgagcttaagaaagcatacagaaaagctgccataaaaaaccatcctgataagggtggagaccctgagaagtttaaagagctgtctcaagcttatgatgttcttagtgacccggagaagagggagatctatgaccagtatggagaagatgcccttaaggaaggaatgggaggaggcagcagcagtgatttccatagcccttttgacatttttgagcaactttttccgggttctagcacctttgggggtggtagctcaagaggacgcagacaaaagcgtggtgaagatgtggtgcatactatgaaggtttccttagacgatctgtacaatgggacaaccaagaaactatctttatcgcggagtgctttgtgctccaagtgcaaggggaaaggatccaagagtggggcatcaggaacatgccatggttgtcgtggtgctggaatgagaacaatcacaagacagataggccttggcatgatccaacagatgaacactgtttgccctgaatgcaaaggatcaggtgagatcataagtgacaaggacaaatgcccaagctgtaaaggaaacaaggtagtccaggagaagaaggtgttagaggttcatgtggagaaaggaatgcaacataaccaaaagattgtattccagggtcaagctgatgaagctcctgatacggttacaggagacattgtttttgtcttgcaacttaaagaccatccaaaatttaagaggatgtacgatgacttatatgttgagcacacaatctctctcaccgaagcattgtgtggcttccagtttgttcttactcatcttgatgggcgacagcttctgatcaaatctgaccccggggaggttattaaaccaggtcaacacaaggccattaacgatgaaggtatgcctcagcatggccgtcctttcatgaagggccgtctgtttgttgaattcaacgtggtgtttcccgagcctggtgcgctctcccctgcccagtgccgatcgttggagaagatccttccgccgaaaccagggagccaactgtcggacatggagctggaccagtgcgaggagaccacccttcacgatgtcaacattgaagaggagatgaggcgcaggcagcagcagaagaagcaggaagcctacgatgaagacgaggaggaggatgctcaaccaagggtgcaatgtgcccagcagtaa

SEQ ID NO: 64104 - protein, 422 aa, Zea mays
MFGRMPRKSSNNTKYYEVLGVSKTASQDELKKAYRKAAIKNHPDKGGDPEKFKELSQAYDVLSDPEKREIYDQYGEDALKEGMGGGSSSDFHSPFDIFEQLFPGSSTFGGGSSRGRRQKRGEDVVHTMKVSLDDLYNGTTKKLSLSRSALCSKCKGKGSKSGASGTCHGCRGAGMRTITRQIGLGMIQQMNTVCPECKGSGEIISDKDKCPSCKGNKVVQEKKVLEVHVEKGMQHNQKIVFQGQADEAPDTVTGDIVFVLQLKDHPKFKRMYDDLYVEHTISLTEALCGFQFVLTHLDGRQLLIKSDPGEVIKPGQHKAINDEGMPQHGRPFMKGRLFVEFNVVFPEPGALSPAQCRSLEKILPPKPGSQLSDMELDQCEETTLHDVNIEEEMRRRQQQKKQEAYDEDEEEDAQPRVQCAQQ

SEQ ID NO: 64105 - DNA, 1263 bp, Glycine max
  CDS (1)..(1263)
atgtttgggcgtggtggaccaaggaggagtgataactccaaatattatgatattctcgggatttccaaaaatgccagtgaagatgaaatcaagaaggcctatagaaaggcggctatgaagaaccatccagataagggaggagatcctgaaaagtttaaggagttaggtcaagcatatgaagttttaagtgatcctgagaagaaagaactgtatgaccagtatggtgaagatgcccttaaagaagggatggggggaggaggctcgtttcataatccatttgatatatttgaatcattttttggaggagcaagctttggtggtggtggtagttcccgaggtagaagacagaagcatggtgaagatgtggtgcattctttaaaggtttccttggaggacgtttataatggcacaacaaagaaactatctctttctagaaacatattatgcccaaaatgtaaagggaaaggttcaaaaagtggaactgctggtaggtgttttggatgcaaaggcactggtatgaaaattacaagaaggcagattggactaggcatgattcaacaaatgcaacatgtctgtcctgactgcagaggatctggtgaggtcattaacgagagagataaatgtcctctgtgcaaaggaaacaaggtttcccaggaaaagaaggtgctggaagtgcatgttgagaagggcatgcagcagggtcagaagattgtttttgaaggacaagctgatgaagctcctgacacaatcacaggagacattgtttttgtattgcaagtaaaggatcacccaaagttcagaagggagcaggatgacctctatattgatcacaatctcagcttaaccgaggcactctgtggcttccagtttgctgtcaaacatcttgatggtaggcaactattgatcaaatcaaaccctggggaagtcatcaaaccaggtcaatataaagcaataaatgatgagggaatgccacaacacaataggccattcatgaagggtcgcctttacatccagtttaatgttgatttcccagactcagggtttctttcccctgaccaatgccagttactggaaaaggtgttacctcaaaagagcagcaagcatgtgtcagacatggagctggatgattgtgaggagaccactttgcatgatgtcaactttaaggaggagatgagacgaaagcagcaacagcaatatcgcgaggcatatgatgaagatgatgatgagccatctggtcaacgagtgcaatgtgctcaacagtag

SEQ ID NO: 64106 - protein, 420 aa, Glycine max
MFGRGGPRRSDNSKYYDILGISKNASEDEIKKAYRKAAMKNHPDKGGDPEKFKELGQAYEVLSDPEKKELYDQYGEDALKEGMGGGGSFHNPFDIFESFFGGASFGGGGSSRGRRQKHGEDVVHSLKVSLEDVYNGTTKKLSLSRNILCPKCKGKGSKSGTAGRCFGCKGTGMKITRRQIGLGMIQQMQHVCPDCRGSGEVINERDKCPLCKGNKVSQEKKVLEVHVEKGMQQGQKIVFEGQADEAPDTITGDIVFVLQVKDHPKFRREQDDLYIDHNLSLTEALCGFQFAVKHLDGRQLLIKSNPGEVIKPGQYKAINDEGMPQHNRPFMKGRLYIQFNVDFPDSGFLSPDQCQLLEKVLPQKSSKHVSDMELDDCEETTLHDVNFKEEMRRKQQQQYREAYDEDDDEPSGQRVQCAQQ

SEQ ID NO: 64107 - DNA, 1263 bp, Glycine max
  CDS (1)..(1263)
atgtttgggcgtggtggaccaaggaggagtgacaactccaaatattatgatattctcggggtttccaaaaatgccagtgaagatgaaatcaagaaggcctatagaaaggctgctatgaagaaccatccagataagggaggagatcctgaaaagttcaaggagttaggtcaagcatatgaagttttaagtgatcctgagaagaaagacctgtatgaccagtatggtgaagatgcccttaaagaaggaatggggggaggaggctcgtttcataatccatttgatatatttgaatcattttttggtggagcaagctttggtggtggtggtagttcccgaggtagaagacagaagcatggtgaagatgtggtgcattctttaaaggtttccttggaggacgtctataacggcacaacaaagaaactatctctttctagaaacgtattctgctcaaaatgtaaagggaaaggttcaaaaagtggaacagctggtaggtgttttggatgccaaggcactggtatgaaaattacaagaaggcagattggactaggcatgattcaacaaatgcaacatgtctgtcctgactgcagaggatctggtgaggtcattaacgagagagataaatgtcctcagtgcaaaggaaacaaaatttcccaggaaaagaaggtgctggaagtgcatgttgagaagggtatgcagcagggtcagaagattgtttttgaaggacaagctgatgaagctcctgacacaatcacaggagatattgtttttgtattgcaagtaaaggatcacccaaggttcagaagggaacaagatgacctctttattgatcaaaatctcagcttaactgaggcactctgtggctttcagtttgccgtcaaacatcttgatggtaggcaactattgatcaaatcaaatcctggggaagtcatcaagccaggtcaatataaagcattaaatgatgagggaatgccacaacacaataggccattcatgaagggtcgcctttacatccaatttaatgttgatttccccgactcagggtttctttcccctgaccaatgccagttattggaaaaggtgttgcctcagaagagcagcaagcacgtgtcagatatggagctggatgattgtgaggagaccactttgcatgatgtcaactttaaggaggagatgagacgaaagcagcaacagcaacaccgcgaggcatacgacgaagatgatgatgagccatctggtcaccgagtgcaatgtgctcaacagtag

SEQ ID NO: 64108 - protein, 420 aa, Glycine max
MFGRGGPRRSDNSKYYDILGVSKNASEDEIKKAYRKAAMKNHPDKGGDPEKFKELGQAYEVLSDPEKKDLYDQYGEDALKEGMGGGGSFHNPFDIFESFFGGASFGGGGSSRGRRQKHGEDVVHSLKVSLEDVYNGTTKKLSLSRNVFCSKCKGKGSKSGTAGRCFGCQGTGMKITRRQIGLGMIQQMQHVCPDCRGSGEVINERDKCPQCKGNKISQEKKVLEVHVEKGMQQGQKIVFEGQADEAPDTITGDIVFVLQVKDHPRFRREQDDLFIDQNLSLTEALCGFQFAVKHLDGRQLLIKSNPGEVIKPGQYKALNDEGMPQHNRPFMKGRLYIQFNVDFPDSGFLSPDQCQLLEKVLPQKSSKHVSDMELDDCEETTLHDVNFKEEMRRKQQQQHREAYDEDDDEPSGHRVQCAQQ

SEQ ID NO: 64109 - DNA, 1233 bp, Glycine max
  CDS (1)..(1233)
atgtttgggagggcaccgaagaagagcgataatacgaggtactacgaaatcctcggcgtctcgaagaacgcttcgcaggatgatctgaagaaggcttacaagaaagccgccatcaagaatcaccctgacaagggcggtgatcccgagaagtttaaagagctggcacaagcatatgaggttctgagtgaccctgagaagcgtgagatatatgatcagtatggtgaagatgcgcttaaggaaggaatgggtggtggcggtggccatgatccgtttgatatcttttcatctttctttggaggtggaagtagtcgaggtaggaggcagaggcgcggagaagatgtggttcaccctctcaaggtctctctggaggacctttatctcgggacttctaagaagctctccctctccagaaatgtcatatgctccaagtgcactggtaagggttctaagtctggtgcttcgatgaagtgtgctggttgtcaaggaactggtatgaaggtttctataagacatcttggcccgtccatgattcagcagatgcagcatgcttgcaatgaatgcaagggtactggagaaaccatcaacgacagagatcgctgcccacagtgcaagggagaaaaggttgtgcaggagaaaaaagtccttgaagttattgtggaaaagggaatgcagaacgggcagaagattacattccctggcgaagctgatgaagcgccagacacaattactggggatattgtctttgtccttcagcagaaggaacatcccaaattcaaaagaaaggctgaagatctttttgtagagcacattttgtcccttactgaagccttatgtggcttccaatttgtgctgactcacttggatggccgtcagcttcttattaaatcaaatcctggggaagttgtcaagcctgattcatacaaggctataaatgatgagggaatgcccatgtatcagaggtcattcatgaaggggaagctttacattcacttcactgtggagttcccagattccctaaaccctgaccaggttaaggccttggaagctgttctgccaccaaagccttcttcacaattgacagacatggagctggatgaatgtgaggaaacaacactccatgatgtcaacatggaggaggagactaggaggaagcaacaacaagctcaggaggcatatgatgaggatgatgacatgcctggtggtgcacagagggtacagtgtgcccagcagtaa

SEQ ID NO: 64110 - protein, 410 aa, Glycine max
MFGRAPKKSDNTRYYEILGVSKNASQDDLKKAYKKAAIKNHPDKGGDPEKFKELAQAYEVLSDPEKREIYDQYGEDALKEGMGGGGGHDPFDIFSSFFGGGSSRGRRQRRGEDVVHPLKVSLEDLYLGTSKKLSLSRNVICSKCTGKGSKSGASMKCAGCQGTGMKVSIRHLGPSMIQQMQHACNECKGTGETINDRDRCPQCKGEKVVQEKKVLEVIVEKGMQNGQKITFPGEADEAPDTITGDIVFVLQQKEHPKFKRKAEDLFVEHILSLTEALCGFQFVLTHLDGRQLLIKSNPGEVVKPDSYKAINDEGMPMYQRSFMKGKLYIHFTVEFPDSLNPDQVKALEAVLPPKPSSQLTDMELDECEETTLHDVNMEEETRRKQQQAQEAYDEDDDMPGGAQRVQCAQQ

SEQ ID NO: 64111 - DNA, 1464 bp, Zea mays
  CDS (1)..(1464)
atggcgcccacgtccatgctcccgttcgcgccctccaatacgtcgctgccctattcctcccgcgccacaactgccgccgcgttcgctcctcgtgggctccaccacgccgcggccggaaggagcggcggcggccaacggctcgcgtgcgctgcgcctcgacgccgccgcggagggggtcttgtggtcagggcgtcggccgactactacgcgacgctgggcgtgccgcgcgccgccagcaacaaagacatcaaggccgcgtaccggaagctcgcgcgccagtatcatcctgatgtcaataaggagcctggagcgaccgaaaagtttaaagagataagtgcagcatatgaggtgctgtcagatgaaaagaagagggcgttgtatgaccaatatggtgaagctggagttaagagtgcagttggaggctccggtggagcttacacaaccaatccatttgatctgtttgagacattttttggagcaagcatgggtggtttttctggtatggaccagagcgcgtttaggacaagcaggcgaagcactgctattcagggtgaagacatcagatatgatgtgattctggggttcacagaggcgatatttggaacagagaaagatattatattatctcatttggaaacatgtgatacatgtggtggttctggatcaaaggctggctccaagttgagaatatgttccacatgtggtgggcgagggcaagtaatgcgaactgagcaaacaccatttggtctgttctcccaggtttctatttgccccacttgtgcaggagagggcgaagtcatctcagagtattgtaggaaatgttctggagaggggcgtatccgtgtcaggaaggagatcaaagtaaaaatccctccaggagtgagcaaaggcagtactcttcgtgtacgtggggaaggtgatgctggaccaaaaggtgggcctcctggagatctctttgtttgcctcgatatagaggagccatcagatatcaagagggatggtataaacttgtattcaactgtgtcaataagctatcttgaagctattttgggcactgttatgcaagtcagaactgttgatggaaccagtgaccttcgaatacctccaggtatccaacctggtgatgtaattgtcttagcgaagcaaggggttccatcattgaataagccgactatacgtggtgatcatctgttcactgttaaagttgcaatacccaagcgcataagtgggcgtgaaagggaattacttgaggaacttgcatctttgagtaatggtggctttgctcgaacagatgccaagccaaaacctgcccagccaaaacgtgtacatctagagaaagaagttggtgctagccaagaagatacagacaaatctaaagcagcgggtgattggttgaagaaacttacagattttgctgggtcaattgctaatggtgctgcaaagtggctgaaagaaaacctgtag

SEQ ID NO: 64112 - protein, 487 aa, Zea mays
MAPTSMLPFAPSNTSLPYSSRATTAAAFAPRGLHHAAAGRSGGGQRLACAAPRRRRGGGLVVRASADYYATLGVPRAASNKDIKAAYRKLARQYHPDVNKEPGATEKFKEISAAYEVLSDEKKRALYDQYGEAGVKSAVGGSGGAYTTNPFDLFETFFGASMGGFSGMDQSAFRTSRRSTAIQGEDIRYDVILGFTEAIFGTEKDIILSHLETCDTCGGSGSKAGSKLRICSTCGGRGQVMRTEQTPFGLFSQVSICPTCAGEGEVISEYCRKCSGEGRIRVRKEIKVKIPPGVSKGSTLRVRGEGDAGPKGGPPGDLFVCLDIEEPSDIKRDGINLYSTVSISYLEAILGTVMQVRTVDGTSDLRIPPGIQPGDVIVLAKQGVPSLNKPTIRGDHLFTVKVAIPKRISGRERELLEELASLSNGGFARTDAKPKPAQPKRVHLEKEVGASQEDTDKSKAAGDWLKKLTDFAGSIANGAAKWLKENL

SEQ ID NO: 64113 - DNA, 1260 bp, Zea mays
  CDS (1)..(1260)
atgttcgggcgcgcgccgaagaagagcgacaacaccaagtactacgagatcctcggggtgcccaagtcggcgtcccaggacgacctcaagaaggcctaccgcaaggccgctatcaagaaccaccccgacaagggcggtgaccccgagaagttcaaggagctcgcacaagcctatgaggttttgagtgatccagagaaacgtgagatttatgatcagtatggtgaagatgcccttaaggaaggaatgggtggtggtgggtcccatgctgatccattcgacattttctcatcattctttggaccctcttttggaggaggtggtggaagcagcaggggaagaaggcaaaggaggggagaagatgtagtccactcacttaaagtttctctggaagatctttacaatggaatctcaaagaagctctctctttcacgcaatgtcatctgctccaagtgcaagggcaagggctcgaagtctggtgcttcaatgaggtgccctgggtgccagggctcaggtatgaaagtcaccattcgccagcttgggccttccatgatacagcagatgcagcagccttgcaacgagtgcaaggggactggggagagcatcaacgagaaggaccgctgcccagggtgcaagggtgagaaggtcgttcaggagaagaaggttcttgaggttcatgttgagaagggaatgcaacacagccagaagatcaccttccctggtgaagctgatgaagcgcctgataccgtcactggagacattgtattcgtcctccagcagaaggaccactccaagttcaaaagaaagggtgaagatctcttttatgagcacaccctgtctctgaccgaagctctatgtgggttccaatttgttcttacacatctggacaacaggcagcttctgatcaaatcaaaccccggcgaagttgttaaacctgaccaattcaaggcgataaacgacgaggggatgcctatttaccagaggcccttcatgaaggggaagctctacattcatttcacggtggagttccccgactcgctggcaccagagcagtgcaaggctctcgagtcggtacttccgccaaagccttcgtccaagctgacagacatggagattgatgaatgcgaggagacaaccatgcatgatgtgaataacatcgaggaagagatgcgcaggaagcaggctcatgctgctcaggaggcctacgaggaggatgacgagatgcctggcggagcccaaagagtgcagtgcgctcaacagtaa

SEQ ID NO: 64114 - protein, 419 aa, Zea mays
MFGRAPKKSDNTKYYEILGVPKSASQDDLKKAYRKAAIKNHPDKGGDPEKFKELAQAYEVLSDPEKREIYDQYGEDALKEGMGGGGSHADPFDIFSSFFGPSFGGGGGSSRGRRQRRGEDVVHSLKVSLEDLYNGISKKLSLSRNVICSKCKGKGSKSGASMRCPGCQGSGMKVTIRQLGPSMIQQMQQPCNECKGTGESINEKDRCPGCKGEKVVQEKKVLEVHVEKGMQHSQKITFPGEADEAPDTVTGDIVFVLQQKDHSKFKRKGEDLFYEHTLSLTEALCGFQFVLTHLDNRQLLIKSNPGEVVKPDQFKAINDEGMPIYQRPFMKGKLYIHFTVEFPDSLAPEQCKALESVLPPKPSSKLTDMEIDECEETTMHDVNNIEEEMRRKQAHAAQEAYEEDDEMPGGAQRVQCAQQ

SEQ ID NO: 64115 - DNA, 1269 bp, Zea mays
  CDS (1)..(1269)
atgtttggacgcatgccaaggaagagtagtaacaataccaagtattacgaggttcttggtgtgtctaagaccgcaagtcaggatgagcttaagaaagcatacagaaaagctgccataaaaaaccatcctgataagggtggagaccctgagaagtttaaagagctgtctcaagcttatgatgttcttagtgacccggagaagagggagatctatgaccagtatggagaagatgcccttaaggaaggaatgggaggaggcagcagcagtgatttccatagccctttcgacatttttgagcaactttttccgggttctagcacctttgggggtggtagctcaagaggacgcagacaaaagcgtggtgaagatgtggtgcatactatgaaggtttccttagacgatctgtacaatgggacaaccaagaaactatctttatcgcggagtgctttgtgctccaagtgcaaggggaaaggatccaagagtggggcatcaggaacatgccatggttgtcgtggtgctggaatgagaacaatcacaagacagataggccttggcatgatccaacagatgaacactgtttgccctgaatgcaaaggatcaggtgagatcataagtgacaaggacaaatgcccaagctgtaaaggaaacaaggtagtccaggagaagaaggtgttagaggttcatgtggagaaaggaatgcaacataaccaaaagattgtattccagggtcaagctgatgaagctcctgatacggttacaggagacattgtttttgtcttgcaacttaaagaccatccaaaatttaagaggatgtacgatgacttatatgttgagcacacaatctctctcaccgaagcattgtgtggcttccagtttgttcttactcatcttgatgggcgacagcttctgatcaaatctgaccccggggaggttattaaaccaggtcaacacaaggccattaacgatgaaggtatgcctcagcatggccgtcctttcatgaagggtcgtctgtttgttgaattcaacgtggagtttcccgagcctggtgtgctctcccctgcccagtgccgttcgttggagaagatccttccgccgaaaccagggagccaactgtcggacatggagctggaccagtgcgaggagaccacccttcacgatgtcaacatagaagaggagatgaggcgcaggcagcagcagaagaagcaggaagcctacgatgaagacgacgacgaggatgctcaaccaagggtgcaatgtgcccagcagtaa

SEQ ID NO: 64116 - protein, 422 aa, Zea mays
MFGRMPRKSSNNTKYYEVLGVSKTASQDELKKAYRKAAIKNHPDKGGDPEKFKELSQAYDVLSDPEKREIYDQYGEDALKEGMGGGSSSDFHSPFDIFEQLFPGSSTFGGGSSRGRRQKRGEDVVHTMKVSLDDLYNGTTKKLSLSRSALCSKCKGKGSKSGASGTCHGCRGAGMRTITRQIGLGMIQQMNTVCPECKGSGEIISDKDKCPSCKGNKVVQEKKVLEVHVEKGMQHNQKIVFQGQADEAPDTVTGDIVFVLQLKDHPKFKRMYDDLYVEHTISLTEALCGFQFVLTHLDGRQLLIKSDPGEVIKPGQHKAINDEGMPQHGRPFMKGRLFVEFNVEFPEPGVLSPAQCRSLEKILPPKPGSQLSDMELDQCEETTLHDVNIEEEMRRRQQQKKQEAYDEDDDEDAQPRVQCAQQ

SEQ ID NO: 64117 - DNA, 1260 bp, Zea mays
  CDS (1)..(1260)
atgttcgggcgcgcgccgaagaagagcgacaacaccaagtactacgagatcctcggggtgcccaagtcggcgtcccaggacgatctcaagaaggcctaccgcaaggctgctatcaagaaccaccccgacaagggcggtgaccccgagaagttcaaggagctcgcacaagcctatgaggttttgagtgatccagagaaacgtgagatttatgatcagtatggtgaagatgcccttaaggaaggaatgggcggtggaggatcccatgttgatccatttgacatcttctcatcattttttggaccctcttttggaggaggtggtggaagcagcaggggaagaaggcaaaggaggggagaagatgtagttcacccacttaaagtttctctggaagatctttacaatggcacctcaaagaagctctctctttcgcgcaatgtcatctgctccaagtgcaagggcaagggctcgaagtctggtgcctcaatgaggtgccctggttgccagggctcaggcatgaaagtcactattcgtcagctgggcccttccatgatacagcagatgcagcagccttgcaatgagtgcaaggggactggagagagcatcaatgagaaggaccgctgcccagggtgcaagggtgagaaggtcattcaagagaagaaggttcttgaggttcatgttgagaaggggatgcaacacaaccagaagatcaccttccctggtgaagctgatgaagcgcctgatactgtcactggagacattgtattcgtcctccagcagaaggatcactccaaattcaaaagaaagggtgaagatctcttctatgagcacaccttgtctctgaccgaagcactatgtgggttccaatttgttcttacacatctggacaacaggcagcttctcatcaaatcagaccctggtgaagttgttaaacctgaccaattcaaggcgattaatgatgaggggatgccaatttaccagaggcctttcatgaaggggaagctgtacatccatttcacggtggagttccctgactcgttggcaccagagcagtgcaaggctctcgagacagtacttccaccaaggccttcatccaagctgacagacatggagatagatgaatgcgaggagacgactatgcatgatgtgaacaacatcgaggaagagatgcgcaggaagcaagctcacgctgcccaggaggcgtacgaggaggacgacgagatgccgggcggagcccagagagtgcagtgcgcgcaacagtaa

SEQ ID NO: 64118 - protein, 419 aa, Zea mays
MFGRAPKKSDNTKYYEILGVPKSASQDDLKKAYRKAAIKNHPDKGGDPEKFKELAQAYEVLSDPEKREIYDQYGEDALKEGMGGGGSHVDPFDIFSSFFGPSFGGGGGSSRGRRQRRGEDVVHPLKVSLEDLYNGTSKKLSLSRNVICSKCKGKGSKSGASMRCPGCQGSGMKVTIRQLGPSMIQQMQQPCNECKGTGESINEKDRCPGCKGEKVIQEKKVLEVHVEKGMQHNQKITFPGEADEAPDTVTGDIVFVLQQKDHSKFKRKGEDLFYEHTLSLTEALCGFQFVLTHLDNRQLLIKSDPGEVVKPDQFKAINDEGMPIYQRPFMKGKLYIHFTVEFPDSLAPEQCKALETVLPPRPSSKLTDMEIDECEETTMHDVNNIEEEMRRKQAHAAQEAYEEDDEMPGGAQRVQCAQQ

SEQ ID NO: 64119 - DNA, 1290 bp, Zea mays
  CDS (1)..(1290)
atgcgcctccacgccggcgtacgcctcgcgctcctgctcgcccgccgctccctctcctcctccccccgtatcccgcgggtgcacacagggatacggagcgaggcgccctcccggagctctcccttctatccgccgagcagcgcccgcaggtccttccacgggaccaggccggtggcggcaagggactactacgatgtgctcggcgtcagcaagagcgccagccaggcggagataaaaaaggcctattatgggcttgcaaagaagctccatccagacacaaataaaggtgatgcggatgcagaacgcaagtttcaagaggttcaacgagcttatgagactctaaaggatgaacaaaaaagatcattatatgatcaggttggccctgagcagtatgagaaaactgcttctggcggaggcggaactggcttcgagggtggttttggaaatccatttgaggatatttttggtggtggcggtggcggtggtggaatgaatgatttctttaggaacatttttggggatagggactttagaggacgagatgttaaggttgcactcgaactatcatttatggaagcagttcaagggtgcagcaaaacggtcaccttccaaacgtctgtaacatgtgaaatctgtggtggagccggtgtgcctcctggaaccacacctgaaacatgtctatcttgcaggggttcaggatttatattcatgcaaaccgggccattcaggatgcaatcaacctgcacaaaatgtggtggttctgggaaaactgtgaaggaattctgcaaggcatgcagaggaaacaaagttgtgcctggaaggaaatcagtccgccttgacatactgcctggttcggataatgaggacaccataaaggtggttcgatcaggtggagaagacccagatggccgtccaggtgatctttatgtgaccctcgaggttcgtgaggatcctgttttccgaagagagaaaggtgatattcatgttgatgctgtcctgaatgtgactcaggcaattttgggagggacagttcaagtcccaactctcagtggagacgttgttctaaagatcaagcccggtactcaacctggtcagaaggtagttctgagaggaaaagggatcaagacaagaaactcaccgtaccacggagatcaatatgtccatttcaatgtcaacatccccgaaaatttgacgtctagacagcgggagctgatcgaggaattcgcgaaggaggagcaaggcgaagacgagaaggacgccaaggcagcagctggagcatcggggggatag

SEQ ID NO: 64120 - protein, 429 aa, Zea mays
MRLHAGVRLALLLARRSLSSSPRIPRVHTGIRSEAPSRSSPFYPPSSARRSFHGTRPVAARDYYDVLGVSKSASQAEIKKAYYGLAKKLHPDTNKGDADAERKFQEVQRAYETLKDEQKRSLYDQVGPEQYEKTASGGGGTGFEGGFGNPFEDIFGGGGGGGGMNDFFRNIFGDRDFRGRDVKVALELSFMEAVQGCSKTVTFQTSVTCEICGGAGVPPGTTPETCLSCRGSGFIFMQTGPFRMQSTCTKCGGSGKTVKEFCKACRGNKVVPGRKSVRLDILPGSDNEDTIKVVRSGGEDPDGRPGDLYVTLEVREDPVFRREKGDIHVDAVLNVTQAILGGTVQVPTLSGDVVLKIKPGTQPGQKVVLRGKGIKTRNSPYHGDQYVHFNVNIPENLTSRQRELIEEFAKEEQGEDEKDAKAAAGASGG

SEQ ID NO: 64121 - DNA, 1257 bp, Zea mays
  CDS (1)..(1257)
atgttcgggcgcgcgccgaagaagagcgacaacacacggtactacgagatcctcggggtctccaaggacgcgtcccaggatgacctcaagaaagcctaccgcaaggccgccatcaagaaccaccccgacaagggcggcgatcccgagaagttcaaggagctagctcaggcttatgaggtcctcagtgatcctgaaaagcgggagatttatgatcaatatggtgaggatgccctcaaggagggaatgggaggtggtggagggatgcacgatccctttgacatattccagtcattctttggtggtggaagcccttttggaggtggtggcagcagtaggggcagaaggcagcgaaggggagaggatgtggttcatcctctaaaggtttctctggaggatttgtacaatggcacatcaaagaagctctctctgtcccgcagtgttctctgctccaagtgcaatggtaagggttcaaagtctggagcttcatcgaggtgtgctggttgccaaggttctggctttaaggtccaaatcaggcagttggggcctggaatgatccagcaaatgcagcatccttgcaacgagtgcaagggttctggagagacaatcagcgacaaggatagatgcccacagtgcaagggtgataaagttgtgcaggagaagaaggttcttgaagtgtttgtggagaaaggcatgcagaatgggcagaagatcacattccctggtgaagctgatgaagcgcctgacactgtcactggagatatcatctttgttctccagcagaaggagcatcccaagttcaagagaaagggtgatgacctcttctacgagcacaccctgaccttgactgaatctctgtgtggcttccagtttgttgtgactcacttggataacaggcagctgctgatcaaatcaaatccgggcgaagttgtgaagcctgattctttcaaggcgatcaacgacgaaggcatgcccatgtaccagaggccgttcatgaagggcaagctgtacatccacttctcggtggagttcccggactcgctgagcccggagcagtgcaaggccctggaggctgtgctcccgcccaagccggtgtcgcagtacaccgacatggagctggacgagtgcgaggagacgatgccctatgacgtgaacatcgaagcggagatgcggaggcggcagcagcagcaccaggaggcctacgacgaggatgaggacatgccgggcggcgcgcagagggtgcagtgcgcccagcagtag

SEQ ID NO: 64122 - protein, 418 aa, Zea mays
MFGRAPKKSDNTRYYEILGVSKDASQDDLKKAYRKAAIKNHPDKGGDPEKFKELAQAYEVLSDPEKREIYDQYGEDALKEGMGGGGGMHDPFDIFQSFFGGGSPFGGGGSSRGRRQRRGEDVVHPLKVSLEDLYNGTSKKLSLSRSVLCSKCNGKGSKSGASSRCAGCQGSGFKVQIRQLGPGMIQQMQHPCNECKGSGETISDKDRCPQCKGDKVVQEKKVLEVFVEKGMQNGQKITFPGEADEAPDTVTGDIIFVLQQKEHPKFKRKGDDLFYEHTLTLTESLCGFQFVVTHLDNRQLLIKSNPGEVVKPDSFKAINDEGMPMYQRPFMKGKLYIHFSVEFPDSLSPEQCKALEAVLPPKPVSQYTDMELDECEETMPYDVNIEAEMRRRQQQHQEAYDEDEDMPGGAQRVQCAQQ

SEQ ID NO: 64123 - DNA, 1290 bp, Zea mays
  CDS (1)..(1290)
atgcgcctccacgccggcgcacgcctcgcgctcctgctcgcccgccgctccctctcctcctccccccgtatcccgcgggtgcacacagggatacggagcgaggcgccctcccggagctctcccttctatccgccgagcagcgcccgcaggtccttccacgggaccaggccggtggcggcaagggactactacgatgtgctcggcgtcagcaagagcgccagccaggcggagataaaaaaggcctattatgggcttgcaaagaagctccatccagacacaaataaaggtgatgcggatgcagaacgcaagtttcaagaggttcaacgagcttatgagactctaaaggatgaacaaaaaagatcattatatgatcaggttggccctgatcagtatgagaaaactgcttctggcggaggcggaactggcttcgagggtggttttggaaatccatttgaggatatttttggtggtggcggtggcggtggtggaatgaatgatttctttaggaacatttttggggatagggactttggaggacgagatgttaaggttgcactcgaactatcatttatggaagcagttcaagggtgcagcaaaacggtcaccttccaaacgtctgtaacatgtgaaatctgtggtggagccggtgtgcctcctggaaccacacctgaaacatgtctatcttgcaggggttcaggatttatattcatgcaaaccgggccattcaggatgcaatcaacctgcacaaaatgtggtggttctgggaaaactgtgaaggaattctgcaaggcatgcagaggaaacaaagttgtgcctggaaggaaatcagtccgccttgacatactgcctggttcggataatgaggacaccataaaggtggttcgatcaggtggagaagacccagatggccgtccaggtgatctttatgtgaccctcgaggttcgtgaggatcctgttttccgaagagagaaaggtgatattcatgttgatgctgtcctgaatgtgactcaggcaattttgggagggacagttcaagtcccaactctcagtggagacgttgttctaaagatcaagcccggtactcaacctggtcagaaggtagttctgagaggaaaagggatcaagacaagaaactcaccgtaccacggagatcaatatgtccatttcaatgtcaacatccccgaaaatttgacgtctagacagcgggagctgatcgaggaattcgcgaaggaggagcaaggcgaagacgagaaggacgccaaggcagcagctggagcatcggggggatag

SEQ ID NO: 64124 - protein, 429 aa, Zea mays
MRLHAGARLALLLARRSLSSSPRIPRVHTGIRSEAPSRSSPFYPPSSARRSFHGTRPVAARDYYDVLGVSKSASQAEIKKAYYGLAKKLHPDTNKGDADAERKFQEVQRAYETLKDEQKRSLYDQVGPDQYEKTASGGGGTGFEGGFGNPFEDIFGGGGGGGGMNDFFRNIFGDRDFGGRDVKVALELSFMEAVQGCSKTVTFQTSVTCEICGGAGVPPGTTPETCLSCRGSGFIFMQTGPFRMQSTCTKCGGSGKTVKEFCKACRGNKVVPGRKSVRLDILPGSDNEDTIKVVRSGGEDPDGRPGDLYVTLEVREDPVFRREKGDIHVDAVLNVTQAILGGTVQVPTLSGDVVLKIKPGTQPGQKVVLRGKGIKTRNSPYHGDQYVHFNVNIPENLTSRQRELIEEFAKEEQGEDEKDAKAAAGASGG

SEQ ID NO: 64125 - DNA, 1290 bp, Zea mays
  CDS (1)..(1290)
atgcgcctccccgccggcgcacgcctcgcgctcctgctcgcccgccgctccctctcctcctccccccgcatcccgcgggcgcacacagggatatggagcgaggcgccctcccggagctctcccttctctccgccgagcagcgcccgcaggtccttccacgggaccaggccggtggcggcaagggactactacgatgtgctcggcgtcagcaagagcgccagccaggcggagataaaaaaggcctattatgggcttgcaaagaagctccatccagacacaaataaaggtgatgcggatgcagaacgcaagtttcaagaggttcaacgagcttatgagactttaaaggatgaacaaaaaagatcattatatgatcaggttggccctgagcagtatgagaaaactgcttctggcggaggcggaactggcttcgagggtggttttggaaatccatttgaggatatttttggtggtggcggtggcggtggtggaatgaatgatttctttaggaacattttcggggatagggactttggaggacgagatgttaaggttgcactcgaactatcatttgtggaagcagttcaaggttgcagcaaaacggtcaccttccaaacgtctgtaacatgtgaaatctgtggtggagccggtgtgcctcctggaaccacacctgaaacatgtctatcttgcaggggttcaggatttatattcatgcaaaccgggccattcaggatgcaatcaacctgcacaaaatgtggtggttctgggaaaactgtgaaggaattctgcaaggcatgcagaggaaacaaagttgtgcctggaaggaaatcagtccgccttgacatactgcctggttcggataatgaggacaccataaaggtggttcgatcaggtggagaagacccagatggccgtccaggtgatctttatgtgaccctcgaggttcgtgaggatcctgttttccgaagagagaaaggtgatattcatgttgatgctgtcctgaatgtgactcaggcaattttgggagggacagttcaagtcccaactctcagtggagacgttgttctaaagatcaagcccggtactcaacctggtcagagggtagttctgagaggaaaagggatcaagacaagaaactcaccgtaccacggagatcaatatgtccatttcaatgtcaacatccccgaaaatttgacgtctagacagcgggagctgatcgaggaattcgcgaaggaggagcaaggcgaagacgagaaggacgccaaggcagcagctggagcatcggggggatag

SEQ ID NO: 64126 - protein, 429 aa, Zea mays
MRLPAGARLALLLARRSLSSSPRIPRAHTGIWSEAPSRSSPFSPPSSARRSFHGTRPVAARDYYDVLGVSKSASQAEIKKAYYGLAKKLHPDTNKGDADAERKFQEVQRAYETLKDEQKRSLYDQVGPEQYEKTASGGGGTGFEGGFGNPFEDIFGGGGGGGGMNDFFRNIFGDRDFGGRDVKVALELSFVEAVQGCSKTVTFQTSVTCEICGGAGVPPGTTPETCLSCRGSGFIFMQTGPFRMQSTCTKCGGSGKTVKEFCKACRGNKVVPGRKSVRLDILPGSDNEDTIKVVRSGGEDPDGRPGDLYVTLEVREDPVFRREKGDIHVDAVLNVTQAILGGTVQVPTLSGDVVLKIKPGTQPGQRVVLRGKGIKTRNSPYHGDQYVHFNVNIPENLTSRQRELIEEFAKEEQGEDEKDAKAAAGASGG

SEQ ID NO: 64127 - DNA, 1257 bp, Zea mays
  CDS (1)..(1257)
atggcgcgcgccgccgcctccaggctcgccgccgtggcgaactcttcctctacgcgcgagttgttcgcccgccacctcgccgccgctgccgcctcggcgtggaccgcaccgccgcgtctgcctgaaccagggagggagcggcggagcccgggctggtggtgcccgagcaggtcgtttcatgccacaaggcaggtgtatacaagggattactatgatgtgcttggagtaagcaaggatgcttctgcaccggatataaagaaggcatattatgcgctcgcaaagaagttccatcctgatactaataaagatgctgatgcagaaaaaacatttcaagaagttaaccgtgcctatgaggttttgaaggacaatgacaagcgtgaaatatatgatcagcttggaccagaagcatacgagcgtcaagcttcaggtggtgaccctggagggccgggttttcctcggggtaacccatttggtgacatctttggtgatatctttgataatgcatacagaggtggccaagatgttaaggtttctgttgaactatcattcatggaagctgtccaaggttgcagaaaaaccattacgtacgaagctgatactttttgtggaacttgcaatggaagtggcgtcccccctggaactgtgcctaaaacatgtaaaacatgtcgaggctctggtgtgatatacatgcagaagggtatatttactgtcgaatgtacttgctccctgtgcaatgggagcgggaaaattgtcaagagtttttgcaagacttgcaaaggagaacaggtagtgaaggggaaaacgtcagtcaagctagatatagccgcaggaagtgacgataatgacatcatgaaggtttttggtaagggtggtgcagatgttgaccgaaataagcctggtgacctttatgttactatcaaggtcagagaggaccctacttttcgaagagaaggcatccatgtgcatgttgattctgttttaagcattgctcaggctgtcctaggtggaactgtcacggtaccaaccctcactggaaatgttacagtcaaggttcgtcaaggtacccaacctggagagaaggtcgtcctccggggcaaaggaataaaagcgaggaactcgccagtgtttgggaatcagtatgtacacttcaatatcagggttccgacggatgtgacgcaaaggcagagggagctgatagatgagttcgataaagaggagtgcgcagaccgggaaagacctgcggttgcctccggatga

SEQ ID NO: 64128 - protein, 418 aa, Zea mays
MARAAASRLAAVANSSSTRELFARHLAAAAASAWTAPPRLPEPGRERRSPGWWCPSRSFHATRQVYTRDYYDVLGVSKDASAPDIKKAYYALAKKFHPDTNKDADAEKTFQEVNRAYEVLKDNDKREIYDQLGPEAYERQASGGDPGGPGFPRGNPFGDIFGDIFDNAYRGGQDVKVSVELSFMEAVQGCRKTITYEADTFCGTCNGSGVPPGTVPKTCKTCRGSGVIYMQKGIFTVECTCSLCNGSGKIVKSFCKTCKGEQVVKGKTSVKLDIAAGSDDNDIMKVFGKGGADVDRNKPGDLYVTIKVREDPTFRREGIHVHVDSVLSIAQAVLGGTVTVPTLTGNVTVKVRQGTQPGEKVVLRGKGIKARNSPVFGNQYVHFNIRVPTDVTQRQRELIDEFDKEECADRERPAVASG

SEQ ID NO: 64129 - DNA, 1281 bp, Zea mays
  CDS (1)..(1281)
atgttttttggcggcggatttcccggattccatggtcatggtcacggtcacgatgatgatgactcatccagaggagaagtagataacaaggaattctacgagattctcgaagttcctcaaactgctggtcaagatgagatcaagaaggcctacagaaagaaggtcattaaggctcatcctgataaaggtggtgatgttgaagaattcaaaaaattacaagctgcctatgaagtcttgagcaatcctgaaaagagagaaatctatgacaaatatggtcttgatggcttgagagaagacggtggtggcggaatggaccccttcgaaagtatgtttggtggtcttttcggcagaggaagaggcggcaagcaacaacaacaacaaagaaaggtcaagccaatcgttaaggacttaactgtcactttggaagaagtatatgttggaaagatgaagaaggtcaccttcgacagacaaagaaactgtcaaggatgtgacggaaagggaggaaaagacgccaagaagtgtaccacttgtaagggtcaaggtatggtcgaaaaggtcgtccaacttgctcccggtttcatcacccaaaccagaagccactgctctacttgtaaaggtgaaggaactgtctatgaaaagggaaatgtctgcaaagaatgcaagggtgaaaaagtcaagagagaaaccaagactatcgaagtccccattgaatctggtgctcccaacgagtgccccatcagcttcagcggtgaaggaaacgaaattcctgacgttttggctggtgatttcattgtgagactcatcatcgaaccccataaaagattcgaaagaaagggagctgatctttactataagaagaagatctctttatacgaagctttgactggatgtgctttctacattgaacatctcgatggcaaaaagatcctcgtcaccactcaccaaggagaagtcatcactcctggagccaagaagcaactcaataacctcggtatgcccttctataaggacgctatgagtcacggtaacttgtacgtcactttcgaagtcgaattccccaaggccaaccaacttaagaatgctgctgacctcaagaatattttgccagttcctaaggacatactcaccaacgttgacagaactaaatctgagcttcttgaagattttgatgctgaaggagtgaatgctagcgctgaaggaggacgcggtagacgtcatgatgatgacgatgatgaagatggtatgcctcaaggccaaagagtccaatgcgctcaacaataa

SEQ ID NO: 64130 - protein, 426 aa, Zea mays
MFFGGGFPGFHGHGHGHDDDDSSRGEVDNKEFYEILEVPQTAGQDEIKKAYRKKVIKAHPDKGGDVEEFKKLQAAYEVLSNPEKREIYDKYGLDGLREDGGGGMDPFESMFGGLFGRGRGGKQQQQQRKVKPIVKDLTVTLEEVYVGKMKKVTFDRQRNCQGCDGKGGKDAKKCTTCKGQGMVEKVVQLAPGFITQTRSHCSTCKGEGTVYEKGNVCKECKGEKVKRETKTIEVPIESGAPNECPISFSGEGNEIPDVLAGDFIVRLIIEPHKRFERKGADLYYKKKISLYEALTGCAFYIEHLDGKKILVTTHQGEVITPGAKKQLNNLGMPFYKDAMSHGNLYVTFEVEFPKANQLKNAADLKNILPVPKDILTNVDRTKSELLEDFDAEGVNASAEGGRGRRHDDDDDEDGMPQGQRVQCAQQ

SEQ ID NO: 64131 - DNA, 1347 bp, Zea mays
  CDS (1)..(1347)
atggcgctagtacagttcaatggtgccttgcttccccaactcggtgaaaaacctcggccgctatcctcgccgcctgcagttgcaagggctacctatgccgatgcaaggttcctggcaccgaaaaccagttcaagaggtagaggtaaacacctgctatcacctagttatagtttgcattcacagacctcttctgaacaaataaaccatgtaccgtcgtcaagatctcgccagaaaaggggctcaagttttgtcgtcagagctgaagctgatttctataacgtacttggtgtctcaagaaatgctagtaaatctgaaatcaagagcgcctatcggaagcttgctaggagctatcatccagatgtaaacaaagatcctggtgctgaacaaaagttcaaggaaatcagcaatgcttatgaggttttgtctgatgatgagaagcgatcaatctatgataaatatggagaagcaggtctgaaaggtgctggcatgggcacaggagattactcaaacccgtttgatctattcgagtccctgtttgaaggattcggtgggatgggtggaatgggtggcggtcgtgctgcccgtaacagaccaatgcaaggtgatgatgagagctacaatctggtactcaatttcaaggatgcggtgtttggtgtggagaaagagattgagataaccagattggaaggctgtaacacctgcgatggaagtggtgctaagccaggtacaaaggcaacgacatgtaaaacttgtggaggccagggccaggtggtctcctccacaagaacaccactcggaatattccagcaagtctccacctgcaatacctgtggtggcaccggcgaattctccacgccttgcaacacctgttcgggcgatggccgagtgcgaaggacaaagaggatcagtctaaaggttcctgccggagtggattctggaagcaggctgagggttcggtctgagggtaatgctggccggagaggaggccctcctggggacctttatgtcttcattgacgttctctctgatcctgttcttaagcgagatgggacaaacattctctacacgtgcaaggtttcttacatcgacgcaatccttgggacaaccgtcaaagtccccactgtcgatggaatggttgacctcaagataccttcagggactcagccaggcacaactctggtgatggccaagaaaggtgttccgcttcttgggaagtcgaatgctcgcggagaccagcttgtgcgcgtacaggttgagatcccgaaacggctgagcagcgacgagaagaagctagttgaggagcttgcaaacctgaacaaggctcagacagccaatagcaggagttga

SEQ ID NO: 64132 - protein, 448 aa, Zea mays
MALVQFNGALLPQLGEKPRPLSSPPAVARATYADARFLAPKTSSRGRGKHLLSPSYSLHSQTSSEQINHVPSSRSRQKRGSSFVVRAEADFYNVLGVSRNASKSEIKSAYRKLARSYHPDVNKDPGAEQKFKEISNAYEVLSDDEKRSIYDKYGEAGLKGAGMGTGDYSNPFDLFESLFEGFGGMGGMGGGRAARNRPMQGDDESYNLVLNFKDAVFGVEKEIEITRLEGCNTCDGSGAKPGTKATTCKTCGGQGQVVSSTRTPLGIFQQVSTCNTCGGTGEFSTPCNTCSGDGRVRRTKRISLKVPAGVDSGSRLRVRSEGNAGRRGGPPGDLYVFIDVLSDPVLKRDGTNILYTCKVSYIDAILGTTVKVPTVDGMVDLKIPSGTQPGTTLVMAKKGVPLLGKSNARGDQLVRVQVEIPKRLSSDEKKLVEELANLNKAQTANSRS

SEQ ID NO: 64133 - DNA, 1347 bp, Zea mays
  CDS (1)..(1347)
atggcgctagtacagttcaacggtgccttggttcctcaactcggtgaaaagcctcggctgctatccttgtcagctgcaatcgcaaaggctgcctattctgatgcaagattcctgacaccaaaaactggttcaagaggtagaggtaaacacctgctatcacctagttatagtttgcattcacagacctcttctgaacaactaaaccatgtaccatcgtcaagatttcgccagaaaaggggttcacgttttatcgtcagagctgaagctgatttctatagtgtacttggtgtctcaagaaatgctagtaaatctgaaatcaagagcgcctatcggaagcttgctaggagctatcatccagatgtaaacaaagatcctggtgctgaacaaaagttcaaggatatcagtaatgcttatgaggttctgtctgatgatgagaagcgatcgatctatgataaatatggagaagcaggtctgaagggtgctggcatgggcacaggagattactcaaacccgtttgatcttttcgagtccctgtttgaaggattcggtgggatgggtggaatgggtggcggtcgtgctgcccgtaacagaccaatgcaaggtgatgatgagagctacaatctggtactcaatttcaaggatgcggtgtttggtgtggagaaagagattgagataaccagattggaaggctgtaacacctgtgatggaagcggtgctaagccaggtacaaaggcaacgacatgtaaaacatgtggaggtcagggccaggtggtctcctccacaagaacaccactcggaatattccagcaagtctccacctgcaatacctgtggtggcaccggtgaattctccacgccttgcaacacctgttcgggcgatggccgagtgcgaaggacaaagaggatcagtctaaaggttcctgccggagtggattctggaagcaggctgagggttcggtctgagggtaatgctggccggagaggaggccctcctggggacctttatgtcttcattgacgttctctctgatcctgttcttaagcgagacgggacaaacattctctacacgtgcaaggtttcttacatcgacgcaatccttgggacaaccgtcaaagtccccactgtcgatggaatggttgacctcaagataccttcagggactcagccaggcacaactctggtgatggccaagaaaggtgttccgcttcttgggaagtcgaatgctcgcggagaccagctcgtgcgtgtccaggttgagatcccgaaacggctgagcagcgacgagaagaagctagttgaggagcttgcaaacctgaacaaggctcagacagccaatagcaggagatga

SEQ ID NO: 64134 - protein, 448 aa, Zea mays
MALVQFNGALVPQLGEKPRLLSLSAAIAKAAYSDARFLTPKTGSRGRGKHLLSPSYSLHSQTSSEQLNHVPSSRFRQKRGSRFIVRAEADFYSVLGVSRNASKSEIKSAYRKLARSYHPDVNKDPGAEQKFKDISNAYEVLSDDEKRSIYDKYGEAGLKGAGMGTGDYSNPFDLFESLFEGFGGMGGMGGGRAARNRPMQGDDESYNLVLNFKDAVFGVEKEIEITRLEGCNTCDGSGAKPGTKATTCKTCGGQGQVVSSTRTPLGIFQQVSTCNTCGGTGEFSTPCNTCSGDGRVRRTKRISLKVPAGVDSGSRLRVRSEGNAGRRGGPPGDLYVFIDVLSDPVLKRDGTNILYTCKVSYIDAILGTTVKVPTVDGMVDLKIPSGTQPGTTLVMAKKGVPLLGKSNARGDQLVRVQVEIPKRLSSDEKKLVEELANLNKAQTANSRR

SEQ ID NO: 64135 - DNA, 1467 bp, Zea mays
  CDS (1)..(1467)
atggcgcccacgtccatgctcccgttcgcgccctccaatacgtcgctgccctattcctcccgcgccacaactgccgccgcgttcgctcctcgtgggctccaccacgccgcggccggaaggagcggcggcggccaacggctcgcgtgcgctgcgcctcggcgccgccgcggagggggtcttgtggtcagggcgtcggccgactactacgcgacgctgggcgtgccgcgcgccgccagtaacagagacatcaaggccgcgtaccggaagctcgcgcgccagtatcatcctgatgtcaataaggagcctggagcgactgaaaagtttaaagagataagtgcagcatatgaggtgctgtcagatgaaaagaagagggcgttgtatgaccaatatggtgaagctggtgttaagagtgcagttggaggctccggtggagcttacacaaccaatccatttgatctgtttgagacattttttggagcaagcatgggtggtttttctggcatggaccagagcgcgtttaggacaagcaggcgaagcactgctatacagggtgaagacatcagatatgatgtgattctggggttcacagaggcgatatttggaacagagaaagatattatattatctcatttggaaacatgtgatacatgtggtggttctggatcaaaggctggctccaagatgagaatatgttccacatgtggtgggcgagggcaagtaatgcgaactgagcaaacaccatttggtctgttctcccaggtttctatttgccccacttgtgcaggagagggcgaagtcatttcagagtattgcaggaaatgttctggagaggggcgtatccgtgtcagaaaggagatcaaagtaaaaatccctccaggagtgagcaaaggcagtactcttcgtgtacgtggggaaggtgatgctggaccaaaaggtgggcctcctggagatctctttgtttgccttgatatagaggagccatcagatatcaagagggatggtataaacttgtattcaactgtgtcaataagctatcttgaagctattttgggcactgttatgcaagtcagaactgttgatggaaccagtgaccttcgaatacctccaggtatccaacctggtgatgtaattgtcttagcgaagcaaggagttccatcattgaataagccgtctatacgtggtgatcatctcttcactgttaaagtcgcaataccgaagcgcataagtgggcgtgaaagagaattacttgaggaacttgcatctttgagtaatggtcgctttgcacgaacagacactaagccaaaacctgcccagccaaaagccatacatcaagagaaagaagttggtgctagtcaagaagatacaagcaaatctaaagaagcagagggtgactggttgaagaaacttacagattttgctgggtccattgttaatggcgctgcgaagtggctgaacgacaacctgtag

SEQ ID NO: 64136 - protein, 488 aa, Zea mays
MAPTSMLPFAPSNTSLPYSSRATTAAAFAPRGLHHAAAGRSGGGQRLACAAPRRRRGGGLVVRASADYYATLGVPRAASNRDIKAAYRKLARQYHPDVNKEPGATEKFKEISAAYEVLSDEKKRALYDQYGEAGVKSAVGGSGGAYTTNPFDLFETFFGASMGGFSGMDQSAFRTSRRSTAIQGEDIRYDVILGFTEAIFGTEKDIILSHLETCDTCGGSGSKAGSKMRICSTCGGRGQVMRTEQTPFGLFSQVSICPTCAGEGEVISEYCRKCSGEGRIRVRKEIKVKIPPGVSKGSTLRVRGEGDAGPKGGPPGDLFVCLDIEEPSDIKRDGINLYSTVSISYLEAILGTVMQVRTVDGTSDLRIPPGIQPGDVIVLAKQGVPSLNKPSIRGDHLFTVKVAIPKRISGRERELLEELASLSNGRFARTDTKPKPAQPKAIHQEKEVGASQEDTSKSKEAEGDWLKKLTDFAGSIVNGAAKWLNDNL

SEQ ID NO: 64137 - DNA, 1290 bp, Zea mays
  CDS (1)..(1290)
atgcgcctccacgccggcgcacgcctcgcgctcctgctcgcccgccgctccctctcctcctccccccgtatcccgcgggtgcacacagggatacggagcgaggcgccctcccggagctctcccttctatccgccgagcagcgcccgcaggtccttccacgggaccaggccggtggcggcaagggactactacgatgtgctcggcgtcagcaagagcgccagccaggcggagataaaaaaggcctattatgggcttgcaaagaagctccatccagacacaaataaaggtgatgcggatgcagaacgcaagtttcaagaggttcaacgagcttatgagactctaaaggatgaacaaaaaagatcattatatgatcaggttggccctgatcagtatgagaaaactgcttctggcggaggcggaactggcttcgagggtggttttggaaatccatttgaggatatttttggtggtggcggtggcggtggtggaatgaatgatttctttaggaacatttttggggatagggactttggaggacgagatgttaaggttgcactcgaactatcatttatggaagcagttcaagggtgcagcaaaacggtcaccttccaaacgtctgtaacatgtgaaatctgtggtggagccggtgtgcctcctggaaccacacctgaaacatgtctatcttgcaggggttcaggatttatattcatgcaaaccgggcccttcaggatgcaatcaacctgcacaaaatgtggtggttctgggaaaactgtgaaggaattctgcaaggcatgcagaggaaacaaagttgtgcctggaaggaaatcagtccgccttgacatactgcctggtttggataatgaggataccataaaggtggttcgatcaggtggagaagacccagatggccgtccaggtgatctttatgtgaccctcgaggttcgtgaggatcctgttttccgaagagagaaaggtgatattcatgttgatgctgtcctgaatgtgactcaggcaattttgggagggacagttcaagtcccaactctcagtggagacgttgttctaaaggtcaagcccggtactcaacctggtcagaaggtagttctgagaggaaaagggatcaagacaagaaactcaccgtactacggagatcaatatgtccatttcaatgtcaacatccccgaaaatttgacgtctagacagcgggagctgatcgaggaattcgcgaaggaggagcaaggcgaagacgagaaggacgccaaggcagcagctggagcatcggggggatag

SEQ ID NO: 64138 - protein, 429 aa, Zea mays
MRLHAGARLALLLARRSLSSSPRIPRVHTGIRSEAPSRSSPFYPPSSARRSFHGTRPVAARDYYDVLGVSKSASQAEIKKAYYGLAKKLHPDTNKGDADAERKFQEVQRAYETLKDEQKRSLYDQVGPDQYEKTASGGGGTGFEGGFGNPFEDIFGGGGGGGGMNDFFRNIFGDRDFGGRDVKVALELSFMEAVQGCSKTVTFQTSVTCEICGGAGVPPGTTPETCLSCRGSGFIFMQTGPFRMQSTCTKCGGSGKTVKEFCKACRGNKVVPGRKSVRLDILPGLDNEDTIKVVRSGGEDPDGRPGDLYVTLEVREDPVFRREKGDIHVDAVLNVTQAILGGTVQVPTLSGDVVLKVKPGTQPGQKVVLRGKGIKTRNSPYYGDQYVHFNVNIPENLTSRQRELIEEFAKEEQGEDEKDAKAAAGASGG

SEQ ID NO: 64139 - DNA, 25 bp, Artificial sequence
  primer
atggctttccaacaaggtgtattgt

SEQ ID NO: 64140 - DNA, 28 bp, Artificial sequence
  primer
ttaattttttttgtcacctttgatcttc

SEQ ID NO: 64141 - protein, 426 aa, Artificial sequence
  consensus sequence
  Variant (2)..(3): Xaa in position 2 to 3 is any amino acid
  Variant (7)..(9): Xaa in position 7 to 9 is any amino acid
  Variant (11)..(15): Xaa in position 11 to 15 is any amino acid
  Variant (17)..(17): Xaa in position 17 is any amino acid
  Variant (20)..(22): Xaa in position 20 to 22 is any amino acid
  Variant (24)..(26): Xaa in position 24 to 26 is any amino acid
  Variant (30)..(35): Xaa in position 30 to 35 is any amino acid
  Variant (36)..(39): Xaa in position 36 to 39 is any or no amino acid
  Variant (44)..(46): Xaa in position 44 to 46 is any amino acid
  Variant (50)..(50): Xaa in position 50 is any amino acid
  Variant (52)..(52): Xaa in position 52 is any amino acid
  Variant (54)..(55): Xaa in position 54 to 55 is any amino acid
  Variant (58)..(59): Xaa in position 58 to 59 is any amino acid
  Variant (62)..(63): Xaa in position 62 to 63 is any amino acid
  Variant (65)..(78): Xaa in position 65 to 78 is any amino acid
  Variant (79)..(114): Xaa in position 79 to 114 is any or no amino acid
  Variant (116)..(117): Xaa in position 116 to 117 is any amino acid
  Variant (118)..(118): Xaa in position 118 is any or no amino acid
  Variant (120)..(129): Xaa in position 120 to 129 is any amino acid
  Variant (130)..(153): Xaa in position 130 to 153 is any or no amino acid
  Variant (155)..(155): Xaa in position 155 is any amino acid
  Variant (157)..(170): Xaa in position 157 to 170 is any amino acid
  Variant (172)..(183): Xaa in position 172 to 183 is any amino acid
  Variant (184)..(184): Xaa in position 184 is any or no amino acid
  Variant (186)..(187): Xaa in position 186 to 187 is any amino acid
  Variant (189)..(189): Xaa in position 189 is any amino acid
  Variant (191)..(191): Xaa in position 191 is any amino acid
  Variant (193)..(194): Xaa in position 193 to 194 is any amino acid
  Variant (195)..(195): Xaa in position 195 is any or no amino acid
  Variant (197)..(199): Xaa in position 197 to 199 is any amino acid
  Variant (200)..(202): Xaa in position 200 to 202 is any or no amino acid
  Variant (204)..(205): Xaa in position 204 to 205 is any amino acid
  Variant (207)..(207): Xaa in position 207 is any amino acid
  Variant (209)..(209): Xaa in position 209 is any amino acid
  Variant (211)..(222): Xaa in position 211 to 222 is any amino acid
  Variant (223)..(241): Xaa in position 223 to 241 is any or no amino acid
  Variant (243)..(244): Xaa in position 243 to 244 is any amino acid
  Variant (246)..(246): Xaa in position 246 is any amino acid
  Variant (248)..(248): Xaa in position 248 is any amino acid
  Variant (250)..(250): Xaa in position 250 is any amino acid
  Variant (251)..(251): Xaa in position 251 is any or no amino acid
  Variant (253)..(254): Xaa in position 253 to 254 is any amino acid
  Variant (255)..(257): Xaa in position 255 to 257 is any or no amino acid
  Variant (259)..(260): Xaa in position 259 to 260 is any amino acid
  Variant (262)..(262): Xaa in position 262 is any amino acid
  Variant (264)..(274): Xaa in position 264 to 274 is any amino acid
  Variant (275)..(275): Xaa in position 275 is any or no amino acid
  Variant (277)..(280): Xaa in position 277 to 280 is any amino acid
  Variant (282)..(284): Xaa in position 282 to 284 is any amino acid
  Variant (286)..(291): Xaa in position 286 to 291 is any amino acid
  Variant (293)..(294): Xaa in position 293 to 294 is any amino acid
  Variant (295)..(313): Xaa in position 295 to 313 is any or no amino acid
  Variant (316)..(327): Xaa in position 316 to 327 is any amino acid
  Variant (329)..(329): Xaa in position 329 is any amino acid
  Variant (331)..(345): Xaa in position 331 to 345 is any amino acid
  Variant (346)..(355): Xaa in position 346 to 355 is any or no amino acid
  Variant (357)..(358): Xaa in position 357 to 358 is any amino acid
  Variant (360)..(368): Xaa in position 360 to 368 is any amino acid
  Variant (370)..(390): Xaa in position 370 to 390 is any amino acid
  Variant (391)..(393): Xaa in position 391 to 393 is any or no amino acid
  Variant (395)..(402): Xaa in position 395 to 402 is any amino acid
  Variant (403)..(409): Xaa in position 403 to 409 is any or no amino acid
  Variant (411)..(423): Xaa in position 411 to 423 is any amino acid
  Variant (424)..(425): Xaa in position 424 to 425 is any or no amino acid
YXXLGVXXXAXXXXXKXAYXXXAXXXHPDXXXXXXXXXXKFKEXXXAYEXLXDXXKRXXYDXXGXXXXXXXXXXXXXXXXXXXXXXXXXXXXXXXXXXXXXXXXXXXXXXXXXXFXXXFXXXXXXXXXXXXXXXXXXXXXXXXXXXXXXXXXXGXDXXXXXXXXXXXXXXGXXXXXXXXXXXXXCXXCXGXGXXXGXXXXXXCXXCXGXGXXXXXXXXXXXXXXXXXXXXXXXXXXXXXXXCXXCXGXGXXIXXXXXCXXCXGXXXXXXXXXXXXVXXXXGXXXGXXXXXXGXXXXXXXXXXXXXXXXXXXXXGDXXXXXXXXXXXXFXRXXXXXXXXXXXXXXXXXXXXXXXXXAXXGXXXXXXXXXGXXXXXXXXXXXXXXXXXXXXXXXXGXXXXXXXXXXXXXXXGXXXXXXXXXXXXXXXL

SEQ ID NO: 64142 - protein, 19 aa, Artificial sequence
  protein pattern
  Variant (2)..(3): Xaa in position 2 to 3 is any amino acid
  Variant (6)..(6): Xaa in position 6 is Ile, Leu or Val
  Variant (7)..(8): Xaa in position 7 to 8 is any amino acid
  Variant (9)..(9): Xaa in position 9 is Ala, Asp, Gly, Asn, Ser or Thr
  Variant (11)..(11): Xaa in position 11 is Ala, Asp, Glu, Asn, Gln, Ser or Thr
  Variant (12)..(13): Xaa in position 12 to 13 is any amino acid
  Variant (14)..(14): Xaa in position 14 is Asp, Glu, Gln or Thr
  Variant (15)..(15): Xaa in position 15 is Ile, Leu or Val
  Variant (17)..(17): Xaa in position 17 is any amino acid
YXXLGXXXXAXXXXXKXAY

SEQ ID NO: 64143 - protein, 27 aa, Artificial sequence
  protein pattern
  Variant (2)..(3): Xaa in position 2 to 3 is any or no amino acid
  Variant (5)..(5): Xaa in position 5 is any amino acid
  Variant (6)..(6): Xaa in position 6 is Asp, Glu or Gln
  Variant (7)..(7): Xaa in position 7 is Ala, Ile, Leu or Val
  Variant (8)..(9): Xaa in position 8 to 9 is any amino acid
  Variant (12)..(12): Xaa in position 12 is Ala, Asp, Glu or Gln
  Variant (13)..(13): Xaa in position 13 is any amino acid
  Variant (15)..(15): Xaa in position 15 is any amino acid
  Variant (16)..(16): Xaa in position 16 is Asp, Asn, Ser or Thr
  Variant (17)..(19): Xaa in position 17 to 19 is any amino acid
  Variant (20)..(20): Xaa in position 20 is Lys or Arg
  Variant (21)..(22): Xaa in position 21 to 22 is any amino acid
  Variant (23)..(23): Xaa in position 23 is Phe or Tyr
  Variant (25)..(26): Xaa in position 25 to 26 is any amino acid
KXXFXXXXXAYXXLXXXXXXXXXDXXG

SEQ ID NO: 64144 - DNA, 354 bp, Saccharomyces cerevisiae
  CDS (1)..(354)
atgatagttgaactttattcaaatatcatcgaagtaagaagatatactactaaagactccctttgctctatattcgagtcaggctccaccagtcatttcgaaattaaccagttacaggtcaaaagactaaacttactgcaaaaccaatttgcttctgttttcacttctttccaccccaaagataatacaaagggcatacatatcaattttttttcacctgtcactaggataactgaccttcaatattcctttttttatacgaatcagatactgttcggtacacgatatctaattaaaatgattcaaaactttgtaacaggtaaagttttcactagaaccaatcaatccaagtga

SEQ ID NO: 64145 - protein, 117 aa, Saccharomyces cerevisiae
MIVELYSNIIEVRRYTTKDSLCSIFESGSTSHFEINQLQVKRLNLLQNQFASVFTSFHPKDNTKGIHINFFSPVTRITDLQYSFFYTNQILFGTRYLIKMIQNFVTGKVFTRTNQSK

SEQ ID NO: 64146 - DNA, 28 bp, Artificial sequence
  primer
atgatagttgaactttattcaaatatca

SEQ ID NO: 64147 - DNA, 25 bp, Artificial sequence
  primer
tcacttggattgattggttctagtg

SEQ ID NO: 64148 - DNA, 1941 bp, Saccharomyces cerevisiae
  CDS (1)..(1941)
atgagttacgaatctgggaggtcatcctcctcttccgagagtacacggccaccaacgctaaaagaagaacctaatggtaaaatagcttgggaagaaagtgtcaaaaaatctagggaaaataacgaaaatgacagcactctcttgaggcgaaagctaggtgagactcgaaaagcaattgaaactggaggatcatcgagaaataaactttctgctttgacacccttgaaaaaagtggttgacgagaggaaggattcggtacaaccacaggtcccttccatgggttttacttattctttgcctaatttgaagactttaaacagtttttcagatgctgagcaagcacgtataatgcaagattatctatccaggggggtaaatcaaggcaacagtaataattatgtagacccactatatcggcaattaaatccaactatgggtagtagcaggaacaggcctgtttggagtttaaatcagccgttaccgcatgtattggatcgaggcttggcagcaaagatgatacaaaagaatatggatgcaaggtcccgcgcatcatcgagacgagggtcgaccgatatttcaagggggggttctactacgtcagtgaaagactggaaaaggctccttagaggtgcagcaccgggtaaaaagcttggtgacatcgaagctcaaacgcaacgcgataatactgttggtgcagatgtgaaacctactaagttagagcctgaaaacccacaaaagccctctaacacgcatattgagaatgtttcacgtaagaaaaagcgtacttcgcataatgtcaatttttcattaggcgatgaaagctacgcatcctccatagccgatgcagaatccagaaaattaaagaacatgcaaaccctcgatggttctactccggtttatacgaagcttcctgaagaacttattgaagaggaaaataaaagtacgagtgcattagatggtaatgaaattggtgcctcagaagatgaagacgcggatataatgacatttcctaacttttgggcaaaaattcgctatcatatgcgagaaccgtttgcggagtttctcgggacactagttcttgtcatttttggtgttggtggtaatcttcaagcaactgtaacaaaaggtagtggtggttcctatgaatccctatcatttgcatgggggttcggttgtatgcttggtgtttacgtcgcaggcggtattagtggtggtcatattaaccctgctgttacgatttcaatggcaatttttcgaaaattcccctggaaaaaggtgcccgtatatattgttgctcagattatcggtgcatattttggaggagctatggcttatggttatttttggagctctatcacagaatttgagggaggtccgcacataagaacaacggcgaccggtgcgtgtttgtttactgatccaaagtcttacgtcacgtggagaaatgccttctttgacgaattcataggagcctctatacttgtgggttgtttgatggcgctattggatgatagtaatgctccacctggcaatggtatgaccgcattaattattggattcttagtcgctgcaattggtatggcccttggatatcaaacaagtttcacaatcaatcctgcaagagatctcggtcctcgcatatttgcttccatgattggctatggtccacatgcttttcatctcacacattggtggtggacatggggagcctggggtggtccaattgccggcggtattgctggagcactcatatatgacattttcatttttactggatgcgaatccccagtcaactacccagacaacggttatattgagaatagggtaggtaaacttttacatgcggagttccaccagaatgatggcactgtctcagatgaatctggtgttaacagcaacagcaacactggcagcaagaaatctgtgcctacttcgtcataa

SEQ ID NO: 64149 - protein, 646 aa, Saccharomyces cerevisiae
MSYESGRSSSSSESTRPPTLKEEPNGKIAWEESVKKSRENNENDSTLLRRKLGETRKAIETGGSSRNKLSALTPLKKVVDERKDSVQPQVPSMGFTYSLPNLKTLNSFSDAEQARIMQDYLSRGVNQGNSNNYVDPLYRQLNPTMGSSRNRPVWSLNQPLPHVLDRGLAAKMIQKNMDARSRASSRRGSTDISRGGSTTSVKDWKRLLRGAAPGKKLGDIEAQTQRDNTVGADVKPTKLEPENPQKPSNTHIENVSRKKKRTSHNVNFSLGDESYASSIADAESRKLKNMQTLDGSTPVYTKLPEELIEEENKSTSALDGNEIGASEDEDADIMTFPNFWAKIRYHMREPFAEFLGTLVLVIFGVGGNLQATVTKGSGGSYESLSFAWGFGCMLGVYVAGGISGGHINPAVTISMAIFRKFPWKKVPVYIVAQIIGAYFGGAMAYGYFWSSITEFEGGPHIRTTATGACLFTDPKSYVTWRNAFFDEFIGASILVGCLMALLDDSNAPPGNGMTALIIGFLVAAIGMALGYQTSFTINPARDLGPRIFASMIGYGPHAFHLTHWWWTWGAWGGPIAGGIAGALIYDIFIFTGCESPVNYPDNGYIENRVGKLLHAEFHQNDGTVSDESGVNSNSNTGSKKSVPTSS

SEQ ID NO: 64150 - DNA, 1797 bp, Schizosaccharomyces pombe 972h-
  CDS (1)..(1797)
atgagcgtccctttacgcttctcgacaccatcatcatctccttcagcctcagataatgagagcgtgcatgatgatggtcccacaactgaattagacactttcaatacgacggacgtgccaagaagagtcaataccactaaagctcgacaaatgcgtcccaaaaataccctaaaagttgcgttctcttcacccaacctcaaaggcctggacaacactgccgactcggattctcaaccctggcttggtgggtaccttgctggaagacttgaagatatatccggacaatcgcgtcgaaattatgttgatccttattacgaagaattgaatgctgggaggagacccaacaaaccggtgtggagtttgaatggaccattgccacatgttcttggtaactctgtggtagaaaaaatatctcaaaagaatcaggaagctcgttctagagcaaattccagggtgaattccagagcaaattccagagcaaactcctcggtctctttggctggtatggatggatcgcccaattggaaacggaaaatgaagagtgctgtttttggatcaagagtcaagcttaatgatgaagaagctcaattgccgcgcaataaatcttccgtttccatagcggaacaagccgcttcaagacccaaagttagtttctcgcttcaaagcagccgtcaaccatccattgctgaggagcaaccccaaacccagcgtaagtcttccgcgataacggtagagcatgcggaaaatgctgaaccagagaccccaagaaataatgttagtttctctaggaaaccgtcaatagctgaacaagattcatctcaagatattactatgcctcctaatgaaattattgctgaagaaagtttagactcgggaagcgatactgaaaccctgtatctcaactattggtgcaagattagacacttttttcgtgagggttttgctgagttcctgggcactttggttttggttgtgtttggtgtaggcagtaatttgcaagctaccgtcactaatggagcaggtggaagcttcgaatccctttcttttgcttggggatttggttgcatgcttggcgtttatatagctggtggaatcagtggtggtcatgtcaatcccgctgtgactatctcattagccatatttcgcaaatttccttggtataaagtgccaatctacatttttttccaaatctggggtgcattctttggaggtgcacttgcctatggttaccattggagttcaattactgaatttgaaggaggcaaagatattagaacaccggcaacaggtggttgtttgtacaccaatccaaaaccatacgtcacttggagaaacgcatttttcgatgagtttattggaacagccgttttggtaggatgtttattcgccattctagatgataccaactctccaccaacccagggcatgactgcttttatcgttggtttgcttattgcagctattggtatggctcttggatatcaaacaagtttcactctgaatccagctcgtgacttgggacctcgtatgtttgcatggtggattggctatggaccacattcatttcacctgtatcattggtggtggacttggggtgcttggggcggtaccataggaggtggtattgctggaggacttatttatgatttagtaatatttacgggcccagagtctccacttaattatccagataacgggtttatcgataaaaaagtgcatcagattaccgcaaaatttgagaaggaagaagaggttgaaaacttggaaaaaacagattctccgattgagaataattga

SEQ ID NO: 64151 - protein, 598 aa, Schizosaccharomyces pombe 972h-
MSVPLRFSTPSSSPSASDNESVHDDGPTTELDTFNTTDVPRRVNTTKARQMRPKNTLKVAFSSPNLKGLDNTADSDSQPWLGGYLAGRLEDISGQSRRNYVDPYYEELNAGRRPNKPVWSLNGPLPHVLGNSVVEKISQKNQEARSRANSRVNSRANSRANSSVSLAGMDGSPNWKRKMKSAVFGSRVKLNDEEAQLPRNKSSVSIAEQAASRPKVSFSLQSSRQPSIAEEQPQTQRKSSAITVEHAENAEPETPRNNVSFSRKPSIAEQDSSQDITMPPNEIIAEESLDSGSDTETLYLNYWCKIRHFFREGFAEFLGTLVLVVFGVGSNLQATVTNGAGGSFESLSFAWGFGCMLGVYIAGGISGGHVNPAVTISLAIFRKFPWYKVPIYIFFQIWGAFFGGALAYGYHWSSITEFEGGKDIRTPATGGCLYTNPKPYVTWRNAFFDEFIGTAVLVGCLFAILDDTNSPPTQGMTAFIVGLLIAAIGMALGYQTSFTLNPARDLGPRMFAWWIGYGPHSFHLYHWWWTWGAWGGTIGGGIAGGLIYDLVIFTGPESPLNYPDNGFIDKKVHQITAKFEKEEEVENLEKTDSPIENN

SEQ ID NO: 64152 - DNA, 2136 bp, Aspergillus niger
  CDS (1)..(2136)
atgttcactcgtattctccttcagctgagccaggagctgatcggagtaatctcctcgcttgagcagtctgatgcgatctccccccgaggagagaaccctcccacttcacctctatcacctactcgcggccgccgagggactgctggtgacgctgactttgtttctcccacccgccgcgtctctggccgtgatggctccggggctggagttcgtcgacgcagctccgccgcctcccgtcgcagtggtggaagtggcatccccagtttggcgccacgcaccacgctggctgaacgaacccaaggtcgtttcaccatggctggcccagaagagacgcctcagctgcgcttggcccatgaaccgtttgtgcaaccgggctatggcgatctaaacccatcctacgaacagcccgccaactccaaacctgtctggggtctggcgaaaccgctccctcgtgtcgtccgaccgggcatggtgccgaccaaggaggagctgttggaagcccgtcaaaatattcagctgccggcagaaaattcacagaagctagggctggaggtcgaccccaatgacctagagctgggccaaatcgagaagacggctgaccctcgtaaaatggcggcccaggtggaagatgcccgcatccagcgtgagaacaacttcatgaacaagattctgagtggggatgccaccacaacgcgacaaggctcgcgcctctcgcggacttcatcgtcgcgtatccgccgcccatcggcctgggatctcccgcctgagaatctctcgacggtgcccgaaggcgagaccccggctcccagtgagacccatgaggaaccccctcagatgagtagtgaggagcccttggagcccgtcctggaggagcccgagctgcgcgctgacgatggcaaggacgggatgatggacgacctgcccaatctggaggagatcgaggccgcctatccggaagatctgcatccgctggtacaggagctggtggaggaggaggtgcacaacaaccacaccacctggtccgtcatccgcactcatcaccgcgaagccctggccgagtccctgggggtcttcgtgcagctgttcgtcggcttttgcggcgatctagcagtgaccgtggccaacgccggtaatcccaacaccaccgactgggtctgggggtttgctaccatgatggccatctacgtctccggtggtgtgtccggtgcacatctcaatccgaccatcaccattatgctatggttttaccgcggtttccccaagagcaagatgcccgagtacttcgccgcgcaattcttgggggccttcatcgccgcgctcgccgcgtacggtctctactatcactccatccaacactatctcctgaccaactccaccacgggcatcatcaccagctttgtgacaagtcagcgcgagacctggatcggtcctggtactgccttctttaccgaattcctgggcacgatgatactgactgtggtggtcctggcgctgggtgacgatcaaaacgcacccccgggagcgggtatgaactcactcatcgtgggtctcatggtgacctgcaacacgatgagctttgcctaccagacgggtgccgccttgaatccgagtcgggactttgggccccgactggcgttgctggctctcgggtacggctcgtcgctgttcaccaatccgtactggttttacggaccatgggccggatcactcgcgggctccttcctcggtgccttcctgtacgactttatgatcttcacgggtggtgagtcgccggtcaattacccctgggaacggacgcagcgggcgatgcgcaagagtcggatgaagtgggggaagcggttgcatctgtcgcaccgagacaggggagagaagactttacatgatacactcatattgaccgcaatgagcgatgaacgttttcaattactttcttattatttttataatcatagtagcatcccaactcatggcgaggtagtgctactacttaatagccccgcgattggtaacttctctcgcctttattgtgccagtacttgtatattcccctgcggcaagccgatcggtatcccgaggcaagtatcgggccacccggaaatcgaccgagacgcgggaaggttgacacagtcttcttga

SEQ ID NO: 64153 - protein, 711 aa, Aspergillus niger
MFTRILLQLSQELIGVISSLEQSDAISPRGENPPTSPLSPTRGRRGTAGDADFVSPTRRVSGRDGSGAGVRRRSSAASRRSGGSGIPSLAPRTTLAERTQGRFTMAGPEETPQLRLAHEPFVQPGYGDLNPSYEQPANSKPVWGLAKPLPRVVRPGMVPTKEELLEARQNIQLPAENSQKLGLEVDPNDLELGQIEKTADPRKMAAQVEDARIQRENNFMNKILSGDATTTRQGSRLSRTSSSRIRRPSAWDLPPENLSTVPEGETPAPSETHEEPPQMSSEEPLEPVLEEPELRADDGKDGMMDDLPNLEEIEAAYPEDLHPLVQELVEEEVHNNHTTWSVIRTHHREALAESLGVFVQLFVGFCGDLAVTVANAGNPNTTDWVWGFATMMAIYVSGGVSGAHLNPTITIMLWFYRGFPKSKMPEYFAAQFLGAFIAALAAYGLYYHSIQHYLLTNSTTGIITSFVTSQRETWIGPGTAFFTEFLGTMILTVVVLALGDDQNAPPGAGMNSLIVGLMVTCNTMSFAYQTGAALNPSRDFGPRLALLALGYGSSLFTNPYWFYGPWAGSLAGSFLGAFLYDFMIFTGGESPVNYPWERTQRAMRKSRMKWGKRLHLSHRDRGEKTLHDTLILTAMSDERFQLLSYYFYNHSSIPTHGEVVLLLNSPAIGNFSRLYCASTCIFPCGKPIGIPRQVSGHPEIDRDAGRLTQSS

SEQ ID NO: 64154 - DNA, 24 bp, Artificial sequence
  primer
atgagttacgaatctgggaggtca

SEQ ID NO: 64155 - DNA, 25 bp, Artificial sequence
  primer
ttatgacgaagtaggcacagatttc

SEQ ID NO: 64156 - protein, 666 aa, Artificial sequence
  consensus sequence
  Variant (2)..(42): Xaa in position 2 to 42 is any amino acid
  Variant (43)..(77): Xaa in position 43 to 77 is any or no amino acid
  Variant (79)..(98): Xaa in position 79 to 98 is any amino acid
  Variant (99)..(104): Xaa in position 99 to 104 is any or no amino acid
  Variant (106)..(106): Xaa in position 106 is any amino acid
  Variant (108)..(138): Xaa in position 108 to 138 is any amino acid
  Variant (139)..(141): Xaa in position 139 to 141 is any or no amino acid
  Variant (143)..(143): Xaa in position 143 is any amino acid
  Variant (145)..(145): Xaa in position 145 is any amino acid
  Variant (147)..(148): Xaa in position 147 to 148 is any amino acid
  Variant (151)..(155): Xaa in position 151 to 155 is any amino acid
  Variant (156)..(157): Xaa in position 156 to 157 is any or no amino acid
  Variant (159)..(159): Xaa in position 159 is any amino acid
  Variant (160)..(160): Xaa in position 160 is any or no amino acid
  Variant (164)..(164): Xaa in position 164 is any amino acid
  Variant (166)..(167): Xaa in position 166 to 167 is any amino acid
  Variant (171)..(171): Xaa in position 171 is any amino acid
  Variant (173)..(197): Xaa in position 173 to 197 is any amino acid
  Variant (199)..(319): Xaa in position 199 to 319 is any amino acid
  Variant (320)..(333): Xaa in position 320 to 333 is any or no amino acid
  Variant (335)..(335): Xaa in position 335 is any amino acid
  Variant (336)..(340): Xaa in position 336 to 340 is any or no amino acid
  Variant (342)..(354): Xaa in position 342 to 354 is any amino acid
  Variant (355)..(362): Xaa in position 355 to 362 is any or no amino acid
  Variant (364)..(365): Xaa in position 364 to 365 is any amino acid
  Variant (368)..(370): Xaa in position 368 to 370 is any amino acid
  Variant (373)..(374): Xaa in position 373 to 374 is any amino acid
  Variant (377)..(377): Xaa in position 377 is any amino acid
  Variant (380)..(381): Xaa in position 380 to 381 is any amino acid
  Variant (383)..(386): Xaa in position 383 to 386 is any amino acid
  Variant (388)..(391): Xaa in position 388 to 391 is any amino acid
  Variant (393)..(394): Xaa in position 393 to 394 is any amino acid
  Variant (397)..(399): Xaa in position 397 to 399 is any amino acid
  Variant (400)..(401): Xaa in position 400 to 401 is any or no amino acid
  Variant (403)..(410): Xaa in position 403 to 410 is any amino acid
  Variant (414)..(415): Xaa in position 414 to 415 is any amino acid
  Variant (417)..(419): Xaa in position 417 to 419 is any amino acid
  Variant (421)..(422): Xaa in position 421 to 422 is any amino acid
  Variant (425)..(425): Xaa in position 425 is any amino acid
  Variant (428)..(428): Xaa in position 428 is any amino acid
  Variant (430)..(430): Xaa in position 430 is any amino acid
  Variant (433)..(434): Xaa in position 433 to 434 is any amino acid
  Variant (437)..(441): Xaa in position 437 to 441 is any amino acid
  Variant (443)..(443): Xaa in position 443 is any amino acid
  Variant (446)..(447): Xaa in position 446 to 447 is any amino acid
  Variant (449)..(449): Xaa in position 449 is any amino acid
  Variant (451)..(451): Xaa in position 451 is any amino acid
  Variant (453)..(455): Xaa in position 453 to 455 is any amino acid
  Variant (457)..(458): Xaa in position 457 to 458 is any amino acid
  Variant (461)..(466): Xaa in position 461 to 466 is any amino acid
  Variant (470)..(473): Xaa in position 470 to 473 is any amino acid
  Variant (476)..(484): Xaa in position 476 to 484 is any amino acid
  Variant (485)..(485): Xaa in position 485 is any or no amino acid
  Variant (487)..(505): Xaa in position 487 to 505 is any amino acid
  Variant (509)..(509): Xaa in position 509 is any amino acid
  Variant (512)..(512): Xaa in position 512 is any amino acid
  Variant (514)..(516): Xaa in position 514 to 516 is any amino acid
  Variant (518)..(522): Xaa in position 518 to 522 is any amino acid
  Variant (524)..(525): Xaa in position 524 to 525 is any amino acid
  Variant (528)..(528): Xaa in position 528 is any amino acid
  Variant (530)..(530): Xaa in position 530 is any amino acid
  Variant (533)..(534): Xaa in position 533 to 534 is any amino acid
  Variant (537)..(539): Xaa in position 537 to 539 is any amino acid
  Variant (541)..(541): Xaa in position 541 is any amino acid
  Variant (543)..(549): Xaa in position 543 to 549 is any amino acid
  Variant (551)..(553): Xaa in position 551 to 553 is any amino acid
  Variant (557)..(560): Xaa in position 557 to 560 is any amino acid
  Variant (563)..(563): Xaa in position 563 is any amino acid
  Variant (566)..(566): Xaa in position 566 is any amino acid
  Variant (570)..(575): Xaa in position 570 to 575 is any amino acid
  Variant (579)..(581): Xaa in position 579 to 581 is any amino acid
  Variant (583)..(586): Xaa in position 583 to 586 is any amino acid
  Variant (588)..(589): Xaa in position 588 to 589 is any amino acid
  Variant (590)..(591): Xaa in position 590 to 591 is any or no amino acid
  Variant (593)..(593): Xaa in position 593 is any amino acid
  Variant (595)..(595): Xaa in position 595 is any amino acid
  Variant (597)..(599): Xaa in position 597 to 599 is any amino acid
  Variant (601)..(603): Xaa in position 601 to 603 is any amino acid
  Variant (605)..(607): Xaa in position 605 to 607 is any amino acid
  Variant (610)..(611): Xaa in position 610 to 611 is any amino acid
  Variant (616)..(616): Xaa in position 616 is any amino acid
  Variant (620)..(620): Xaa in position 620 is any amino acid
  Variant (624)..(641): Xaa in position 624 to 641 is any amino acid
  Variant (642)..(665): Xaa in position 642 to 665 is any or no amino acid
MXXXXXXXXXXXXXXXXXXXXXXXXXXXXXXXXXXXXXXXXXXXXXXXXXXXXXXXXXXXXXXXXXXXXXXXXXXXXVXXXXXXXXXXXXXXXXXXXXXXXXXXPXLXXXXXXXXXXXXXXXXXXXXXXXXXXXXXXXXXXVXPXYXXLNXXXXXXXNXXPVWXLXXPLPXVXXXXXXXXXXXXXXXXXXXXXXXXXSXXXXXXXXXXXXXXXXXXXXXXXXXXXXXXXXXXXXXXXXXXXXXXXXXXXXXXXXXXXXXXXXXXXXXXXXXXXXXXXXXXXXXXXXXXXXXXXXXXXXXXXXXXXXXXXXXXXXXXXXXXXXXXXXXXXXXXXEXXXXXXLXXXXXXXXXXXXXXXXXXXXXWXXIRXXXREXXAEXLGXXVXXXXGXXXXLXXTVXXXXXGXXXXXXXXWGFXXMXXXYXXGGXSGXHXNPXXTIXXXXXRXFPXXKXPXYXXXQXXGAXXXXXXAYGXXXXSIXXXXXXXXXXTXXXXXXXXXXXXXXXXXXXAFFXEFXGXXXLXXXXXAXXDDXNXPPXXGMXXXIXGXXXXXXXMXXXYQTXXXXNPXRDXGPRXXXXXXGYGXXXFXXXXWXXXXGXWXGXXXGXXXGXXXYDXXIFTGXESPXNYPXXXXXXXXXXXXXXXXXXXXXXXXXXXXXXXXXXXXXXXXXXE

SEQ ID NO: 64157 - DNA, 801 bp, Saccharomyces cerevisiae
  CDS (1)..(801)
atggcattgcatcagtatttatcagagacttatgggcccacgaaacccaaaaataagacgaaaaagaagaagaaagagtcaaaatcagacgctaactcagacaaaacttctttgatagtaaaagaacggctaagtacactgcaacaagaacaggagaagtcaggagttgcttcattcagcaagtttgacaaacaaaaaagcaagaatatatggaagaacctggaaacaaacgagctttcccatgcaataacacatccttccgcatcgtcaattactggcaacgaaagcaagaacgatctaaaggaaatcagggctcaagagccacttgtcacagtagcagacaaatcgaaaacacgaaaaaccatatacagagacgctcaaggtcacaagattcaggaagattccaagatagacgattctagttttagtcgatctaaatatgaagatgagaaagccgcggaaagagagcaatacctgaaaaatttgaatatgggagacgtgcaaaagcttggaataaatgtagatgcacatgataagaagaaaaatcaaactgcctcgagtctgacgatagaagaccctgcaataacatttacacatgacaaagaaagaactgtaaaaacatctttactgggccgcaagctttatgataagccagcacctgagaacaggtttgccattatgcctgggtcaagatgggacggtgtccacagatcaaatggctttgaagaaaaatggtttgctaagcaaaatgagatcaatgagaagaaagtgcaaagctacaccctacaggaggattattga

SEQ ID NO: 64158 - protein, 266 aa, Saccharomyces cerevisiae
MALHQYLSETYGPTKPKNKTKKKKKESKSDANSDKTSLIVKERLSTLQQEQEKSGVASFSKFDKQKSKNIWKNLETNELSHAITHPSASSITGNESKNDLKEIRAQEPLVTVADKSKTRKTIYRDAQGHKIQEDSKIDDSSFSRSKYEDEKAAEREQYLKNLNMGDVQKLGINVDAHDKKKNQTASSLTIEDPAITFTHDKERTVKTSLLGRKLYDKPAPENRFAIMPGSRWDGVHRSNGFEEKWFAKQNEINEKKVQSYTLQEDY

SEQ ID NO: 64159 - DNA, 813 bp, Ashbya gossypii
  CDS (1)..(813)
atgtccttgaacagttacctaaccgaggcttatggtcccaagagagcagccaagtcaaggaatggctccaaacgcgaagctaaagtgtccaatgttagtatcaccgattctgccgaacagttagtcttcaccaacaataagccgacgggccatgcaacggatataaaggccaaagcgaaacgaacaggactatttaagaatctggagaccaatgagcttaccgaattcaagcctgcaagtgaggtgcaagagccaaatgaggtcaagatgagttcgggagcgcatgcaggcctgcaatcggcagagcaggttgcggaacagattggcaaaaagcagcgagaagcacagcgagaagctgctgcggcagcagtcaataaagagactgtgttccgggacagctccggtgcccagattgcggactactctacatatatgcgcgaccgtgagcgggcggacaagctacgcgaacggttccagcaaaataagagcagagagatgaacatgggagacatacagctacatcagctacggaatccagattggcggcccgcacgttgtgaaggcgagcagattcgtagggatgaccctgcggcccagttcactgctgagtcctcggccgccacatacaagctctctccactggggagaaagctttacaacaaagcatggcctgaaaacaggttccagatagctcctggatggcgctgggacggagtagatcgctcaaatggtttcgagcagaagtggtttgcaaagcaaggggagcttgcagagcgaaaagcgcagcagatggccgcgcaacaggattactga

SEQ ID NO: 64160 - protein, 270 aa, Ashbya gossypii
MSLNSYLTEAYGPKRAAKSRNGSKREAKVSNVSITDSAEQLVFTNNKPTGHATDIKAKAKRTGLFKNLETNELTEFKPASEVQEPNEVKMSSGAHAGLQSAEQVAEQIGKKQREAQREAAAAAVNKETVFRDSSGAQIADYSTYMRDRERADKLRERFQQNKSREMNMGDIQLHQLRNPDWRPARCEGEQIRRDDPAAQFTAESSAATYKLSPLGRKLYNKAWPENRFQIAPGWRWDGVDRSNGFEQKWFAKQGELAERKAQQMAAQQDY

SEQ ID NO: 64161 - DNA, 846 bp, Candida albicans
  CDS (1)..(846): transl_table=12
atgtcaaaaagggcagattatttatctaaatatttaaataatgaatcatctgataaacctaaaaagaaaaaacataagaagaaatcatccaccacccctgcaacatctatgaatattgtggtggaaactcccaaaccattaggtgtaccttcaatagataataatgaagaatataatgaattgaatcaacaaacaaaagacaatgaggttgatgttgatgaatttgctccagtgaaactaaaaacaactcaaaaatcaaataaaggtttcaaacgaatagataatggagatataataactacaaataatactaccacgactactccaccaccatcatcattatcttcttcttcatcagtaataaagcctaataagctacaacctaatcaagaaactatatatcgtgattcatccggacgtataataaatgatatcaaacaacgacaagaagatttacaacaacaaaaattgcatgaagaacaattgaaacaatttactgaaattaaaacatctaaacaagatcaaataaatcaagaacaagaaatatttaaagtcaaaaatggtcatgttgataatcaatttgaagatcccatgacatcatttattaaagataccactaccaccaccaaaaaagaatttgaggatgtatctaaatcaaaatttgtttataataaagggatcaatatacctaatcgattcaatatacctgctggatatttttgggatggaatagatcgtagtaatggttttgaacaaatgtatcttcgtaaacaaactgaatataattatgataaaattgattcaaaaattaatgaaacttatgaaattgatattggtgatgattga

SEQ ID NO: 64162 - protein, 281 aa, Candida albicans
MSKRADYLSKYLNNESSDKPKKKKHKKKSSTTPATSMNIVVETPKPLGVPSIDNNEEYNELNQQTKDNEVDVDEFAPVKLKTTQKSNKGFKRIDNGDIITTNNTTTTTPPPSSLSSSSSVIKPNKLQPNQETIYRDSSGRIINDIKQRQEDLQQQKLHEEQLKQFTEIKTSKQDQINQEQEIFKVKNGHVDNQFEDPMTSFIKDTTTTTKKEFEDVSKSKFVYNKGINIPNRFNIPAGYFWDGIDRSNGFEQMYLRKQTEYNYDKIDSKINETYEIDIGDD

SEQ ID NO: 64163 - DNA, 708 bp, Candida glabrata
  CDS (1)..(708)
atgtcactgcatgactatttattgaaggagtatgggccatccgataggaaaaagaagagtaagaaagtagatagtaaatcaacagctcaaaaaccaaataatgaagatgtcaatagcaatgctaataatcccttgagagataactctgagaaatccctatggttaagtcatggtgtaaataatattcctggagcaccgctatcggacaatttgacgaataaacagaagaatggcatcaatatcgaaccaccttccagaacagtattagaaccaaagacccacaatatcgagacagtatttagaaatgcgcagggtcataagatagatgtcgaagctaaaacgcttgacagtgactctggcaaaagaaatagccaagaagaaaggatacgaatattgaatatgggcgaaatacagctagctgggctagatggtgtttcaactatcagtagtaagtacacggctgaaatacgagataatgacccagcgactgagtttgatcataataaaggcgtgaatcatcaaaagatatcacctttaggtaggaagctatacgcaggtactgctacagaaaataggtttgggatactaccaggtaataagtgggatggggttgatagatcaaatggttatgaaaaaaagtggtttaaaagacagggcgaacttgcggagtcaaaaattcaagagtttactaatagtgaagactattaa

SEQ ID NO: 64164 - protein, 235 aa, Candida glabrata
MSLHDYLLKEYGPSDRKKKSKKVDSKSTAQKPNNEDVNSNANNPLRDNSEKSLWLSHGVNNIPGAPLSDNLTNKQKNGINIEPPSRTVLEPKTHNIETVFRNAQGHKIDVEAKTLDSDSGKRNSQEERIRILNMGEIQLAGLDGVSTISSKYTAEIRDNDPATEFDHNKGVNHQKISPLGRKLYAGTATENRFGILPGNKWDGVDRSNGYEKKWFKRQGELAESKIQEFTNSEDY

SEQ ID NO: 64165 - DNA, 1038 bp, Emericella nidulans
  CDS (1)..(1038)
atgaccgattccgaatatcttgcgaagaactaccttactgcggacccttcgcctcccacggatcgccccaaaaagaagcgcaagaagaccaaagctgccgaagtagaatcacaagggctcataattgcggacgatgacccacccgatctccggagcacggctacgctgagttcaaaagaaaatgatgagtacggacctgttgtgacaggcgcgcgaagcgcagagtttcgcaaaactaagaagagtaattggaagactattgggtcgtctacgaacacgggtacggatacagctacagctacggggccaaatgctggacgggatgaggcagacgctatattagcggatgcgatggctgaggaggatgcgaggcgggcagcgggtgatgaagacccgatggttgtggatcaggatgataatgaagacgatggagggctgcgaatggaatcgggcgctcgcgcgggtctacagacggcggaacaaacagcagccatggtagcagcgcagcagaagaagcgaaaggcagaagaagcgcaatataaagggaaacaaggacacgcacaagagaccatataccgagacgcctcaggacggattataaacgttgcgatgaagcgggccgaagcgcgacggctggaggaggagaagctgatcaaggaagcggaggcgaaagaggcgctcatgggtgatgtgcagcgggctgagagggagtccaggagagcggcgctcgaggaggcaaaggtcatgccgttggcgcggactgcggacgatgaggagctgaacgaggagttgaaagcgcaaactcggtggaacgaccccgcggcgcagttcctgaccaagagtacagggggtggcaggagcaaaacggggaagccgctatataagggggcatttcagccaaatcgatatggaatccggcccgggcatcggtgggatggtgtggatcggtcgaatgggttcgaaaaggagtggtttgcggcgcgcaataagaaggagaggatgcaggctctggaatatgagtggcagatggatgaatag

SEQ ID NO: 64166 - protein, 345 aa, Emericella nidulans
MTDSEYLAKNYLTADPSPPTDRPKKKRKKTKAAEVESQGLIIADDDPPDLRSTATLSSKENDEYGPVVTGARSAEFRKTKKSNWKTIGSSTNTGTDTATATGPNAGRDEADAILADAMAEEDARRAAGDEDPMVVDQDDNEDDGGLRMESGARAGLQTAEQTAAMVAAQQKKRKAEEAQYKGKQGHAQETIYRDASGRIINVAMKRAEARRLEEEKLIKEAEAKEALMGDVQRAERESRRAALEEAKVMPLARTADDEELNEELKAQTRWNDPAAQFLTKSTGGGRSKTGKPLYKGAFQPNRYGIRPGHRWDGVDRSNGFEKEWFAARNKKERMQALEYEWQMDE

SEQ ID NO: 64167 - DNA, 807 bp, Kluyveromyces lactis
  CDS (1)..(807)
atgtcacttaacgattttttggcgaagtcttacggctcaaagcacggtaaagagaagacgaaaaagtctaaggataagtcatcacacagaaagagcgatgagtctaaaagagtcacatcaagaaatattgatattattgacaaggctaatcttattactgaagaaaacaagaaggctgcaagctcaaataaaacaggaaagtctctttggaaaaaccttgaaactgaaaagttggaacttgtacaacacgttgatgtcgacaaaaaggacgatagtaaggaaaggatgtcgtcaggcgcctttgctgggttacagacagcagaagagatggaaaagcagatcgcagaaaaggaaaaactttctatgcaaaaatcagggcttctcaagaagaatcagaacacagtatatagagacgaaaaaggtaaggtaatagatggatacgaagaagaattgaaacttcgagaaaaggctaatttgacagcgaaagtacgtaaggaagaagaacttaaaatacgaaatataggcgaagtacaaatatcaaaacttgatcgcaaaactgagaaaagtgcattattatcaaccgaagatccattgaatcaaggaaacaccctgcgaggaacgaatacgtcactgttgggtcgaaggctttacgagaaaaactttccagaaaatcggttcggtatcgttcccggttatagatgggatggagttgatagatcaaatgggtttgaaactaagtggtttgctaagagtcacgatatcgctgatcaaaaaataaaggaacaaacaacaaaccgggaattttga

SEQ ID NO: 64168 - protein, 268 aa, Kluyveromyces lactis
MSLNDFLAKSYGSKHGKEKTKKSKDKSSHRKSDESKRVTSRNIDIIDKANLITEENKKAASSNKTGKSLWKNLETEKLELVQHVDVDKKDDSKERMSSGAFAGLQTAEEMEKQIAEKEKLSMQKSGLLKKNQNTVYRDEKGKVIDGYEEELKLREKANLTAKVRKEEELKIRNIGEVQISKLDRKTEKSALLSTEDPLNQGNTLRGTNTSLLGRRLYEKNFPENRFGIVPGYRWDGVDRSNGFETKWFAKSHDIADQKIKEQTTNREF

SEQ ID NO: 64169 - DNA, 918 bp, Schizosaccharomyces pombe
  CDS (1)..(918)
atgcattcagcacatatgtcaaacgccgactatattgctaaaaagtatttacgaaaagatcaagggaaaaagaaaaagaagaaagagaaggattttgtagaaattcaggatgaagatgtcgctggatgggacgatgacaattcattttcactagtcaacagagaactcacatctttgcatgatgcccctacaattgtcgcaaatgaaagccttaaagatcgagatattgatgctatttatcagaatatagaaaaaactactaataaacctgctcagttgtggaaagctgtggggaatgatgaagttgtcgaatctgaacaacaggattctcatgatgctgaatcaattcctcagttcggtctgttaactggaaagcaggtgacctttaaagctgaagaaagaagaaagagagaagagaaatcatccaatcttgatgaggaagagcttcgcaaaagtcgcgaaactgtttacagagatgccacagggagaaggatagatctggttcttgcaagaaaagaagccaaaagaaaattaaaagagaaagaggaagaagctagaagacagaaggaacaacaacaaggtgtggttcaagtgcgtcaacagaaagaatacctaaaagaacttgaaaggcaaaaaacggtgccattggcgcgttatgaggacgatcctgaatacaataaggaattgaaagaaaggtctcgttggaatgacccagctgcttcgtttctcactaataaacctgtatcatcaaaagctacttatcaaggatatgcgcctcccaataggtttaatatacgacctggccatcgttgggatggaattattcgtggtaatggatttgaaaataaatggtttcagcgccaaaatgagagaaaggcacaagaacacgaggcacatatgtgggcaattgaggagtaa

SEQ ID NO: 64170 - protein, 305 aa, Schizosaccharomyces pombe
MHSAHMSNADYIAKKYLRKDQGKKKKKKEKDFVEIQDEDVAGWDDDNSFSLVNRELTSLHDAPTIVANESLKDRDIDAIYQNIEKTTNKPAQLWKAVGNDEVVESEQQDSHDAESIPQFGLLTGKQVTFKAEERRKREEKSSNLDEEELRKSRETVYRDATGRRIDLVLARKEAKRKLKEKEEEARRQKEQQQGVVQVRQQKEYLKELERQKTVPLARYEDDPEYNKELKERSRWNDPAASFLTNKPVSSKATYQGYAPPNRFNIRPGHRWDGIIRGNGFENKWFQRQNERKAQEHEAHMWAIEE

SEQ ID NO: 64171 - DNA, 25 bp, Artificial sequence
  primer
atggcattgcatcagtatttatcag

SEQ ID NO: 64172 - DNA, 24 bp, Artificial sequence
  primer
tcaataatcctcctgtagggtgta

SEQ ID NO: 64173 - protein, 336 aa, Artificial sequence
  consensus sequence
  Variant (2)..(10): Xaa in position 2 to 10 is any amino acid
  Variant (12)..(18): Xaa in position 12 to 18 is any amino acid
  Variant (19)..(25): Xaa in position 19 to 25 is any or no amino acid
  Variant (27)..(27): Xaa in position 27 is any amino acid
  Variant (30)..(30): Xaa in position 30 is any amino acid
  Variant (32)..(106): Xaa in position 32 to 106 is any amino acid
  Variant (107)..(189): Xaa in position 107 to 189 is any or no amino acid
  Variant (191)..(192): Xaa in position 191 to 192 is any amino acid
  Variant (195)..(196): Xaa in position 195 to 196 is any amino acid
  Variant (198)..(199): Xaa in position 198 to 199 is any amino acid
  Variant (201)..(226): Xaa in position 201 to 226 is any amino acid
  Variant (227)..(233): Xaa in position 227 to 233 is any or no amino acid
  Variant (235)..(236): Xaa in position 235 to 236 is any amino acid
  Variant (238)..(256): Xaa in position 238 to 256 is any amino acid
  Variant (257)..(276): Xaa in position 257 to 276 is any or no amino acid
  Variant (279)..(281): Xaa in position 279 to 281 is any amino acid
  Variant (283)..(293): Xaa in position 283 to 293 is any amino acid
  Variant (294)..(303): Xaa in position 294 to 303 is any or no amino acid
  Variant (305)..(310): Xaa in position 305 to 310 is any amino acid
  Variant (311)..(311): Xaa in position 311 is any or no amino acid
  Variant (315)..(315): Xaa in position 315 is any amino acid
  Variant (317)..(317): Xaa in position 317 is any amino acid
  Variant (320)..(321): Xaa in position 320 to 321 is any amino acid
  Variant (325)..(326): Xaa in position 325 to 326 is any amino acid
  Variant (333)..(334): Xaa in position 333 to 334 is any amino acid
MXXXXXXXXXYXXXXXXXXXXXXXXKXKKXKXXXXXXXXXXXXXXXXXXXXXXXXXXXXXXXXXXXXXXXXXXXXXXXXXXXXXXXXXXXXXXXXXXXXXXXXXXXXXXXXXXXXXXXXXXXXXXXXXXXXXXXXXXXXXXXXXXXXXXXXXXXXXXXXXXXXXXXXXXXXXXXXXXXXXXXXXXXXXXTXXRDXXGXXIXXXXXXXXXXXXXXXXXXXXXXXXXXXXXXXXXGXXQXXXXXXXXXXXXXXXXXXXXXXXXXXXXXXXXXXXXXXXDPXXXFXXXXXXXXXXXXXXXXXXXXXYXXXXXXXNRFXIXPGXXWDGXXRSNGFEXXWF

SEQ ID NO: 64174 - protein, 31 aa, Artificial sequence
  protein pattern
  Variant (4)..(4): Xaa in position 4 is Ala, Gly, Asn or Gln
  Variant (6)..(6): Xaa in position 6 is any or no amino acid
  Variant (8)..(8): Xaa in position 8 is any or no amino acid
  Variant (10)..(11): Xaa in position 10 to 11 is any amino acid
  Variant (15)..(15): Xaa in position 15 is Ile or Val
  Variant (16)..(16): Xaa in position 16 is any amino acid
  Variant (18)..(18): Xaa in position 18 is Gly or Ser
  Variant (21)..(21): Xaa in position 21 is Phe or Tyr
  Variant (23)..(24): Xaa in position 23 to 24 is any amino acid
  Variant (25)..(25): Xaa in position 25 is Trp or Tyr
  Variant (26)..(26): Xaa in position 26 is Phe or Leu
  Variant (27)..(27): Xaa in position 27 is any amino acid
  Variant (28)..(28): Xaa in position 28 is Lys or Arg
  Variant (29)..(29): Xaa in position 29 is Gln or Ser
  Variant (30)..(30): Xaa in position 30 is any amino acid
  Variant (31)..(31): Xaa in position 31 is Asp or Glu
NRFXIXPXGXXWDGXXRXNGXEXXXXXXXXX

SEQ ID NO: 64175 - protein, 11 aa, Artificial sequence
  protein pattern
  Variant (2)..(2): Xaa in position 2 is Ile or Val
  Variant (3)..(3): Xaa in position 3 is Phe or Tyr
  Variant (6)..(6): Xaa in position 6 is Ala, Glu or Ser
  Variant (7)..(7): Xaa in position 7 is any amino acid
  Variant (9)..(9): Xaa in position 9 is any amino acid
  Variant (10)..(10): Xaa in position 10 is any or no amino acid
TXXRDXXGXXI

SEQ ID NO: 64176 - protein, 12 aa, Artificial sequence
  protein pattern
  Variant (2)..(2): Xaa in position 2 is Ala, Ser or Thr
  Variant (3)..(4): Xaa in position 3 to 4 is any amino acid
  Variant (5)..(5): Xaa in position 5 is Asp, Glu, Gln or Ser
  Variant (6)..(6): Xaa in position 6 is Phe or Tyr
  Variant (7)..(7): Xaa in position 7 is Ile or Leu
  Variant (8)..(8): Xaa in position 8 is any amino acid
  Variant (9)..(9): Xaa in position 9 is Glu or Lys
  Variant (10)..(10): Xaa in position 10 is any amino acid
  Variant (12)..(12): Xaa in position 12 is Gly or Leu
MXXXXXXXXXYX

SEQ ID NO: 64177 - DNA, 798 bp, Saccharomyces cerevisiae
  CDS (1)..(798)
atgtcagcagacgaaacggatgcgaaatttcatccattagaaacagatctgcaatctgatacagcggctgcaacatcaacggcagcagcttcacgcagtccctctcttcaagagaagcccatagagatgcccttggatatgggaaaagcgccttctccaagaggcgaagatcaacgggttacaaatgaagaagatttgtttttgtttaacagattgcgggcatcacagaatagagttatggactccttggaaccacaacaacagtcacagtatacatcttccagtgtcagtacgatggaaccatctgccgactttactagtttctctgcagtgactactttaccgcctcctcctcatcaacaacaacagcaacaacagcagcagcagcagcagcagcaattggtggttcaagcccagtacacccaaaatcaaccaaacttgcaaagcgatgttttaggaaccgctatagcagagcaaccattttatgttaatgccaagcagtactaccgaattttgaaaaggcgatatgcaagagctaaactagaggaaaagctacgaatatcaagagaacgaaagccatacttacacgaatctcgacataaacatgcgatgcgaagacctcgtggtgaaggtgggaggttcttgacagccgctgagatcaaagccatgaaatcgaagaaaagtggggctagcgatgatcctgacgatagtcatgaggataaaaaaatcactactaaaataatacaagaacagccgcatgctacttccaccgcagctgcagcagacaaaaaaacataa

SEQ ID NO: 64178 - protein, 265 aa, Saccharomyces cerevisiae
MSADETDAKFHPLETDLQSDTAAATSTAAASRSPSLQEKPIEMPLDMGKAPSPRGEDQRVTNEEDLFLFNRLRASQNRVMDSLEPQQQSQYTSSSVSTMEPSADFTSFSAVTTLPPPPHQQQQQQQQQQQQQQLVVQAQYTQNQPNLQSDVLGTAIAEQPFYVNAKQYYRILKRRYARAKLEEKLRISRERKPYLHESRHKHAMRRPRGEGGRFLTAAEIKAMKSKKSGASDDPDDSHEDKKITTKIIQEQPHATSTAAAADKKT

SEQ ID NO: 64179 - DNA, 921 bp, Magnaporthe grisea 70-15
  CDS (1)..(921)
atgatggagtacgcgcagtaccagcagccgccgcaaaatgcgcactcgaatttccagagctcaacggcgtccaataacatcacgtcgccaacgtctcaacatgtccagacctcgcccataatcccgcaacagaatcagcaagccgcaaacgccaaccaaacccacatgtatcaaccaccgtacggagtgccccagcaaagcttgcactatgggatgccggggatccaggccgccgcactggcggccacagctgccgcttcaggttcaaattacccctacagcttaccgtcggacccaagcctgcagcaaacctcaccgcgtatgggctcaaagaaggaagctagaggcaaccctcgctctcctcaacagatggacgcacaacgtcgcatgagccaggtcacgagtccaggactacctaatgcccaggccatgatgaaccacaccggtgcccgccccggtgttgcggcgccgaccatgccggcacaacagatgggcccgcctcaatcacccgagattgctgccggtgcagttgaagagtccccactatatgtgaatgccaagcagttccatcgcatcctcaagcgccgtgtagcaagacaaaagcttgaagaacaacttcgcttgacctcaaagggacggaaaccttatttgcacgagtctcgacacaatcacgccatgcggaggcctcgcggtcctggtggacgtttcctcactgccgacgaggtccttgagatcgagaaacagaagggactgggtggcgctgaatcagagatcaagcatgatgtcgagtcgtcgccgccagcaaaggccaataacaagcgcaagtccatgtcggtcccggatacggccaacaagaaggccaaagtggatacagaaagtcccgatgttgaagaggaggaggatgccgaggacgatggatga

SEQ ID NO: 64180 - protein, 306 aa, Magnaporthe grisea 70-15
MMEYAQYQQPPQNAHSNFQSSTASNNITSPTSQHVQTSPIIPQQNQQAANANQTHMYQPPYGVPQQSLHYGMPGIQAAALAATAAASGSNYPYSLPSDPSLQQTSPRMGSKKEARGNPRSPQQMDAQRRMSQVTSPGLPNAQAMMNHTGARPGVAAPTMPAQQMGPPQSPEIAAGAVEESPLYVNAKQFHRILKRRVARQKLEEQLRLTSKGRKPYLHESRHNHAMRRPRGPGGRFLTADEVLEIEKQKGLGGAESEIKHDVESSPPAKANNKRKSMSVPDTANKKAKVDTESPDVEEEEDAEDDG

SEQ ID NO: 64181 - DNA, 924 bp, Gibberella zeae PH-1
  CDS (1)..(924)
atggattacagtcaatatcaacaacagggacaaaatacaaattcgggctacacaaactcggctgctgctaataacatcacatcgccaacgaacaacatctcccagcacccagtgcaatcgtcgcccatcatcgcctcccagcaacagcaaggtcaaactcaaggtcacggcatgtaccaaccaccatacggagtgccgcagcagggtatgcagcaagtccactatggaatgcctggcatacaggcggccgcaatggccgcaaccgctgctgcctctggcgcaaactatccctatatgccttccgatcccaacatgccccaaagctcacctcgcacgggcgccaatgctaagaatgatggacgccaatctcctcgcatgaacagcatgtctcaattacctgggcgcaggatgagtcaggttacgagccccggcgttgctactgcaccgatgatgagccatgccggcgcgcgaccaggcgtcgccccaccgcagatgccgaccgcacagatgcaacatccacaatcgcccgacatgccggccgctagtggtgcggaagaatcgccgttatatgtgaacgccaagcaattccaccgcattctcaagcgccgcgttgcccgacaaaagctcgaagaacaactgcgattgacgtcaaaagggcggaagccatatctccacgaatcacgacacaaccatgctatgcgaagacctcgtggtcctggcggtcgctttctcactgcggaagaggttgcggccatggaacgtgatggtgagaagagcgccgatggaaaagacaactctgctgcggagaactctgggaacgcgggaacaaagcgcaagtctgaagctggctctgcaacctcgaataaaaaagctaagacggacacagcgagcccaggggatgacgaagatgaggacgagggttaa

SEQ ID NO: 64182 - protein, 307 aa, Gibberella zeae PH-1
MDYSQYQQQGQNTNSGYTNSAAANNITSPTNNISQHPVQSSPIIASQQQQGQTQGHGMYQPPYGVPQQGMQQVHYGMPGIQAAAMAATAAASGANYPYMPSDPNMPQSSPRTGANAKNDGRQSPRMNSMSQLPGRRMSQVTSPGVATAPMMSHAGARPGVAPPQMPTAQMQHPQSPDMPAASGAEESPLYVNAKQFHRILKRRVARQKLEEQLRLTSKGRKPYLHESRHNHAMRRPRGPGGRFLTAEEVAAMERDGEKSADGKDNSAAENSGNAGTKRKSEAGSATSNKKAKTDTASPGDDEDEDEG

SEQ ID NO: 64183 - DNA, 891 bp, Candida glabrata CBS 138
  CDS (1)..(891)
atgtctcgaagagaagttatatactctgaaacaatgaatctacagaatgtacatccaccgtcctctattgttggtggtacttcaaacgccagccccgcaggtaccgatttgtacacctcaaatccggatgataacgaatctcaggcacctacaaacgaggagctatatctctacaacgaactgaaaagagtctcagaaaatgtggattctgataaccttgaaggaaagcaacaagaagatacaggagtaccacaaaatattataaccaaacaatatgttcaaacaattcccagaacagctttggataatgaatcaaataatggaaatatcaaaatggaatctgaaccaccaataaactcaacaactagagtccctgataataaaaacacacatataaatggaaaagagaaaaactacaagtttgatggaccacagcgtagctctactaatgataatgttcgtaagtcagttccaaaaaattatgaaaatccctctaataagttttcaactgaaattccagaatcgaatctgccgaaagaagagagtacttcagagcaaccgtattatgttaatgccaagcaatattatagaattctgaagaggagatatgctagagcaaaattagaagaatctttacgaatatgtagagaaaggaaaccatatttacatgaatctcgtcacaagcatgctttgagaagaccgcgcggtgaaggtggccggttcctcactgctgcagagatcaaagagctcaaggaaaagggtgaattgaaggatactgaaaaaactaaaagtcaatcagatgcagaaaaatctatagatacaaatgcagacattgtaaatagtcaaaaatcaggtgctagtactggagacttagacaccaaaaaagattaa

SEQ ID NO: 64184 - protein, 296 aa, Candida glabrata CBS 138
MSRREVIYSETMNLQNVHPPSSIVGGTSNASPAGTDLYTSNPDDNESQAPTNEELYLYNELKRVSENVDSDNLEGKQQEDTGVPQNIITKQYVQTIPRTALDNESNNGNIKMESEPPINSTTRVPDNKNTHINGKEKNYKFDGPQRSSTNDNVRKSVPKNYENPSNKFSTEIPESNLPKEESTSEQPYYVNAKQYYRILKRRYARAKLEESLRICRERKPYLHESRHKHALRRPRGEGGRFLTAAEIKELKEKGELKDTEKTKSQSDAEKSIDTNADIVNSQKSGASTGDLDTKKD

SEQ ID NO: 64185 - DNA, 1104 bp, Aspergillus oryzae
  CDS (1)..(1104)
atggaatatcctccacaatatcaacagcctcatggccaacacccacatgccccctcccacatcgctgccccgtatcagaccgcaccccagaacccaggctcaacggtgggttcgatgacctctcccaccaatccccaggcacacatgcagcaagcccatcctacgcatcaagcatctcccattgtcccatcgcagtctcattaccaacaggcacagaatgcgccgggttcagtacaccagcagatgaactttcctcaatcctatggggtaactacagcgatgccgcagacgttcggcatctcaccaacacaggcggcggctatggctactgcggctgcgtctgggcaattctaccctttgcatcaggactcaatggctggccaaatgcagcaagggcctcgtggctcgccacgtatggctggagtgcaacaggtgaagaatgagcggaatccacgctcgccaccgcagatgccagggcaaatgccttctatgggttcgcaagtacagatgcagcagaatgcacagatacaacagcgtcgcatgagccatgttggcagcccccacgttcaagctgctcagccggtccttaatcacgttgttcgaccttcagtacctccacctatgccgcccccacctcagcctgcggtgcaacaaagccaaccttccccagatatggctgttggcgccgtggaagaatctcctctttacgtcaatgcaaagcaattccaccgcattttgaaacggcgcgttgctaggcaaaaattggaggaacaactccgactcacgtccaagggccgtaagccatatttgcatgagtcgcgtcataatcatgccatgcgacggccacgcggtcctggtggtcgattcctgacggcagacgaagtcgctaacttggagaagaagaataacgctggtggacaagagaatgtcgatagcaagccgaccggtgagaatcctccgtcggcacagaaaagaaaatctagtgatgttaacgatgagaacacgaactcagcgaagaaggcgaagactagtgttgcaaaaacgagcacgagcgctgaggagagcgaacacgaatccgccgaaccatccgatgaggatggttga

SEQ ID NO: 64186 - protein, 367 aa, Aspergillus oryzae
MEYPPQYQQPHGQHPHAPSHIAAPYQTAPQNPGSTVGSMTSPTNPQAHMQQAHPTHQASPIVPSQSHYQQAQNAPGSVHQQMNFPQSYGVTTAMPQTFGISPTQAAAMATAAASGQFYPLHQDSMAGQMQQGPRGSPRMAGVQQVKNERNPRSPPQMPGQMPSMGSQVQMQQNAQIQQRRMSHVGSPHVQAAQPVLNHVVRPSVPPPMPPPPQPAVQQSQPSPDMAVGAVEESPLYVNAKQFHRILKRRVARQKLEEQLRLTSKGRKPYLHESRHNHAMRRPRGPGGRFLTADEVANLEKKNNAGGQENVDSKPTGENPPSAQKRKSSDVNDENTNSAKKAKTSVAKTSTSAEESEHESAEPSDEDG

SEQ ID NO: 64187 - DNA, 1122 bp, Aspergillus niger
  CDS (1)..(1122)
atgatggaatacccgccgcagtatcaacagcctcacggccagcatccccacgcctcctctcacatcactgccccgtatcagacagctccccaaagtgctgggtcgacggtggggtcaatgacttctcccaccaacccccaagcgcgcatgcaacaagctcacgcgacacatcaagcgtctcccattgttccctcacaatctcattatcagcctgctcaaaatgccccgggctctgtacatcagcaaatgaatttcccccagtcgtatggagttaccacggcgatgccacaggcatatggtatctcccctacgcaggcagccgcaatggccaccgctgcagcatcgggtcaattttatcctctccatcaagactcgatggctggccagatggctccgggtccccgcggatcaccgcgcatggctggggtgcaggtcaagagtgaccgcaatcctcgttcaccaccccagattccgggccagatgccctcaatgggatcccaggtacagatgtcccagaacgcccagatgcagcaacgtcgcatgagccatgtcagtagtccacatgttcaaaatgcgcaaccacttatcaaccatgctggacggccttcggtgcccccatctatgccgccaccaccacagccgcctgttcagcaaagccagccttcgccggatatggtcgccggcgccgctgaggagccacctttatacgtgaacgcgaagcaatttcatcgcatcttgaaacgacgagtggctcgccagaaactggaggaacagttgcggcttacttccaagggtcgcaagccatatctgcacgaatcgcgtcataaccatgccatgcgccgccctcgtggtcctggcgggcggttcttaacggctgacgaagtggctgctatggggaagaagcaagcatcggggtctacgaccgctggactcgaaggcgctgacgattatgcggtgaaaccacctggcgataacccgccatccgcacagaaacgaaaatcaagtgatgtcaacgatgacaccatcaattcgtctaaaaagacgaaaactagcgccaagccaagcaccagtgcggatgaaagcgagaatgaatctgctgagctgtccgacgaggatggttga

SEQ ID NO: 64188 - protein, 373 aa, Aspergillus niger
MMEYPPQYQQPHGQHPHASSHITAPYQTAPQSAGSTVGSMTSPTNPQARMQQAHATHQASPIVPSQSHYQPAQNAPGSVHQQMNFPQSYGVTTAMPQAYGISPTQAAAMATAAASGQFYPLHQDSMAGQMAPGPRGSPRMAGVQVKSDRNPRSPPQIPGQMPSMGSQVQMSQNAQMQQRRMSHVSSPHVQNAQPLINHAGRPSVPPSMPPPPQPPVQQSQPSPDMVAGAAEEPPLYVNAKQFHRILKRRVARQKLEEQLRLTSKGRKPYLHESRHNHAMRRPRGPGGRFLTADEVAAMGKKQASGSTTAGLEGADDYAVKPPGDNPPSAQKRKSSDVNDDTINSSKKTKTSAKPSTSADESENESAELSDEDG

SEQ ID NO: 64189 - DNA, 1038 bp, Trichoderma reesei; identical to SEQ ID NO: 22941
  CDS (1)..(1038)

SEQ ID NO: 64190 - protein, 345 aa, Trichoderma reesei; identical to SEQ ID NO: 22942

SEQ ID NO: 64191 - DNA, 912 bp, Arabidopsis thaliana; identical to SEQ ID NO: 22921
  CDS (1)..(912)

SEQ ID NO: 64192 - protein, 303 aa, Arabidopsis thaliana [sequence omitted]

SEQ ID NO: 64193 - DNA, 23 bp, Artificial sequence
  primer
atgtcagcagacgaaacggatgc

SEQ ID NO: 64194 - DNA, 25 bp, Artificial sequence
  primer
ttatgtttttttgtctgctgcagct

SEQ ID NO: 64195 - protein, 380 aa, Artificial sequence
  consensus sequence
  Variant (2)..(26): Xaa in position 2 to 26 is any amino acid
  Variant (27)..(40): Xaa in position 27 to 40 is any or no amino acid
  Variant (42)..(50): Xaa in position 42 to 50 is any amino acid
  Variant (51)..(59): Xaa in position 51 to 59 is any or no amino acid
  Variant (61)..(102): Xaa in position 61 to 102 is any amino acid
  Variant (103)..(143): Xaa in position 103 to 143 is any or no amino acid
  Variant (145)..(151): Xaa in position 145 to 151 is any amino acid
  Variant (153)..(177): Xaa in position 153 to 177 is any amino acid
  Variant (178)..(184): Xaa in position 178 to 184 is any or no amino acid
  Variant (186)..(223): Xaa in position 186 to 223 is any amino acid
  Variant (224)..(265): Xaa in position 224 to 265 is any or no amino acid
  Variant (267)..(267): Xaa in position 267 is any amino acid
  Variant (269)..(269): Xaa in position 269 is any amino acid
  Variant (276)..(277): Xaa in position 276 to 277 is any amino acid
  Variant (284)..(284): Xaa in position 284 is any amino acid
  Variant (287)..(287): Xaa in position 287 is any amino acid
  Variant (292)..(292): Xaa in position 292 is any amino acid
  Variant (295)..(298): Xaa in position 295 to 298 is any amino acid
  Variant (299)..(299): Xaa in position 299 is any or no amino acid
  Variant (310)..(310): Xaa in position 310 is any amino acid
  Variant (319)..(319): Xaa in position 319 is any amino acid
  Variant (327)..(327): Xaa in position 327 is any amino acid
  Variant (329)..(368): Xaa in position 329 to 368 is any amino acid
  Variant (369)..(379): Xaa in position 369 to 379 is any or no amino acid
MXXXXXXXXXXXXXXXXXXXXXXXXXXXXXXXXXXXXXXXSXXXXXXXXXXXXXXXXXXPXXXXXXXXXXXXXXXXXXXXXXXXXXXXXXXXXXXXXXXXXXXXXXXXXXXXXXXXXXXXXXXXXXXXXXXXXXXXXXXXXXXTXXXXXXXYXXXXXXXXXXXXXXXXXXXXXXXXXXXXXXXXPXXXXXXXXXXXXXXXXXXXXXXXXXXXXXXXXXXXXXXXXXXXXXXXXXXXXXXXXXXXXXXXXXXXXXXXXXXXXXXXXEXPXYVNAKQXXRILKRRXARXKLEEXLRXXXXXRKPYLHESRHXHAMRRPRGXGGRFLTAXEXXXXXXXXXXXXXXXXXXXXXXXXXXXXXXXXXXXXXXXXXXXXXXXXXXXK

SEQ ID NO: 64196 - protein, 40 aa, Artificial sequence
  protein pattern
  Variant (3)..(3): Xaa in position 3 is any amino acid
  Variant (6)..(9): Xaa in position 6 to 9 is any amino acid
  Variant (10)..(10): Xaa in position 10 is any or no amino acid
  Variant (21)..(21): Xaa in position 21 is any amino acid
  Variant (24)..(24): Xaa in position 24 is Leu or Met
  Variant (30)..(30): Xaa in position 30 is Glu or Pro
  Variant (38)..(38): Xaa in position 38 is Ala, Asp or Glu
  Variant (40)..(40): Xaa in position 40 is Ile or Val
EEXLRXXXXXRKPYLHESRHXHAXRRPRGXGGRFLTAXEX

SEQ ID NO: 64197 - protein, 21 aa, Artificial sequence
  protein pattern
  Variant (2)..(2): Xaa in position 2 is Pro, Gln or Ser
  Variant (4)..(4): Xaa in position 4 is any amino acid
  Variant (11)..(11): Xaa in position 11 is Phe or Tyr
  Variant (12)..(12): Xaa in position 12 is His or Tyr
  Variant (19)..(19): Xaa in position 19 is any amino acid
EXPXYVNAKQXXRILKRRXAR

SEQ ID NO: 64198 - DNA, 1761 bp, Saccharomyces cerevisiae
  CDS (1)..(1761)
atgttttcacttagttcgctatctagcagcggtgggcattcagagcagaaggaaagagagagaataagttattttgatattagaataaactccccgtacaaggacataattttgatccaagggtcaccgttggaactgtcgtctatacctttatcaggaaacttagtgatttcagtgaaaaatgagatcgtagtgaagaaaatttcgctgagattggtaggaagattcaaattggagtttttgcaagttggccgatataagaagaatagcagtagtttggcaagtctagttaaggaaaagcgtaagattttcgaatgctattgggacaacttattggtttcttcaaaaggggatgttttagtcggtggggaaaatgcggaaaatcaacataacagtagtagcggtcgcagtacaagcaaccaagatatggacaccagcggcaacgcaatatttctaagcaagagatcactttcgagccctgttttcaacaaaataattcgaagaaagacccattcttcccacagaaaaatactagagctaccagaaaatggtgttacaggaacccctttcgagggtttaagagaaaacgcccgtagtagaagcagtagtagtaacaccctcaataacaatagccatagttatagtaacagagacgggtctggaagttcgtacttattcctaatgaaaagaggcaactacgaactacccttcaatacaatgctccccccagaagtgtgcgaaacaatcgagggactacaaagtggtagcatactgtattcctttgaagccattatagatggacgtcagttatgggatactgatctgagcgttcatacttctcctcacggtccaatcggtagcacaagtacgagcggcaatggtatgagaacgaagaataaaattatcatcaaaaagttcaagtatctcagaatccttcgtacattatcgatggacaatcttgccatgcaagaagaaattagcgtgggtaatacttggcgtgacaagttgcaatacgaaacgtccatcccgagtagggctgttcctattggtagcacaacccccgtgaagattaagattttccccttcgaaaagaacattcgtttggataggatagaaatggcgctaatccaatattacgcaatgaaggacagcagcgcacaaatttatgatgatgaaatagccgtcatgaaaattactcatctagcggacttcggcccgctgacggacaaacttgacgtcgattgtccctttacaattccagataacctcaaacaaataactcaagactgctgtctgcaagacaacctaatccgtgtcatgcacaaattgcaggtacgtattcttttacaacgtcaagtggatggcgaatacaagaacctggagatcaaggcgcaattacctatgttattatttatttcgccgcatctgcctatgaaaggccgtctagtgttgtttgataaacacgatggcaagatccacttccgccctggcgaattagtacccctttttttaaccacttaccccgcgcagggtctgactccaggcgttgaactgaactccactacaacggcgcacctcgcgctgccacaaccgccaccgaattatcacgagagcaccaacgatcatctcatgccggcgctacagccgctcggcgccgattcggtggtactgacagtgccgtcatacgagcaggcgcaggcgcaggcatcggcatcgtcttacgtgacagggtccgtacccgcttactgcgacgatgactga

SEQ ID NO: 64199 - protein, 586 aa, Saccharomyces cerevisiae
MFSLSSLSSSGGHSEQKERERISYFDIRINSPYKDIILIQGSPLELSSIPLSGNLVISVKNEIVVKKISLRLVGRFKLEFLQVGRYKKNSSSLASLVKEKRKIFECYWDNLLVSSKGDVLVGGENAENQHNSSSGRSTSNQDMDTSGNAIFLSKRSLSSPVFNKIIRRKTHSSHRKILELPENGVTGTPFEGLRENARSRSSSSNTLNNNSHSYSNRDGSGSSYLFLMKRGNYELPFNTMLPPEVCETIEGLQSGSILYSFEAIIDGRQLWDTDLSVHTSPHGPIGSTSTSGNGMRTKNKIIIKKFKYLRILRTLSMDNLAMQEEISVGNTWRDKLQYETSIPSRAVPIGSTTPVKIKIFPFEKNIRLDRIEMALIQYYAMKDSSAQIYDDEIAVMKITHLADFGPLTDKLDVDCPFTIPDNLKQITQDCCLQDNLIRVMHKLQVRILLQRQVDGEYKNLEIKAQLPMLLFISPHLPMKGRLVLFDKHDGKIHFRPGELVPLFLTTYPAQGLTPGVELNSTTTAHLALPQPPPNYHESTNDHLMPALQPLGADSVVLTVPSYEQAQAQASASSYVTGSVPAYCDDD

SEQ ID NO: 64200 - DNA, 1755 bp, Candida glabrata CBS 138
  CDS (1)..(1755)
atgttttcccttaagaatttggataagaggctgtacgactcgcatggtaggaagaaaaggaagaagaaattggtttatattgatgtgcgtaccaattcgatctacaaggatatgatccttatccagggaacacctttggagtctcctcccataccgttgtcagggaatgtagtttttagtgtaagcgataatgtgaaggtaaagcggatcaagctccggctagtatgccactataaattggattttgtacaattggttcatgacgacatggcaagtatagtgaaagaaagaactaagatattggagtgtacttgggctaaccttctgaaaaatagtgagggagaaacacaatttgacttcacaaaagttcacaagagcacgaagaaaaaaactggactgctacgtggaattaaaatatggaacactagtgatggagattattcgagtggtcatcatgggactagtgctagtgaatctgtagcaagttcgcattctactggacacacctcaagtgaacatgggaagtggtatcaagcaggtaattatgaagttccgtttcaggtccaacttcctaacgatattccagaaactatcgagggtttgcaaagtggtagcattctttacaattttatcctggaaatagagacagaggaaagaaataataaagttgatgtgacgaataagtacaatttctacaaatatctcaggattttgagaacattgtctatgaatcatattgcaatacaggaagaaatgatggttagtaatactataaggaatatgttacaataccaaatcagcataccaagtagggctgtatcgattggcgacgaaagtatgataggactatcgatcaagctaattccgtttgagaaaagttattatcaattagataaaataatggttggtctggtacaggaatattgtgttaaggacagacatgatgaggaatacgtagatagtagtacgatcaaccctataacaatagcatcgtttagggacatagaaggtattgtacctgatacaaacgagttaatagattctacagaattgaagatacaatatgagatgcccaagaatcttaaatcaatcacgcaggactgtgatataatgataggtgatgaacggttagggattaagaagcaagtaatgtatgtgagacatgaacttagtgttcgtatcaagttcatcaaactgaaagatgataataaaccacttgagataaaactacggctaccagttttactatatgtttcgcctatgaagaaattgcttggaagaagagtctatttcaatgagtcgactggtagaatacatttcagggccaatgattatgtgccactgttcaccccaaataccggcaacagcacctctttaaatcaaattggtctgaatagcgcagcaggcgacagccaaggacaatcagacgtacgcgatggtagccaggaggtaccgcccccgctctattcggagatagaccaggatattgtatatacgggtgataatgtagagtcccaattattcgttgagagcacgcgtcgagacgggcgtaaccgggatagtgatgaaatccagatggaaactaaccctgggtcgcaattacgacactatagttcaaatgattcgaatgggtacatgagaaatcaaaatcaaccggtagtcgctactcaaccaccagtggacacgtctacaccaacgtatgaagaggcacaaagtgcaactgttgagcagaggcctgcccctacatacgagtag

SEQ ID NO: 64201 - protein, 584 aa, Candida glabrata CBS 138
MFSLKNLDKRLYDSHGRKKRKKKLVYIDVRTNSIYKDMILIQGTPLESPPIPLSGNVVFSVSDNVKVKRIKLRLVCHYKLDFVQLVHDDMASIVKERTKILECTWANLLKNSEGETQFDFTKVHKSTKKKTGLLRGIKIWNTSDGDYSSGHHGTSASESVASSHSTGHTSSEHGKWYQAGNYEVPFQVQLPNDIPETIEGLQSGSILYNFILEIETEERNNKVDVTNKYNFYKYLRILRTLSMNHIAIQEEMMVSNTIRNMLQYQISIPSRAVSIGDESMIGLSIKLIPFEKSYYQLDKIMVGLVQEYCVKDRHDEEYVDSSTINPITIASFRDIEGIVPDTNELIDSTELKIQYEMPKNLKSITQDCDIMIGDERLGIKKQVMYVRHELSVRIKFIKLKDDNKPLEIKLRLPVLLYVSPMKKLLGRRVYFNESTGRIHFRANDYVPLFTPNTGNSTSLNQIGLNSAAGDSQGQSDVRDGSQEVPPPLYSEIDQDIVYTGDNVESQLFVESTRRDGRNRDSDEIQMETNPGSQLRHYSSNDSNGYMRNQNQPVVATQPPVDTSTPTYEEAQSATVEQRPAPTYE

SEQ ID NO: 64202 - DNA, 2115 bp, Kluyveromyces lactis NRRL Y-1140
  CDS (1)..(2115)
atgtttgctgggctccacaagaccaaccataacaacatcaacagttccagtgggattggtggtgtttctaagaagactcccattatatttgacattcgaattgcctccaaatatgggaatgttaaatttatgtcagggtctgcgttagatgctgagcccactgttctacgtggtgatacagtgttttctttgcctgaagctttacatgtgaagagaattactttacgtcttgttggtaagtttaagcttgagtttttacaagtgggtcagcataagaataataatttggctagtatagtcaaagaggaccaaaccatctttgaagctttctggcataacttgttggttgacaaagagggtgtagtattgaagggctccgatgcttccggtgctggtactgggagtagtagttctggttctggaaatagtagttcctcttcttccttatcttcaaaaccaattctttctagggttcgatctgtacccataatgaacaatccagcaaaaatgaaattgagcaagacaagctctccgacggtacttaaattacctagtaacggagttagtggtacaccttataatggaacgaatgcgccaactggagccagtttcatgttaccgcccggaaattatgagttaccattccaaattgtcttcccggatgatatgccagaaaccgtagaaggtttacaaagcggatctgtattatacacaatggaatcttgcattgagagacatgggttcaataaggcaaattttaccaaatacgaatacttgagaatttttagaacgttgaagcctgataatctcgccattcaagaagaagtcaccgtaggtaaaagttggcctgataaactacaatacgaaatctctatcccaagcaaagctatccctatcggtggtgctactccgcttacagtaaaactttacccgttccaaaaaggatacaagttgaagaaaattgtggtatcgttgcttcaatactatgcattcaaagacagtgcgggagaagtttacgacgatgaaaacgtgatacaaaagcaaatgttggccaggttcgatgaccttcccggatgtgatccaactcaggataatcttttgatagatcagattaaactcaattcagtgcttcaattcccggatgatttgaagcgagccacccaggactgtgatgttggtgccgatttgatcaaagtacgtcacaaattacaagttcatatcactttgaaaaggaacgttattcataaagacaaaccagatgatccgccgtacgaacagtctacagaaattaaagtgaacctaccgattaaattgtatttgatggaacatgttccgatccaaggaagaatggtattattagatcatttcggtaagatccacttcaggccgggccaattttgtccattgttcgaacaatcagatgaatccaacggtggaacttctcctgcagaaccagctgatatcaccgggatgaatagcagtacaaatgataacaatgccaatgttaacactacggtacccggcgcgcacggcaaccgtggaggtgtcacaagactagaggacgggtccttttctgtacagtatttcccagaaacagataaccaagctcctccgagctatgaagcgtatcagagagaatctactccagtacaaatgacaagatccttacccaccacacccccacaacaactagatgatattctgtccagggaccaaccaccatcttcttcatactttgatggcccaccgccatcttggagattgcaagcacctcagccgaacaataattcagtggcattaaatgccttactaaatacatcgggagatgctggaaatttacaacgacaaagtcgtaattcatcatccaatagacttgctgcactagctgctgcggctgccggtgttgctggcaatactgcaagtggcaatggtaccaacagcggttcctcagctgctggcgccctaggcgtcagcagcaatgcctcaagtaacgcagcctcaatgacagatctcctaagtcacctccagaggttaccctcatacgaagagtctagagtccgttacgaaaatgtatcacgtgaacctaccccactatacattccatcacaacaataa

SEQ ID NO: 64203 - protein, 704 aa, Kluyveromyces lactis NRRL Y-1140
MFAGLHKTNHNNINSSSGIGGVSKKTPIIFDIRIASKYGNVKFMSGSALDAEPTVLRGDTVFSLPEALHVKRITLRLVGKFKLEFLQVGQHKNNNLASIVKEDQTIFEAFWHNLLVDKEGVVLKGSDASGAGTGSSSSGSGNSSSSSSLSSKPILSRVRSVPIMNNPAKMKLSKTSSPTVLKLPSNGVSGTPYNGTNAPTGASFMLPPGNYELPFQIVFPDDMPETVEGLQSGSVLYTMESCIERHGFNKANFTKYEYLRIFRTLKPDNLAIQEEVTVGKSWPDKLQYEISIPSKAIPIGGATPLTVKLYPFQKGYKLKKIVVSLLQYYAFKDSAGEVYDDENVIQKQMLARFDDLPGCDPTQDNLLIDQIKLNSVLQFPDDLKRATQDCDVGADLIKVRHKLQVHITLKRNVIHKDKPDDPPYEQSTEIKVNLPIKLYLMEHVPIQGRMVLLDHFGKIHFRPGQFCPLFEQSDESNGGTSPAEPADITGMNSSTNDNNANVNTTVPGAHGNRGGVTRLEDGSFSVQYFPETDNQAPPSYEAYQRESTPVQMTRSLPTTPPQQLDDILSRDQPPSSSYFDGPPPSWRLQAPQPNNNSVALNALLNTSGDAGNLQRQSRNSSSNRLAALAAAAAGVAGNTASGNGTNSGSSAAGALGVSSNASSNAASMTDLLSHLQRLPSYEESRVRYENVSREPTPLYIPSQQ

SEQ ID NO: 64204 - DNA, 2736 bp, Candida albicans SC5314
  CDS (1)..(2736): transl_table=12
atggtgaaaaaactgcaacaaaatacatctaaatcaacatcattatttgaaattagattgaaaaatcttgatcatgatgtattagtattgaaaggaaatcctcaagaagcagcatcggctttattatcaggaactatagtaatatcagtaattgaaccaatttcaattaaaaaaatttcccttcgtttattttctacattaaaattagatggtgaagttactggtggtgctagtggtagttctagaataatcaatttttctaaaaaaacttatgaatatatttggaatagtcaagaattttctaattacttaaataatcacaataataaccttagtcaattgagttcagggacaaattcaccaaataatcgatcatctacttcattatcatcacataataacaatcatcatggggcattttctaaattgacgagaaatcattcatcaacttcattattgggattaagatcaaaatcttcattaagcctttcaggattaactggtggttcatcaacaaatttagtatcagcattcacatcaagtaatactaacaacaacaacaataataataataataaattaaatcattctttatcatctactcaattacatagtggtagcactggtaacactggtggtagtcatttattggtacaaggaaattatgaaattccattcagtgtaattttacctggagatttacctgaatcaattgaagggctacctggatgttctaatgtttatcgattagaagcaattattgatcgggggaaatttcatagttcaatgattgctaaaaaaagacttcgaatcattcgtacattaacttctgatgcggttgaattatcagaaaccatagctgttgataatacttggcccaataaagtagaatattcattaagttgtccaacaaaagctattgctattggttcatcaactcctataacaatgactcttgtccccttattgaaaggtttacagttaggtgatattaaaattgaattgattgaaatgtattcatttgttgggagttatccaccaatgaaaactgatgaaagaataattgccaaaaagaaaatacccaaacgaaagaaaaataacaatggtgaagaagaagaagaagaagtggatatgtttgatcaatggcaaatcgatacaattattaatattccatcaagcttatcaaaatgtactcaagatgttgatttatctactaatgttagagttcgtcataaattgaaatttaatattggattaattaatcctgatggtcatacttcagaattaagagcaactttacccattcaattatttatttctccatttgttactgttcgtggtaataataataattctaatactggtgaggataataatgatagaaatattgatccaaatgatgatgatattttatttactagtgattcctatgatgcattatcggcattaaataataatcagaatgttgacaattttggggctgatggcggagatattggatcaaataatagttcaatgacaaatttaacgggattacttgctccaccaatgtatgaaagacatatttatgatcgattatggtcagatatttctcctgtagctactcctttagcatcaggtccagcaactccaagaagtggaatcattttaggtggtggaagtggtagtgaacgatttggtaatgaatatggtatgtcgccattggattctcaagtattgacggaaaatcttcgacaattaagtttacaacgacaaaaacaagaacaatcggatactactactgttgatgatggacatggtagagcaacttttaatttaatggataatgatgataataatagtattcatagtggaaccaccgggggtgttactggtggcaatggtgattattttaccagtagcacttcaagaagaccaattttacctcgttctaatcaaagtttccttcaagatcatatggtggcaatgtcaccaccagtacatatatctcgagttaattcagatatcaatttaggtaataataacaacaacaacaacaacaatgccccttccaatttgagtccattagaattatcacaagttccatcatatgctgaagcaatgaatagtgatccaccaacaattactaatgaagaattattttctccagcttatgaaccaccattacctgggtctcatattaatttacaagaattaaataaaaatttaaccaatcttcaacaacaaaataataataaaattggtcgtcataattcttttaaaaattcaaattcgttcaaattacagcgatcttcatcgactacttcaagaaattcttcacaaaattcatcaccaatgcattcaagaactgtatcaagtaataatttatcatcattatcaggacatcacactaataatagtcatcatcatcatcaacatcatcattctggtgcaacttcaccatcatcatcaatgactaatttacaaagattaacacctgcccatcttgctcgttcaagtagtactaatcaatcattaaatataccaacaacaacaactagtggtggtggtgatggcggggcaacatttagtttatcaagttcaccaaatagtacaactgcatctactacacatcaaagtgttggtaaattatctaatagtgctgctgatcgaactaatggaggggcaacaccaataagaacaagttctagtttgagtttacataatttacattttttaagtaagaaaaagaaatag

SEQ ID NO: 64205 - protein, 911 aa, Candida albicans SC5314
MVKKSQQNTSKSTSLFEIRLKNLDHDVLVLKGNPQEAASALLSGTIVISVIEPISIKKISLRLFSTLKLDGEVTGGASGSSRIINFSKKTYEYIWNSQEFSNYLNNHNNNLSQLSSGTNSPNNRSSTSLSSHNNNHHGAFSKLTRNHSSTSLLGLRSKSSLSLSGLTGGSSTNLVSAFTSSNTNNNNNNNNNKLNHSLSSTQLHSGSTGNTGGSHLLVQGNYEIPFSVILPGDLPESIEGLPGCSNVYRLEAIIDRGKFHSSMIAKKRLRIIRTLTSDAVELSETIAVDNTWPNKVEYSLSCPTKAIAIGSSTPITMTLVPLLKGLQLGDIKIELIEMYSFVGSYPPMKTDERIIAKKKIPKRKKNNNGEEEEEEVDMFDQWQIDTIINIPSSLSKCTQDVDLSTNVRVRHKLKFNIGLINPDGHTSELRATLPIQLFISPFVTVRGNNNNSNTGEDNNDRNIDPNDDDILFTSDSYDALSALNNNQNVDNFGADGGDIGSNNSSMTNLTGLLAPPMYERHIYDRLWSDISPVATPLASGPATPRSGIILGGGSGSERFGNEYGMSPLDSQVLTENLRQLSLQRQKQEQSDTTTVDDGHGRATFNLMDNDDNNSIHSGTTGGVTGGNGDYFTSSTSRRPILPRSNQSFLQDHMVAMSPPVHISRVNSDINLGNNNNNNNNNAPSNLSPLELSQVPSYAEAMNSDPPTITNEELFSPAYEPPLPGSHINLQELNKNLTNLQQQNNNKIGRHNSFKNSNSFKLQRSSSTTSRNSSQNSSPMHSRTVSSNNLSSLSGHHTNNSHHHHQHHHSGATSPSSSMTNLQRLTPAHLARSSSTNQSLNIPTTTTSGGGDGGATFSLSSSPNSTTASTTHQSVGKLSNSAADRTNGGATPIRTSSSLSLHNLHFLSKKKK

SEQ ID NO: 64206 - DNA, 2772 bp, Candida albicans SC5314
  CDS (1)..(2772): transl_table=12
atggtgaaaaaactgcaacaaaatacatctaaatcaacatcattatttgaaattagattgaaaaatcttgatcatgatgtattagtattgaaaggaaatcctcaagaagcagcatcggctttattatcaggaactatagttatatcagtaattgaaccaatttcaattaaaaaaatttcccttcgtttattttctacattaaaattagatggtgaagttactggtggtgctagtggtagttctagaataatcaatttttctaaaaaaacttatgaatatatttggaatagtcaagaattttctaattatttaaataatcacaataataaccttagtcaattgagttcagggacaaattcaccaaataatcgatcatctacttcattatcatcacataataacaatcatcatggggcattttctaaattgacgagaaatcattcatcaacttcattattgggattaagatcaaaatcttcattaagtctttcaggattaactggtggttcatcaacaaatttagtatcagcattcacatcaagtaatactaacaacaataataataataataataataataataaattaaatcattctttatcatctactcaattacatagtggtagcattggtggtagcactggtaacattggtggtagcactggtaacattggtggtagtcatttattggtacaaggaaattatgaaattccattcagtgtaattttacctggagatttacctgaatcaattgaagggctacctggatgttctaatgtttatcgattagaagcaattattgatcgggggaaatttcatagttcaatgattgctaaaaaaagacttcgaatcattcgtacattaacttctgatgcggttgaattatcagaaaccatagctgttgataatacttggcccaataaagtagaatattcattaagttgtccaacaaaagctattgctattggttcatcaactcctataacaatgactcttgtccccttattgaaaggtttacaattaggtgatattaaaattgaattgattgaaatgtattcatttgttggaagttatccaccaatgaaaactgatgaaagaataattgccaaaaagaaaatacccaaacgaaagaaaaataacaatggtgatgaagaagaagaagaagaagaagtggatatgtttgatcaatggcaaatcgatacaattattaatattccatcaagcttatcaaaatgtactcaagatgttgatttatctactaatgttagagttcgtcataaattgaaatttaatattggattaattaatcctgatggtcatacttcagaattaagagcaactttacccattcaattatttatttctccatttgttactgttcgtggtaataataataattctaatactggtgaggataataatgatagaaatattgatccaaatgatgatgatattttatttactagcgattcctatgatgcattatcggcattaaataataatcagaatgttgacaattctggggctggtggcggagatattggatcaaataatagttcaatgacaaatttaacgggattacttgctccaccaatgtatgaaagacatatttatgatcgattatggtcagatatttctcctgtagctactcctttagcatcaggtccagcaactccaaaaagtggaatcattttaggtggtggaagtggtagtgaacgatttggtaatgaatatggtatgtcgccattggattctcaagtattgacggaaaatcttcgacaattaagtttacaacgacaaaaacaagaacaatcggatattactactgttgatgatggacatggtagagcaacttttaatttaatggataatgatgataataatagtattcatagtggaaccaccgggggtgttactggtggcaatggtgattattttaccagtagcacttcaagaagaccaattttacctcgttctaatcaaagtttcgttcaagatcatatggtggcaatgtcaccaccagtacatatatctcgagttaattcagatatcaatttaggtaataataacaacaacaacaacaatgccccttccaatttgagtccattagaattatcacaagttccatcatatgctgaagcaatgaatagtgatccaccaacaattactaatgaagaattattttctccagcttatgaaccaccattacctggatctcatattaatttacaagaattaaataaaaatttaaccaatcttcaacaacaaaataataataaaattggtcgtcataattctcttaaaaattcaaattcgttcaaattacaacgatcttcatcgactacttcaagaaattcttcacaaaattcatcaccaatgcattcaagaactgtatcaagtaataatttatcatcattatcaggacatcacactaataatagtcatcatcatcatcatcattctggtgcaacttcaccatcatcatcaatgactaatttacaaagattaacacctgcccatcttgctcgttcaagtagtactaatcaatcattaaatataccaacaacaacaactagtggtggtggtgatggcggggcaacatttagtttatcaagttcaccaaatagtacaactgcatctactacacatcaaagtgttggtaaattatctaatagtgctgctgatcgaactaatggaggggcaacaccaataagaacaagttctagtttgagtttacataatttacattttttaagtaagaaaaagaaatag

SEQ ID NO: 64207 - protein, 923 aa, Candida albicans SC5314
MVKKSQQNTSKSTSLFEIRLKNLDHDVLVLKGNPQEAASALLSGTIVISVIEPISIKKISLRLFSTLKLDGEVTGGASGSSRIINFSKKTYEYIWNSQEFSNYLNNHNNNLSQLSSGTNSPNNRSSTSLSSHNNNHHGAFSKLTRNHSSTSLLGLRSKSSLSLSGLTGGSSTNLVSAFTSSNTNNNNNNNNNNNKLNHSLSSTQLHSGSIGGSTGNIGGSTGNIGGSHLLVQGNYEIPFSVILPGDLPESIEGLPGCSNVYRLEAIIDRGKFHSSMIAKKRLRIIRTLTSDAVELSETIAVDNTWPNKVEYSLSCPTKAIAIGSSTPITMTLVPLLKGLQLGDIKIELIEMYSFVGSYPPMKTDERIIAKKKIPKRKKNNNGDEEEEEEEVDMFDQWQIDTIINIPSSLSKCTQDVDLSTNVRVRHKLKFNIGLINPDGHTSELRATLPIQLFISPFVTVRGNNNNSNTGEDNNDRNIDPNDDDILFTSDSYDALSALNNNQNVDNSGAGGGDIGSNNSSMTNLTGLLAPPMYERHIYDRLWSDISPVATPLASGPATPKSGIILGGGSGSERFGNEYGMSPLDSQVLTENLRQLSLQRQKQEQSDITTVDDGHGRATFNLMDNDDNNSIHSGTTGGVTGGNGDYFTSSTSRRPILPRSNQSFVQDHMVAMSPPVHISRVNSDINLGNNNNNNNNAPSNLSPLELSQVPSYAEAMNSDPPTITNEELFSPAYEPPLPGSHINLQELNKNLTNLQQQNNNKIGRHNSLKNSNSFKLQRSSSTTSRNSSQNSSPMHSRTVSSNNLSSLSGHHTNNSHHHHHHSGATSPSSSMTNLQRLTPAHLARSSSTNQSLNIPTTTTSGGGDGGATFSLSSSPNSTTASTTHQSVGKLSNSAADRTNGGATPIRTSSSLSLHNLHFLSKKKK

SEQ ID NO: 64208 - DNA, 26 bp, Artificial sequence
  primer
atgttttcacttagttcgctatctag

SEQ ID NO: 64209 - DNA, 22 bp, Artificial sequence
  primer
tcagtcatcgtcgcagtaagcg

SEQ ID NO: 64210 - protein, 771 aa, Artificial sequence
  consensus sequence
  Variant (2)..(2): Xaa in position 2 is any amino acid
  Variant (5)..(10): Xaa in position 5 to 10 is any amino acid
  Variant (12)..(16): Xaa in position 12 to 16 is any amino acid
  Variant (18)..(18): Xaa in position 18 is any amino acid
  Variant (20)..(20): Xaa in position 20 is any amino acid
  Variant (22)..(26): Xaa in position 22 to 26 is any amino acid
  Variant (30)..(31): Xaa in position 30 to 31 is any amino acid
  Variant (33)..(33): Xaa in position 33 is any amino acid
  Variant (36)..(41): Xaa in position 36 to 41 is any amino acid
  Variant (43)..(43): Xaa in position 43 is any amino acid
  Variant (45)..(45): Xaa in position 45 is any amino acid
  Variant (49)..(52): Xaa in position 49 to 52 is any amino acid
  Variant (55)..(59): Xaa in position 55 to 59 is any amino acid
  Variant (61)..(66): Xaa in position 61 to 66 is any amino acid
  Variant (67)..(71): Xaa in position 67 to 71 is any or no amino acid
  Variant (73)..(77): Xaa in position 73 to 77 is any amino acid
  Variant (79)..(80): Xaa in position 79 to 80 is any amino acid
  Variant (82)..(83): Xaa in position 82 to 83 is any amino acid
  Variant (85)..(86): Xaa in position 85 to 86 is any amino acid
  Variant (87)..(92): Xaa in position 87 to 92 is any or no amino acid
  Variant (94)..(113): Xaa in position 94 to 113 is any amino acid
  Variant (116)..(118): Xaa in position 116 to 118 is any amino acid
  Variant (120)..(130): Xaa in position 120 to 130 is any amino acid
  Variant (131)..(141): Xaa in position 131 to 141 is any or no amino acid
  Variant (143)..(143): Xaa in position 143 is any amino acid
  Variant (144)..(144): Xaa in position 144 is any or no amino acid
  Variant (146)..(147): Xaa in position 146 to 147 is any amino acid
  Variant (149)..(159): Xaa in position 149 to 159 is any amino acid
  Variant (160)..(164): Xaa in position 160 to 164 is any or no amino acid
  Variant (166)..(173): Xaa in position 166 to 173 is any amino acid
  Variant (175)..(187): Xaa in position 175 to 187 is any amino acid
  Variant (188)..(221): Xaa in position 188 to 221 is any or no amino acid
  Variant (226)..(226): Xaa in position 226 is any amino acid
  Variant (229)..(231): Xaa in position 229 to 231 is any amino acid
  Variant (234)..(234): Xaa in position 234 is any amino acid
  Variant (236)..(236): Xaa in position 236 is any amino acid
  Variant (239)..(239): Xaa in position 239 is any amino acid
  Variant (244)..(246): Xaa in position 244 to 246 is any amino acid
  Variant (248)..(249): Xaa in position 248 to 249 is any amino acid
  Variant (251)..(252): Xaa in position 251 to 252 is any amino acid
  Variant (254)..(255): Xaa in position 254 to 255 is any amino acid
  Variant (257)..(268): Xaa in position 257 to 268 is any amino acid
  Variant (269)..(297): Xaa in position 269 to 297 is any or no amino acid
  Variant (299)..(299): Xaa in position 299 is any amino acid
  Variant (303)..(303): Xaa in position 303 is any amino acid
  Variant (307)..(308): Xaa in position 307 to 308 is any amino acid
  Variant (310)..(314): Xaa in position 310 to 314 is any amino acid
  Variant (316)..(318): Xaa in position 316 to 318 is any amino acid
  Variant (320)..(320): Xaa in position 320 is any amino acid
  Variant (324)..(325): Xaa in position 324 to 325 is any amino acid
  Variant (327)..(328): Xaa in position 327 to 328 is any amino acid
  Variant (330)..(331): Xaa in position 330 to 331 is any amino acid
  Variant (333)..(333): Xaa in position 333 is any amino acid
  Variant (335)..(336): Xaa in position 335 to 336 is any amino acid
  Variant (338)..(339): Xaa in position 338 to 339 is any amino acid
  Variant (342)..(343): Xaa in position 342 to 343 is any amino acid
  Variant (345)..(345): Xaa in position 345 is any amino acid
  Variant (348)..(351): Xaa in position 348 to 351 is any amino acid
  Variant (353)..(353): Xaa in position 353 is any amino acid
  Variant (355)..(356): Xaa in position 355 to 356 is any amino acid
  Variant (358)..(360): Xaa in position 358 to 360 is any amino acid
  Variant (361)..(361): Xaa in position 361 is any or no amino acid
  Variant (363)..(364): Xaa in position 363 to 364 is any amino acid
  Variant (366)..(368): Xaa in position 366 to 368 is any amino acid
  Variant (370)..(372): Xaa in position 370 to 372 is any amino acid
  Variant (374)..(377): Xaa in position 374 to 377 is any amino acid
  Variant (379)..(384): Xaa in position 379 to 384 is any amino acid
  Variant (387)..(388): Xaa in position 387 to 388 is any amino acid
  Variant (390)..(390): Xaa in position 390 is any amino acid
  Variant (392)..(393): Xaa in position 392 to 393 is any amino acid
  Variant (395)..(404): Xaa in position 395 to 404 is any amino acid
  Variant (405)..(415): Xaa in position 405 to 415 is any or no amino acid
  Variant (417)..(426): Xaa in position 417 to 426 is any amino acid
  Variant (428)..(429): Xaa in position 428 to 429 is any amino acid
  Variant (431)..(433): Xaa in position 431 to 433 is any amino acid
  Variant (437)..(437): Xaa in position 437 is any amino acid
  Variant (439)..(443): Xaa in position 439 to 443 is any amino acid
  Variant (444)..(444): Xaa in position 444 is any or no amino acid
  Variant (447)..(447): Xaa in position 447 is any amino acid
  Variant (451)..(453): Xaa in position 451 to 453 is any amino acid
  Variant (455)..(455): Xaa in position 455 is any amino acid
  Variant (457)..(464): Xaa in position 457 to 464 is any amino acid
  Variant (465)..(475): Xaa in position 465 to 475 is any or no amino acid
  Variant (477)..(480): Xaa in position 477 to 480 is any amino acid
  Variant (483)..(484): Xaa in position 483 to 484 is any amino acid
  Variant (486)..(487): Xaa in position 486 to 487 is any amino acid
  Variant (490)..(494): Xaa in position 490 to 494 is any amino acid
  Variant (496)..(500): Xaa in position 496 to 500 is any amino acid
  Variant (501)..(511): Xaa in position 501 to 511 is any or no amino acid
  Variant (513)..(516): Xaa in position 513 to 516 is any amino acid
  Variant (517)..(517): Xaa in position 517 is any or no amino acid
  Variant (519)..(519): Xaa in position 519 is any amino acid
  Variant (521)..(527): Xaa in position 521 to 527 is any amino acid
  Variant (529)..(544): Xaa in position 529 to 544 is any amino acid
  Variant (545)..(550): Xaa in position 545 to 550 is any or no amino acid
  Variant (553)..(564): Xaa in position 553 to 564 is any amino acid
  Variant (565)..(596): Xaa in position 565 to 596 is any or no amino acid
  Variant (598)..(610): Xaa in position 598 to 610 is any amino acid
  Variant (611)..(629): Xaa in position 611 to 629 is any or no amino acid
  Variant (631)..(633): Xaa in position 631 to 633 is any amino acid
  Variant (635)..(639): Xaa in position 635 to 639 is any amino acid
  Variant (640)..(658): Xaa in position 640 to 658 is any or no amino acid
  Variant (660)..(681): Xaa in position 660 to 681 is any amino acid
  Variant (682)..(747): Xaa in position 682 to 747 is any or no amino acid
  Variant (749)..(749): Xaa in position 749 is any amino acid
  Variant (751)..(751): Xaa in position 751 is any amino acid
  Variant (753)..(754): Xaa in position 753 to 754 is any amino acid
  Variant (755)..(768): Xaa in position 755 to 768 is any or no amino acid
  Variant (770)..(770): Xaa in position 770 is any amino acid
FXIRXXXXXXDXXXXXGXPXEXXXXXLSGXXVXSVXXXXXXKXIXLRLXXXXKLXXXXXGXXXXXXXXXXXIXXXXXKXXEXXWXXXXXXXXLXXXXXXXXXXXXXXXXXXXXSSXXXSXXXXXXXXXXXXXXXXXXXXXXLXXRXXSXXXXXXXXXXXXXXXXSXXXXXXXXNXXXXXXXXXXXXXXXXXXXXXXXXXXXXXXXXXXXXXXXXXXXXXXXGNYEXPFXXXLPXDXPEXIEGLXXXSXXYXXEXXIXXXXXXXXXXXXXXXXXXXXXXXXXXXXXXXXXXXXXXXXXKXLRIXRTLXXDXXXXXEXXXVXNTWXXKXXYXXSXPXXAXXIGXXSXTPXXXXLXPXXKXXXXLXXIXXXLXXXYXXXXSXXXXXXDEXXIXKXXIXXXXXXXXXXXXXXXXXXXXXDXXXXXXXXXXPXXLXXXTQDXDXXXXXXRVXHKLXXXIXLXXXXXXXXXXXXXXXXXXXEXXXXLPXXLXXSPXXXXXGXXXXXXXXXXXXXXXXDXXXXXIXFXXXXXXXLXXXXXXXXXXXXXXXXXXXXXXNSXXXXXXXXXXXXXXXXXXXXXXXXXXXXXXXXXXXXXXXXXXXXPXXXXXXXXXXXXXXXXXXXXXXXXXXXXXXXXLXXXSXXXXXXXXXXXXXXXXXXXXXXXXLXXXXXXXXXXXXXXXXXXXXXXXXXXXXXXXXXXXXXXXXXXXXXXXXXXXXXXXXXXXXXXXXXXXXXXXXXXXXXXXXXXXXXXXXPXYXEXXXXXXXXXXXXXXXXPXY

SEQ ID NO: 64211 - protein, 53 aa, Artificial sequence
  protein pattern
  Variant (4)..(4): Xaa in position 4 is Phe, Ile or Leu
  Variant (8)..(9): Xaa in position 8 to 9 is any amino acid
  Variant (11)..(11): Xaa in position 11 is Ala or Asn
  Variant (12)..(12): Xaa in position 12 is Leu or Val
  Variant (13)..(13): Xaa in position 13 is Ala or Glu
  Variant (14)..(14): Xaa in position 14 is Ile, Leu or Met
  Variant (15)..(15): Xaa in position 15 is Gln or Ser
  Variant (17)..(17): Xaa in position 17 is Glu or Thr
  Variant (18)..(18): Xaa in position 18 is Ile or Val
  Variant (19)..(19): Xaa in position 19 is Ala, Ser or Thr
  Variant (21)..(21): Xaa in position 21 is Asp or Gly
  Variant (22)..(22): Xaa in position 22 is any amino acid
  Variant (23)..(23): Xaa in position 23 is Ser or Thr
  Variant (25)..(25): Xaa in position 25 is any amino acid
  Variant (26)..(26): Xaa in position 26 is Asp or Asn
  Variant (28)..(28): Xaa in position 28 is Leu or Val
  Variant (29)..(29): Xaa in position 29 is Glu or Gln
  Variant (31)..(31): Xaa in position 31 is Glu or Ser
  Variant (32)..(32): Xaa in position 32 is any amino acid
  Variant (34)..(34): Xaa in position 34 is any amino acid
  Variant (36)..(36): Xaa in position 36 is Ser or Thr
  Variant (37)..(37): Xaa in position 37 is Lys or Arg
  Variant (39)..(39): Xaa in position 39 is Ile or Val
  Variant (40)..(40): Xaa in position 40 is Ala or Pro
  Variant (43)..(43): Xaa in position 43 is Gly or Ser
  Variant (44)..(44): Xaa in position 44 is Ala, Ser or Thr
  Variant (47)..(47): Xaa in position 47 is Ile, Leu or Val
  Variant (48)..(48): Xaa in position 48 is any amino acid
  Variant (49)..(49): Xaa in position 49 is Ile, Met or Val
  Variant (50)..(50): Xaa in position 50 is any amino acid
  Variant (51)..(51): Xaa in position 51 is Ile or Leu
  Variant (52)..(52): Xaa in position 52 is any amino acid
LRIXRTLXXDXXXXXEXXXVXXXWXXKXXYXXSXPXXAXXIGXXTPXXXXXXP

SEQ ID NO: 64212 - protein, 40 aa, Artificial sequence
  protein pattern
  Variant (2)..(3): Xaa in position 2 to 3 is any amino acid
  Variant (4)..(4): Xaa in position 4 is any or no amino acid
  Variant (9)..(9): Xaa in position 9 is Ile or Leu
  Variant (12)..(12): Xaa in position 12 is Asn, Gln or Ser
  Variant (13)..(13): Xaa in position 13 is any amino acid
  Variant (14)..(14): Xaa in position 14 is Ile, Met or Val
  Variant (15)..(15): Xaa in position 15 is Phe or Leu
  Variant (17)..(19): Xaa in position 17 to 19 is any or no amino acid
  Variant (22)..(22): Xaa in position 22 is Ser, Thr or Val
  Variant (23)..(23): Xaa in position 23 is any amino acid
  Variant (25)..(25): Xaa in position 25 is Gly or Thr
  Variant (26)..(26): Xaa in position 26 is Ile or Leu
  Variant (27)..(27): Xaa in position 27 is Glu, Pro or Gln
  Variant (28)..(28): Xaa in position 28 is Gly or Ser
  Variant (29)..(29): Xaa in position 29 is any amino acid
  Variant (30)..(30): Xaa in position 30 is Gln or Ser
  Variant (31)..(31): Xaa in position 31 is Asn, Ser or Val
  Variant (32)..(32): Xaa in position 32 is Gly, Leu or Val
  Variant (33)..(34): Xaa in position 33 to 34 is any amino acid
  Variant (35)..(35): Xaa in position 35 is Leu or Met
  Variant (36)..(36): Xaa in position 36 is any amino acid
  Variant (37)..(37): Xaa in position 37 is Ala or Ser
  Variant (38)..(39): Xaa in position 38 to 39 is any amino acid
  Variant (40)..(40): Xaa in position 40 is Ala, Asp or Glu
LXXXGNYEXPFXXXXPXXXPEXXEXXXXXXXXXXXXXXXX

SEQ ID NO: 64213 - protein, 60 aa, Artificial sequence
  protein pattern
  Variant (2)..(3): Xaa in position 2 to 3 is any amino acid
  Variant (4)..(5): Xaa in position 4 to 5 is any or no amino acid
  Variant (7)..(9): Xaa in position 7 to 9 is any amino acid
  Variant (10)..(10): Xaa in position 10 is any or no amino acid
  Variant (12)..(12): Xaa in position 12 is Ile, Met or Val
  Variant (13)..(13): Xaa in position 13 is Ile or Leu
  Variant (14)..(14): Xaa in position 14 is Leu or Val
  Variant (15)..(15): Xaa in position 15 is Ile or Leu
  Variant (16)..(16): Xaa in position 16 is any amino acid
  Variant (18)..(18): Xaa in position 18 is Asn, Ser or Thr
  Variant (20)..(20): Xaa in position 20 is any amino acid
  Variant (22)..(22): Xaa in position 22 is any amino acid
  Variant (23)..(23): Xaa in position 23 is Ala, Pro or Ser
  Variant (24)..(24): Xaa in position 24 is Pro or Ser
  Variant (25)..(25): Xaa in position 25 is Ala or Ile
  Variant (26)..(26): Xaa in position 26 is Leu or Pro
  Variant (30)..(30): Xaa in position 30 is Asn or Thr
  Variant (31)..(31): Xaa in position 31 is Ile, Leu or Val
  Variant (33)..(33): Xaa in position 33 is Phe or Ile
  Variant (36)..(36): Xaa in position 36 is any amino acid
  Variant (37)..(37): Xaa in position 37 is Asp, Glu or Asn
  Variant (38)..(38): Xaa in position 38 is Glu, Asn or Pro
  Variant (39)..(39): Xaa in position 39 is Ile or Val
  Variant (40)..(40): Xaa in position 40 is any amino acid
  Variant (41)..(41): Xaa in position 41 is Ile or Val
  Variant (43)..(43): Xaa in position 43 is Lys or Arg
  Variant (45)..(45): Xaa in position 45 is any amino acid
  Variant (49)..(49): Xaa in position 49 is Phe or Val
  Variant (50)..(50): Xaa in position 50 is Cys, Gly or Ser
  Variant (51)..(52): Xaa in position 51 to 52 is any amino acid
  Variant (55)..(55): Xaa in position 55 is Asp or Glu
  Variant (56)..(59): Xaa in position 56 to 59 is any amino acid
  Variant (60)..(60): Xaa in position 60 is Gly or Val
IXXXXNXXXXDXXXXXGXPXEXXXXXLSGXXVXSVXXXXXXKXIXLRLXXXXKLXXXXXX

SEQ ID NO: 64214 - protein, 31 aa, Artificial sequence
  protein pattern
  Variant (2)..(2): Xaa in position 2 is any amino acid
  Variant (3)..(4): Xaa in position 3 to 4 is any or no amino acid
  Variant (6)..(7): Xaa in position 6 to 7 is any amino acid
  Variant (8)..(9): Xaa in position 8 to 9 is any or no amino acid
  Variant (11)..(11): Xaa in position 11 is any amino acid
  Variant (12)..(12): Xaa in position 12 is Ile, Met or Val
  Variant (13)..(13): Xaa in position 13 is Ala, Glu or Ser
  Variant (15)..(15): Xaa in position 15 is Ile or Leu
  Variant (16)..(16): Xaa in position 16 is Glu or Gln
  Variant (17)..(17): Xaa in position 17 is any amino acid
  Variant (19)..(19): Xaa in position 19 is Ala or Ser
  Variant (20)..(20): Xaa in position 20 is Phe or Met
  Variant (21)..(21): Xaa in position 21 is any amino acid
  Variant (22)..(22): Xaa in position 22 is Asp or Gly
  Variant (24)..(24): Xaa in position 24 is any amino acid
  Variant (25)..(25): Xaa in position 25 is Ala, Gly or Pro
  Variant (26)..(26): Xaa in position 26 is Glu, Pro or Gln
  Variant (27)..(27): Xaa in position 27 is Ile, Met or Val
  Variant (28)..(28): Xaa in position 28 is any amino acid
  Variant (29)..(29): Xaa in position 29 is Asp or Thr
KXXXLXXXXIXXXLXXXYXXXXSXXXXXXDE

SEQ ID NO: 64215 - protein, 32 aa, Artificial sequence
  protein pattern
  Variant (2)..(3): Xaa in position 2 to 3 is any or no amino acid
  Variant (5)..(5): Xaa in position 5 is Ile, Met or Val
  Variant (6)..(6): Xaa in position 6 is any amino acid
  Variant (8)..(8): Xaa in position 8 is Phe or Tyr
  Variant (9)..(9): Xaa in position 9 is Ile or Val
  Variant (12)..(15): Xaa in position 12 to 15 is any amino acid
  Variant (16)..(17): Xaa in position 16 to 17 is any or no amino acid
  Variant (19)..(19): Xaa in position 19 is any amino acid
  Variant (20)..(20): Xaa in position 20 is Asn or Val
  Variant (21)..(22): Xaa in position 21 to 22 is any amino acid
  Variant (23)..(23): Xaa in position 23 is Asp or Asn
  Variant (24)..(25): Xaa in position 24 to 25 is any amino acid
  Variant (26)..(26): Xaa in position 26 is Asp or Thr
  Variant (28)..(28): Xaa in position 28 is Glu, Lys or Arg
  Variant (29)..(31): Xaa in position 29 to 31 is any amino acid
  Variant (32)..(32): Xaa in position 32 is Asp or Arg
LXXPXXLXXSPXXXXXXRXXXXXXXXGXXXXX

SEQ ID NO: 64216 - protein, 21 aa, Artificial sequence
  protein pattern
  Variant (3)..(3): Xaa in position 3 is Pro or Ser
  Variant (4)..(4): Xaa in position 4 is Ile, Leu or Pro
  Variant (5)..(5): Xaa in position 5 is Met or Val
  Variant (6)..(6): Xaa in position 6 is any amino acid
  Variant (8)..(9): Xaa in position 8 to 9 is any amino acid
  Variant (10)..(10): Xaa in position 10 is any or no amino acid
  Variant (12)..(12): Xaa in position 12 is Phe or Tyr
  Variant (13)..(13): Xaa in position 13 is Asp or Glu
  Variant (14)..(15): Xaa in position 14 to 15 is any amino acid
  Variant (17)..(17): Xaa in position 17 is any amino acid
  Variant (18)..(18): Xaa in position 18 is Asp or Asn
  Variant (19)..(19): Xaa in position 19 is Ile or Leu
  Variant (20)..(20): Xaa in position 20 is any amino acid
  Variant (21)..(21): Xaa in position 21 is Pro or Val
LAXXXXEXXXIXXXXWXXXXX

SEQ ID NO: 64217 - protein, 13 aa, Artificial sequence
  protein pattern
  Variant (2)..(2): Xaa in position 2 is any amino acid
  Variant (6)..(6): Xaa in position 6 is any amino acid
  Variant (7)..(7): Xaa in position 7 is Phe or Val
  Variant (8)..(8): Xaa in position 8 is any amino acid
  Variant (10)..(10): Xaa in position 10 is any amino acid
  Variant (12)..(12): Xaa in position 12 is any amino acid
  Variant (13)..(13): Xaa in position 13 is Asn or Arg
VXHKLXXXIXLXX

SEQ ID NO: 64218 - DNA, 1491 bp, Saccharomyces cerevisiae
  CDS (1)..(1491)
atgtctgctgttaacgttgcacctgaattgattaatgccgacaacacaattacctacgatgcgattgtcatcggtgctggtgttatcggtccatgtgttgctactggtctagcaagaaagggtaagaaagttcttatcgtagaacgtgactgggctatgcctgatagaattgttggtgaattgatgcaaccaggtggtgttagagcattgagaagtctgggtatgattcaatctatcaacaacatcgaagcatatcctgttaccggttataccgtctttttcaacggcgaacaagttgatattccatacccttacaaggccgatatccctaaagttgaaaaattgaaggacttggtcaaagatggtaatgacaaggtcttggaagacagcactattcacatcaaggattacgaagatgatgaaagagaaaggggtgttgcttttgttcatggtagattcttgaacaacttgagaaacattactgctcaagagccaaatgttactagagtgcaaggtaactgtattgagatattgaaggatgaaaagaatgaggttgttggtgccaaggttgacattgatggccgtggcaaggtggaattcaaagcccacttgacatttatctgtgacggtatcttttcacgtttcagaaaggaattgcacccagaccatgttccaactgtcggttcttcgtttgtcggtatgtctttgttcaatgctaagaatcctgctcctatgcacggtcacgttattcttggtagtgatcatatgccaatcttggtttaccaaatcagtccagaagaaacaagaatcctttgtgcttacaactctccaaaggtcccagctgatatcaagagttggatgattaaggatgtccaacctttcattccaaagagtctacgtccttcatttgatgaagccgtcagccaaggtaaatttagagctatgccaaactcctacttgccagctagacaaaacgacgtcactggtatgtgtgttatcggtgacgctctaaatatgagacatccattgactggtggtggtatgactgtcggtttgcatgatgttgtcttgttgattaagaaaataggtgacctagacttcagcgaccgtgaaaaggttttggatgaattactagactaccatttcgaaagaaagagttacgattccgttattaacgttttgtcagtggctttgtattctttgttcgctgctgacagcgataacttgaaggcattacaaaaaggttgtttcaaatatttccaaagaggtggcgattgtgtcaacaaacccgttgaatttctgtctggtgtcttgccaaagcctttgcaattgaccagggttttcttcgctgtcgctttttacaccatttacttgaacatggaagaacgtggtttcttgggattaccaatggctttattggaaggtattatgattttgatcacagctattagagtattcaccccatttttgtttggtgagttgattggttaa

SEQ ID NO: 64219 - protein, 496 aa, Saccharomyces cerevisiae
MSAVNVAPELINADNTITYDAIVIGAGVIGPCVATGLARKGKKVLIVERDWAMPDRIVGELMQPGGVRALRSLGMIQSINNIEAYPVTGYTVFFNGEQVDIPYPYKADIPKVEKLKDLVKDGNDKVLEDSTIHIKDYEDDERERGVAFVHGRFLNNLRNITAQEPNVTRVQGNCIEILKDEKNEVVGAKVDIDGRGKVEFKAHLTFICDGIFSRFRKELHPDHVPTVGSSFVGMSLFNAKNPAPMHGHVILGSDHMPILVYQISPEETRILCAYNSPKVPADIKSWMIKDVQPFIPKSLRPSFDEAVSQGKFRAMPNSYLPARQNDVTGMCVIGDALNMRHPLTGGGMTVGLHDVVLLIKKIGDLDFSDREKVLDELLDYHFERKSYDSVINVLSVALYSLFAADSDNLKALQKGCFKYFQRGGDCVNKPVEFLSGVLPKPLQLTRVFFAVAFYTIYLNMEERGFLGLPMALLEGIMILITAIRVFTPFLFGELIG

SEQ ID NO: 64220 - DNA, 2034 bp, Oryza sativa
  CDS (166)..(1758)
ggtctccgcctgctcctcccaccaccaccaccgctgcttcccttctcccctctcgcccgccgccgcctcgccgcgacgcgcatcggcgccgccccacgaccgcagcagagaagcccaccaccacgcgcggagcggccgaggaggcctcaccactattggtgcgggatggcggaggtcgccgccggcaccgggcagctcattggcgtcgccgtggccacgctcctcgcggcgatcttcctcgccgccgcgcttcttggcagccgccggcgccggcggcgggcgccgttggcagggaagcctgcggccgtgggtggctgcggggtggccgacggcgaagggtgcggcggggatggccggaccgacgtcatcgtcgtcggagccggggtcgccggatctgcgctggcatacacgctcggaaaggatggccgtcgtgtgcatgttatagagagagacctaacagagcctgatagaattgtcggtgaactgttacaacctggtggctacctgaaattgatcgagttgggtctcgaggattgtgttcaagaaatagatgctcagcgtgtccttggttacgcgttattcaaagatgggaaagacacaaaactctcctatcccttggagaagttccactcagatgttgctggtaggagctttcacaatggacggtttatacagaggatgcgccagaaagctgcatctttgcctaatgttcaattggagcaaggaactgttacatcattggttgaagaagatggtacagttaagggtgttaaatacaagaccaagtcaggtggagaattaaaagcatatgcacctctgacaattgtatgcgatggctgtttctcaaaccttcgccgcgccctttgctctccaaaggttgatgtaccatcttgttttgttgggctggtcctggagaattgtcaacttcctcatgcaaaccatggccatgttgtcctggccaatccttcacctatcctattttacccaataagcagcactgaagttcgctgtttggttgatgtccctggtcagaaggtgccttccatagcaaacggtgaaatggcaaaatatctcaaaacagtggttgcacctcagattcctccagaaatctatgattcattcatagcagccattgataagggaagcataagaacaatgccaaacaggagcatgccggctgctccacatccaacccctggtgcacttttgatgggtgatgcattcaacatgcggcatcctttgactggtggcggaatgactgttgcattatctgacattgttgtgctacgtaatcttctcaagcctctccgcaatctgcatgatgcatctgctctttgcaaataccttgaatcattctatacactgcggaagccggttgcttctaccataaacacattagctggtgctctatacaaggttttcagtgcctcacctgatcaggctaggaatgagatgcgccaagcctgctttgattacttgagccttggaggtgtcttttcaaatgggcctattgctcttctgtctggtctgaatcctcgaccattgagtttagtggcacatttctttgctgtcgctatctatggtgtcggtcgcctaatgcttcccctcccttcacctaaacgcatgtggatcggcgtaagactgatttccagtgcatgtggtataattttccccatcatcaaagctgaaggtgtgaggcatatgttcttccccgccactgtccctgcctattatcgtgctcctcgtccaatggagtaaggggggaaaatgaaaggagaagcgaagagaaaatccctgccactgtcctgatcggcggatgtttttcgtggatggcaattttcctgtgtaattggtagtagtcgtcaggccgtgaggttgtgtgtgctgttgttctaatggaacgaggggacctgtatacaccgtcacattccctgtacacttgccactttcgttgttccgtcagggatgcatgtcgactgctaatccttaagctgtatatcccccatgaattcatcatgattgcgtctttgctct

SEQ ID NO: 64221 - protein, 530 aa, Oryza sativa
MAEVAAGTGQLIGVAVATLLAAIFLAAALLGSRRRRRRAPLAGKPAAVGGCGVADGEGCGGDGRTDVIVVGAGVAGSALAYTLGKDGRRVHVIERDLTEPDRIVGELLQPGGYLKLIELGLEDCVQEIDAQRVLGYALFKDGKDTKLSYPLEKFHSDVAGRSFHNGRFIQRMRQKAASLPNVQLEQGTVTSLVEEDGTVKGVKYKTKSGGELKAYAPLTIVCDGCFSNLRRALCSPKVDVPSCFVGLVLENCQLPHANHGHVVLANPSPILFYPISSTEVRCLVDVPGQKVPSIANGEMAKYLKTVVAPQIPPEIYDSFIAAIDKGSIRTMPNRSMPAAPHPTPGALLMGDAFNMRHPLTGGGMTVALSDIVVLRNLLKPLRNLHDASALCKYLESFYTLRKPVASTINTLAGALYKVFSASPDQARNEMRQACFDYLSLGGVFSNGPIALLSGLNPRPLSLVAHFFAVAIYGVGRLMLPLPSPKRMWIGVRLISSACGIIFPIIKAEGVRHMFFPATVPAYYRAPRPME

SEQ ID NO: 64222 - DNA, 2051 bp, Zea mays
  CDS (188)..(1777)
gtaccctcgggttcggccgggttgggtgcccccgggcccgccgggagacgcatcaaaccgccctcctctgtccctccctctcccgtctgccccctcgcatccccaaattaagccccgcgcgcaaggcagcaaacgcgccgcgcaccggaaggccccggggagctgcacgaggtggccccattgcggcatggctgctacggccgccgccgctggcgtcgagttcccgctcattggcgttgccgtggccacgctcatcgtgacggtccttgtcgcggccgtgatgcgccgccgccgccgtccctggcaccaggcgcctctggtggaggggaaacccgcaccagaggcaggctgcgcggtcagcgatggcgggacggacgtcatcatcgtcggcgccggggtagctggatctgcgctggcatacacgctcggaaaggatggccgtcgggtgcatgtcatcgagagggatctgacagaacctgacagaattgtgggcgagctgttgcaacctgggggttacttgaaattaattgagctgggcctccaagattgtgtggaagaaattgatgcccaacgcgtgcttggttacgcattattcaaagatggaaggaacacaaagcttgcttatcccctggagaagttccattctgatgttgctggtaggagctttcacaatgggaggtttatacagaggatgcgtcaaaaagctgcgtctttgcccaatgtccaattagagcaaggaactgttacctcacttcttgaagaaaatggtactgttaaaggtgttcaatacaaaaccaagtcaggtgaagaactaaaggcttatgcgcccttgacgattgtatgtgatggctgcttttcgaatctacgacgcgccctttgctctccaaaggttgatgtcccatcatgttttgttgggctggtattggagaactgccaacttccacatccaaaccatggccatgttatcttggccaatccttctccaatcttattttacccaattagcagcacagaggtgcgctgtttggttgatgtccctggtcagaaggtgccttccatagctaccggtgaaatggcaaactatctcaaaactgttgttgcaccccagattcctccagaaatctatgactctttcatagcagccattgataagggaagcatacggacaatgccaaacaggagcatgccagcggctccacatccgacccctggtgcacttctgatgggggatgcgttcaatatgagacaccctttaactggtggaggaatgactgttgcattatctgacatcgttgtcctgcgtaatctgctcaagcctctccgcaatcttcatgacgcatcttccctgtgcaagtaccttgaatcgttctatacactgcggaagccggttgcttccacaataaacacattggccggtgctctgtacaaggtcttcagtgcctcgcctgatcaagctaggaatgagatgcgccaggcttgttttgattacttgagcctcggaggcgtcttctcgaacgggcctatcgctttactctctggccttaaccctcggccactgagtttagttgcgcacttctttgctgttgctatctacggtgtcggccgcttgatgctccctcttccttcacctaaacgaatgtggattggagctagactgatttctggtgcatgcggcatcatcctccctatcatcaaagctgaaggcgtgagacagatgttcttccctgctacagtacccgcatattaccgggccgcacctacgggagaaaaggcatgaacagagaaccgattccgtgctgctggtccgaccatgaatgatctcatggcaactgatgtttcacggatgacatttttcctttgctagtggttagttattggttattgttagaccgtcgatggaatgaggaacctgtatagtgtttgtcctgggtactggtaaagttggaaaatgtgttgggtttgttctaaaaaaaaaaaaaaagctcccacgttgtgcacgtagccacgtatgattctgttagctagtgaaaaaaaaaaaaaaaaaagcggcc

SEQ ID NO: 64223 - protein, 529 aa, Zea mays
MAATAAAAGVEFPLIGVAVATLIVTVLVAAVMRRRRRPWHQAPLVEGKPAPEAGCAVSDGGTDVIIVGAGVAGSALAYTLGKDGRRVHVIERDLTEPDRIVGELLQPGGYLKLIELGLQDCVEEIDAQRVLGYALFKDGRNTKLAYPLEKFHSDVAGRSFHNGRFIQRMRQKAASLPNVQLEQGTVTSLLEENGTVKGVQYKTKSGEELKAYAPLTIVCDGCFSNLRRALCSPKVDVPSCFVGLVLENCQLPHPNHGHVILANPSPILFYPISSTEVRCLVDVPGQKVPSIATGEMANYLKTVVAPQIPPEIYDSFIAAIDKGSIRTMPNRSMPAAPHPTPGALLMGDAFNMRHPLTGGGMTVALSDIVVLRNLLKPLRNLHDASSLCKYLESFYTLRKPVASTINTLAGALYKVFSASPDQARNEMRQACFDYLSLGGVFSNGPIALLSGLNPRPLSLVAHFFAVAIYGVGRLMLPLPSPKRMWIGARLISGACGIILPIIKAEGVRQMFFPATVPAYYRAAPTGEKA

SEQ ID NO: 64224 - DNA, 1935 bp, Glycine max
  CDS (160)..(1740)
acagtaactgtaaccgttccaaatttctatgccagcgaggcagagagagaaactagagcgagaaagagagagagcgccacgcaccgttcattccttcgtcctcgccgtttctaaccgtcgcagttttccggcgaagtttctccgatttgtttaaccgaaatggcggatctgtccgttctcggttggattctgtgctccgctctgagcctcttcgcgctctacagcctggccttcggcggagcgagccgtaaccgcgcttcgccggagaagaggaatgagttatcggagaccgtgacgacctccgccggagaatgtagatcagagaaacaccacggcgacgctgacgtcatcattgtcggagccggcgtcgccggcgcctctctggcgcacactctcggcaaggatgggcgtcgggtacacgtcattgaaagagacctgagtgagcctgatcgaattgttggagagttgcttcaacccggtggctatctcaaattaattgagctcggacttgaagattttgtggacaaaattgatgctcagcaagtgtttggttatgcccttttcaaggatgggaaacatactcgtctctcttaccccttggagaagtttcactcggatgtctctggcagaagctttcacaatgggcgctttattcagaggttgcgggagaaagctgcctcacttgccaatgtacgattggagcaaggaacagtcacttccctggttgaagagaagggaacaattaaaggtgtgcaatataagaacaaagatggccaggagttgacaacatatgctcctcttaccattgtttgtgatggttgcttctcaaacttacgccgttctctttgtaatcctaaggtggatattccctcatgttttgttggtttagttttagagaactgtgaacttccatgtgcaaatcatggccatgtcatactgggagacccttcgccgattctattctatcctatcagtagtacagagattcgctgtctggtcgatgtacctggtcagaaggttccttctatatcaaacggtgaaatggaaaagtatttgaagacaatggtggctccacagatccccccccagctttatgatgccttcattgctgctgttgacaaaggcaacataaggacaatgccaaacagaagcatgccagcagatcctcatcctacacccggagcccttctgatgggagatgcattcaacatgcgacatccactaactgggggaggaatgactgtagcattgtctgatattgtggtgctgagaaatcttctaagccctttgtctgacctgaatgatgcacccacactctgtaaataccttgaatcattttataccttgcgtaagcctgtggcatccaccataaatacattggcaggtgctctttacaaagtattttgtgcatcccctgatctggcaaggaaggaaatgcgccaagcttgcttcgattatctcagccttggaggcctattctcggaaggaccagtctctttactttctggattaaaccctcgtcccttgagcttggttctccatttctttgctgttgcaatatacggtgttggccgtctattgttaccatttccttcacctaagagagtatggatcggagcccgattaatctcgggtgcatctgcaatcatccttcccataattaaggccgaagggattcgtcagatgtttttccctgccactgttccagcttattacagaactcctccagttgcacaataaattgagggaaggttgaagttcgtagttctgtaagcattttggcttcttttgtgtgtattctttgtagtctgtagcttgtaatgttttaattgaatgtatcatctctgtctctctctctctctctcctttttggtacactagaaattaaatccatgatattaaactaaattacaatccactctgggcacttaaacc

SEQ ID NO: 64225 - protein, 526 aa, Glycine max
MADLSVLGWILCSALSLFALYSLAFGGASRNRASPEKRNELSETVTTSAGECRSEKHHGDADVIIVGAGVAGASLAHTLGKDGRRVHVIERDLSEPDRIVGELLQPGGYLKLIELGLEDFVDKIDAQQVFGYALFKDGKHTRLSYPLEKFHSDVSGRSFHNGRFIQRLREKAASLANVRLEQGTVTSLVEEKGTIKGVQYKNKDGQELTTYAPLTIVCDGCFSNLRRSLCNPKVDIPSCFVGLVLENCELPCANHGHVILGDPSPILFYPISSTEIRCLVDVPGQKVPSISNGEMEKYLKTMVAPQIPPQLYDAFIAAVDKGNIRTMPNRSMPADPHPTPGALLMGDAFNMRHPLTGGGMTVALSDIVVLRNLLSPLSDLNDAPTLCKYLESFYTLRKPVASTINTLAGALYKVFCASPDLARKEMRQACFDYLSLGGLFSEGPVSLLSGLNPRPLSLVLHFFAVAIYGVGRLLLPFPSPKRVWIGARLISGASAIILPIIKAEGIRQMFFPATVPAYYRTPPVAQ

SEQ ID NO: 64226 - DNA, 1473 bp, Arabidopsis thaliana
  CDS (1)..(1473)
atggcctttacgaacgtttgcctatggacgctactcgccttcatgctgacttggacagtgttctacgtcacaaacagggggaagaaggcgacgcagttggcggatgcggtggttgaagagcgagaagacggtgctactgacgttatcatcgttggggctggagtaggcggctcggctctcgcatatgctcttgctaaggacgggcgtcgagtccatgtaatagagagggacctgagagaaccagagagaatcatgggtgagtttatgcaaccaggaggacgactcatgctctctaagcttggtcttgaagattgtttggagggaatagatgcccaaaaagccacgggcatgacagtttataaggacggaaaagaagcagtcgcatcttttcccgtggacaacaacaattttccttttgatccttcggctcgatcttttcacaatggccgattcgtccaacgattgcggcaaaaggcttcttctcttcccaatgtgcgcctggaagaaggaacggtgaagtctttgatagaagaaaaaggagtgatcaaaggagtgacatacaaaaatagcgcaggcgaagaaacaacagccttggcacctctcactgtagtatgcgacggttgctactcaaaccttcgccggtctcttaatgacaacaatgcggaggttctgtcataccaagttggttttatctcaaagaactgtcagcttgaagaacccgaaaagttaaagttgataatgtctaaaccctccttcaccatgttgtatcaaatcagcagcaccgacgttcgttgtgtttttgaagttctccccaacaacattccttctatttcaaatggtgaaatggctactttcgtgaagaacactattgctcctcaggtacctttaaaactccgcaaaatatttttgaaagggattgatgaaggagaacatataaaagccatgccaacaaagaagatgacagctactttgagcgagaagaaaggagtgattttattgggagatgcattcaacatgcgtcatccagcaatcgcatctggaatgatggttttattatctgacattctcattctacgccgtcttctccagccattaagcaaccttggcaatgcgcaaaaaatctcacaagttatcaagtccttttatgatatccgcaagccaatgtcagcgacagttaacacgttaggaaatgcattctctcaagtgctagttgcatcgacggacgaagcaaaagaggcaatgagacaaggttgctatgattacctctctagtggtgggtttcgcacgtcagggatgatggctttgctaggcggcatgaaccctcgtccgatctctctcatctatcatctatgtgctatcactctatcctccattggccatctactctctccatttccctctccccttcgcatttggcatagccttcgactttttgttggctatgaaaatgttggttccccatctcaaggctga

SEQ ID NO: 64227 - protein, 490 aa, Arabidopsis thaliana
MAFTNVCLWTLLAFMLTWTVFYVTNRGKKATQLADAVVEEREDGATDVIIVGAGVGGSALAYALAKDGRRVHVIERDLREPERIMGEFMQPGGRLMLSKLGLEDCLEGIDAQKATGMTVYKDGKEAVASFPVDNNNFPFDPSARSFHNGRFVQRLRQKASSLPNVRLEEGTVKSLIEEKGVIKGVTYKNSAGEETTALAPLTVVCDGCYSNLRRSLNDNNAEVLSYQVGFISKNCQLEEPEKLKLIMSKPSFTMLYQISSTDVRCVFEVLPNNIPSISNGEMATFVKNTIAPQVPLKLRKIFLKGIDEGEHIKAMPTKKMTATLSEKKGVILLGDAFNMRHPAIASGMMVLLSDILILRRLLQPLSNLGNAQKISQVIKSFYDIRKPMSATVNTLGNAFSQVLVASTDEAKEAMRQGCYDYLSSGGFRTSGMMALLGGMNPRPISLIYHLCAITLSSIGHLLSPFPSPLRIWHSLRLFVGYENVGSPSQG

SEQ ID NO: 64228 - DNA, 1575 bp, Oryza sativa (japonica cultivar-group)
  CDS (1)..(1575)
atggatgcggtcgccggcgccgggcagctcgttggcctcgccgcggccacgctcctcacggcggccttcctcgtcgcagtgaagatggggtggcggcgccgccgccgccaacgggaggtcgcgccggagggtggctgccgggttgttggcggcgatgggggtgaccggacggacatcgtcattgttggtgccggggtcgccggatctgcgctcgcctacacgctcggaaaggatgggcgacgagtgcatgttatagagcgggacatgacggagcctgatagaattgttggtgaactgctacagcctggtggctatttgaaattgatggagctgggtcttgaggattgtgttgaagaaatcgatgctcagcgtgtccttggttacgcattgttgaaagatgggagaaacacaaagctttcttatcccttggagaagttccattcagatgttgctggtaggagctttcacaatggacggtttatacagaagatgcgtcaaaaagctgcatctttgcctaatgttcatttggagcaaggaaccgttacatcattgctcgaagaaggtggcacggttaagggtgttcaatacaagacaaagtcaggtgaagaattaaaggcctatgcaccattgacaattgtatgcgatggctgtttctcaaacctacggcgtgtcctgtgctctccaaaggttgatgtgccatcctgttttgttgggttggttttggagaattgtcaacttcctcacccaaaccatggccatgttatcctggctaatccttcacctatcctatgttacccgataagcagcactgagattcgttgtttggttgatatccctgggcagaaggtgccttccatggcaaccggtgaaatggcaaaatatctcaagactgtggttgcacctcagattcctccagaactccatgattctttcattgcagcaattgataaaggaagcataaggacaatgccaaataggagtatgccagctgctccacttccaacccctggcgcgctgttgatgggtgatgcattcaacatgcgacatcctttaactggtggtggaatgaccgttgcgttttctgacattgttgtcctacgcaatcttctcaagcctctcggcaacctgcacgatgcaccttccctgtgcaagtaccttgaatcgttctatacactgcggaagcctgttgcttctacaatcaacacactggctggtgctctgtacaaggtcttctgtgcctcaactgaccaggctaagaatgagatgcgagaagcttgctttgattacttgagccttggaggagtcttctcaaatgggcctattgctcttctctctggcctcaatcctcggcctctgagtttagtagcccacttctttgctgttgctatctatggcgttggacgcctaatgctccccgtcccttcacctaaacgcatgtggatcggcgcgagactggtttccggtgcatgtggtatcatcttcccaatcatcaaagctgaaggtgtgaggcaaatgttcttccctgctacagtccctgcatattaccgggcccctcctccaatggaatccggataa

SEQ ID NO: 64229 - protein, 524 aa, Oryza sativa (japonica cultivar-group)
MDAVAGAGQLVGLAAATLLTAAFLVAVKMGWRRRRRQREVAPEGGCRVVGGDGGDRTDIVIVGAGVAGSALAYTLGKDGRRVHVIERDMTEPDRIVGELLQPGGYLKLMELGLEDCVEEIDAQRVLGYALLKDGRNTKLSYPLEKFHSDVAGRSFHNGRFIQKMRQKAASLPNVHLEQGTVTSLLEEGGTVKGVQYKTKSGEELKAYAPLTIVCDGCFSNLRRVLCSPKVDVPSCFVGLVLENCQLPHPNHGHVILANPSPILCYPISSTEIRCLVDIPGQKVPSMATGEMAKYLKTVVAPQIPPELHDSFIAAIDKGSIRTMPNRSMPAAPLPTPGALLMGDAFNMRHPLTGGGMTVAFSDIVVLRNLLKPLGNLHDAPSLCKYLESFYTLRKPVASTINTLAGALYKVFCASTDQAKNEMREACFDYLSLGGVFSNGPIALLSGLNPRPLSLVAHFFAVAIYGVGRLMLPVPSPKRMWIGARLVSGACGIIFPIIKAEGVRQMFFPATVPAYYRAPPPMESG

SEQ ID NO: 64230 - DNA, 1593 bp, Oryza sativa (japonica cultivar-group)
  CDS (1)..(1593)
atggcggaggtcgccgccggcaccgggcagctcattggcgtcgccgtggccacgctcctcgcggcgatcttcctcgccgccgcgcttcttggcagccgccggcgccggcggcgggcgccgttggcagggaagcctgcggccgtgggtggctgcggggtggccgacggcgaagggtgcggcggggatggccggaccgacgtcatcgtcgtcggagccggggtcgccggatctgcgctggcatacacgctcggaaaggatggccgtcgtgtgcatgttatagagagagacctaacagagcctgatagaattgtcggtgaactgttacaacctggtggctacctgaaattgatcgagttgggtctcgaggattgtgttcaagaaatagatgctcagcgtgtccttggttacgcgttattcaaagatgggaaagacacaaaactctcctatcccttggagaagttccactcagatgttgctggtaggagctttcacaatggacggtttatacagaggatgcgccagaaagctgcatctttgcctaatgttcaattggagcaaggaactgttacatcattggttgaagaagatggtacagttaagggtgttaaatacaagaccaagtcaggtgaagaattaaaagcatatgcacctctgacaattgtatgcgatggctgtttctcaaaccttcgccgcgccctttgctctccaaaggttgatgtaccatcttgttttgttgggctggtcctggagaattgtcaacttcctcatgcaaaccatggccatgttgtcctggccaatccttcacctatcctattttacccaataagcagcactgaagttcgctgtttggttgatgtccctggtcagaaggtgccttccatagcaaacggtgaaatggcaaaatatctcaaaacagtggttgcacctcagattcctccagaaatctatgattcattcatagcagccattgataagggaagcataagaacaatgccaaacaggagcatgccggctgctccacatccaacccctggtgcacttttgatgggtgatgcattcaacatgcggcatcctttgactggtggcggaatgactgttgcattatctgacattgttgtgctacgtaatcttctcaagcctctccgcaatctgcatgatgcatctgctctttgcaaataccttgaatcattctatacactgcggaagccggttgcttctaccataaacacattagctggtgctctatacaaggttttcagtgcctcacctgatcaggctaggaatgagatgcgccaagcctgctttgattacttgagccttggaggtgtcttttcaaatgggcctattgctcttctgtctggtctgaatcctcgaccattgagtttagtggcacatttctttgctgtcgctatctatggtgtcggtcgcctaatgcttcccctcccttcacctaaacgcatgtggatcggcgtaagactgatttccagtgcatgtggtataattttccccatcatcaaagctgaaggtgtgaggcatatgttcttccccgccactgtccctgcctattatcgtgctcctcgtccaatggagtaa

SEQ ID NO: 64231 - protein, 530 aa, Oryza sativa (japonica cultivar-group)
MAEVAAGTGQLIGVAVATLLAAIFLAAALLGSRRRRRRAPLAGKPAAVGGCGVADGEGCGGDGRTDVIVVGAGVAGSALAYTLGKDGRRVHVIERDLTEPDRIVGELLQPGGYLKLIELGLEDCVQEIDAQRVLGYALFKDGKDTKLSYPLEKFHSDVAGRSFHNGRFIQRMRQKAASLPNVQLEQGTVTSLVEEDGTVKGVKYKTKSGEELKAYAPLTIVCDGCFSNLRRALCSPKVDVPSCFVGLVLENCQLPHANHGHVVLANPSPILFYPISSTEVRCLVDVPGQKVPSIANGEMAKYLKTVVAPQIPPEIYDSFIAAIDKGSIRTMPNRSMPAAPHPTPGALLMGDAFNMRHPLTGGGMTVALSDIVVLRNLLKPLRNLHDASALCKYLESFYTLRKPVASTINTLAGALYKVFSASPDQARNEMRQACFDYLSLGGVFSNGPIALLSGLNPRPLSLVAHFFAVAIYGVGRLMLPLPSPKRMWIGVRLISSACGIIFPIIKAEGVRHMFFPATVPAYYRAPRPME

SEQ ID NO: 64232 - DNA, 1758 bp, Arabidopsis thaliana
  CDS (1)..(1758)
atgaaaccattcgtaatcaggaaccttccaagatttcaatcaactcttagatcttcgcttctctacacaaatcatcgcccctcttctcgattctctctctctactcgtcgattcaccaccggagccacctacattcgccgatggaaagcaacggcggcgcagacactcaaactctccgccgtgaactccacggtgatgatgaaaccggcgaagattgcgttggatcaatttatagcttctctatttacgtttctgcttctctacattttgcgtcggagtagtaataagaataagaagaatcgtggactcgtcgtttcccaaaacgataccgtatccaaaaatcttgaaacggaggttgattctggcactgatgtgatcatcgtcggagctggtgtcgccggttccgctcttgctcatactctcggcaaggaaggaagaagagtgcacgttatagaaagagatttttctgagcaagacagaatcgttggtgaattgcttcaacctggtggttatttgaagttaatagaacttggacttgaagattgtgtgaagaagattgatgctcaacgagttcttggttatgttctctttaaagatgggaagcatactaaacttgcttaccccttggaaacgtttgattcggatgtagccgggagaagtttccataatgggagatttgtacagagaatgcgagaaaaagcccttactctttcaaatgtacgattggaacaaggaacggttacgtcgttgcttgaagaacacgggacaattaaaggggttcgatacagaacaaaagagggcaatgagtttagatcatttgctcctctcacaattgtatgtgatggttgtttctccaacttgcgtcgctctctttgcaaacctaaggtggatgtgccatctacttttgtgggtcttgtcttggagaactgtgaacttccatttgcaaatcacgggcacgttgttctcggtgacccatcacccatcttaatgtatcccatcagcagttctgaagtccgttgcttagtagatgtaccgggtcaaaaacttcctcccattgcaaatggtgaaatggcaaagtatctgaaaacacgggttgcgcctcaagtaccaaccaaggtccgtgaagcattcatcaccgctgttgagaaaggtaatatcagaaccatgccaaaccgaagcatgccagctgatccgattcctactcctggagctcttcttcttggtgatgcattcaacatgagacatcctttaaccggtggtgggatgaccgttgcattggcggatatagttgtactccgtgatcttctaaggccaattcgcaaccttaatgacaaagaagctttgtctaagtatattgaatccttttacacactacgaaaacctgtagcttccaccattaatacattggcggatgcgttgtataaggtctttttagcatcttcagatgaagcaagaacggaaatgcgtgaagcttgcttcgactatcttagccttggaggtgttttctcatctggtccagttgcattgctctctggtttaaaccctcgtcctctgagtttagttctccacttctttgctgtggcgatctacgctgtttgtcgtttaatgctaccatttccttcgattgagagcttttggcttggagctaggataatctcgagtgcttcaagcatcatctttccaataattaaagcagagggagttagacaaatgttcttccctcgtacaatccctgccatataccgtgctcctccttaa

SEQ ID NO: 64233 - protein, 585 aa, Arabidopsis thaliana
MKPFVIRNLPRFQSTLRSSLLYTNHRPSSRFSLSTRRFTTGATYIRRWKATAAQTLKLSAVNSTVMMKPAKIALDQFIASLFTFLLLYILRRSSNKNKKNRGLVVSQNDTVSKNLETEVDSGTDVIIVGAGVAGSALAHTLGKEGRRVHVIERDFSEQDRIVGELLQPGGYLKLIELGLEDCVKKIDAQRVLGYVLFKDGKHTKLAYPLETFDSDVAGRSFHNGRFVQRMREKALTLSNVRLEQGTVTSLLEEHGTIKGVRYRTKEGNEFRSFAPLTIVCDGCFSNLRRSLCKPKVDVPSTFVGLVLENCELPFANHGHVVLGDPSPILMYPISSSEVRCLVDVPGQKLPPIANGEMAKYLKTRVAPQVPTKVREAFITAVEKGNIRTMPNRSMPADPIPTPGALLLGDAFNMRHPLTGGGMTVALADIVVLRDLLRPIRNLNDKEALSKYIESFYTLRKPVASTINTLADALYKVFLASSDEARTEMREACFDYLSLGGVFSSGPVALLSGLNPRPLSLVLHFFAVAIYAVCRLMLPFPSIESFWLGARIISSASSIIFPIIKAEGVRQMFFPRTIPAIYRAPP

SEQ ID NO: 64234 - DNA, 1596 bp, Arabidopsis thaliana
  CDS (1)..(1596)
atggagtcacaattatggaattggatcttacctcttttgatctcttctctcctcatctccttcgtcgctttctatggattcttcgtcaaaccgaagcggaacggtctccgtcacgatcggaaaactgtttctaccgtcacctccgacgtcggatctgttaatattaccggagatactgtcgctgatgtcattgttgttggagctggtgttgctggttctgctcttgcttatactcttggaaaggataaacgccgagttcatgtgattgaaagagatttatcggagcctgatcgtattgttggggagttgttacagcctgggggttacctcaagttactggagttgggaattgaagattgtgtggaagaaatagatgctcagcgtgtgtatggttatgcactttttaaaaatgggaaacgcattcgcttagcttatcctttggagaagtttcacgaagatgtatctggaaggagctttcacaatggacgttttattcaaagaatgcgggagaaagctgcttcacttcccaatgttcagctagagcaaggaacagttctttctcttctagaagagaatgggactatcaaaggtgtgagatataagaataaagcaggagaggaacaaaccgcatttgcagctttgactatagtttgtgatggttgtttctcaaacctgcgtcgctctttgtgcaatcctcaggtcgaggtgccttcttgttttgtcgggttggtcctagagaactgcaatctcccatatgcaaaccatggacatgtcgtcttagcagatccatcaccaattttgatgtatccaattagtagcacagaggtgcggtgcctagttgatgttcccggccagaaagtgccgtccattgcaaatggtgaaatgaaaaactatttgaagactgttgtggctcctcagatgcctcatgaggtctatgactctttcattgctgcggttgataaaggaaatattaagtccatgccaaacagaagcatgccagcttctccttatcctactccaggggctctgttaatgggagatgcatttaacatgcgtcatcctttgacgggtggaggaatgacggttgcattagctgacattgttgtcctgcgtaatctccttagaccgctgcgtgatcttagtgacggcgctagtctctgcaaatatcttgaatcattttacactctgcgaaagccagttgcagcaacaatcaacacccttgcgaatgctctttaccaagtgttctgttcatcagaaaatgaagcaagaaacgagatgagggaagcttgcttcgattatctgggcctcgggggtatgtgcacaagtggaccagtatctttgctttcgggtttgaaccctcgaccattaacacttgtctgccatttctttgcggttgcggtttatggagtcatacggttgttaatcccattcccttccccaaaacgaatctggcttggagccaaattaatctcgggagcatcggggataatatttccgataataaaagcggaaggagttaggcagatgtttttcccagcaactgtacctgcatactactacaaagctcctacagttggagaaaccaaatgttcatag

SEQ ID NO: 64235 - protein, 531 aa, Arabidopsis thaliana
MESQLWNWILPLLISSLLISFVAFYGFFVKPKRNGLRHDRKTVSTVTSDVGSVNITGDTVADVIVVGAGVAGSALAYTLGKDKRRVHVIERDLSEPDRIVGELLQPGGYLKLLELGIEDCVEEIDAQRVYGYALFKNGKRIRLAYPLEKFHEDVSGRSFHNGRFIQRMREKAASLPNVQLEQGTVLSLLEENGTIKGVRYKNKAGEEQTAFAALTIVCDGCFSNLRRSLCNPQVEVPSCFVGLVLENCNLPYANHGHVVLADPSPILMYPISSTEVRCLVDVPGQKVPSIANGEMKNYLKTVVAPQMPHEVYDSFIAAVDKGNIKSMPNRSMPASPYPTPGALLMGDAFNMRHPLTGGGMTVALADIVVLRNLLRPLRDLSDGASLCKYLESFYTLRKPVAATINTLANALYQVFCSSENEARNEMREACFDYLGLGGMCTSGPVSLLSGLNPRPLTLVCHFFAVAVYGVIRLLIPFPSPKRIWLGAKLISGASGIIFPIIKAEGVRQMFFPATVPAYYYKAPTVGETKCS

SEQ ID NO: 64236 - DNA, 1578 bp, Arabidopsis thaliana
  CDS (1)..(1578)
atggctccgacgatattcgttgatcactgtatcctcacaacaacgtttgtcgcatccttgttcgcgtttctgcttctatacgtcctgcgtcgccggagcaagacgattcatgggtctgtcaatgtccgtaacggaaccctaacggtgaaatctggaacagacgttgatattatcattgtcggtgctggtgtcgccggcgctgcccttgctcataccctcggcaaggaaggaagaagagttcacgttatagaaagagacttaacggagcctgatcgaattgtcggtgaattacttcagcctggtggttacttgaagttaatcgaactcgggcttgaagattgtgtgaaggatatagatgcgcagagagttcttggttatgctctctttaaagatgggaaacacactaaactctcttacccgttggatcagtttgattccgatgttgcgggtcgtagctttcacaatgggagatttgtgcagaggatgcgagagaaagcttctttacttcccaatgttcgaatggagcaaggaacagtgacatcgttggtggaagaaaacggaataatcaaaggtgttcaatacaaaaccaaagatggccaagagcttaagtcatttgctcctctcactattgtatgtgatggttgtttctccaacttgcgtcgatctctctgcaaacctaaggtggaggtgccatccaatttcgttggtctggtattggagaattgcgaactcccgtttccgaaccacgggcacgttgttcttggcgatccgtcacccattttattctatcctatcagcagctcggaagtccgttgcttggtagatgtaccaggttcaaaacttccttcagttgcaagtggtgaaatggctcaccatctcaaaacaatggttgcaccgcaggtaccacctcagatccgtgatgctttcatttctgcagtcgaaaaaggtaacataagaacaatgccgaacagaagcatgccagctgatccaattcatacacctggagctttgcttttaggtgatgcgttcaacatgcgccatcctcttactggaggtggtatgaccgttgcattgtctgatatagtcatcctccgtgatctattgaacccgctcgtcgacttaaccaacaaagagtccttatccaaatacatagaatcattctacacattgcggaaaccggttgcttcgactatcaatacactcgcaggcgctctttacaaagtctttttagcatctccagacgatgcaagaagcgaaatgcgtcgagcttgcttcgattatcttagcctcggaggggtttgctcatcaggacctgtggctttgctatctggtttgaacccacgacctatgagccttgttcttcatttcttcgcagttgcgattttcggggttggtcgtttgcttgtacctctcccgtccgttaaacggttatggcttggagctagactaatctcgagtgcttcagggatcatatttccaataataaaagcagaaggtgtgaggcaaatgttcttccctcgaactattcctgccatttacagagctcctcctactccttcttcttcttctcctcaatga

SEQ ID NO: 64237 - protein, 525 aa, Arabidopsis thaliana
MAPTIFVDHCILTTTFVASLFAFLLLYVLRRRSKTIHGSVNVRNGTLTVKSGTDVDIIIVGAGVAGAALAHTLGKEGRRVHVIERDLTEPDRIVGELLQPGGYLKLIELGLEDCVKDIDAQRVLGYALFKDGKHTKLSYPLDQFDSDVAGRSFHNGRFVQRMREKASLLPNVRMEQGTVTSLVEENGIIKGVQYKTKDGQELKSFAPLTIVCDGCFSNLRRSLCKPKVEVPSNFVGLVLENCELPFPNHGHVVLGDPSPILFYPISSSEVRCLVDVPGSKLPSVASGEMAHHLKTMVAPQVPPQIRDAFISAVEKGNIRTMPNRSMPADPIHTPGALLLGDAFNMRHPLTGGGMTVALSDIVILRDLLNPLVDLTNKESLSKYIESFYTLRKPVASTINTLAGALYKVFLASPDDARSEMRRACFDYLSLGGVCSSGPVALLSGLNPRPMSLVLHFFAVAIFGVGRLLVPLPSVKRLWLGARLISSASGIIFPIIKAEGVRQMFFPRTIPAIYRAPPTPSSSSPQ

SEQ ID NO: 64238 - DNA, 1605 bp, Magnaporthe grisea 70-15
  CDS (1)..(1605)
atgacgacaaaggttgaaacgcaggatccccaggtccaggtggatcggaggtccaaataccatgaggccgatgtggtagttgtcggagctggcgtcttcggatgcgccatcgcatacgcgctagcaaaccagggcaggagcatcctgctgttggagagatggatgcatgagccagaccggattgtcggcgagctgctgcagcccggcggcgtcgcctccctcaagaagctcggtctcggtcactgcctcgagggcatcgatgcacaaccttgttacggctaccacgtcatgcacaagggcgatgaggtcgccatcccgtacccgtacatggacgacgaaggctgtatcgtgaccgacatgaacaagaagcagatccccaccgatgatcacgtcaacggtcacaccaataatcacaccattgacggccatgccaacggcaacggtcacctgtacaacggcggctacgaaaagctcgagccgatggcgacgaagcctgagggccgctcctttcatcatggaaggctgataacgaacctaagaaagtcttgccttgcgcacaagaatatcacagtggtggagacggaggtgacggcgaccatccggggaacccacactccccaggttctcggcgtggaggcgcggaccacggacaagtcgacgggaaagaagcacgcagactgcttctttggccaattgaccatcatcgcggatggctatgcgtccaaattccgcaagcagtacatctcccgcgcgccaatcgttcgatctaagttttacgccttagagctgattgactgcccattacccccgtacggttacggtcatgttgtaattggtgagaagcatctggcgctgctgtaccagattggctcgcatgagacccgttgcctcatcgacgttcccgagaaccttcccgctgcctcgccggcaaatgggggtgtgcgcggctacctccataaggttgttatcccgtcgctcccagagtctgttcgcccctctgccttgaaagccctctcggatggcaagatcccaaggagtatgccaaacagctggttaccccctacacctcagactcagcacgagggcatcctgatcctcggtgacgccatgaacatgcggcatcctctgacgggaggcggcatgacggttgcattcaacgatgcacttctcgttgcagaactgctagatccggatgtcgttcccagcctgtccgacacagctgccgtccgggctgccatgaaaacgtttcactggcgtcgcaagcggttgacatcgatcgtcaacgtgctcgcccaggcgctttacagtctctttgccgcgagcgactggcgtctggacgccctcaggcgtggctgctttgaatacttccagcgcggcatcaccgatgagccttgtgccatgttggcgggtcttctcgagagccctaccacgctcgcctatcacttcttcagcgttgcatttgtcgcactttggctacatctctccggctcgatcggctcgcccgcgggtttgtggaaattgcccatggtcctgattgaatgtgtcatgattttgtggaaggcctgtgtcgtattccttcctgtcatgtgggccgaggccgcctag

SEQ ID NO: 64239 - protein, 534 aa, Magnaporthe grisea 70-15
MTTKVETQDPQVQVDRRSKYHEADVVVVGAGVFGCAIAYALANQGRSILLLERWMHEPDRIVGELLQPGGVASLKKLGLGHCLEGIDAQPCYGYHVMHKGDEVAIPYPYMDDEGCIVTDMNKKQIPTDDHVNGHTNNHTIDGHANGNGHLYNGGYEKLEPMATKPEGRSFHHGRLITNLRKSCLAHKNITVVETEVTATIRGTHTPQVLGVEARTTDKSTGKKHADCFFGQLTIIADGYASKFRKQYISRAPIVRSKFYALELIDCPLPPYGYGHVVIGEKHLALLYQIGSHETRCLIDVPENLPAASPANGGVRGYLHKVVIPSLPESVRPSALKALSDGKIPRSMPNSWLPPTPQTQHEGILILGDAMNMRHPLTGGGMTVAFNDALLVAELLDPDVVPSLSDTAAVRAAMKTFHWRRKRLTSIVNVLAQALYSLFAASDWRLDALRRGCFEYFQRGITDEPCAMLAGLLESPTTLAYHFFSVAFVALWLHLSGSIGSPAGLWKLPMVLIECVMILWKACVVFLPVMWAEAA

SEQ ID NO: 64240 - DNA, 1503 bp, Gibberella zeae PH-1
  CDS (1)..(1503)
atggcttcaatactcacaacgaccgaggcgcaaacccgccgccgcgaacaataccatgaagccgatgtcgtcgtcgtaggagccggtgtattcggctgcactatggctttcgctctcgccaaccaaggccgatccgtccttctcctcgagcgatggctcaaggaacccgatcgcattgtcggcgagcttctccagcccggcggtgtcgcctccctgcagaaactcggcctcggacactgcgtcgagggcatcgacgcaaagccctgctacggatacaccattttctaccacggtgaaaaggtcctcgttccttatcccgggatcgacgatgagggtagccctacacatgcttggggaggccacagcacaggagacaggagtacaagaccttctggatgcagtttccaccatggtcgcttcatcaacaagctacgagagtcgtgcatagcccataagaacatcactgtcgtcgagactgaggttgtcaagacgctgcgcggagaggtatcggatcagatcctcggtgtcgagagtcgcaccatgaacaaggagactggaaagaaggagcaagattattactttggacaattgaccatcattgctgatggctatgactccaagtggcgccaggaagtcctcaagaccaagcccaaggtctgctcaaagttctacgctcttgagctcatcgattgcgaccttcctcaacctggtcacggccatgtcattattggcaacgctttccccatccttctctaccagatcggaacccacgagacccgcgctcttatcgatgtgccccaaggcatccctgaagcttcgcccgagaacggcggtgtccgtggctacatccgcaatttcgtcttacccgctcttcctccttccatccgaccatcagctgagaaggctctggaagacggcaagatcccccgaagcatgcctaacagctggcttcctcctacgaaacagcgcgccaacggagcgatccttctcggtgacgctatgaacatgcgccacccgcttactggtggtggtatgactgtggcattcaacgacgttgttattctgtcagagctgctgcatcctgataaggttggcgaccttggtgattccaagctgatcaacaatgcgcttgaggagctttactggagacggaagcctctgactggtatcatcaacgtcctggcgcaggccctctactctctgttcgctgccaatgaccgtcaactacgtgctctccagtacggatgcttcacctacttcaagaacggtgatactgacggccccgtcgctctcctcgctggtattctccagcgtcctttcatccttgcctatcacttcttctctgtcgccttcctcgccatctggctcaacgcctgctccgtcgttggctgtggaattcttggcatcttcaagttccctctcgccattatcgacgccgtccttatcctctggaaggcgtgcattgtcttcattcccattatgtggcgtgaatcattccagtag

SEQ ID NO: 64241 - protein, 500 aa, Gibberella zeae PH-1
MASILTTTEAQTRRREQYHEADVVVVGAGVFGCTMAFALANQGRSVLLLERWLKEPDRIVGELLQPGGVASLQKLGLGHCVEGIDAKPCYGYTIFYHGEKVLVPYPGIDDEGSPTHAWGGHSTGDRSTRPSGCSFHHGRFINKLRESCIAHKNITVVETEVVKTLRGEVSDQILGVESRTMNKETGKKEQDYYFGQLTIIADGYDSKWRQEVLKTKPKVCSKFYALELIDCDLPQPGHGHVIIGNAFPILLYQIGTHETRALIDVPQGIPEASPENGGVRGYIRNFVLPALPPSIRPSAEKALEDGKIPRSMPNSWLPPTKQRANGAILLGDAMNMRHPLTGGGMTVAFNDVVILSELLHPDKVGDLGDSKLINNALEELYWRRKPLTGIINVLAQALYSLFAANDRQLRALQYGCFTYFKNGDTDGPVALLAGILQRPFILAYHFFSVAFLAIWLNACSVVGCGILGIFKFPLAIIDAVLILWKACIVFIPIMWRESFQ

SEQ ID NO: 64242 - DNA, 1503 bp, Kluyveromyces lactis NRRL Y-1140
  CDS (1)..(1503)
atgagtgattctgttgacgttaaagctattcctaaggagctccttagtgctagctcagaaattgtctatgatgccattgtcgttggatgtggtgtcgtaggtccatgtattgcaacaggacttgcaagaaagggtaagaaagtgttgattgttgaaagagattggactatgccagatcgtattgttggtgaactaatgcaacctggtggtttgcgggcattgagaagcctcggtatgattcaagccatcaataatattgatgctatcccagtgactggctactctgtgttctacaatggtgagaaagtttcaatcccatacccttacaaggccgatacagcaccagtagagaaaatatcggatttagtcttcgatggtaatgatagagttattgaagataaaaccgttcatgtcaaggatttcgaagatgacgacagggaaagaggtgttggtttcgttcacggtaagttcttacagaatttaagagatattgttgccaaagaaccaaatgtgacccgcctccaaggtaatgtcattgagatcttgagaagcaaagaaaacgaagtagttggtgctaaggtcgaaatcccaggtcgtggtaaagaagacttcaaagcacatttgacttttgtatgtgatggtatcttttctcgctttagaaaagagctctccccagatcatatcccctctgttggatcctctttcgtcggtatgtctttgttccatgcaaacattccatcgaagaaccatggtcatgttattctaggtacttcacatatgcccgtgctcgtatatcaaatctcctctgaagaaacaagaattctatgtgcatacaattcagcaagactacctaaagatataaagtcgtggttgactactgatgttaaaccatacttacctaaatctttgttgccatcgtttgataaagcggttgaagatggtaaattcagatcaatgccaaactcttacctaccagcaaagcaaaatactgtcaccggattatgcgtcatcggagatgccttgaatatgagacatcctttgactggtggtgggatggctgttggcttgaacgacgttgctctactaatcaagactgttggtgatttagatttctcagacagagagactgtccttgatgaattactagaataccatttcgaaagaaagcaatatgacagtgtcatcaatgtactatccatcgctttatactcattgtttgctgcagacaacagaaacttacaagtattacaaagaggttgtttcaaatatttcgaaagaggtggagactgtattagattgccagtaagtttcttggctggtgttcttccaaaaccgttcttgttgaccaaggtgtttttctcagtggcattgtactccatatatgttaacttccaagaaagaggcattttgggatcccctctggcattattagaggcatttgctatcctatttacagctgcaaaagtgtttactccttacttgttcaaagaattgataggttaa

SEQ ID NO: 64243 - protein, 500 aa, Kluyveromyces lactis NRRL Y-1140
MSDSVDVKAIPKELLSASSEIVYDAIVVGCGVVGPCIATGLARKGKKVLIVERDWTMPDRIVGELMQPGGLRALRSLGMIQAINNIDAIPVTGYSVFYNGEKVSIPYPYKADTAPVEKISDLVFDGNDRVIEDKTVHVKDFEDDDRERGVGFVHGKFLQNLRDIVAKEPNVTRLQGNVIEILRSKENEVVGAKVEIPGRGKEDFKAHLTFVCDGIFSRFRKELSPDHIPSVGSSFVGMSLFHANIPSKNHGHVILGTSHMPVLVYQISSEETRILCAYNSARLPKDIKSWLTTDVKPYLPKSLLPSFDKAVEDGKFRSMPNSYLPAKQNTVTGLCVIGDALNMRHPLTGGGMAVGLNDVALLIKTVGDLDFSDRETVLDELLEYHFERKQYDSVINVLSIALYSLFAADNRNLQVLQRGCFKYFERGGDCIRLPVSFLAGVLPKPFLLTKVFFSVALYSIYVNFQERGILGSPLALLEAFAILFTAAKVFTPYLFKELIG

SEQ ID NO: 64244 - DNA, 1494 bp, Debaryomyces hansenii CBS767
  CDS (1)..(1494)
atgacaagtgctagcaatatttatgatgttattgtggttggagccggtgttgttggacctactatagcaacagcacttgcgagacaaggcagacgggttttgatcatcgagagagattggtcgacgcctgatagaatcgtaggagagttaatgcagcctggaggaataaaggcattaaaggaacttggaatgattaaggctattaacaatatcgaagctattcatgttgatgggtattacgtcaaatatggtgatcaagtagttcgattagactacccagataagcaggatgcaatgaaaacgaactctgttaagtcagtaccagactgtgtatttgacggtaacgacaagatggcgagcgattatacattgagttcgaaagactgggatgaagacgagcgtgttcggggtgtagcgtttcacaatggagaatttttaatgaatttaagatcgatggttaaaagtgaacctaacgtgacatgggttgaaggaacagccaccaagatacttcgggatgaagaaaatcctagcatagttacaggagttgaggtcaagcaaaaccaggcaaaaaagacatatacagctaagttaactataagttgcgatgggatatattcgaaattcagaaaagaactttcggccgaaaatgtacctataataggatcctatttcgttgggttgaagcttattgatgctaaattacctatggtcaaccggggacatgtcatattaggatcgcatgcgccaattttgatataccaaatatcaccacacgaaacaagaatattatgtgcttacagatccacgaagcctccttctcagacgagcgacgagttatacaattaccttcgtgacgaagtattgcctgcattaccaaaagaaactcaaccttcgtttgaaaaggccttggagactagaaaattcagagcgatgcctaatcaatatttacctgcagtaaaacaaggaaaagagactaagggcttagttatgttaggcgattctctcaacatgagacatcctttaactggaggaggtatgactgtcggcttaaatgacagtgtgttgctcgcaaaattattgcatccaaggtacatagaagacttcgataaccacgaacttctaggcaaacaactaagcactttccatagaaaacgtaagaatctcgatgctgtgcttaatactttatctatagccttgtacacattgtttgcggccgacagaaatgctttattgattttacaaagaggctgcttcaagtatttcctcctcggaggtgactgcgtttccggcccaattggcttgttatcaggaatcctaccattccccatgttattattcaaccatttcttcagtgtggccttctatgcaatttactgcaactttatagacagaggcctcattggattccctctagccttgcttgaagcatttgataccattttcactgcgataattgttttcacaccgtatttgtggaaagaattggtttactag

SEQ ID NO: 64245 - protein, 497 aa, Debaryomyces hansenii CBS767
MTSASNIYDVIVVGAGVVGPTIATALARQGRRVLIIERDWSTPDRIVGELMQPGGIKALKELGMIKAINNIEAIHVDGYYVKYGDQVVRLDYPDKQDAMKTNSVKSVPDCVFDGNDKMASDYTLSSKDWDEDERVRGVAFHNGEFLMNLRSMVKSEPNVTWVEGTATKILRDEENPSIVTGVEVKQNQAKKTYTAKLTISCDGIYSKFRKELSAENVPIIGSYFVGLKLIDAKLPMVNRGHVILGSHAPILIYQISPHETRILCAYRSTKPPSQTSDELYNYLRDEVLPALPKETQPSFEKALETRKFRAMPNQYLPAVKQGKETKGLVMLGDSLNMRHPLTGGGMTVGLNDSVLLAKLLHPRYIEDFDNHELLGKQLSTFHRKRKNLDAVLNTLSIALYTLFAADRNALLILQRGCFKYFLLGGDCVSGPIGLLSGILPFPMLLFNHFFSVAFYAIYCNFIDRGLIGFPLALLEAFDTIFTAIIVFTPYLWKELVY

SEQ ID NO: 64246 - DNA, 1470 bp, Yarrowia lipolytica CLIB122
  CDS (1)..(1470)
atggtcacccaacagtctgcagcagagaccagcgccacccagaccaacgagtacgacgtggtcattgtcggagctggtattgccgggcccgctctggccgtggctcttggaaatcagggcagaaaggttcttgttgtggaacgagatctctccgaaccggaccgaatcgtgggagagctgcttcagcccggaggagtcgctgctctcaagactctgggtctcggctcttgtatcgaggatatcgacgcgatcccctgccagggatacaacgtgatctactctggagaagagtgcgttctcaaataccccaaggtcccccgagacatccagcaggactacaacgagctgtacagaagcggaaagtctgccgacatctccaacgaggctccccgaggagtatccttccaccacggccgatttgtcatgaacttgcgaagggccgcacgagacacacccaatgtgactctgctggaggccacagtcaccgaggtggtcaagaacccttacaccggccacattattggagtcaagaccttctctaaaactggaggcgccaaaatctacaagcacttctttgctcctctcaccgtcgtctgtgatggaactttttccaagttccgaaaggactttagcaccaacaagacgtctgtgcgttcgcatttcgccggtctgattctcaaggacgctgttctgccctccccccagcatggccacgtgattctgtcgcccaactcgtgtcccgttcttgtctaccaggttggagctcgagagacccgaattctgtgtgacattcagggacccgtcccctctaatgcaaccggagccctcaaggaacacatggagaagaacgtcatgccccacctgcctaagtccatccagccgtctttccaagccgctctcaaggagcagaccattcgagtcatgcccaactctttcctgtcggcctccaagaacgatcaccacggtttgattctgctgggtgacgcactcaacatgcgacatccacttaccggaggaggaatgaccgttgctctcaatgatgcccttctactcagcagacttctcaccggcgttaacctggaagacacctatgccgtgtcctccgtcatgagctcgcagttccactggcagcgaaaacacctcgactccatcgtcaacattctctccatggccctctactcgctcttcgccgccgactcggactacctgcgaatcctgcagctcggatgcttcaactacttcaagctgggaggcatctgtgtggaccaccccgtcatgctgttggctggagttctcccccgacccatgtacctgtttacgcatttcttcgtagtggccatctacggcggaatctgcaacatgcaggccaacggcattgccaagctgcccgcgtcgctactgcaatttgtcgcctctctggtcaccgcttgcatcgtcatcttcccttacatttggagcgagctgacttag

SEQ ID NO: 64247 - protein, 489 aa, Yarrowia lipolytica CLIB122
MVTQQSAAETSATQTNEYDVVIVGAGIAGPALAVALGNQGRKVLVVERDLSEPDRIVGELLQPGGVAALKTLGLGSCIEDIDAIPCQGYNVIYSGEECVLKYPKVPRDIQQDYNELYRSGKSADISNEAPRGVSFHHGRFVMNLRRAARDTPNVTLLEATVTEVVKNPYTGHIIGVKTFSKTGGAKIYKHFFAPLTVVCDGTFSKFRKDFSTNKTSVRSHFAGLILKDAVLPSPQHGHVILSPNSCPVLVYQVGARETRILCDIQGPVPSNATGALKEHMEKNVMPHLPKSIQPSFQAALKEQTIRVMPNSFLSASKNDHHGLILLGDALNMRHPLTGGGMTVALNDALLLSRLLTGVNLEDTYAVSSVMSSQFHWQRKHLDSIVNILSMALYSLFAADSDYLRILQLGCFNYFKLGGICVDHPVMLLAGVLPRPMYLFTHFFVVAIYGGICNMQANGIAKLPASLLQFVASLVTACIVIFPYIWSELT

SEQ ID NO: 64248 - DNA, 1743 bp, Ustilago maydis 521
  CDS (1)..(1743)
atgctctccaaaacttcatccgccaagcccgacatcatccttgtcggagccggcatcgttggctccgctcttgcctattcgctcggcaagtccggccgccgggtagctcttctcgagagagactttgacgagccggaccgtattgtcggcgagcttcttcagcccggtggtgtacgtgcactctccaaaatgggcattgtcgatacgcttgaagatatcgacgctgttcctgtcgaaggctaccacgtattctacggttctcgctccgtacctatcccttatccgcaggaaagacccgaccaagccggcagtggcgttgtcagtaatagtggcagggttgagggtcgcagtttccaccatggcaagttcgttcagtctctacgcagcaaggctcttcatcagcaaaatgtcaccccgtacgaagccacagtacgagatctgctcaaagacgccgaaggcagagtcgttggtgtcagcgctacgtggaagaaagcgccagagggcaaaccagcggcttttgagctgcgtgctcctctcaccattgttgctgatggctgcttctccaaatttcgacgtacacacggaagctcaatccaacccttggttcgatccaactttgtcggtcttgagctgcacgatgctcccttacctgcgccgcaccacggccatgtcgtcttgtccaagaacggtccggtgttgctgtatcagattggcacccacaccacacgtattctgatcgatgtagccggcgaaaagctaccttcggcagcaaaaggagatctgcaaaagcacgtcaacgagaatgtaatttctcagcttccagagcagctgcgcgaatgcgttcaagtcgaaatggccaaaggtcagcgattgcgcagtatgcccaattccttcctgccgcccagcatgcagggtcagtccgaacacgcaaagggagtcatcgtggtcggagatgcgatgaatatgcgacatcctctcacaggcggtggaatgaccgtcggtctctgggatgccgttcatctcacagaagtgctcggtggatcagaatgggcaccactctctggcgacaaaccatcacgcgctccactcgaactcgccaattggtctaccctcagcccagcattgcgctcctggcactggaacaggaagggtctctcttccgtcatcaacattctcgcacaagcattgtacagcctgtttggcgccgacgatgccaacctcgaagtgctgcgagaaggttgtttcaagtactttgaaatgggaggcgagtgtgtcaatggtcctgtatcgctgctttctggactggcaccgagaccgatgctcctcgttggacactttttcgctgttgctgtatacagcatctatgcgctgttcgctcatcccaaattctaccctaaggagggaaagacgaggaagccttcactattggaatacccagcgttgatctggcgatccatcatggttttctacacggcatgtatcgtgctgcttccggtcgttttcacggagatgaagagcaacgttccaaggctcactcctgtcaccgcagcttcaggaacaagtggaaagggcggtcaattggcgaacgctggatctctcaggacggacaactttgccctcgtcagtgcctcaattctgctgattgcaaccgtgatgttctggggcaacgcgagggatcctggtacagcgagaaacctgtccaattggttggtctttcccaaagtaggtgccggagcgtcctga

SEQ ID NO: 64249 - protein, 580 aa, Ustilago maydis 521
MLSKTSSAKPDIILVGAGIVGSALAYSLGKSGRRVALLERDFDEPDRIVGELLQPGGVRALSKMGIVDTLEDIDAVPVEGYHVFYGSRSVPIPYPQERPDQAGSGVVSNSGRVEGRSFHHGKFVQSLRSKALHQQNVTPYEATVRDLLKDAEGRVVGVSATWKKAPEGKPAAFELRAPLTIVADGCFSKFRRTHGSSIQPLVRSNFVGLELHDAPLPAPHHGHVVLSKNGPVLLYQIGTHTTRILIDVAGEKLPSAAKGDLQKHVNENVISQLPEQLRECVQVEMAKGQRLRSMPNSFLPPSMQGQSEHAKGVIVVGDAMNMRHPLTGGGMTVGLWDAVHLTEVLGGSEWAPLSGDKPSRAPLELANWSTLSPALRSWHWNRKGLSSVINILAQALYSLFGADDANLEVLREGCFKYFEMGGECVNGPVSLLSGLAPRPMLLVGHFFAVAVYSIYALFAHPKFYPKEGKTRKPSLLEYPALIWRSIMVFYTACIVLLPVVFTEMKSNVPRLTPVTAASGTSGKGGQLANAGSLRTDNFALVSASILLIATVMFWGNARDPGTARNLSNWLVFPKVGAGAS

SEQ ID NO: 64250 - DNA, 1555 bp, Trichophyton rubrum
  CDS (47)..(1516)
gtgacagcgacaagtgccagatttaccccatcaataagttactacaatggttgtagaggctcctccctgcccccagagcggcaacggctttgcgaatggctccgcgaagcccaaggtataccgcgacgaagccgagcggcgacgatacgaacaccacgaagcggacgtcgtgataattggcgctggcattgctggatgtacgctggctgttgcgttggggaaccagggacggagcgttatcttgcttgagaggtcgttgaaggagcctgatcggatagtgggagagctgcttcaacctggcggggtgagagctcttgaacaactcggcctgagagattgcctggagggaatagatgccgtgaggacatatggatacgatgtgatatattttggcaatggtgtgaagatacctttccctagcgacgccaacgataagatcctggaaggcaggtgcttccaccacggccgctttatcatgcgccttcgagaggccgcggccgcgaacccgaacgtcaccattgtcgagaccaaggccgtttctaccataaaatccacgcatacaggggaggtccttggagtccagtgccagactgatggcaaacaagacttttattttgggcccctgaccgttgtcgcggatggttatgcctctacgttccgaaaggaatatctccccatacaaccagtcgccaaatcgaaattctggggcctggagcttatagatgcgaaattacccataccgggccacggccatgttgtcctgggtgatttcccgcccatattgatataccagattggagagcatgagactcgaatcctaattgatataccagacaacctgccttcggcgtcagttgccaacggaggtgtaaagggtcacatgcggaatgtcgtccttccttctttgccagagtgtattcggccctcatttgaagctgcgttggagaagggagggtttcggtcaatgccaaattccttcctcagacccgtcacgaataggatccccggattgatgttcctaggtgattccctgaacatgcgtcacccgttgactggtggcggtatgaccgtggcatttaatgatgtcgttctcctccgggatctgcttagtccggaggccgtacctgatttaagtgataccaaacttgttttaaaacagctgtccaaattccactggcaacggaagtcgttgatttctgtcatcaatattcttgctcaggccttatactctatactcgccgctggtgaccccaatttgaaagtcctgcaacgaggctgcttcaggtatttccaacttggacttatagatggccccatcggactgctgtccggcattattcgatcacccttggttctattacggcatttttactccgtagccttcctcgctatctggctacaccttactagcaaacccatctacctcctccccttgacccttttcgagtgcataatcgtatttcttactgcctgcagggtcatccttcctttcatatttgccgaacttcaaagctaggcagataggcttatctctaactctttttaatacattctc

SEQ ID NO: 64251 - protein, 489 aa, Trichophyton rubrum
MVVEAPPCPQSGNGFANGSAKPKVYRDEAERRRYEHHEADVVIIGAGIAGCTLAVALGNQGRSVILLERSLKEPDRIVGELLQPGGVRALEQLGLRDCLEGIDAVRTYGYDVIYFGNGVKIPFPSDANDKILEGRCFHHGRFIMRLREAAAANPNVTIVETKAVSTIKSTHTGEVLGVQCQTDGKQDFYFGPLTVVADGYASTFRKEYLPIQPVAKSKFWGLELIDAKLPIPGHGHVVLGDFPPILIYQIGEHETRILIDIPDNLPSASVANGGVKGHMRNVVLPSLPECIRPSFEAALEKGGFRSMPNSFLRPVTNRIPGLMFLGDSLNMRHPLTGGGMTVAFNDVVLLRDLLSPEAVPDLSDTKLVLKQLSKFHWQRKSLISVINILAQALYSILAAGDPNLKVLQRGCFRYFQLGLIDGPIGLLSGIIRSPLVLLRHFYSVAFLAIWLHLTSKPIYLLPLTLFECIIVFLTACRVILPFIFAELQS

SEQ ID NO: 64252 - DNA, 1648 bp, Panax notoginseng
  CDS (14)..(1627)
gtcaaccaacaccatgaattcatcttcttctactagtactactgatacgttgcattcttttatggaagctctgctcattgatcaatatcttcttggatggatctttgctttcctttttgggttcctgctcttgcttaatttcaaaaggaagagagagaaaaataattccacggagtttggaacagatcatagcaacggatactacataccggaaaatattgccggaagtacggacgtcatcatcgtcggcgccggggttgctggctctgctcttgcttatacgcttgccaaagatggccggagagttcatgttattgagagggacttaactgagcaagacagaattgtaggtgaacttctacaaccaggaggctacttgaaattgattgaattagggctagaggattgtgtgaatgaaatcgatgcgcaacgagtttttggatatgccctttacatggatggtaaaaacaccaggctttcttaccccttggaggaaattcattcggatgtagctggaagaagctttcataacggccgttttgttcaacgaatgagggagaaagctgcatcacttccaaacgtaagaatggaacaggggactgttacatctctggttgagaaaaagggaagtgtaaaaggggtgcaatacaaaaccaaggatggccaagaattgtctgcatttgctcctcttacaattgtttgtgatggttgtttttcgaatctccgtcgctccctctgcaatcccaaggtggaggtgccttcgtgttttgttggtttgattttggaaaacattgatcttccacatataaaccatggccatgtcattctagcagatccttctccgatcttgttttataaaattagtagtaccgagattcgctgtttggttgatttgcctggacaaaaggtgccttctatttctaatggggaattggctaattatctcaagacagtagtagctcctcaggttccaaaacagctatataactctttcatggcagcagttgacaaaggaaacattcgaatcatgccaaacagaagcatgccagctgatcctcatccaactccgggtgcacttctattaggggatgctttcaatatgcgccatcctttaaccggcgggggaatgacagttgctccgtccgatattgtcttgatccgggatcttcttagacccttatgcgatctccatgactcatcaaccctctgcaaatatctcgaatccttttacacccttcgtaagcccgtggcatctactataaatacattggcaggtgccctttataaagttttttgtgcatcacctgataaagcaaggcaagaaatgcgcaatgcgtgttttgattatctgagcctcggaggaatttgttcccaagggccaattgctttactttctggcctaaacccgcgtccaattagcctatttctccacttctttgccgtggctatctatggcgttggccacttgttgattccttttccttcaccaaaacgaatgtggctcggcgctagattgattttgggtgcatctggaattattttccctattataaagtcagaaggacttcgacaaatgttcttccctgcaactgttcctgcttactacagagctccccccattcgctaagaaagtgattatggccttcat

SEQ ID NO: 64253 - protein, 537 aa, Panax notoginseng
MNSSSSTSTTDTLHSFMEALLIDQYLLGWIFAFLFGFLLLLNFKRKREKNNSTEFGTDHSNGYYIPENIAGSTDVIIVGAGVAGSALAYTLAKDGRRVHVIERDLTEQDRIVGELLQPGGYLKLIELGLEDCVNEIDAQRVFGYALYMDGKNTRLSYPLEEIHSDVAGRSFHNGRFVQRMREKAASLPNVRMEQGTVTSLVEKKGSVKGVQYKTKDGQELSAFAPLTIVCDGCFSNLRRSLCNPKVEVPSCFVGLILENIDLPHINHGHVILADPSPILFYKISSTEIRCLVDLPGQKVPSISNGELANYLKTVVAPQVPKQLYNSFMAAVDKGNIRIMPNRSMPADPHPTPGALLLGDAFNMRHPLTGGGMTVAPSDIVLIRDLLRPLCDLHDSSTLCKYLESFYTLRKPVASTINTLAGALYKVFCASPDKARQEMRNACFDYLSLGGICSQGPIALLSGLNPRPISLFLHFFAVAIYGVGHLLIPFPSPKRMWLGARLILGASGIIFPIIKSEGLRQMFFPATVPAYYRAPPIR

SEQ ID NO: 64254 - DNA, 1623 bp, Panax notoginseng
  CDS (9)..(1622)
ccaacaccatgaattcatcttcttctactagtactactgatacgttgcattcttttatggaagctctgctcattgatcaatattttcttggatggatctttgctttcctttttgggttcctgctcttgcttaatttcaaaaggaagagagagaaaaataattccacggagtttggaacagatcatagcaacggatactacataccggaaaatattgccggaagtacggacgtcatcatcgtcggcgccggggttgctggctctgctcttgcttatacgcttgccaaagatggccggagagttcatgttattgagagggactcaactgagcaagacagaattgtaggtgaacttctacaaccaggaggctacttgaaattgattgaattagggctagaggattgtgtgaatgaaatcgatgcgcaacgagtttttggatatgccctttacatggatggtaaaaacaccaggctttcttaccccttggagaaatttcattcggatgtagctggaagaagctttcataacggccgttttgttcaacgaatgagggagaaagctgcatcacttccaaacgtaagaatggaacaggggactgttacatctctggttgagaaaaaggcaagtgtaaaaggggtgcaatacaaaaccaaggatggccaagaattgtctgcatttgctcctcttacaattgtttgtgatggttgtttttcgaatctccgtcgctccctctgcaatcccaaggtggaggtgccttcgtgttttgttggtttgattttggaaaatattgatcttccacatataaaccatggccatgtcattctagcagatccttctccgatcttgttttataaaattagtagtaccgagattcgctgtttggttgatttgcctggacaaaaggtgccttctatttctaatggggaattggctaattatctcaagacagtagtagctcctcaggttccaaaacagctatataactctttcatagcagcagttgacaaaggaaacattcgaaccatgccaaacagaagcatgccagctgatcctcatccaactccgggtgcacttctattaggggatgctttcaatgtgcgccatcctttaaccggcgggggaatgacagttgctctgtccgatattgtcttgatccgggatcttcttagacccttatgcgatctccatgactcatcaaccctctgcaaatatctcgaatccttttacacccttcgtaagcccgtggcatctactataaatacattggcaggtgccctttataaagttttttgtgcatcacctgataaagcaaggcaagaaatgcgcaatgcgtgttttgattatctgagcctcggaggaatttgttcccaagggccaattgctttactttctggcctaaacccgcgtccaattagcctatttctccacttctttgccgtggctatctatggcgttggccgcttgttgattccttttccttcaccaaaacgaatgtggctcggcgctagattgattttgggtgcatctggaattattttccctattataaagtcagaaggacttcgacaaatgttcttccctgcaactgttcctgcttactacagagctccccccattcactaag

SEQ ID NO: 64255 - protein, 537 aa, Panax notoginseng
MNSSSSTSTTDTLHSFMEALLIDQYFLGWIFAFLFGFLLLLNFKRKREKNNSTEFGTDHSNGYYIPENIAGSTDVIIVGAGVAGSALAYTLAKDGRRVHVIERDSTEQDRIVGELLQPGGYLKLIELGLEDCVNEIDAQRVFGYALYMDGKNTRLSYPLEKFHSDVAGRSFHNGRFVQRMREKAASLPNVRMEQGTVTSLVEKKASVKGVQYKTKDGQELSAFAPLTIVCDGCFSNLRRSLCNPKVEVPSCFVGLILENIDLPHINHGHVILADPSPILFYKISSTEIRCLVDLPGQKVPSISNGELANYLKTVVAPQVPKQLYNSFIAAVDKGNIRTMPNRSMPADPHPTPGALLLGDAFNVRHPLTGGGMTVALSDIVLIRDLLRPLCDLHDSSTLCKYLESFYTLRKPVASTINTLAGALYKVFCASPDKARQEMRNACFDYLSLGGICSQGPIALLSGLNPRPISLFLHFFAVAIYGVGRLLIPFPSPKRMWLGARLILGASGIIFPIIKSEGLRQMFFPATVPAYYRAPPIH

SEQ ID NO: 64256 - DNA, 1497 bp, Trichoderma harzianum
  CDS (1)..(1497)
atgtcggaaacattgatttcagaaacccacacgcgcgagcggcgtgacctctatcatgaggccgatgtcgtcgtcgtcggcgccggtgtctttggttgcgcggctgccttcgctctggcaaaccagggacgctccgtgcttcttctcgagaggtggatgcacgagcctgaccggattgtgggcgagctgctgcagccaggcgggttgacggccctcagaaagctgggcttgggtcactgcgttgaggacatcgacgcaataccctgctacggctacaacgtcatctaccacggagaaccatgcgccattccctaccccgggctcaacgaaaagggcgaagtgacacatgcgtggggaggaagagggacgggcggaacgaagcaagaaggatgcggcttccatcacggcaaattcatctcacagctccgcaaggcgtgtctgggccacaagaacatcacagtcgtcgagacagaggttgtcaagaccattcgaggagagcacacagaccaggttctgggcgtggagtcacggaccacagtgaacaaggagacgggagagaagaagagcgactacttctttggccagctcaccattgttgccgacggatacgactccaagtttcgaaagcaagttctagagaccaagcccgtcgtcaaaagcaaattttatgccctggagctggtcgacacgaagctaccgctgcccttccacggccatgtcatcatcggcaatgcctttcccattctcctctaccagatcggcactcacgagacaagagcgctcttcgacgtgcccgcaaacatcccccaggcttctcccgaagccggcggcgtccgcggctatatcaagaactgcgccatccccgtgctccccgaggccatccgcccggctgccgaaaaggcccttgccgacggcaagatcccccgcagcatgcccaacagctggctccccgccgttccccagaccccaagcggcctcgtcgtccttggcgacgcgctgaacatgcggcacccccttaccggaggcggcatgactgtcgccttcaacgacgccctgctgctctccgagctgctgcatcccgacgtcgtcccgaacctcgaggacaaggcggccattcgcgacgccatgaacaagctctactggcgccgcaagaacttcaccagcatcatcaacaccctcgcccaagccctctactctctcttcgccgccaacgaccgccagctgcgcgccctccagttgggttgcttcgagtacttccgccgcggctggaccgatgggccggctggcctgctcggcggcatcatccagcgaccccttgtgctggcgtaccatttcttctatgtcgccttcgtggccatttggatgaacgggtgcaacgtcattggcggaccacttggcttctggaaactgcccctggcgctgctcgatgccgttctcatcctgtggaaggcctgcatcgtctttttgccagttatctggagagaaggcttccaataa

SEQ ID NO: 64257 - protein, 498 aa, Trichoderma harzianum
MSETLISETHTRERRDLYHEADVVVVGAGVFGCAAAFALANQGRSVLLLERWMHEPDRIVGELLQPGGLTALRKLGLGHCVEDIDAIPCYGYNVIYHGEPCAIPYPGLNEKGEVTHAWGGRGTGGTKQEGCGFHHGKFISQLRKACLGHKNITVVETEVVKTIRGEHTDQVLGVESRTTVNKETGEKKSDYFFGQLTIVADGYDSKFRKQVLETKPVVKSKFYALELVDTKLPLPFHGHVIIGNAFPILLYQIGTHETRALFDVPANIPQASPEAGGVRGYIKNCAIPVLPEAIRPAAEKALADGKIPRSMPNSWLPAVPQTPSGLVVLGDALNMRHPLTGGGMTVAFNDALLLSELLHPDVVPNLEDKAAIRDAMNKLYWRRKNFTSIINTLAQALYSLFAANDRQLRALQLGCFEYFRRGWTDGPAGLLGGIIQRPLVLAYHFFYVAFVAIWMNGCNVIGGPLGFWKLPLALLDAVLILWKACIVFLPVIWREGFQ

SEQ ID NO: 64258 - DNA, 1410 bp, Emericella nidulans
  CDS (1)..(1410)
atggccaccacccgtgccaacggccacgccaacggccaagcctcgaaaccttcagacgccgcagagctccgcagacgacttcaccatgaagccgacgttgtaatagtgggtgcaggagtgctggggtgcgcgctggcggtggcattggggcgccaggggcgtagcgtcctcctcctggaacagtcgctcaaggagccagaccgcattgttggtgaactcctgcagcctggaggggtctctgccctcgagcagctaggattgcgagactgcttagaggatattgatgccatacccacaaatggttactatgtcacctacctgggcaagcccgtcaaaatcccataccccagccaaagtcccggggcgccgccaccggagggccgctcgttccaccatggccggttcgtgatgaagctgcgcgaagctgcaggggcttgtcccaatgtcactatcgttgagacaaaggttacggacctgatcaccagttcccattccaagcaggttcttggtgtggaatgcgtgaccaaggagtccaaggactgctatttcggtcagatcaccgtcgtcgcggacgggtacgcctctaagtttcgaaaacaataccacccttataccccgaaggttcgatcgaagttctgggggcttgagctcattgatgcggaactgccgcagccacactacggccatgtcctcctagagcctgagcgcccgcccattctcatctaccagatcggaactcacgaaacgcgaatcctctgcgatatccccgaaaatctgccctcggcgtccgtcaagaacggaggcgtaaaaggtcatctccgcaacgtcgtgctcccgtccctgcccaaatgcgtgcagccctcctttgctgcggcgttagataaaggtcagctgcggtcaatgccgaactccttcctgccgagcgcgccgaacaagacaccggggttaatagtgctgggtgatgcgctaaacatgcggcatccattaactggcggaggcatgactgtcgctttgaatgacgtcgtcattctccgcgacttgctcagcccggagaaggtgcccagactaagcgacaccagactcgtcctcaaaaagctgtccaccttccactggagacgaaagatgggggcgtctgtcatcaacatcctagctcaggcgctgtactctctcttcgctgcagatgacgataacctcaaagccctccaacgcggctgcttccagtatttctccatggggatgtacgaaacccccgtcagcctcctcggcggcatgctcaagaaaccagaagtcctctttgcgcacttcttcactgttgcgttcctctcactgtggatgatcatccgcgactcccccctgtacaaactcccgctcgcattgatccggtgcgcgcttgtcttttggacggcgtag

SEQ ID NO: 64259 - protein, 469 aa, Emericella nidulans
MATTRANGHANGQASKPSDAAELRRRLHHEADVVIVGAGVLGCALAVALGRQGRSVLLLEQSLKEPDRIVGELLQPGGVSALEQLGLRDCLEDIDAIPTNGYYVTYLGKPVKIPYPSQSPGAPPPEGRSFHHGRFVMKLREAAGACPNVTIVETKVTDLITSSHSKQVLGVECVTKESKDCYFGQITVVADGYASKFRKQYHPYTPKVRSKFWGLELIDAELPQPHYGHVLLEPERPPILIYQIGTHETRILCDIPENLPSASVKNGGVKGHLRNVVLPSLPKCVQPSFAAALDKGQLRSMPNSFLPSAPNKTPGLIVLGDALNMRHPLTGGGMTVALNDVVILRDLLSPEKVPRLSDTRLVLKKLSTFHWRRKMGASVINILAQALYSLFAADDDNLKALQRGCFQYFSMGMYETPVSLLGGMLKKPEVLFAHFFTVAFLSLWMIIRDSPLYKLPLALIRCALVFWTA

SEQ ID NO: 64260 - DNA, 1659 bp, Solanum lycopersicum
  CDS (1)..(1659)
atggataagtatattgttcccagttttgttgtttctctattggggttccttcttctttatgttttgcgaccaagaacccccaattataagaaaatggatcttaaatctacccgaaaatgtgaaacccacaacgtaatttctagaaaattggagaaagggaccgatgccgatgttataattgttggagctggggttgctggtgctgctcttgctcatacccttgctaaggaaggacgaaatgttcacgtcatcgaaagggatttgacagagccggaccggattgttggcgaattgcttcagcctgggggttatcttaaattgattgagttgggcattgaagattgtgttgaggatattgatgcccagcgggtggttggatatgctcttttcaaggatggaaagagcacaaatgtttcctatcccttgaaaaacttccattcggatgtggctgggagaagctttcacaatgggcgcttcatacagaagatgagagaaaaagcagctactcttcccaatgtacgattggaacaaggcaccgtaacatccctgattgaagaaaatggatccattaagggtgttcagtacaaaactaaggctggccaagaacttaaagcacatgctcctcttacagtagtttgtgatgggtgcttctcaaacttgcgacgctcgctttgtgaccctaaggttgatgttccctcttgctttgttggtctggtattggaattggagaatgatcgacttccatacccaaaccatgggcatgttattctggcagatccttctcccatcttattttatcctatcagtagcacggaaattcgctgcttggtcgatgtacctggtcaaaagcttccttctcttgctaatggtgatatggcaaattatttgaaaactatggtagctccccaggtaccacctgagctacgtgatgcgtttctatctgcaattgataaggggcatattaaaactatgccaaacaggagcatgccagctgctccctatcctacacctggagctctgttgctaggcgattctttcaacatgcgccatccattaactggtgggggaatgactgttgcgctttcagacattgcagtattaaggaatcttcttatgccattgcaagacctgaatgacgcagatgagttgtgtaaatatctggagtcattttatactttgcgcaagccagtggcttccaccataaatactttggctggagctctgtataaggtgttctgtgcttctcctgatcaagcgaggagggagatgcgagatgcgtgttttgactatttgagccttggaggcacttgttcaactggacctgtagctctactctctggtcttgatcctaatccaatgagcttggtgctccatttctttgcagtggccgtttatggagttggtcgtttacttgtaccttttccttctccaaagaagttgtggatcggagctaaattaatattgttgaaattcctacatactcgttcaccttgtttgaaagtcttgaccattttggcatgcatgctctttttttttgttcagtctgcatcaggcatcatatttcccatcataaaggcagaagggatccggcaaatgttctttccaacaacaataccagcatatcacagagctcctcccgtgaagacggagtcagattaa

SEQ ID NO: 64261 - protein, 552 aa, Solanum lycopersicum
MDKYIVPSFVVSLLGFLLLYVLRPRTPNYKKMDLKSTRKCETHNVISRKLEKGTDADVIIVGAGVAGAALAHTLAKEGRNVHVIERDLTEPDRIVGELLQPGGYLKLIELGIEDCVEDIDAQRVVGYALFKDGKSTNVSYPLKNFHSDVAGRSFHNGRFIQKMREKAATLPNVRLEQGTVTSLIEENGSIKGVQYKTKAGQELKAHAPLTVVCDGCFSNLRRSLCDPKVDVPSCFVGLVLELENDRLPYPNHGHVILADPSPILFYPISSTEIRCLVDVPGQKLPSLANGDMANYLKTMVAPQVPPELRDAFLSAIDKGHIKTMPNRSMPAAPYPTPGALLLGDSFNMRHPLTGGGMTVALSDIAVLRNLLMPLQDLNDADELCKYLESFYTLRKPVASTINTLAGALYKVFCASPDQARREMRDACFDYLSLGGTCSTGPVALLSGLDPNPMSLVLHFFAVAVYGVGRLLVPFPSPKKLWIGAKLILLKFLHTRSPCLKVLTILACMLFFFVQSASGIIFPIIKAEGIRQMFFPTTIPAYHRAPPVKTESD

SEQ ID NO: 64262 - DNA, 1470 bp, Trichophyton rubrum
  CDS (1)..(1470)
atggttgtagaggctcctccctgcccccagagcggcaacggctttgcgaatggctccgcgaagcccaaggtataccgcgacgaagccgagcggcgacgatacgaacaccacgaagcggacgtcgtgataattggcgctggcattgctggatgtacgctggctgttgcgttggggaaccagggacggagcgttatcttgcttgagaggtcgttgaaggagcctgatcggatagtgggagagctgcttcaacctggcggggtgagagctcttgaacaactcggcctgagagattgcctggagggaatagatgccgtgaggacatatggatacgatgtgatatattttggcaatggtgtgaagatacctttccctagcgacgccaacgataagatcctggaaggcaggtgcttccaccacggccgctttatcatgcgccttcgagaggccgcggccgcgaacccgaacgtcaccattgtcgagaccaaggccgtttctaccataaaatccacgcatacaggggaggtccttggagtccagtgccagactgatggcaaacaagacttttattttgggcccctgaccgttgtcgcggatggttatgcctctacgttccgaaaggaatatctccccatacaaccagtcgccaaatcgaaattctggggcctggagcttatagatgcgaaattacccataccgggccacggccatgttgtcctgggtgatttcccgcccatattgatataccagattggagagcatgagactcgaatcctaattgatataccagacaacctgccttcggcgtcagttgccaacggaggtgtaaagggtcacatgcggaatgtcgtccttccttctttgccagagtgtattcggccctcatttgaagctgcgttggagaagggagggtttcggtcaatgccaaattccttcctcagacccgtcacgaataggatccccggattgatgttcctaggtgattccctgaacatgcgtcacccgttgactggtggcggtatgaccgtggcatttaatgatgtcgttctcctccgggatctgcttagtccggaggccgtacctgatttaagtgataccaaacttgttttaaaacagctgtccaaattccactggcaacggaagtcgttgatttctgtcatcaatattcttgctcaggccttttactctatattcgccgctggtgaccccaatttgaaagtcctgcaacgaggctgcttcaggtatttccaacttggacttatagatggccccatcggactgctgtccggcattattcgatcacccttggttctattacggcatttttactccgtagccttcctcgctatctggctacaccttactagcaaacccatctacctcctccccttgacccttttcgagtgcataatcgtatttcttactgcctgcagggtcatccttcctttcatatttgccgaacttcaaagctag

SEQ ID NO: 64263 - protein, 489 aa, Trichophyton rubrum
MVVEAPPCPQSGNGFANGSAKPKVYRDEAERRRYEHHEADVVIIGAGIAGCTLAVALGNQGRSVILLERSLKEPDRIVGELLQPGGVRALEQLGLRDCLEGIDAVRTYGYDVIYFGNGVKIPFPSDANDKILEGRCFHHGRFIMRLREAAAANPNVTIVETKAVSTIKSTHTGEVLGVQCQTDGKQDFYFGPLTVVADGYASTFRKEYLPIQPVAKSKFWGLELIDAKLPIPGHGHVVLGDFPPILIYQIGEHETRILIDIPDNLPSASVANGGVKGHMRNVVLPSLPECIRPSFEAALEKGGFRSMPNSFLRPVTNRIPGLMFLGDSLNMRHPLTGGGMTVAFNDVVLLRDLLSPEAVPDLSDTKLVLKQLSKFHWQRKSLISVINILAQAFYSIFAAGDPNLKVLQRGCFRYFQLGLIDGPIGLLSGIIRSPLVLLRHFYSVAFLAIWLHLTSKPIYLLPLTLFECIIVFLTACRVILPFIFAELQS

SEQ ID NO: 64264 - DNA, 1751 bp, Trichophyton rubrum
  CDS (115)..(1584)
ggacactgacatggactgaggagtagaaaagactcctttatccccggcaagcagatgatgcagcgacggtgacagcgacaagtgccagatttaccccatcaataagttactacaatggttgtagaggctcctccctgcccccagagcggcaacggctttgcgaatggctccgcgaagcccaaggtataccgcgacgaagccgagcggcgacgatacgaacaccacgaagcggacgtcgtgataattggcgctggcattgctggatgtacgctggctgttgcgttggggaaccagggacggagcgttatcttgcttgagaggtcgttgaaggagcctgatcggatagtgggagagctgcttcaacctggcggggtgagagctcttgaacaactcggcctgagagattgcctggagggaatagatgccgtgaggacatatggatacgatgtgatatattttggcaatggtgtgaagatacctttccctagcgacgccaacgataagatcctggaaggcaggtgcttccaccacggccgctttatcatgcgccttcgagaggccgcggccgcgaacccgaacgtcaccattgtcgagaccaaggccgtttctaccataaaatccacgcatacaggggaggtccttggagtccagtgccagactgatggcaaacaagacttttattttgggcccctgaccgttgtcgcggatggttatgcctctacgttccgaaaggaatatctccccatacaaccagtcgccaaatcgaaattctggggcctggagcttatagatgcgaaattacccataccgggccacggccatgttgtcctgggtgatttcccgcccatattgatataccagattggagagcatgagactcgaatcctaattgatataccagacaacctgccttcggcgtcagttgccaacggaggtgtaaagggtcacatgcggaatgtcgtccttccttctttgccagagtgtattcggccctcatttgaagctgcgttggagaagggagggtttcggtcaatgccaaattccttcctcagacccgtcacgaataggatccccggattgatgttcctaggtgattccctgaacatgcgtcacccgttgactggtggcggtatgaccgtggcatttaatgatgtcgttctcctccgggatctgcttagtccggaggccgtacctgatttaagtgataccaaacttgttttaaaacagctgtccaaattccactggcaacggaagtcgttgatttctgtcatcaatattcttgctcaggccttatactctatattcgccgctggtgaccccaatttgaaagtcctgcaacgaggctgcttcaggtatttccaacttggacttatagatggccccatcggactgctgtccggcattattcgatcacccttggttctattacggcatttttactccgtagccttcctcgctatctggctacaccttactagcaaacccatctacctcctccccttgacccttttcgagtgcataatcgtatttcttactgcctgcagggtcatccttcctttcatatttgccgaacttcaaagctaggcagataggcttatctctaactctttttaatacattctcttttaatgactggggtcggttggactcgatagctgcattatctctgcatttatatgtttgcataagtgttacgttgagatattggattaattagattttcttgtcctgctcttaaaaaaaaaaaaaaa

SEQ ID NO: 64265 - protein, 489 aa, Trichophyton rubrum
MVVEAPPCPQSGNGFANGSAKPKVYRDEAERRRYEHHEADVVIIGAGIAGCTLAVALGNQGRSVILLERSLKEPDRIVGELLQPGGVRALEQLGLRDCLEGIDAVRTYGYDVIYFGNGVKIPFPSDANDKILEGRCFHHGRFIMRLREAAAANPNVTIVETKAVSTIKSTHTGEVLGVQCQTDGKQDFYFGPLTVVADGYASTFRKEYLPIQPVAKSKFWGLELIDAKLPIPGHGHVVLGDFPPILIYQIGEHETRILIDIPDNLPSASVANGGVKGHMRNVVLPSLPECIRPSFEAALEKGGFRSMPNSFLRPVTNRIPGLMFLGDSLNMRHPLTGGGMTVAFNDVVLLRDLLSPEAVPDLSDTKLVLKQLSKFHWQRKSLISVINILAQALYSIFAAGDPNLKVLQRGCFRYFQLGLIDGPIGLLSGIIRSPLVLLRHFYSVAFLAIWLHLTSKPIYLLPLTLFECIIVFLTACRVILPFIFAELQS

SEQ ID NO: 64266 - DNA, 1990 bp, Datura innoxia
  CDS (72)..(1661)
ggcacgaggcgccatttcctcattctccgtcgccgtttcccgtccttttttctgcattgtcgcctacgacaatggtggatttgggtctctccggatctgttcttgccgtggtgctggggttcgttgcagttttctggtttttcattcagggaaatggtggcggcagcaaagataaaactgatgaccctgccaccaccaccaccaccacaactacggtgtatgatggagaatccagatcaaaggatggaaacgacgacgttgacatcatcatcgttggtgcaggtgttgccggtgccgctctcgcgcacactcttggcaaggaagggcgtcgtgtaaaagtaattgaaagagatttgacagagcctgatcgaattgttggagaactattacaaccgggtggctatctcaaattgcaggagttgggattggaagattgtgtggagaaaattgatgctcaacgagtgtttgggtatgcacttttcaaggatgggaagagcacacgtctttcttatcccctggagaaatttcactctgatgttgctggaaggagctttcacaatgggcgtttcattcaaagaatgcgagagaaagctgcatctcttcccaatgtcaaactagagcaaggcactgttacgtctctgcttgaagaaaatgggaccattaaaggtgttcagtacaaaactaaatctggtgaagagttgaaagcgtatgcaccattaaccgtagtatgtgatggttgtttctcaaatctgcgacgtactctttgtgacccaaaggtagaagtgccttcttgttttgttggtcttgtcctggagaactgccagcttccacatgaaaatcatggacatgtcattttggcagatccatcacctatcttgttctatcccataagcagtactgaggttcgctgtctggttgatgtacctggtcaaaaagtgccttctatttcgaatggtgaaatggccaaatatttgaaaaacgtagttgctccccaggtacctgctgagataaaagatgcattcattgccgcaattaataaagggaacatcaggacaatgccaaaccgaagcatgccagctgctcctcatccaactcctggtgctcttctcatgggagatgcttttaatatgcgccaccccttgactggtggaggaatgactgtagcattgtctgatattgttgtattgcgtgatcttctcaaacctcttcatgatttgaatgatgcacctactctttgcagatatctggagtccttttacaccttgcgtaagccagtggcctccaccatcaatacattggctggtgccttgtataaggtgttttgtgcttcacctgatcaagctaggaaggagatgcgtgaagcatgcttcgactatttgagccttggtggagtattctcagaaggaccagtatctttgctttctggcttaaacccccggccattaagtcttgtttgtcatttctttgctgtggccatctatggtgttggccgcttgctgctgcctttcccatcacccaaacgtttatggattggagctcggctaatatcgggtgcgtctgcaatcattttccctatcatcaaggcagaaggggttaggcagatgttcttcccagctaccattcccgcatattatagggctcctcctgaagtgaggttgtgaccgctaaaaacagaataagtctatgccattgtgccacctctcaggattcaggttgtgagcgtcaagagtttagtccaactgttacataatttttgtttgctagtgtttttgtataacctttttccttttcgtttgttcccatgattgattgcattgttaactggaaagtaaatacaagttgttcaatcatatatttctcctctctgtacgttgattttttctcctcctctttgttttcttttttgcttttccttattgttctcccacattggcattggggaatcacttagttttgccaataacagtaagcctcttggctcttaagcccc

SEQ ID NO: 64267 - protein, 529 aa, Datura innoxia
MVDLGLSGSVLAVVLGFVAVFWFFIQGNGGGSKDKTDDPATTTTTTTTVYDGESRSKDGNDDVDIIIVGAGVAGAALAHTLGKEGRRVKVIERDLTEPDRIVGELLQPGGYLKLQELGLEDCVEKIDAQRVFGYALFKDGKSTRLSYPLEKFHSDVAGRSFHNGRFIQRMREKAASLPNVKLEQGTVTSLLEENGTIKGVQYKTKSGEELKAYAPLTVVCDGCFSNLRRTLCDPKVEVPSCFVGLVLENCQLPHENHGHVILADPSPILFYPISSTEVRCLVDVPGQKVPSISNGEMAKYLKNVVAPQVPAEIKDAFIAAINKGNIRTMPNRSMPAAPHPTPGALLMGDAFNMRHPLTGGGMTVALSDIVVLRDLLKPLHDLNDAPTLCRYLESFYTLRKPVASTINTLAGALYKVFCASPDQARKEMREACFDYLSLGGVFSEGPVSLLSGLNPRPLSLVCHFFAVAIYGVGRLLLPFPSPKRLWIGARLISGASAIIFPIIKAEGVRQMFFPATIPAYYRAPPEVRL

SEQ ID NO: 64268 - DNA, 2005 bp, Panax ginseng
  CDS (113)..(1723)
attcggccattacggccggggactcaaaattgcaggagaacaaacgtgaaaggcattgtagagagagagagttgtagatagagagagagaaacttgaacgtcaaccaacaccatgaattcatcttcttctagtactactgatacgttgcattcttttatggaagctctgctcattgatcaatattttcttggatggatctttgctttcctttttgggttcctgctcttgcttaatttcaaaaggaagagagagaaaaataattccacggagtttggaacagatgatagcaacggttactacacaccggaaaatattgccggaagtacggacgtcatcatcgtcggcgccggggttgctggctctgctcttgcttatacgcttgccaaagatggccggagagttcatgtaattgagagggacttaactgagcaagaccgaattgtaggtgaacttctacaaccaggaggctacttgaaattgattgaattggggttagaggattgtgtgaatgaaatcgatgcgcaacgagtttttggatatgccctatacatggatggtaaaaacaccaggctttcttaccccttggagaaatttcattcggatgtagccggaagaagctttcataacgggcgttttgttcaacgaatgagggagaaagctgcatcacttccaaatgtaagaatggaacaggggactgttacatctctggttgagaaaaaggcaagtgtaaaaggggtgcaatacaaaaccaaggatggccaagaattgtctgcatttgctcctcttacaattgtttgtgatggttgtttttcgaatctgcgtcgctccctctgcaatcccaaggtggaggtgccttcgtgttttgttggtttgattttggaaaatattgatcttccacatgtaaaccatggccatgtcattctagcagatccttctccgatcttgttttataaaattagtagtaccgagattcgctgtttggttgatgtgcctggacaaaaggtgccttgtatttctaatggggaattggctaattatctcaagacagtagtagctcctcaggttccaaaacagctatataactctttcatagcagcagttgacaaaggaaacattagaaccatgccaaacagaagcatgccagccgatcctcatccaactccgggtgcacttctattaggggatgctttcaatatgcgccatcctttaaccggcgggggaatgacagtggctctgtccgatattgtcttgattcgggatcttcttagacctttacgcgatctccatgactcatcaaccctctgcaaatatctcgaatccttttacacccttcgtaagcccgtggcatctactataaatacattggcaggtgccctttataaagttttttgtgcatcacctgataaagcaaggcaagaaatgcgcaatgcgtgttttgattatctgagcctcggaggaatttgttcccaagggccaattgctttactttctggcctaaacccgcgtccaattagcctatttctccacttctttgccgtggctatctatggcgttggccgcttgttgattccttttccttcaccaaaacgaatgtggctcggcgctagattgattttgggtgcatctggaattattttccctattataaagtcagaaggacttcgacaaatgttcttccctgcaacggttcctgcttactacagagctccccccattcactaagaaagtgattatggccttcattttgttatcaagagaagaacttgtatgactataagtcgagggcggatccaacttgaaagtttagttgggtcaaatttgaaaataaaattcattaagaataaaaattaatttaataaaataaatcacaaaattaaataatcctcaaatattgtttacaataacattttttcgaagttttattgcttgaaattgttgcatgatagcctcatttttaatagttacaaaaatatcatatatcaataacatttacgtgccttcttc

SEQ ID NO: 64269 - protein, 536 aa, Panax ginseng
MNSSSSSTTDTLHSFMEALLIDQYFLGWIFAFLFGFLLLLNFKRKREKNNSTEFGTDDSNGYYTPENIAGSTDVIIVGAGVAGSALAYTLAKDGRRVHVIERDLTEQDRIVGELLQPGGYLKLIELGLEDCVNEIDAQRVFGYALYMDGKNTRLSYPLEKFHSDVAGRSFHNGRFVQRMREKAASLPNVRMEQGTVTSLVEKKASVKGVQYKTKDGQELSAFAPLTIVCDGCFSNLRRSLCNPKVEVPSCFVGLILENIDLPHVNHGHVILADPSPILFYKISSTEIRCLVDVPGQKVPCISNGELANYLKTVVAPQVPKQLYNSFIAAVDKGNIRTMPNRSMPADPHPTPGALLLGDAFNMRHPLTGGGMTVALSDIVLIRDLLRPLRDLHDSSTLCKYLESFYTLRKPVASTINTLAGALYKVFCASPDKARQEMRNACFDYLSLGGICSQGPIALLSGLNPRPISLFLHFFAVAIYGVGRLLIPFPSPKRMWLGARLILGASGIIFPIIKSEGLRQMFFPATVPAYYRAPPIH

SEQ ID NO: 64270 - DNA, 1848 bp, Medicago truncatula
  CDS (117)..(1676)
ggcacgaggacaacattacatccagcgaagcagagagagagggaaaacacaacacaacacaacacagcaccgtcatcttctctccgactcaaaagagttttgagttttctctcaaaatgatagacccctacggtttcgggtggatcacatgcaccctcatcacccttgctgcactctacaatttccttttctctcgtaaaaaccattcagattcaacaaccaccgagaacattacaaccgctaccggagaatgcagatcttttaatcccaacggcgatgttgatatcatcattgtcggtgctggtgtcgccggctccgctctcgcttacactctcggcaaggatggacgacgagtacttattattgaaagagatctgaatgaaccagaccgaattgttggagagttgctacaacctggaggttatctcaaattgattgaactgggacttgatgattgtgtggagaaaattgatgctcagaaagtgtttgggtatgctcttttcaaggatgggaaacatacgagactctcttatcccttggaaaagtttcactcagatatcgctggaagaagctttcacaatgggcgttttattctgagaatgagagagaaagctgcctcccttcccaatgtacggttggagcaaggaacagtcacttccctgctcgaagagaatggtacaattaaaggtgtacagtacaaaacgaaagatgctcaggaattttcagcatgtgcacctcttaccattgtttgtgatggttgtttctcaaacttgcgccgttctctttgtaatcctaaggtagaagtcccctcttgttttgttggcttagttttagaaaattgtgaacttccatgtgcagaccatggtcacgtcatactaggagatccttcaccggttctgttctatcccataagtagtacagaaattcgctgtctggttgatgttcctggtcagaaggttccatctatttccaatggtgaaatggcaaagtatttgaagacagtggtagctccacaggtaccccctgagcttcatgccgctttcatagctgcagtggacaaaggccacataaggacaatgccaaacagaagcatgccagccgatccttatcccaccccgggagcccttctgatgggagatgcattcaacatgcgccatcccctaaccgggggtgggatgactgtggcattatctgatatagtagtgctgcgaaatcttctgaagcctttacgggacctgaatgatgcatctagcctttgtaaataccttgaatccttctataccttgcgtaagccagtggcatccaccataaatacgttggcaggagcactttacaaggttttctgtgcatcacctgatccagcaaggaaagaaatgcgtcaagcttgctttgattatctgagtcttgggggtttattttcagaaggaccagtctctttgctttcaggattaaacccttgccccctgagtttggttcttcatttcttcgctgttgcgatatatggtgttggtcgtttgttgctaccatttccttcccctaaacgcttatggattggaatacgattaatcgctagtgcatccggaatcatcttgcccattattaaggcagaaggaatccgtcaaatgttcttccctgcaactgttccagcttattatagagctcctccagatgcataaatctgtatttagtgaatacgtctttaaaagtcaaggtgattccaagatgagctagcattgttttcagttagaaatctaatggattcgattgaaacgtaaaaattatggcttttaagtttgattctttatggagtaaatattacattgctgggttaaaaaaaaaaaaaaaaaa

SEQ ID NO: 64271 - protein, 519 aa, Medicago truncatula
MIDPYGFGWITCTLITLAALYNFLFSRKNHSDSTTTENITTATGECRSFNPNGDVDIIIVGAGVAGSALAYTLGKDGRRVLIIERDLNEPDRIVGELLQPGGYLKLIELGLDDCVEKIDAQKVFGYALFKDGKHTRLSYPLEKFHSDIAGRSFHNGRFILRMREKAASLPNVRLEQGTVTSLLEENGTIKGVQYKTKDAQEFSACAPLTIVCDGCFSNLRRSLCNPKVEVPSCFVGLVLENCELPCADHGHVILGDPSPVLFYPISSTEIRCLVDVPGQKVPSISNGEMAKYLKTVVAPQVPPELHAAFIAAVDKGHIRTMPNRSMPADPYPTPGALLMGDAFNMRHPLTGGGMTVALSDIVVLRNLLKPLRDLNDASSLCKYLESFYTLRKPVASTINTLAGALYKVFCASPDPARKEMRQACFDYLSLGGLFSEGPVSLLSGLNPCPLSLVLHFFAVAIYGVGRLLLPFPSPKRLWIGIRLIASASGIILPIIKAEGIRQMFFPATVPAYYRAPPDA

SEQ ID NO: 64272 - DNA, 1912 bp, Medicago truncatula
  CDS (126)..(1706)
  misc_feature (1835)..(1835): n is a, g, c or t
ggcacgaggcttcatttttcctctgccaacttggcagagagagagagaagaatctcaaacgccaataactacacctaattctccgtcatcaccactgtcaccatcgccggcgagattcctccgatatggatctatacaatatcggttggattttaagctctgttttgagtctatttgcgttatacaatttgattttcgccgggaagaagaattatgatgtgaatgagaaggtaaatcagcgtgaggatagcgtgacgagtactgatgccggtgaaattaaatcggacaaacttaacggtgatgctgatgttatcattgttggagctggtattgctggtgctgctttggctcatacacttgggaaggatggacgtcgagtgcatattattgaaagagatttgagtgagcctgacagaattgttggagagttgctacaacccggtggctatctcaaattagttgaactcgggcttcaagattgtgtggacaatattgatgcacagcgagtgtttggttatgctctttttaaggacgggaaacatactcgtctctcttatcccttggaaaagtttcactcagatgtctctggcagaagctttcacaatgggcgttttattcagaggatgcgagagaaagctgcctcacttcccaatgtaaatatggagcaaggaacagtcatttccctacttgaagagaaggggacaatcaaaggtgtgcaatacaagaataaagatggtcaggcattgacagcatatgctcctcttaccattgtttgtgatggctgtttctcaaacttgcgtcgttctctttgcaaccctaaggtagataatccctcttgttttgttggcttaattttagagaactgtgaacttccatgtgctaatcacggccatgtcatacttggagatccttcgccaattcttttctatcctataagcagtacagagattcgttgtctggttgatgtacctggaacgaaggttccttctatttcaaacggtgatatgacaaagtatctaaagacgacagttgctccacaggtcccccctgagctttatgatgcattcatagccgcagtggacaaaggcaacataaggacaatgccaaacagaagtatgccagcagatcctcgtcctactcctggagccgtactgatgggagatgcattcaacatgcgtcatccactaacagggggcggaatgaccgtagcattgtctgacattgtggtgttgagaaatcttctcaagcctatgcgtgacctgaacgatgcacctacactttgcaaatacctcgaatccttttataccttgcggaagcctgtggcatccaccataaatacattggcaggagccctttacaaggttttcagtgcatcccccgatgaagcaaggaaggaaatgcgccaagcttgttttgattatctcagccttggaggcttattctcagaaggaccgatctctttactttcaggattaaaccctcggcccttaagcttggttctccatttctttgctgtcgcggtatttggtgttggccgtttactattaccatttccttcacctaagcgggtgtggattggagctcgattactctctggtgcatctggaatcattttacccataattaaggccgaaggaattcggcagatgtttttccctgccactgttccagcttattacagagctcccccggtaaatgcattttgaaaaaataaagttgctatcaagatgagctagctttatcacccattcttgagaatttgatgaaaggttgatgctaatagatatatgtatacattttggcatagtgtgtattctttgtagtttgtaactggnacgatctcaaaagtgcatgtatttcagttcctttttgctattttagaaaatttaatccaaaaaaaaaaaaaaaaaaa

SEQ ID NO: 64273 - protein, 526 aa, Medicago truncatula
MDLYNIGWILSSVLSLFALYNLIFAGKKNYDVNEKVNQREDSVTSTDAGEIKSDKLNGDADVIIVGAGIAGAALAHTLGKDGRRVHIIERDLSEPDRIVGELLQPGGYLKLVELGLQDCVDNIDAQRVFGYALFKDGKHTRLSYPLEKFHSDVSGRSFHNGRFIQRMREKAASLPNVNMEQGTVISLLEEKGTIKGVQYKNKDGQALTAYAPLTIVCDGCFSNLRRSLCNPKVDNPSCFVGLILENCELPCANHGHVILGDPSPILFYPISSTEIRCLVDVPGTKVPSISNGDMTKYLKTTVAPQVPPELYDAFIAAVDKGNIRTMPNRSMPADPRPTPGAVLMGDAFNMRHPLTGGGMTVALSDIVVLRNLLKPMRDLNDAPTLCKYLESFYTLRKPVASTINTLAGALYKVFSASPDEARKEMRQACFDYLSLGGLFSEGPISLLSGLNPRPLSLVLHFFAVAVFGVGRLLLPFPSPKRVWIGARLLSGASGIILPIIKAEGIRQMFFPATVPAYYRAPPVNAF

SEQ ID NO: 64274 - DNA, 1815 bp, Oryza sativa subsp
  CDS (1)..(1815)
atggcggaggtcgccgccggcaccgggcagctcattggcgtcgccgtggccacgctcctcgcggcgatcttcctcgccgccgcgcttcttggcagccgccggcgccggcggcgggcgccgttggcagggaagcctgcggccgtgggtggctgcggggtggccgacggcgaagggtgcggcggggatggccggaccgacgtcatcgtcgtcggagccggggtcgccggatctgcgctggcatacacgctcggaaaggatggccgtcgtgtgcatgttatagagagagacctaacagagcctgatagaattgtcggtgaactgttacaacctggtggctacctgaaattgatcgagttgggtctcgaggattgtgttcaagaaatagatgctcagcgtgtccttggttacgcgttattcaaagatgggaaagacacaaaactctcctatcccttggagaagttccactcagatgttgctggtaggagctttcacaatggacggtttatacagaggatgcgccagaaagctgcatctttgcctaatgttcaattggagcaaggaactgttacatcattggttgaagaagatggtacagttaagggtgttaaatacaagaccaagtcaggtgaagaattaaaagcatatgcacctctgacaattgtatgcgatggctgtttctcaaaccttcgccgcgccctttgctctccaaaggttgatgtaccatcttgttttgttgggctggtcctggagaattgtcaacttcctcatgcaaaccatggccatgttgtcctggccaatccttcacctatcctattttacccaataagcagcactgaagttcgctgtttggttgatgtccctggtcagaaggtgccttccatagcaaacggtgaaatggcaaaatatctcaaaacagtggttgcacctcagattcctccagaaatctatgattcattcatagcagccattgataagggaagcataagaacaatgccaaacaggagcatgccggctgctccacatccaacccctggtgcacttttgatgggtgatgcattcaacatgcggcatcctttgactggtggcggaatgactgttgcattatctgacattgttgtgctacgtaatcttctcaagcctctccgcaatctgcatgatgcatctgctctttgcaaataccttgaatcattctatacactgcggaagccggttgcttctaccataaacacattagctggtgctctatacaaggttttcagtgcctcacctgatcaggctaggaatgagatgcgccaagcctgctttgattacttgagccttggaggtgtcttttcaaatgggcctattgctcttctgtctggtctgaatcctcgaccattgagtttagtggcacatttctttgctgtcgctatctatggtgtcggtcgcctaatgcttcccctcccttcacctaaacgcatgtggatcggcgtaagactgatttccagtgcatgtggtataattttccccatcatcaaagctgaaggtgtgaggcatatgttcttccccgccactgtccctgcctattatcgtgctcctcgtccaatggagcggcgcaaatcgaggtgggacagggccgacgagatcccggaggacgtagagatggggatgggtgagatcgaggcggccggcgagctcacagcgacacggatcgagactgccggcgagctcccggcgccacggatcgagacggccggcgaactcccgaagggggcgcagatcgggatgggtgaagtcgtggtcgtcatcgccgtcattcgccggtttacctggtaa

SEQ ID NO: 64275 - protein, 604 aa, Oryza sativa subsp
MAEVAAGTGQLIGVAVATLLAAIFLAAALLGSRRRRRRAPLAGKPAAVGGCGVADGEGCGGDGRTDVIVVGAGVAGSALAYTLGKDGRRVHVIERDLTEPDRIVGELLQPGGYLKLIELGLEDCVQEIDAQRVLGYALFKDGKDTKLSYPLEKFHSDVAGRSFHNGRFIQRMRQKAASLPNVQLEQGTVTSLVEEDGTVKGVKYKTKSGEELKAYAPLTIVCDGCFSNLRRALCSPKVDVPSCFVGLVLENCQLPHANHGHVVLANPSPILFYPISSTEVRCLVDVPGQKVPSIANGEMAKYLKTVVAPQIPPEIYDSFIAAIDKGSIRTMPNRSMPAAPHPTPGALLMGDAFNMRHPLTGGGMTVALSDIVVLRNLLKPLRNLHDASALCKYLESFYTLRKPVASTINTLAGALYKVFSASPDQARNEMRQACFDYLSLGGVFSNGPIALLSGLNPRPLSLVAHFFAVAIYGVGRLMLPLPSPKRMWIGVRLISSACGIIFPIIKAEGVRHMFFPATVPAYYRAPRPMERRKSRWDRADEIPEDVEMGMGEIEAAGELTATRIETAGELPAPRIETAGELPKGAQIGMGEVVVVIAVIRRFTW

SEQ ID NO: 64276 - DNA, 1836 bp, Arabidopsis thaliana
  CDS (81)..(1658)
gaaccaccggcaatagccgcgggattgcggcggaggattaatcaaaaaacgcaccacctgaaatctctctgtgtacgctaatggctccgacgatattcgttgatcactgtatcctcacaacaacgtttgtcgcatccttgttcgcgtttctgcttctatacgtcctgggtcgccggagcaagacgattcatgggtctgtcaatgtccgtaacggaaccctaacggtgaaatctggaacagacgttgatattatcattgtcggtgctggtgtcgccggcgctgcccttgctcataccctcggcaaggaaggaagaagagttcacgttatagaaagagacttaacggagcctgatcgaattgtcggtgaattacttcagcctggtggttacttgaagttaatcgaactcgggcttgaagattgtgtgaaggatatagatgcgcagagagttcttggttatgctctctttaaagatgggaaacacactaaactctcttacccgttggatcagtttgattccgatgttgcgggtcgtagctttcacaatgggagatttgtgcagaggatgcgagagaaagcttctttacttcccaatgttcgaatgaagcaaggaacagtgacatcgttggtggaagaaaacggaataatcaaaggtgttcaatacaaaaccaaagatggccaagagcttaagtcatttgctcctctcactattgtatgtgatggttgtttctccaacttgcgtcgatctctctgcaaacctaaggtggaggtgccatccaatttcgttggtctggtattggagaattgcgaactcccgtttccgaaccacgggcacgttgttcttggcgatccgtcacccattttattctatcctatcagcagctcggaagtccgttgcttggtagatgtaccaggttcaaaacttccttcagttgcaagtggtgaaatggctcaccatctcaaaacaatggttgcaccgcaggtaccacctcagatccgtgatgctttcatttctgcagtcgaaaaaggtaacataagaacaatgccgaacagaagcatgccagctgatccaattcatacacctggagctttgcttttaggtgatgcgttcaacatgcgccatcctcttactggaggtggtatgaccgttgcattgtctgatatagtcatcctccgtgatctattgaacccgctcgtcgacttaaccaacaaagagtccttatccaaatacatagaatcattctacacattgcggaaaccggttgcttcgactatcaatacactcgcaggcgctctttacaaagtctttttagcatctccagacgatgcaagaagcgaaatgcgtcgagcttgcttcgattatcttagcctcggaggggtttgctcatcaggacctgtggctttgctatctggtttgaacccacgacctatgagccttgttcttcatttcttcgcagttgcgattttcggggttggtcgtttgcttgtacctctcccgtccgttaaacggttatggcttggagctagactaatctcgagtgcttcagggatcatatttccaataataaaagcagaaggtgtgaggcaaatgttcttccctcgaactattcctgccatttacagagctcctcctactccttcttcttcttctcctcaatgatgaatcagaaacattgctttgaagatttctcaggtgttgtaagaatagctactttgcgattatggtacgaatgaaccgggtggtttgatttggtttttacgaactttggtttgaaatttgtactcagtccattacagacaaaatcatcaagtaaataagtatctctttgttaattgtt

SEQ ID NO: 64277 - protein, 525 aa, Arabidopsis thaliana
MAPTIFVDHCILTTTFVASLFAFLLLYVLGRRSKTIHGSVNVRNGTLTVKSGTDVDIIIVGAGVAGAALAHTLGKEGRRVHVIERDLTEPDRIVGELLQPGGYLKLIELGLEDCVKDIDAQRVLGYALFKDGKHTKLSYPLDQFDSDVAGRSFHNGRFVQRMREKASLLPNVRMKQGTVTSLVEENGIIKGVQYKTKDGQELKSFAPLTIVCDGCFSNLRRSLCKPKVEVPSNFVGLVLENCELPFPNHGHVVLGDPSPILFYPISSSEVRCLVDVPGSKLPSVASGEMAHHLKTMVAPQVPPQIRDAFISAVEKGNIRTMPNRSMPADPIHTPGALLLGDAFNMRHPLTGGGMTVALSDIVILRDLLNPLVDLTNKESLSKYIESFYTLRKPVASTINTLAGALYKVFLASPDDARSEMRRACFDYLSLGGVCSSGPVALLSGLNPRPMSLVLHFFAVAIFGVGRLLVPLPSVKRLWLGARLISSASGIIFPIIKAEGVRQMFFPRTIPAIYRAPPTPSSSSPQ

SEQ ID NO: 64278 - DNA, 1608 bp, Arabidopsis thaliana
  CDS (1)..(1608)
atggagtcacaattatggaattggatcttacctcttttgatctcttctctcctcatctccttcgtcgctttctatggattcttcgtcaaaccgaagcggaacggtctccgtcacgatcggaaaactgtttctaccgtcacctccgacgtcggatctgttaatattaccggagatactgtcgctgatgtcattgttgttggagctggtgttgctggttctgctcttgcttatactcttggaaaggataaacgccgagttcatgtgattgaaagagatttatcggagcctgatcgtattgttggggagttgttacagcctgggggttacctcaagttactggagttgggaattgaagggctatctacagattgtgtggaagaaatagatgctcagcgtgtgtatggttatgcactttttaaaaatgggaaacgcattcgcttagcttatcctttggagaagtttcacgaagatgtatctggaaggagctttcacaatggacgttttattcaaagaatgcgggagaaagctgcttcacttcccaatgttcagctagagcaaggaacagttctttctcttctagaagagaatgggactatcaaaggtgtgagatataagaataaagcaggagaggaacaaaccgcatttgcagctttgactatagtttgtgatggttgtttctcaaacctgcgtcgctctttgtgcaatcctcaggtcgaggtgccttcttgttttgtcgggttggtcctagagaactgcaatctcccatatgcaaaccatggacatgtcgtcttagcagatccatcaccaattttgatgtatccaattagtagcacagaggtgcggtgcctagttgatgttcccggccagaaagtgccgtccattgcaaatggtgaaatgaaaaactatttgaagactgttgtggctcctcagatgcctcatgaggtctatgactctttcattgctgcggttgataaaggaaatattaagtccatgccaaacagaagcatgccagcttctccttatcctactccaggggctctgttaatgggagatgcatttaacatgcgtcatcctttgacgggtggaggaatgacggttgcattagctgacattgttgtcctgcgtaatctccttagaccgctgcgtgatcttagtgacggcgctagtctctgcaaatatcttgaatcattttacactctgcgaaagccagttgcagcaacaatcaacacccttgcgaatgctctttaccaagtgttctgttcatcagaaaatgaagcaagaaacgagatgagggaagcttgcttcgattatctgggcctcgggggtatgtgcacaagtggaccagtatctttgctttcgggtttgaaccctcgaccattaacacttgtctgccatttctttgcggttgcggtttatggagtcatacggttgttaatcccattcccttccccaaaacgaatctggcttggagccaaattaatctcgggagcatcggggataatatttccgataataaaagcggaaggagttaggcagatgtttttcccagcaactgtacctgcatactactacaaagctcctacagttggagaaaccaaatgttcatag

SEQ ID NO: 64279 - protein, 535 aa, Arabidopsis thaliana
MESQLWNWILPLLISSLLISFVAFYGFFVKPKRNGLRHDRKTVSTVTSDVGSVNITGDTVADVIVVGAGVAGSALAYTLGKDKRRVHVIERDLSEPDRIVGELLQPGGYLKLLELGIEGLSTDCVEEIDAQRVYGYALFKNGKRIRLAYPLEKFHEDVSGRSFHNGRFIQRMREKAASLPNVQLEQGTVLSLLEENGTIKGVRYKNKAGEEQTAFAALTIVCDGCFSNLRRSLCNPQVEVPSCFVGLVLENCNLPYANHGHVVLADPSPILMYPISSTEVRCLVDVPGQKVPSIANGEMKNYLKTVVAPQMPHEVYDSFIAAVDKGNIKSMPNRSMPASPYPTPGALLMGDAFNMRHPLTGGGMTVALADIVVLRNLLRPLRDLSDGASLCKYLESFYTLRKPVAATINTLANALYQVFCSSENEARNEMREACFDYLGLGGMCTSGPVSLLSGLNPRPLTLVCHFFAVAVYGVIRLLIPFPSPKRIWLGAKLISGASGIIFPIIKAEGVRQMFFPATVPAYYYKAPTVGETKCS

SEQ ID NO: 64280 - DNA, 1593 bp, Arabidopsis thaliana
  CDS (1)..(1593)
atggctccgacgatattcgttgatcactgtatcctcacaacaacgtttgtcgcatccttgttcgcgtttctgcttctatacgtcctgcgtcgccggagcaagacgattcatgggtctgtcaatgtccgtaacggaaccctaacggtgaaatctggaacagacgttgatattatcattgtcggtgctggtgtcgccggcgctgcccttgctcataccctcggcaaggaaggaagaagagttcacgttatagaaagagacttaacggagcctgatcgaattgtcggtgaattacttcagcctggtggttacttgaagttaatcgaactcgggcttgaagattgtgtgaaggatatagatgcgcagagagttcttggttatgctctctttaaagatgggaaacacactaaactctcttacccgttggatcagtttgattccgatgttgcgggtcgtagctttcacaatgggagatttgtgcagaggatgcgagagaaagcttctttacttcccaatgttcgaatggagcaaggaacagtgacatcgttggtggaagaaaacggaataatcaaaggtgttcaatacaaaaccaaagatggccaagagcttaagtcatttgctcctctcactattgtatgtgatggttgtttctccaacttgcgtcgatctctctgcaaacctaaggtgtgtaacatggttgtggaggtgccatccaatttcgttggtctggtattggagaattgcgaactcccgtttccgaaccacgggcacgttgttcttggcgatccgtcacccattttattctatcctatcagcagctcggaagtccgttgcttggtagatgtaccaggttcaaaacttccttcagttgcaagtggtgaaatggctcaccatctcaaaacaatggttgcaccgcaggtaccacctcagatccgtgatgctttcatttctgcagtcgaaaaaggtaacataagaacaatgccgaacagaagcatgccagctgatccaattcatacacctggagctttgcttttaggtgatgcgttcaacatgcgccatcctcttactggaggtggtatgaccgttgcattgtctgatatagtcatcctccgtgatctattgaacccgctcgtcgacttaaccaacaaagagtccttatccaaatacatagaatcattctacacattgcggaaaccggttgcttcgactatcaatacactcgcaggcgctctttacaaagtctttttagcatctccagacgatgcaagaagcgaaatgcgtcgagcttgcttcgattatcttagcctcggaggggtttgctcatcaggacctgtggctttgctatctggtttgaacccacgacctatgagccttgttcttcatttcttcgcagttgcgattttcggggttggtcgtttgcttgtacctctcccgtccgttaaacggttatggcttggagctagactaatctcgagtgcttcagggatcatatttccaataataaaagcagaaggtgtgaggcaaatgttcttccctcgaactattcctgccatttacagagctcctcctactccttcttcttcttctcctcaatga

SEQ ID NO: 64281 - protein, 530 aa, Arabidopsis thaliana
MAPTIFVDHCILTTTFVASLFAFLLLYVLRRRSKTIHGSVNVRNGTLTVKSGTDVDIIIVGAGVAGAALAHTLGKEGRRVHVIERDLTEPDRIVGELLQPGGYLKLIELGLEDCVKDIDAQRVLGYALFKDGKHTKLSYPLDQFDSDVAGRSFHNGRFVQRMREKASLLPNVRMEQGTVTSLVEENGIIKGVQYKTKDGQELKSFAPLTIVCDGCFSNLRRSLCKPKVCNMVVEVPSNFVGLVLENCELPFPNHGHVVLGDPSPILFYPISSSEVRCLVDVPGSKLPSVASGEMAHHLKTMVAPQVPPQIRDAFISAVEKGNIRTMPNRSMPADPIHTPGALLLGDAFNMRHPLTGGGMTVALSDIVILRDLLNPLVDLTNKESLSKYIESFYTLRKPVASTINTLAGALYKVFLASPDDARSEMRRACFDYLSLGGVCSSGPVALLSGLNPRPMSLVLHFFAVAIFGVGRLLVPLPSVKRLWLGARLISSASGIIFPIIKAEGVRQMFFPRTIPAIYRAPPTPSSSSPQ

SEQ ID NO: 64282 - DNA, 1521 bp, Brassica napus
  CDS (1)..(1521)
atggatctagcttttccgcacgtttgtttgtggacgctactcgcctttgtgctgacttggacagtgttctacgtcaacaacaggaggaagaaggtggcgaagttacccgatgcggcgacagaggtgagaagagacggtgatgctgacgtcatcatcgtcggagctggtgttggaggttcagctctcgcctacgctcttgcaaaggatgggcgtcgagtacatgtgatagagagggacatgagggaaccagtgagaatgatgggtgaatttatgcaacccggtggacgactactgctttctaagcttggtcttgaagattgtttggagggaatagatgaacagatagccacaggcttagcagtttataaggacggacaaaaagcactcgtgtcttttccagaggacaacgactttccttatgaacctactggtcgagctttttataatggccgttttgtccagagactgcgccaaaaggcttcttcgctccccactgtacaacttgaagaagggactgtaaaatctttgatagaagaaaaaggagtgatcaaaggagtgacatacaagaatagtgcaggcgaagaaacgactgcatttgcacctctcacagtggtatgcgacggttgctattcaaaccttcgtcggtctgttaacgacaacaatgcggaggttatatcgtaccaagttggttacgtctcaaagaattgtcagcttgaagatcctgaaaagttaaaattgataatgtctaaaccttccttcaccatgttgtatcaaataagcagcaccgatgttcgttgtgttatggagattttccccggcaatattccttctatttcaaatggcgaaatggctgtttatttgaaaaatactatggctcctcaggtacctccagaactccgcaaaatatttttgaaaggaattgatgagggagcacaaattaaagcgatgccaacaaagagaatggaagctactttgagcgaaaagcaaggagtgattgtgttgggagatgcattcaacatgcgccacccagcgattgcctctggaatgatggttgtattatctgacattctcattctacgccgccttctccagccattgcgaaacctcagtgatgcaaataaagtatcagaagttattaagtcattttatgtcatccgaaagccaatgtcagcgacggtgaacacgctaggaaatgcattttctcaagtgctaattgcatctacggacgaagcaaaagaagcgatgcgacaaggctgttttgattacctctctagtggcggctttcgcacgtcaggaatgatggctctgctcggtggcatgaaccctcgaccactctctctcatctttcatctatgtggtattactctatcctccattggtcaactgctctcgccatttccatctcctcttggcatttggcatagcctcagactttttggtgctgaaggggttagccaaatgctgtctccagcatacgcagccgcgtatcgcaaaagctatatgaccgcaaccgctctctaa

SEQ ID NO: 64283 - protein, 506 aa, Brassica napus
MDLAFPHVCLWTLLAFVLTWTVFYVNNRRKKVAKLPDAATEVRRDGDADVIIVGAGVGGSALAYALAKDGRRVHVIERDMREPVRMMGEFMQPGGRLLLSKLGLEDCLEGIDEQIATGLAVYKDGQKALVSFPEDNDFPYEPTGRAFYNGRFVQRLRQKASSLPTVQLEEGTVKSLIEEKGVIKGVTYKNSAGEETTAFAPLTVVCDGCYSNLRRSVNDNNAEVISYQVGYVSKNCQLEDPEKLKLIMSKPSFTMLYQISSTDVRCVMEIFPGNIPSISNGEMAVYLKNTMAPQVPPELRKIFLKGIDEGAQIKAMPTKRMEATLSEKQGVIVLGDAFNMRHPAIASGMMVVLSDILILRRLLQPLRNLSDANKVSEVIKSFYVIRKPMSATVNTLGNAFSQVLIASTDEAKEAMRQGCFDYLSSGGFRTSGMMALLGGMNPRPLSLIFHLCGITLSSIGQLLSPFPSPLGIWHSLRLFGAEGVSQMLSPAYAAAYRKSYMTATAL

SEQ ID NO: 64284 - DNA, 1554 bp, Arabidopsis thaliana
  CDS (1)..(1554)
atggcttttacgcacgtttgtttatggacgttagtcgccttcgtgctgacgtggacggtgttctaccttaccaacatgaagaagaaggcgacggatttggctgatacggtggctgaggatcaaaaagacggtgctgctgacgtcattatcgtcggggctggtgtaggtggttcggctctcgcatatgctcttgctaaggatgggcgtcgagtacatgtgatcgagagggacatgagagaaccagaaagaatgatgggtgagtttatgcaacctggcggacgactcatgctttctaaacttggccttcaagattgcttggaagacatagatgcacagaaagccacgggtttggcagtttataaagatggaaaagaagcagacgcaccttttccagtggataacaacaatttttcttatgaaccttctgctcgatcttttcacaatggccgattcgtccaacaactgcgtcgaaaggctttttctctttccaatgtgcgcctggaagaaggaacggtgaagtctttactagaagaaaaaggagtggtcaaaggagtgacatacaagaataaagaaggcgaagaaacaacagccttggcacctctcactgtggtatgcgacggttgctactcaaaccttcgtcggtctcttaatgatgacaacaatgctgagattatgtcgtacatagttggttacatctcaaagaattgtcggcttgaagaacccgaaaagctacacttgatattgtctaaaccatctttcaccatggtataccaaataagcagcactgacgttcgttgtggttttgaggttctccccgaaaattttccttctattgcaaatggtgaaatgtctactttcatgaagaatactatagttcctcaggtacctccaaaactccgcaaaatatttttgaaaggtatagatgagggagcacacataaaagtggtgccggcaaagcgcatgacatctactttaagcaagaagaaaggtgtgattgtattgggagatgcattcaatatgcgtcatccagttgttgcatctggaatgatggttttactgtcggacattctcattctacgccgtcttcttcagccattaagcaacctcggcgatgcaaacaaagtctcagaagttatcaattccttttatgatatccgcaagccaatgtcggcgacggttaacacattgggaaatgcattttctcaagtactaattggatcaacggatgaagcaaaagaggcaatgagacagggtgtctatgattacctttgtagtggcgggtttcgtacgtcagggatgatggctctgctcggcggcatgaatcctcgtcctctctctctcgtctatcatctttgtgccatcactctatcctccattggccaactgctctctccatttccctctccccttcgcatttggcatagcctcaagctttttggtttggccatgaaaatgttggttcccaatctcaaagctgaaggagttagccaaatgttgtttccagcaaatgcagccgcgtatcacaaaagctatatggctgcaaccactctctaa

SEQ ID NO: 64285 - protein, 517 aa, Arabidopsis thaliana
MAFTHVCLWTLVAFVLTWTVFYLTNMKKKATDLADTVAEDQKDGAADVIIVGAGVGGSALAYALAKDGRRVHVIERDMREPERMMGEFMQPGGRLMLSKLGLQDCLEDIDAQKATGLAVYKDGKEADAPFPVDNNNFSYEPSARSFHNGRFVQQLRRKAFSLSNVRLEEGTVKSLLEEKGVVKGVTYKNKEGEETTALAPLTVVCDGCYSNLRRSLNDDNNAEIMSYIVGYISKNCRLEEPEKLHLILSKPSFTMVYQISSTDVRCGFEVLPENFPSIANGEMSTFMKNTIVPQVPPKLRKIFLKGIDEGAHIKVVPAKRMTSTLSKKKGVIVLGDAFNMRHPVVASGMMVLLSDILILRRLLQPLSNLGDANKVSEVINSFYDIRKPMSATVNTLGNAFSQVLIGSTDEAKEAMRQGVYDYLCSGGFRTSGMMALLGGMNPRPLSLVYHLCAITLSSIGQLLSPFPSPLRIWHSLKLFGLAMKMLVPNLKAEGVSQMLFPANAAAYHKSYMAATTL

SEQ ID NO: 64286 - DNA, 1778 bp, Brassica napus
  CDS (25)..(1581)
gtcgacccacgcgtccgaaaagatatggatatggcttttgtggaagtttgtttacggatgctacttgtcttcgtactgtcttggacgatatttcacgtcaacaacaggaagaagaagaaggcgacgaagttggcggatctggctactgaggagagaaaagaaggtggccctgacgtcataatagtcggagctggagtgggcggctcagctctcgcctatgctcttgctaaggacgggcgtcgagtacatgtgatagaaagagacatgagagagccagtgagaatgatgggtgagttcatgcagccaggaggacggctcatgctttctaagctcggtcttcaagattgtttagaggaaatagacgcacagaaatccaccggcataagactttttaaggacggaaaagaaactgtcgcatgttttccggtggacaccaactttccttatgaaccatctggtcgattttttcacaatggccgttttgtccagagactgcgccaaaaggcctcttctcttcccaatgtgcggctggaagaagggaccgtccgatctttgatagaagaaaaaggagtggtcaaaggagtgacatacaagaacagttcaggggaagaaaccacatcatttgcacctctcactgtcgtatgcgatggttgccactcgaaccttcgtcgctctctaaatgacaacaatgcggaggttacggcgtacgagattggttacatctcgaggaattgtcgccttgaacagcccgacaagttacacttgataatggctaaaccgtctttcgccatgttgtatcaagtcagcagcaccgacgttcgttgtaattttgagcttctctccaaaaatcttccttctgtttcaaatggtgaaatgacgtccttcgtgaggaactctattgctccccaggtacctctaaaactccgcaaaacatttttgaaagggctcgatgagggatcacatataaaaattacacaagcaaagcgcatcccagctactttgagcagaaaaaagggagtgattgtgttgggagatgcattcaacatgcgtcatcccgtaatcgcgtcggggatgatggttttattgtctgacattctcattctaagccgtcttctcaagcctttgggcaacctcggtgatgaaaacaaagtctcagaagttatgaagtccttctatgctctacgcaagccaatgtcagcaacagtaaacacactagggaattcattttggcaagtgctaattgcttcaacggacgaagcaaaagaggccatgcgacaaggttgctttgattacctctctagtggtgggtttcgcacgtcaggcttgatggctctgattggtggcatgaaccctaggccactttctctcttctatcatctattcgttatttctttatcctccattggccaactgctctctccattccccactcctcttcgtgtttggcatagcctcagacttcttgatttgtctttgaaaatgttggttcctcatctcaaggccgaaggaataggtcaaatgttgtctccaacaaatgcagcggcgtatcgcaaaagctatatggctgcaaccgttgtctagacattgatgaaatatagatggtgcacaaatctttgtgattgtggatttgtgaaaatagtattgcaatatgttactgaagaaacttttccttatccacttataagtggaaataggaagaatgtgtatatatgtaaggggtgacaattattttgaaataaaattaagaaaataacaaaaaaaaaaaaaaagggcggccg

SEQ ID NO: 64287 - protein, 518 aa, Brassica napus
MDMAFVEVCLRMLLVFVLSWTIFHVNNRKKKKATKLADLATEERKEGGPDVIIVGAGVGGSALAYALAKDGRRVHVIERDMREPVRMMGEFMQPGGRLMLSKLGLQDCLEEIDAQKSTGIRLFKDGKETVACFPVDTNFPYEPSGRFFHNGRFVQRLRQKASSLPNVRLEEGTVRSLIEEKGVVKGVTYKNSSGEETTSFAPLTVVCDGCHSNLRRSLNDNNAEVTAYEIGYISRNCRLEQPDKLHLIMAKPSFAMLYQVSSTDVRCNFELLSKNLPSVSNGEMTSFVRNSIAPQVPLKLRKTFLKGLDEGSHIKITQAKRIPATLSRKKGVIVLGDAFNMRHPVIASGMMVLLSDILILSRLLKPLGNLGDENKVSEVMKSFYALRKPMSATVNTLGNSFWQVLIASTDEAKEAMRQGCFDYLSSGGFRTSGLMALIGGMNPRPLSLFYHLFVISLSSIGQLLSPFPTPLRVWHSLRLLDLSLKMLVPHLKAEGIGQMLSPTNAAAYRKSYMAATVV

SEQ ID NO: 64288 - DNA, 1551 bp, Arabidopsis thaliana
  CDS (1)..(1551)
atgacttacgcgtggttatggacgcttctcgcctttgttctgacatggatggtttttcacctcatcaagatgaagaaggcggcaaccggagatttagaggccgaggcagaagcaagaagagatggtgcaacggatgtcatcattgttggggcgggtgttgcaggcgcttctcttgcttatgctttagctaaggatggacgacgagtacatgtgatagagagggacttaaaagagccacaaagattcatgggagagctgatgcaagcgggaggtcgcttcatgttagcccagcttggcctcgaagattgtttggaggacatagacgcacaagaagcgaagtccttggcaatatacaaggatggaaaacacgcgacattgccttttccagatgacaagagttttcctcatgagccagtaggtagactcttacgtaatggtcggctggtacaacgtttacgccaaaaagcagcttctcttagcaatgttcaattagaagaaggaacagtgaagtctttaattgaagaagaaggagtggtcaaaggagtgacatacaaaaatagcgcaggcgaagaaataacggcctttgcacctcttactgtcgtatgcgatggttgttattcgaaccttcgtcggtcactcgtggataatactgaggaagtcctctcgtacatggtgggttacgtcacgaagaatagccgacttgaagatccccatagtctacatttgatattttctaaacctttggtttgtgttatatatcaaataaccagtgatgaagttcgttgtgttgccgaagttcccgctgatagtattccttctatatcgaatggtgaaatgtctaccttcctcaagaaatcaatggctcctcagatacctgaaactggaaatcttcgggagatatttttgaaaggcatagaggaaggattaccagagataaaatcaacagcgacgaaaagtatgtcatcgagattgtgtgataaaagaggagtgattgtgttgggagatgcattcaatatgcgtcatcctataatcgcgtcaggaatgatggttgcactctcggacatttgcattctacgcaatcttctcaaaccattgcctaacctcagcaatactaagaaagtctctgatcttgtcaagtccttttacatcatccgcaagccaatgtcagcgaccgtgaacacgctcgcgagtatcttttcacaagtgcttgttgctacaacagacgaagcaagagagggaatgcgacaaggctgcttcaattacctagctcgtggagattttaaaacaaggggattgatgactattctcggaggcatgaaccctcaccctcttactctagtccttcatcttgtagccatcacccttacgtccatgggccacttgctctctccgtttccttcgcctcgtcgcttttggcatagcctcagaattcttgcctgggctttgcaaatgttgggtgcacatttagtggatgaaggattcaaggaaatgttgattccaacaaacgcagctgcttatcgaaggaactatatcgccacaaccactgtttga

SEQ ID NO: 64289 - protein, 516 aa, Arabidopsis thaliana
MTYAWLWTLLAFVLTWMVFHLIKMKKAATGDLEAEAEARRDGATDVIIVGAGVAGASLAYALAKDGRRVHVIERDLKEPQRFMGELMQAGGRFMLAQLGLEDCLEDIDAQEAKSLAIYKDGKHATLPFPDDKSFPHEPVGRLLRNGRLVQRLRQKAASLSNVQLEEGTVKSLIEEEGVVKGVTYKNSAGEEITAFAPLTVVCDGCYSNLRRSLVDNTEEVLSYMVGYVTKNSRLEDPHSLHLIFSKPLVCVIYQITSDEVRCVAEVPADSIPSISNGEMSTFLKKSMAPQIPETGNLREIFLKGIEEGLPEIKSTATKSMSSRLCDKRGVIVLGDAFNMRHPIIASGMMVALSDICILRNLLKPLPNLSNTKKVSDLVKSFYIIRKPMSATVNTLASIFSQVLVATTDEAREGMRQGCFNYLARGDFKTRGLMTILGGMNPHPLTLVLHLVAITLTSMGHLLSPFPSPRRFWHSLRILAWALQMLGAHLVDEGFKEMLIPTNAAAYRRNYIATTTV

SEQ ID NO: 64290 - DNA, 1494 bp, Ashbya gossypii
  CDS (1)..(1494)
atgtccaaggaaacaagttatcccaaagagctgctctgtgcggatgaaaaggtggtgtacgacgcgatcgtggtcggagcaggcgtggtcgggccttgcgtggccactgcgctggctcggaaaggtaagaaggtattgatcgtcgagcgtgagtggagccagccggacagaattgttggcgaattgatgcagcctgcaggtgtgcgtgccttacgctctctgggaatggtgcaggcgatcaacaacatcgatgcctgttcgacgtccgggtacacggtcatatacaacggcgagaagatctcgttcgcatacccttacaaggcggacttgagtcctcccgagaagatccctgacttagtgtttgacgggaatgataaagtcgtggacgacggcaccattagtgcgaaggagtttgaagaggacgagcgggagcatggtgtggggtttgtgcatggaaggtttttacagaacctccgcgcgatctgcgctgctgaggacagggtgacaagattgcagggtaacgttatcagcatcttgcgcaatgactcgaaggaagtcatcggtgcgaaggttgacgtaccagggaggggaaaagtagattttaaagcgcatatgacttttgtctgcgacgggatcttctccagattcagaaaagagctatcaacgactaacacgtccaaggtctggtcttcttttgtcggtttgtcgcttcaccatgccgaccttcccaccaaacaccacggtcatgtcattttgggctctgaacatatgccagtcatagcataccagatatcatctaccgaaaccagaattttgtgtgcctacaactatcctaccctaccgaaaaatgtcccggagtggcttcagaaggaagttcagcctttcattcccccctctcttcgcaaatccttcgatgcggctctagaatcaaagtcctataagtgtatgcccaactcttggctacctgcttcccaaaataatgtaactgggctgtgtgtcgttggtgatgctttaaacatgcgccatcctctgaccggtggaggtatggccgtgggtctgatggatgtcgtccttcttgttaagaccattggtgatatggacttttcggatcgagaggaggttctgaacgagctgctaggttttcactatgagcgaaaggcacatgcctgtgtcattaacactttgtcgatcgctctctactctttatttgcagctgacagttattacctaaaaaagcttcagaagggttgctttgagtatcttggcaggggcgaagattgggttaggcagccgatctccttcctttctggtgtcttgccaagcccttatttgttgaccaaagtattcttcaccgttgccctgtactctgttctcataaatttccgcggtaggacacctctgggctttctcttggcgatctatgagggctttgcaatcatcttcaccgccgctaaagttttcacaccatttttgtatgagcagctacttcagtaa

SEQ ID NO: 64291 - protein, 497 aa, Ashbya gossypii
MSKETSYPKELLCADEKVVYDAIVVGAGVVGPCVATALARKGKKVLIVEREWSQPDRIVGELMQPAGVRALRSLGMVQAINNIDACSTSGYTVIYNGEKISFAYPYKADLSPPEKIPDLVFDGNDKVVDDGTISAKEFEEDEREHGVGFVHGRFLQNLRAICAAEDRVTRLQGNVISILRNDSKEVIGAKVDVPGRGKVDFKAHMTFVCDGIFSRFRKELSTTNTSKVWSSFVGLSLHHADLPTKHHGHVILGSEHMPVIAYQISSTETRILCAYNYPTLPKNVPEWLQKEVQPFIPPSLRKSFDAALESKSYKCMPNSWLPASQNNVTGLCVVGDALNMRHPLTGGGMAVGLMDVVLLVKTIGDMDFSDREEVLNELLGFHYERKAHACVINTLSIALYSLFAADSYYLKKLQKGCFEYLGRGEDWVRQPISFLSGVLPSPYLLTKVFFTVALYSVLINFRGRTPLGFLLAIYEGFAIIFTAAKVFTPFLYEQLLQ

SEQ ID NO: 64292 - DNA, 1470 bp, Candida glabrata
  CDS (1)..(1470)
atgtctctcacgaatgctgatgaaactgttacttacgatgcgctgatcgtcggtgctggtgtcatagggccatgtgttgctaccgcgcttgccagaaagggtaagaaggtgctgattgtcgagcgtgagtggtctcagccagacagaatcgtcggtgagctgatgcaaccaggtggtctgcgtgctctgaggtctctgggtatgatccagtccatcaacaacatcgacgcttacccagtcaccggttacaccgtcttctacaacggtgagcacgtcgacatcccatacccttacaaggctgacttgaagccagtcgagaagttgccaggcttggtccgcgacggtaacgacaaggtcctggaggatgccaccgtccacaagaaggacttcgaggacgacgagagagaaagaggtgtcggtctggtccacggtagattcctgaacaacttgagaaacatctgcgccgctgagccaaacgtcaccagactacagggtaacgtcgtcgagatcttgaaggacaagaagaacgaagtcgtcggtgccaaggtcgacgtcgactcccgtggtaaggtcgacttcaaggcccacttgacctttgtctgtgacggtatcttctcccgtttcagaagagaactacacccagaccacgtcccaaccgtcaactcctctttcgtcggtatgtccctataccacgcccacatgcctcatgacatgcacggtcacgtcatcctaggtgacaagcacatgccaatcttggtttaccaaatctccccagaagaaaccagaatcctgtgtgcttacaacgctccaaaggtcccaaccgacttgaagtcatggatgaccaaggacgtccaaccatacattccaaagactctaagaccatccttcgacgacgctttggcccaaggcaagttcaagccaatggccaactcttggttgccagctagacaaaacgacgtcaccggtctgtgtgtcatcggtgatgccctaaacatgagacaccctctaaccggtggtggtatgaccgtcggtctaaacgatgttgtcctattgatcaagaagattggtgacttggacttcagcgaccgtgagaaggtcttggacgaattgctagattaccacttcgaaagaaagaactacgacgccgttgtcaacgtcttgtctatttccctatactccctattcgccgccgacagcaaaaacttgaaggctctacaaaagggttgtttcaagtatttccaacgtggtggtgactgcgtcaacttgccagtcgctttcctggctggtgtcctaccaaagccattgctattgacccgtgtgttcttcgccgtcgctttctacaccatctacttgaacatggaagaacgtggtttcctaggtctgccaatggctctattggaaggtatcatgatcttgatcaccgccattaaagtcttcactccattcttggttcgtgaattgatcggttaa

SEQ ID NO: 64293 - protein, 489 aa, Candida glabrata
MSLTNADETVTYDALIVGAGVIGPCVATALARKGKKVLIVEREWSQPDRIVGELMQPGGLRALRSLGMIQSINNIDAYPVTGYTVFYNGEHVDIPYPYKADLKPVEKLPGLVRDGNDKVLEDATVHKKDFEDDERERGVGLVHGRFLNNLRNICAAEPNVTRLQGNVVEILKDKKNEVVGAKVDVDSRGKVDFKAHLTFVCDGIFSRFRRELHPDHVPTVNSSFVGMSLYHAHMPHDMHGHVILGDKHMPILVYQISPEETRILCAYNAPKVPTDLKSWMTKDVQPYIPKTLRPSFDDALAQGKFKPMANSWLPARQNDVTGLCVIGDALNMRHPLTGGGMTVGLNDVVLLIKKIGDLDFSDREKVLDELLDYHFERKNYDAVVNVLSISLYSLFAADSKNLKALQKGCFKYFQRGGDCVNLPVAFLAGVLPKPLLLTRVFFAVAFYTIYLNMEERGFLGLPMALLEGIMILITAIKVFTPFLVRELIG

SEQ ID NO: 64294 - DNA, 1845 bp, Panax ginseng
  CDS (43)..(1662)
aaggcattgtagagagagagacgtgaacgtccaaccaacaccatgaattcatcttcttctactactactactgatacgttgcattcttttatggaagctagcgctctgctcattgatcaatattttcttggatggatctttgctttcctttttgggttcctgctcttgcttaatttcaaaaggaagagagagaaaaataattccacggagtttggaacagatgatagcaacggttactacacaccggaaaatattgccggaagtacggacgtcatcatcgtcggcgccggggttgctggctctgctcttgcttatacgcttgccaacgatggccggagagttcatgtaattgagagggacttaactgagcaagacagaattgtaggtgaacttctacaaccaggaggctacttgaaattgattgaattagggctagaggattgtgtgaatgaaatcgatgctcaacgagtttttggatatgccctttacatggatggtaaaaacaccaggctttcttaccccttggagaaatttcattcggatgtagctggaagaagctttcataacgggcgttttgttcaacgaatgagggagaaagctgcatcacttccaaatgtaagaatggaacaggggacagttacatctctggttgagaaaaagggaagtgtaaaaggggtgcaatacaaaaccaaggatggccaagaattgtctgcatttgctccacttacaattgtttgtgatggttgtttttcgaatctccgtcgctccctctgcaatcccaaggtggaggtgccttcgtgttttgttggtttgattttggaaaatattgatcttccacatataaaccatggccatgtcattctagcagatccttctccaatcttgttttataaaattagtagtaccgagattcgctgtttggttgatgtgcctggacaaaaggtgccttgtatttctaatggggaattggctaattatctcaagacagtagtagctcctcaggttccaaaacagctatataactctttcatagcagcagttgacaaaggaaacattagaaccatgccaaacagaagcatgccagccgatcctcatccaactccgggtgcacttttattaggggatgctttcaatatgcgccatcctttaaccggcgggggaatgacagttgctctgtccgatattgtcttgatccgggatcttcttagacctttacgcgatctccatgactcgtcaaccctctgcaaatatctcgaatccttttacacccttcgtaagcccgtggcgtctactataaatacattggcaggtgccctttataaagttttttgtgcatcacctgataaagcaaggcaagaaatgcgcaatgcttgttttgattatctgagcctcggaggaatttgttctcaagggccaattgctttactttctggcctaaacccgcgtccaattagcctatttctccacttctttgccgtggctatctatggcgttggccgcttgttgattccttttccttcaccaaaacgaatgtggctcggcgctagattgattttgggtgcatctggaattattttccctattataaagtcagaaggacttcgacaaatgttcttccctgcaattgttcctgcttactacagagctccccccattcactaagaaagtggttatggccttcattttgttatcaagagaagaacttgtatgaatattagtcccgggatgacccaagttgaaagtttagtggggtcaaatttgaaaataaaattcattaagaataaaaattaatttaataaaatgaatcacaaaattaaacaaaaaaaaaaaaaaaaaaaaaaaaaa

SEQ ID NO: 64295 - protein, 539 aa, Panax ginseng
MNSSSSTTTTDTLHSFMEASALLIDQYFLGWIFAFLFGFLLLLNFKRKREKNNSTEFGTDDSNGYYTPENIAGSTDVIIVGAGVAGSALAYTLANDGRRVHVIERDLTEQDRIVGELLQPGGYLKLIELGLEDCVNEIDAQRVFGYALYMDGKNTRLSYPLEKFHSDVAGRSFHNGRFVQRMREKAASLPNVRMEQGTVTSLVEKKGSVKGVQYKTKDGQELSAFAPLTIVCDGCFSNLRRSLCNPKVEVPSCFVGLILENIDLPHINHGHVILADPSPILFYKISSTEIRCLVDVPGQKVPCISNGELANYLKTVVAPQVPKQLYNSFIAAVDKGNIRTMPNRSMPADPHPTPGALLLGDAFNMRHPLTGGGMTVALSDIVLIRDLLRPLRDLHDSSTLCKYLESFYTLRKPVASTINTLAGALYKVFCASPDKARQEMRNACFDYLSLGGICSQGPIALLSGLNPRPISLFLHFFAVAIYGVGRLLIPFPSPKRMWLGARLILGASGIIFPIIKSEGLRQMFFPAIVPAYYRAPPIH

SEQ ID NO: 64296 - DNA, 1374 bp, Schizosaccharomyces pombe
  CDS (1)..(1374)
atggcaactcaagacgctgatattattattattggtgccggtatcaccggctgtgctttgggcgccgctttgggccgccaaggcagaaaagtgttggttttggaacgtgatatgtctgaacccgatagaattgttggtgaattgcttcaaccaggtggtattgaagccttagagaagatcggcatcgccgatgctgtcgaaggcattgacggtcaatggacttctggctatcaaatcttttatggcgattcaaacgtttccgttccttaccccagcaagcccaatggcggtgcataccaaggaattggtttccattatggtcgctttgtcatgaaccttcgtaaagcacttacaagcacccccaacgtcactgtaaccgaggccaccgtcaatgaacttttacgcgatgaaactggtgaggtgattaccggtgttgttaccagttctaaaaagtccgagtcccctgtcgagtacaaggctcccttgaccattgtttgtgatggttgcttttccaaatttagaaaggctttcatcgatcaccctatccaagtcaccgatcacttcttgggcttgattttgaccaatcccgattacatcgctcctggtcgtggtcatgtaattttaagcaaggttgctcctatggtcctttacccaatttcctctactgaagctcgtatcttaatcaactaccctggtaagaatttaccccccatggagactcttaaaaaatacgttttagaatcatgcgtcccaaacatgcccgaaaagcttcgcccttccctcaaggccgctgtttataacgatcgtcttaggtccatgcctaaccaatttttaccccccactgtcaaccgtaccaaaggtatgatcctcgttggcgattcaaacaatatgcgccatccccttaccggcggtggtatgactgtttgctttcacgatgcctatcttctttcccgattcatttccccttccgctgttcccgatcttctagactacgagcgcattttaaaccaaatgaacaaattccattggaagcgtaagggttacagttttgtaatcaacgttctttccattgctttgtacaaattgtttacccctaaaaatcgctatatgaaggctcttgaatcgggctgtatcgattacttcaagcgtggaggtaattgtgttgaaggtcccattcgtttattaggcggtttagaccatagcccttctcatcttatcggccacttctatgccgtctgtctctatggtatttaccaatatgtcttgtctggtcctgctttgcttatgcccgtccgtatcatcgaatccttattgattttcttacaagcttcgctagtaattatcccttatatccttagcgaaatgtcatcctaa

SEQ ID NO: 64297 - protein, 457 aa, Schizosaccharomyces pombe
MATQDADIIIIGAGITGCALGAALGRQGRKVLVLERDMSEPDRIVGELLQPGGIEALEKIGIADAVEGIDGQWTSGYQIFYGDSNVSVPYPSKPNGGAYQGIGFHYGRFVMNLRKALTSTPNVTVTEATVNELLRDETGEVITGVVTSSKKSESPVEYKAPLTIVCDGCFSKFRKAFIDHPIQVTDHFLGLILTNPDYIAPGRGHVILSKVAPMVLYPISSTEARILINYPGKNLPPMETLKKYVLESCVPNMPEKLRPSLKAAVYNDRLRSMPNQFLPPTVNRTKGMILVGDSNNMRHPLTGGGMTVCFHDAYLLSRFISPSAVPDLLDYERILNQMNKFHWKRKGYSFVINVLSIALYKLFTPKNRYMKALESGCIDYFKRGGNCVEGPIRLLGGLDHSPSHLIGHFYAVCLYGIYQYVLSGPALLMPVRIIESLLIFLQASLVIIPYILSEMSS

SEQ ID NO: 64298 - DNA, 1569 bp, Oryza sativa
  CDS (1)..(1569)
atggatgcggtcgccggcgccgggcagctcgttggcctcgccgcggccacgctcctcacggcggccttcctcgtcgcagtgaagatggggtggcggcgccgccgccgccaacgggaggtcgcgccggagggtggctgccgggttgttggcggcgatgggggtgaccggacggacatcgtcattgttggtgccggggtcgccggatctgcgctcgcctacacgctcggaaaggatgggcgacgagtgcatgttatagagcgggacatgacggagcctgatagaattgttggtgaactgctacagcctggtggctatttgaaattgatggagctgggtcttgaggattgtgttgaagaaatcgatgctcagcgtgtccttggttacgcattgttgaaagatgggagaaacacaaagctttcttatcccttggagaagttccattcagatgttgctggtaggagctttcacaatggacggtttatacagaagatgcgtcaaaaagctgcatctttgcctaatgttcatttggagcaaggaaccgttacatcattgctcgaagaaggtggcacggttaagggtgttcaatacaagacaaagtcaggtgaagaattaaaggcctatgcaccattgacaattgtatgcgatggctgtttctcaaacctacggcgtgtcctgtgctctccaaaggttgatgtgccatcctgttttgttgggttggttttggagaattgtcaacttcctcacccaaaccatggccatgttatcctggctaatccttcacctatcctatgttacccgataagcagcactgagattcgttgtttggttgatatccctgggcagaaggtgccttccatggcaaccggtgaaatggcaaaatatctcaagactgtggttgcacctcagattcctccagaactccatgattctttcattgcagcaattgataaaggaagcataaggacaatgccaaataggagtatgccagctgctccacttccaacccctggcgcgctgttgatgggtgatgcattcaacatgcgacatcctttaactggtggtggaatgaccgttgcgttttctgacattgttgtcctacgcaatcttctcaagcctctcggcaacctgcacgatgcaccttccctgtgcaagtaccttgaatcgttctatacactgcggaagcctgttgcttctacaatcaacacactggctggtgctctgtacaaggtcttctgtgcctcaactgaccaggctaagaatgagatgcgagaagcttgctttgattacttgagccttggaggagtcttctcaaatgggcctattgctcttctctctggcctcaatcctcggcctctgagtttagtagcccacttctttgctgttgctatctatggcgttggacgcctaatgctccccgtcccttcacctaaacgcatgtggatcggcgcgagactggtttccggtgcatgtggtatcatcttcccaatcatcaaagctgaaggtgtgaggcaaatgttcttccctgctacagtccctgcatattaccgggcccctcctccaatggagtaa

SEQ ID NO: 64299 - protein, 522 aa, Oryza sativa
MDAVAGAGQLVGLAAATLLTAAFLVAVKMGWRRRRRQREVAPEGGCRVVGGDGGDRTDIVIVGAGVAGSALAYTLGKDGRRVHVIERDMTEPDRIVGELLQPGGYLKLMELGLEDCVEEIDAQRVLGYALLKDGRNTKLSYPLEKFHSDVAGRSFHNGRFIQKMRQKAASLPNVHLEQGTVTSLLEEGGTVKGVQYKTKSGEELKAYAPLTIVCDGCFSNLRRVLCSPKVDVPSCFVGLVLENCQLPHPNHGHVILANPSPILCYPISSTEIRCLVDIPGQKVPSMATGEMAKYLKTVVAPQIPPELHDSFIAAIDKGSIRTMPNRSMPAAPLPTPGALLMGDAFNMRHPLTGGGMTVAFSDIVVLRNLLKPLGNLHDAPSLCKYLESFYTLRKPVASTINTLAGALYKVFCASTDQAKNEMREACFDYLSLGGVFSNGPIALLSGLNPRPLSLVAHFFAVAIYGVGRLMLPVPSPKRMWIGARLVSGACGIIFPIIKAEGVRQMFFPATVPAYYRAPPPME

SEQ ID NO: 64300 - DNA, 1842 bp, Oryza sativa
  CDS (1)..(1842)
atgaaaaccggagggaggagtcctcctcttcttcctccttcccctccgctcccgataaatcggaacaatctcgaagcatccgcccgtctccgcctgctcctcccaccaccaccaccgctgcttcccttctcccctctcgcccgccgccgcctcgccgcgacgcgcatcggcgccgccccacgaccgcagcagagaagcccaccaccacgcgcggagcggccgaggaggcctcaccactattggtgcgggatggcggaggtcgccgccggcaccgggcagctcattggcgtcgccgtggccacgctcctcgcggcgatcttcctcgccgccgcgcttcttggcagccgccggcgccggcggcgggcgccgttggcagggaagcctgcggccgtgggtggctgcggggtggccgacggcgaagggtgcggcggggatggccggaccgacgtcatcgtcgtcggagccggggtcgccggatctgcgctggcatacacgctcggaaaggatggccgtcgtgtgcatgttatagagagagacctaacagagcctgatagaattgtcggtgaactgttacaacctggtggctacctgaaattgatcgagttgggtctcgaggattgtgttcaagaaatagatgctcagcgtgtccttggttacgcgttattcaaagatgggaaagacacaaaactctcctatcccttggagaagttccactcagatgttgctggtaggagctttcacaatggacggtttatacagaggatgcgccagaaagctgcatctttgcctaatgttcaattggagcaaggaactgttacatcattggttgaagaagatggtacagttaagggtgttaaatacaagaccaagtcaggtgaagaattaaaagcatatgcacctctgacaattgtatgcgatggctgtttctcaaaccttcgccgcgccctttgctctccaaaggttgatgtaccatcttgttttgttgggctggtcctggagaattgtcaacttcctcatgcaaaccatggccatgttgtcctggccaatccttcacctatcctattttacccaataagcagcactgaagttcgctgtttggttgatgtccctggtcagaaggtgccttccatagcaaacggtgaaatggcaaaatatctcaaaacagtggttgcacctcagattcctccagaaatctatgattcattcatagcagccattgataagggaagcataagaacaatgccaaacaggagcatgccggctgctccacatccaacccctggtgcacttttgatgggtgatgcattcaacatgcggcatcctttgactggtggcggaatgactgttgcattatctgacattgttgtgctacgtaatcttctcaagcctctccgcaatctgcatgatgcatctgctctttgcaaataccttgaatcattctatacactgcggaagccggttgcttctaccataaacacattagctggtgctctatacaaggttttcagtgcctcacctgatcaggctaggaatgagatgcgccaagcctgctttgattacttgagccttggaggtgtcttttcaaatgggcctattgctcttctgtctggtctgaatcctcgaccattgagtttagtggcacatttctttgctgtcgctatctatggtgtcggtcgcctaatgcttcccctcccttcacctaaacgcatgtggatcggcgtaagactgatttccagtgcatgtggtataattttccccatcatcaaagctgaaggtgtgaggcatatgttcttccccgccactgtccctgcctattatcgtgctcctcgtccaatggagtaa

SEQ ID NO: 64301 - protein, 613 aa, Oryza sativa
MKTGGRSPPLLPPSPPLPINRNNLEASARLRLLLPPPPPLLPFSPLARRRLAATRIGAAPRPQQRSPPPRAERPRRPHHYWCGMAEVAAGTGQLIGVAVATLLAAIFLAAALLGSRRRRRRAPLAGKPAAVGGCGVADGEGCGGDGRTDVIVVGAGVAGSALAYTLGKDGRRVHVIERDLTEPDRIVGELLQPGGYLKLIELGLEDCVQEIDAQRVLGYALFKDGKDTKLSYPLEKFHSDVAGRSFHNGRFIQRMRQKAASLPNVQLEQGTVTSLVEEDGTVKGVKYKTKSGEELKAYAPLTIVCDGCFSNLRRALCSPKVDVPSCFVGLVLENCQLPHANHGHVVLANPSPILFYPISSTEVRCLVDVPGQKVPSIANGEMAKYLKTVVAPQIPPEIYDSFIAAIDKGSIRTMPNRSMPAAPHPTPGALLMGDAFNMRHPLTGGGMTVALSDIVVLRNLLKPLRNLHDASALCKYLESFYTLRKPVASTINTLAGALYKVFSASPDQARNEMRQACFDYLSLGGVFSNGPIALLSGLNPRPLSLVAHFFAVAIYGVGRLMLPLPSPKRMWIGVRLISSACGIIFPIIKAEGVRHMFFPATVPAYYRAPRPME

SEQ ID NO: 64302 - DNA, 1578 bp, Glycine max
  CDS (1)..(1578)
atggtggacccctacgtgctcggatggatcatatgcgccgtgctcagcctcgtcgcgcttcgcaatttcgctttcgcgcggaagaaccgttgccattcgtctgagaccgatgccactcgccgcgcggaaaatgtcaccaccgccgccggagaatgcagatcctcgagtcgcgacggcgacgttgacgtcattattgtcggagctggtgtcgccggctccgctctcgctcacactctcggcaaggatgggcgtcgggtacttgtcattgaaagagatttgagtgaacaagaccgaattgttggggagttgctacaacctggaggctatctcaaattaattgagctgggacttgaagattgtgtggagaaaattgatgctcaactagtgtttggttatgctcttttcaaggatgggaagcacacaagactctcttatcccttggaaaagtttcactcagatgttgctggcagaagctttcacaatgggcgttttattcagaggatgagagagaaggctgcctccctttccaatgtacgactggagcaaggaacagtcacttccctacttgaagagaagggggttattaaaggtgtgcactacaaaacgaaggatagtcaagaattatcagcttgtgcaccccttaccgttgtttgtgatggctgtttctcaaacttgcgccgatctctttgtaatcctaaggtagatgttccctctcatttcgttggcttaattttggagagttgtgaacttccttatgctaatcatggccatgtcatactgggagatccttcgccagttctgttctatcggataagtagttcagaaattcgttgtctggttgatgttcctggtcagaaggttccatctatttcgaatggtgaaatgacaaattatttgaagacagtggtagctccacagattccacctgagcttcatgactcattcgtagctgcagtggacaaaggcaacatcaggacaatgccaaacagaagcatgccagcagctccttatcctacgcccggagccctgttgatgggagatgcattcaacatgcgccatcctctaaccgggggtggaatgactgtggcattatctgacatagtagtgctgcgaaatcttctgagacctttgcgtgacctgaatgatgcacctggcctttgcaaatacctagaatccttttataccttacgcaagcctgtggcatccactataaatacgttggcaggagcactttacaaggttttttgcgcatcacctgatccagcaaggaaggaaatgcgccaagcttgcttcgattatcttagtcttggaggtctattctcggaagggccagtctctttgctttcaggattaaaccctcggcccttgagcctggttctccatttctttgctgttgcaatatatggtgttggccgtttactgctaccatttccttcacctaaacggatgtggattggagtccgattaatttctagtgcatctggaatcatcttgccaataattaaggcagaaggagtccgtcagatgttcttccctgcaactgttccagcttactatagaaatcccccggcccaataa

SEQ ID NO: 64303 - protein, 525 aa, Glycine max
MVDPYVLGWIICAVLSLVALRNFAFARKNRCHSSETDATRRAENVTTAAGECRSSSRDGDVDVIIVGAGVAGSALAHTLGKDGRRVLVIERDLSEQDRIVGELLQPGGYLKLIELGLEDCVEKIDAQLVFGYALFKDGKHTRLSYPLEKFHSDVAGRSFHNGRFIQRMREKAASLSNVRLEQGTVTSLLEEKGVIKGVHYKTKDSQELSACAPLTVVCDGCFSNLRRSLCNPKVDVPSHFVGLILESCELPYANHGHVILGDPSPVLFYRISSSEIRCLVDVPGQKVPSISNGEMTNYLKTVVAPQIPPELHDSFVAAVDKGNIRTMPNRSMPAAPYPTPGALLMGDAFNMRHPLTGGGMTVALSDIVVLRNLLRPLRDLNDAPGLCKYLESFYTLRKPVASTINTLAGALYKVFCASPDPARKEMRQACFDYLSLGGLFSEGPVSLLSGLNPRPLSLVLHFFAVAIYGVGRLLLPFPSPKRMWIGVRLISSASGIILPIIKAEGVRQMFFPATVPAYYRNPPAQ

SEQ ID NO: 64304 - DNA, 1581 bp, Glycine max
  CDS (1)..(1581)
atggaggatccgtacgttctcggttggattctgtgctccgtcctgagcctcttggcgctctacagcctggccttcggcggagcgggccgtcgccgcgcttcgccggagaagaggaacgagttatcggagaccgtgacgacctccgccggagaatgcagatcggagaaacgaaacggcgacgctgacgtcatcattgtcggagccggcgtcgccggcgccgccctggcgcacactctcggaaaggatgggcgtcgagtacacgtcattgaaagagacctgagtgagcctgatcgaattgttggagagttgctacaacccggtggctatctcaaattaattgagctcggacttgaagattgtgtggacaaaattgatgctcagcaagtgtttggttatgcacttttcaaggatgggaaacatactcgtctctcttaccccttggagaagtttcactcagatgtctctggcagaagctttcataatgggcgctttattcagaggatgcgggagaaagccgcctccattcccaatgtacgattggagcaaggaacagtcacttccctaattgaagagaaggggacaattaaaggtgtgcaatataagaccaaagatggtcaggaattggcaacatatgcacctcttaccattgtttgtgatggctgcttctcaaacttacgccgttctctttgtaatcctaaggtggatattccctcatgctttgttggtttagttttagagaactgtgaacttccatgtgcaaatcatggccacgtcatactgggagacccttcgccaatcttattctaccctataagcagtacagagattcgctgtctggtcgatgtacctggacagaaggttccttctatttcaaacggtgaaatgggaaagtacttgaagacaacggtggctccacagattcccccccagctttatgatgccttcattgctgctgttgacaaaggcaacataaggacaatgccaaacagaagcatgccggcagatcctcatcctacacctggagcccttttgatgggagatgcattcaacatgcggcatccactaaccgggggcggaatgacggttgcattgtctgatattgtggtgctgagaaatcttctaaggcccttgtctgacctgaatgatgcacccacactctgcaaataccttgaatccttttataccttgcgtaagcctgtagcatccaccataaatacattggcaggtgctctttacaaagttttttgtgcatcccctgatcaggcaaggaaggaaatgcggcaagcttgttttgattatctcagccttggaggcctattctcggaaggaccagtctctttactctctggattaaatcctcgtcccttgagcttggttctccatttctttgctgttgcaatatacggtgttggccgtttattgttaccatttccttcacctaagagagtatggattggagcccggctaatctctggtgcatctgcaatcatcctccccataattaaggctgaagggattcgtcagatgtttttccctgccactgttccagcttattacagaacacctccagttgcacaatag

SEQ ID NO: 64305 - protein, 526 aa, Glycine max
MEDPYVLGWILCSVLSLLALYSLAFGGAGRRRASPEKRNELSETVTTSAGECRSEKRNGDADVIIVGAGVAGAALAHTLGKDGRRVHVIERDLSEPDRIVGELLQPGGYLKLIELGLEDCVDKIDAQQVFGYALFKDGKHTRLSYPLEKFHSDVSGRSFHNGRFIQRMREKAASIPNVRLEQGTVTSLIEEKGTIKGVQYKTKDGQELATYAPLTIVCDGCFSNLRRSLCNPKVDIPSCFVGLVLENCELPCANHGHVILGDPSPILFYPISSTEIRCLVDVPGQKVPSISNGEMGKYLKTTVAPQIPPQLYDAFIAAVDKGNIRTMPNRSMPADPHPTPGALLMGDAFNMRHPLTGGGMTVALSDIVVLRNLLRPLSDLNDAPTLCKYLESFYTLRKPVASTINTLAGALYKVFCASPDQARKEMRQACFDYLSLGGLFSEGPVSLLSGLNPRPLSLVLHFFAVAIYGVGRLLLPFPSPKRVWIGARLISGASAIILPIIKAEGIRQMFFPATVPAYYRTPPVAQ

SEQ ID NO: 64306 - DNA, 1557 bp, Brassica napus
  CDS (1)..(1557)
atggacaaggcttttatggaagtttttttatggacgctacttgccttcgtactgacttggacgacataccacgtcaccaacaggaggaagaaggcaacgaagttggcggatgtggccgtggaggagatacgatacggtggtcctgacgtcatcatcgtcggagctggtgttggcggctcagctctcgcctatgctcttgctaaggatggacgtcgagtacatgtgatagagagggacatgagagagccagagagaatgatgggggagtttatgcagccaggaggacgactctttctttctaagcttgatcttcaagattgtttggagggaatagacgcacagaaagccaccggcttgacactttacaaggatggaaaagaagccgcctcaccttttccggtggaggacaacaacttcccttatgaaccatctgctcgaatgttttacaatggccgttttgtccagagactgcgccaaaaggcctcttctcttcccaatgtgcgactagaagaagggaccgtgagatctttgatagaagaaaaaggagtaatcaaaggagtgacatacaagaacagttcaggggaagaatcgacatcatttgcacctctcactgtggtatgcgatggttgccactcgaaccttcgtcgctctctaaatgacaacaatgcggaggttacggcgtacgagattggttacatctcgaggaattgtcgccttgaacagcccgacaagttacacttgataatggctaaaccgtctttcgccatgttgtatcaagtcagcagcaccgacgttcgttgtaattttgagcttctctccaaaaatcttccttctgtttcaaatggtgaaatggcgtccttcgtgaagaactctattgctccccaggtacctctaaaactccgcaaaacatttttgaaagggctcgatgagggatcacatataaaaattacacaagcaaagcgcatgccagctactttgagcagaaaaaagggagtgattgtgttgggagatgcattcaacatgcgtcatcccgtaatcgcgtcggggatgatggttttattgtctgacattctcattctaagccgtcttctcaagcctttgggcaacctcggtgatgaaaacaaagtctcagaagttatgaagtccttctatgttctacgcaagccaatgtcagcaacagtaaacacactaggggattcattttggcaagtgctaattgcttcaacggacgaagcaaaagaggccatgcgacaaggttgctttgattacctctctagtggtgggtttcgcacgtcaggcttgatggctctgattggtggcatgaaccctaggccactttctctcttctatcatctattcgttatttctttatcctccattggccaactgctctctccattccccactcctcttcgtgtttggcatagtctcagacttcttgatctgtgtttgaaaatgttggttcctcatctcaaggctgaaggaataggtcaaatgttgtctccaacaaatgcagcagcgtatcgcaaaagctatatggctgcaaccgttgtctag

SEQ ID NO: 64307 - protein, 518 aa, Brassica napus
MDKAFMEVFLWTLLAFVLTWTTYHVTNRRKKATKLADVAVEEIRYGGPDVIIVGAGVGGSALAYALAKDGRRVHVIERDMREPERMMGEFMQPGGRLFLSKLDLQDCLEGIDAQKATGLTLYKDGKEAASPFPVEDNNFPYEPSARMFYNGRFVQRLRQKASSLPNVRLEEGTVRSLIEEKGVIKGVTYKNSSGEESTSFAPLTVVCDGCHSNLRRSLNDNNAEVTAYEIGYISRNCRLEQPDKLHLIMAKPSFAMLYQVSSTDVRCNFELLSKNLPSVSNGEMASFVKNSIAPQVPLKLRKTFLKGLDEGSHIKITQAKRMPATLSRKKGVIVLGDAFNMRHPVIASGMMVLLSDILILSRLLKPLGNLGDENKVSEVMKSFYVLRKPMSATVNTLGDSFWQVLIASTDEAKEAMRQGCFDYLSSGGFRTSGLMALIGGMNPRPLSLFYHLFVISLSSIGQLLSPFPTPLRVWHSLRLLDLCLKMLVPHLKAEGIGQMLSPTNAAAYRKSYMAATVV

SEQ ID NO: 64308 - DNA, 24 bp, Artificial sequence
  primer
atgtctgctgttaacgttgcacct

SEQ ID NO: 64309 - DNA, 26 bp, Artificial sequence
  primer
ttaaccaatcaactcaccaaacaaaa

SEQ ID NO: 64310 - protein, 562 aa, Artificial sequence
  consensus sequence
  Variant (2)..(4): Xaa in position 2 to 4 is any amino acid
  Variant (10)..(10): Xaa in position 10 is any amino acid
  Variant (12)..(13): Xaa in position 12 to 13 is any amino acid
  Variant (16)..(17): Xaa in position 16 to 17 is any amino acid
  Variant (19)..(21): Xaa in position 19 to 21 is any amino acid
  Variant (24)..(24): Xaa in position 24 is any amino acid
  Variant (26)..(28): Xaa in position 26 to 28 is any amino acid
  Variant (32)..(33): Xaa in position 32 to 33 is any amino acid
  Variant (43)..(43): Xaa in position 43 is any amino acid
  Variant (48)..(50): Xaa in position 48 to 50 is any amino acid
  Variant (52)..(53): Xaa in position 52 to 53 is any amino acid
  Variant (56)..(57): Xaa in position 56 to 57 is any amino acid
  Variant (58)..(61): Xaa in position 58 to 61 is any or no amino acid
  Variant (64)..(66): Xaa in position 64 to 66 is any amino acid
  Variant (70)..(73): Xaa in position 70 to 73 is any amino acid
  Variant (76)..(80): Xaa in position 76 to 80 is any amino acid
  Variant (82)..(87): Xaa in position 82 to 87 is any amino acid
  Variant (90)..(98): Xaa in position 90 to 98 is any amino acid
  Variant (99)..(147): Xaa in position 99 to 147 is any or no amino acid
  Variant (150)..(150): Xaa in position 150 is any amino acid
  Variant (153)..(153): Xaa in position 153 is any amino acid
  Variant (157)..(160): Xaa in position 157 to 160 is any amino acid
  Variant (162)..(163): Xaa in position 162 to 163 is any amino acid
  Variant (165)..(168): Xaa in position 165 to 168 is any amino acid
  Variant (171)..(176): Xaa in position 171 to 176 is any amino acid
  Variant (178)..(203): Xaa in position 178 to 203 is any amino acid
  Variant (204)..(211): Xaa in position 204 to 211 is any or no amino acid
  Variant (213)..(213): Xaa in position 213 is any amino acid
  Variant (216)..(216): Xaa in position 216 is any amino acid
  Variant (221)..(222): Xaa in position 221 to 222 is any amino acid
  Variant (224)..(225): Xaa in position 224 to 225 is any amino acid
  Variant (227)..(235): Xaa in position 227 to 235 is any amino acid
  Variant (236)..(240): Xaa in position 236 to 240 is any or no amino acid
  Variant (242)..(242): Xaa in position 242 is any amino acid
  Variant (244)..(244): Xaa in position 244 is any amino acid
  Variant (246)..(246): Xaa in position 246 is any amino acid
  Variant (249)..(249): Xaa in position 249 is any amino acid
  Variant (251)..(254): Xaa in position 251 to 254 is any amino acid
  Variant (255)..(256): Xaa in position 255 to 256 is any or no amino acid
  Variant (259)..(262): Xaa in position 259 to 262 is any amino acid
  Variant (266)..(266): Xaa in position 266 is any amino acid
  Variant (268)..(271): Xaa in position 268 to 271 is any amino acid
  Variant (272)..(272): Xaa in position 272 is any or no amino acid
  Variant (274)..(274): Xaa in position 274 is any amino acid
  Variant (276)..(276): Xaa in position 276 is any amino acid
  Variant (278)..(278): Xaa in position 278 is any amino acid
  Variant (280)..(282): Xaa in position 280 to 282 is any amino acid
  Variant (284)..(284): Xaa in position 284 is any amino acid
  Variant (286)..(286): Xaa in position 286 is any amino acid
  Variant (288)..(293): Xaa in position 288 to 293 is any amino acid
  Variant (294)..(295): Xaa in position 294 to 295 is any or no amino acid
  Variant (297)..(297): Xaa in position 297 is any amino acid
  Variant (299)..(300): Xaa in position 299 to 300 is any amino acid
  Variant (301)..(301): Xaa in position 301 is any or no amino acid
  Variant (303)..(310): Xaa in position 303 to 310 is any amino acid
  Variant (311)..(311): Xaa in position 311 is any or no amino acid
  Variant (313)..(313): Xaa in position 313 is any amino acid
  Variant (315)..(316): Xaa in position 315 to 316 is any amino acid
  Variant (318)..(323): Xaa in position 318 to 323 is any amino acid
  Variant (324)..(325): Xaa in position 324 to 325 is any or no amino acid
  Variant (327)..(328): Xaa in position 327 to 328 is any amino acid
  Variant (330)..(332): Xaa in position 330 to 332 is any amino acid
  Variant (334)..(337): Xaa in position 334 to 337 is any amino acid
  Variant (338)..(339): Xaa in position 338 to 339 is any or no amino acid
  Variant (343)..(345): Xaa in position 343 to 345 is any amino acid
  Variant (347)..(353): Xaa in position 347 to 353 is any amino acid
  Variant (354)..(357): Xaa in position 354 to 357 is any or no amino acid
  Variant (359)..(362): Xaa in position 359 to 362 is any amino acid
  Variant (366)..(366): Xaa in position 366 is any amino acid
  Variant (380)..(382): Xaa in position 380 to 382 is any amino acid
  Variant (384)..(386): Xaa in position 384 to 386 is any amino acid
  Variant (388)..(389): Xaa in position 388 to 389 is any amino acid
  Variant (392)..(392): Xaa in position 392 is any amino acid
  Variant (394)..(395): Xaa in position 394 to 395 is any amino acid
  Variant (396)..(410): Xaa in position 396 to 410 is any or no amino acid
  Variant (412)..(412): Xaa in position 412 is any amino acid
  Variant (414)..(423): Xaa in position 414 to 423 is any amino acid
  Variant (424)..(424): Xaa in position 424 is any or no amino acid
  Variant (426)..(428): Xaa in position 426 to 428 is any amino acid
  Variant (431)..(436): Xaa in position 431 to 436 is any amino acid
  Variant (438)..(438): Xaa in position 438 is any amino acid
  Variant (440)..(441): Xaa in position 440 to 441 is any amino acid
  Variant (445)..(446): Xaa in position 445 to 446 is any amino acid
  Variant (448)..(448): Xaa in position 448 is any amino acid
  Variant (450)..(450): Xaa in position 450 is any amino acid
  Variant (451)..(451): Xaa in position 451 is any or no amino acid
  Variant (453)..(461): Xaa in position 453 to 461 is any amino acid
  Variant (464)..(464): Xaa in position 464 is any amino acid
  Variant (466)..(468): Xaa in position 466 to 468 is any amino acid
  Variant (471)..(473): Xaa in position 471 to 473 is any amino acid
  Variant (474)..(474): Xaa in position 474 is any or no amino acid
  Variant (477)..(478): Xaa in position 477 to 478 is any amino acid
  Variant (481)..(481): Xaa in position 481 is any amino acid
  Variant (483)..(484): Xaa in position 483 to 484 is any amino acid
  Variant (486)..(486): Xaa in position 486 is any amino acid
  Variant (488)..(489): Xaa in position 488 to 489 is any amino acid
  Variant (491)..(492): Xaa in position 491 to 492 is any amino acid
  Variant (496)..(496): Xaa in position 496 is any amino acid
  Variant (499)..(514): Xaa in position 499 to 514 is any amino acid
  Variant (515)..(556): Xaa in position 515 to 556 is any or no amino acid
  Variant (558)..(558): Xaa in position 558 is any amino acid
  Variant (559)..(561): Xaa in position 559 to 561 is any or no amino acid
DXXXVGAGVXGXXLAXXLXXXGRXVXXXERDXXEPDRIVGELXQPGGXXXLXXLGXXXXXXDCXXXIDAXXXXGYXXXXXGXXXXXXYPXXXXXXXXXXXXXXXXXXXXXXXXXXXXXXXXXXXXXXXXXXXXXXXXXXXXXXXXXXGRXFHXGRFXXXXRXXAXXXXNVXXXXXXVXXXXXXXXXXXXXXXXXXXXXXXXXXXXXXXXXXAXLTXVCDGXXSXXRXXXXXXXXXXXXXXVXSXFXGLXLXXXXXXLPXXXXGHVXLXXXXXPXLXYXIXXXEXRXLXXXXXXXXPXSXXXGXXXXXXXXXVXPXXPXXXXXXXXFXXAXXXGXXXXXXMPNXXXPXXXXXXXXXXXGXXXXGDAXNMRHPLTGGGMTVXXXDXXXLXXLLXPXXXXXXXXXXXXXXXXXLXDXXXXXXXXXXXFXXXRKXXXXXXNXLXXALYXXFXAXXDXXXXXXXXXCFXYXXXGGXXXXGPXXLLXGXXPXPXXLXXHFFXVAXXXXXXXXXXXXXXXXXXXXXXXXXXXXXXXXXXXXXXXXXXXXXXXXXXXXXXXXXXPXXXXE

SEQ ID NO: 64311 - protein, 27 aa, Artificial sequence
  protein pattern
  Variant (2)..(3): Xaa in position 2 to 3 is any amino acid
  Variant (7)..(8): Xaa in position 7 to 8 is any amino acid
  Variant (9)..(10): Xaa in position 9 to 10 is any or no amino acid
  Variant (12)..(13): Xaa in position 12 to 13 is any amino acid
  Variant (14)..(15): Xaa in position 14 to 15 is any or no amino acid
  Variant (17)..(20): Xaa in position 17 to 20 is any amino acid
  Variant (21)..(21): Xaa in position 21 is Asn, Thr or Val
  Variant (22)..(22): Xaa in position 22 is Thr or Val
  Variant (23)..(23): Xaa in position 23 is any amino acid
  Variant (24)..(24): Xaa in position 24 is Ile, Leu, Met or Val
  Variant (25)..(25): Xaa in position 25 is any amino acid
  Variant (26)..(26): Xaa in position 26 is Glu, Gly, Gln or Thr
  Variant (27)..(27): Xaa in position 27 is Ala, Gly, Asn or Thr
FXXGRFXXXXRXXXXAXXXXXXXXXXX

SEQ ID NO: 64312 - protein, 27 aa, Artificial sequence
  protein pattern
  Variant (2)..(2): Xaa in position 2 is any amino acid
  Variant (3)..(4): Xaa in position 3 to 4 is any or no amino acid
  Variant (7)..(8): Xaa in position 7 to 8 is any amino acid
  Variant (9)..(9): Xaa in position 9 is Ala, Asp, Ser or Thr
  Variant (10)..(10): Xaa in position 10 is Ala, Cys, Gly or Ser
  Variant (11)..(11): Xaa in position 11 is any amino acid
  Variant (12)..(12): Xaa in position 12 is Ile or Val
  Variant (14)..(14): Xaa in position 14 is Thr or Val
  Variant (16)..(16): Xaa in position 16 is Ala, Gly or Ser
  Variant (17)..(18): Xaa in position 17 to 18 is any amino acid
  Variant (19)..(19): Xaa in position 19 is Phe or Leu
  Variant (20)..(21): Xaa in position 20 to 21 is any amino acid
  Variant (22)..(22): Xaa in position 22 is Leu or Val
  Variant (23)..(23): Xaa in position 23 is Phe or Leu
  Variant (24)..(24): Xaa in position 24 is any amino acid
  Variant (25)..(25): Xaa in position 25 is Ala, Gly or Ser
  Variant (26)..(26): Xaa in position 26 is Asp, Asn, Ser or Thr
  Variant (27)..(27): Xaa in position 27 is Asp, Glu, Asn, Pro, Ser or Thr
YXXXRKXXXXXXNXLXXXXXXXXXXXX

SEQ ID NO: 64313 - protein, 18 aa, Artificial sequence
  protein pattern
  Variant (2)..(2): Xaa in position 2 is any amino acid
  Variant (5)..(5): Xaa in position 5 is Phe, Ile or Val
  Variant (6)..(6): Xaa in position 6 is any amino acid
  Variant (10)..(10): Xaa in position 10 is any amino acid
  Variant (11)..(11): Xaa in position 11 is Phe, His or Tyr
  Variant (13)..(13): Xaa in position 13 is any amino acid
  Variant (14)..(14): Xaa in position 14 is Phe or Leu
  Variant (16)..(16): Xaa in position 16 is Lys or Arg
  Variant (17)..(17): Xaa in position 17 is any amino acid
  Variant (18)..(18): Xaa in position 18 is Phe, Leu or Val
AXLTXXCDGXXSXXRXXX

SEQ ID NO: 64314 - protein, 13 aa, Artificial sequence
  protein pattern
  Variant (2)..(2): Xaa in position 2 is any amino acid
  Variant (4)..(4): Xaa in position 4 is Gly or Ser
  Variant (5)..(5): Xaa in position 5 is Glu, Pro, Ser or Thr
  Variant (6)..(6): Xaa in position 6 is any amino acid
  Variant (8)..(8): Xaa in position 8 is any amino acid
  Variant (10)..(10): Xaa in position 10 is any amino acid
  Variant (12)..(12): Xaa in position 12 is any amino acid
  Variant (13)..(13): Xaa in position 13 is Ala or Asp
YXIXXXEXRXLXX

SEQ ID NO: 64315 - DNA, 1869 bp, Saccharomyces cerevisiae
  CDS (1)..(1869)
atgtttagtcactaccgctataaagaaaattcttgccaaaaaagagaggctataccagacaaatctcgcgtatcactgacatttcttcagaaaagaaccgattcatctaacgtcactgttgcagtggccgttgctgttcccattggtgctattattatagtactatccgtcgttttaatagtagtatataggagatgcaaaaagaaccttctatgcaggattttgacccaaattttgagggcgatttatactatttaccgaagatggattacttctatgaattctgcaaactcagacagcaatgccacagaaaagaggtttatttatggtggttatgacgattttttgcaaccgtcaatcgaaaactcacaatctttcaaagattatgtgaggcgtatcaatgagcatgcaccctccgcttataatattgcttcactggcttcgcagaataacagcaagttatcggtcccctccaagcacattgacctttcgaataagatttctttcgaatcgttagagaattctgagctgattgtttcaccacaacactcaaatactgggcaagactgtgatcaaagatgtgatagtacgtcaaatcctgatgtaaatgaaaagtccagccataacaacgataatcgacttaaatcgaattatacgagtcgtagcgggctcgagcctcagtgttcgagagaggaggaagaaaatattgacagaataagaagcatttataacatttattttgagaaaagtaatagcacgatacgatcctctgtaacttcttcgatacggcgtgactctaaattaaacatcgctacaagaaaaagtgtaaatatgagctctcaagacaatccaaatgatactacattaattgaacagagtcacttcggaagtacaactgtccaagaaattgattccagttccagcgccaatgaggaatatgaagatgcaactgattatctgcaagtgccggcaccacaagagaataaaaacattgcatcgtcagtatattcagaagtagcaaccagagaaaaagtgattcccgaatcgtctctatctcttacattcccaccaccgaatggtctttcaacgagaattacctcatcaatatattctgacacggtcgctaaggaccatattcactctgcaaaggctcccgtacgggccctttcggagggttcgggtcagtcaaatcttacttctgctcagcaatattctacatattttatagatcactgcaaccagagcaatgatgacaattactactataattatcccctcccgttagaacatcctcaaaattatgagaacatcggagatttgcccacgcctacccaattcatttattccacctcttcgcattccttgacgtcattcaaaggaaggcctaaacctccaaaaacactaaaacatgtacctacagctaggcttaatgggacagcgttgaatccaatggatcatcctgaaatgttttacagttcgcctacgaaaataccgtcaacatctttgacaaagcaattttgtacgccccttccatatcagcttagacaaagtgttgttatgaccaacccatcagaactttctatgaaacctcgctataagcctgcaggatctttaagaaatttaataaaggcccaatatctccctggtaactcatccactacaacatcatcttctttatcacaaccgccgtcaacgttgtcaaatgcaataaatttccgtgttagtgggttattggatgacactgacatcttgcagcctcctagtgtgggggaaatcttaccttttaaagcttctacggaagacttaaggaagcaactgggcacatcccataattacgaaataacaccgtacgagaatgtacatgtataa

SEQ ID NO: 64316 - protein, 622 aa, Saccharomyces cerevisiae
MFSHYRYKENSCQKREAIPDKSRVSLTFLQKRTDSSNVTVAVAVAVPIGAIIIVLSVVLIVVYRRCKKNLLCRILTQILRAIYTIYRRWITSMNSANSDSNATEKRFIYGGYDDFLQPSIENSQSFKDYVRRINEHAPSAYNIASLASQNNSKLSVPSKHIDLSNKISFESLENSELIVSPQHSNTGQDCDQRCDSTSNPDVNEKSSHNNDNRLKSNYTSRSGLEPQCSREEEENIDRIRSIYNIYFEKSNSTIRSSVTSSIRRDSKLNIATRKSVNMSSQDNPNDTTLIEQSHFGSTTVQEIDSSSSANEEYEDATDYLQVPAPQENKNIASSVYSEVATREKVIPESSLSLTFPPPNGLSTRITSSIYSDTVAKDHIHSAKAPVRALSEGSGQSNLTSAQQYSTYFIDHCNQSNDDNYYYNYPLPLEHPQNYENIGDLPTPTQFIYSTSSHSLTSFKGRPKPPKTLKHVPTARLNGTALNPMDHPEMFYSSPTKIPSTSLTKQFCTPLPYQLRQSVVMTNPSELSMKPRYKPAGSLRNLIKAQYLPGNSSTTTSSSLSQPPSTLSNAINFRVSGLLDDTDILQPPSVGEILPFKASTEDLRKQLGTSHNYEITPYENVHV

SEQ ID NO: 64317 - DNA, 1866 bp, Candida glabrata CBS 138
  CDS (1)..(1866)
atgaacacaattggttttgaaaatgatttcttaagaccaacgagcactatagctcctacttcaacaacaactcttttcaagagagatgatgttacaggctctgactcagctacttccacgtcttctgacagcgatagtagctctacttcgacttctacaaaatgtaccggtagtgcccaatactgtgagaaaccaacagatgctcattggaaagagaccgtgggtattgccgtcggtgtgcctgtcggtgttattgtgctaggtttactcattgttcttatccttgtatggaagaaagggaagaaagaagccgatgaggatttggatccagagtttcaaagtgggagtgagtacttgccttatatcagtaacgagaaacatattggaagctcatcaacgaactcatcagcgggctcaaaaattgatgctccatataaatcaagagcggatccattccaactacctgatgcctctactgactctttaagagattttgctagaatggcacatgacccaagtctagacaaatataaactagcaacatcttctctgagaaataagagcaacctttctcttgtgaataatcaaaccagacacaccacgtctggtgactcagagaaggattcatttgattttgccaataattctacaacatcaactttagaggacgaatcgaccccaattaagaagatgcctaataatgatgctgaggaagttggtaatgatactacactaaacccatttgagtcagaagatgacccagcagaaatgagacctcagattatcattaccgacagtgatccttcaaacgatgatgctccactgactccaagggaggaggaagacattcaacgtattaagagtatctacaatgtctatctagaccagaacggtaatcaaatagttgtagatccaacagatgaaaataaactgggcaacactgaaacagtctccactgaagattctgaaaatattgaaggtttgggaatacaaactggtactggaatacaagctcagcgtgcctcgcgtatagcttcttcggtatattctgagaatcccttggctggttctgagaataaggaggattatttcaatcacaaggatatgaatgacaatgtacaatatgacatgcaatcacagcaacaatacataccgcagacagtacagtacccaaacaatgggtttgtctatgatcagcaataccatgatcaacaacaggcttattatatgcaacattatcagcaaccaaatgctcaacaaatgatgtactatcaacctccaataaaccaaacttaccaccaataccacccacaaacactggaagcaattgatgaactaccgacaccaacggaactagcatattcaccatcctatcactctttgacatctttcaagaagcctatgaaacagcaacttttgattaaaaatcagattgctactttaaatggattaacattgaatccaattgaccatccagagatgttctttactcaagatgattcttattccaaataccaagaaaagatcgcacctatgtccggtaagcctagcaataaaaacccagcctcaaatgtacctctaccccaccatctgagacaaagtgttgttatgacaaaccctcatgatctatcattatcaaccacgcataagccagcaggctctttcagaaaggtgcataatgccgctcaatcaccccacttgggcgttgaccctagatatggtaacaatacccgtgtgagtggtttactggacgataccgacgttgtccaaccagcaagtgtcggtgaaattttgcctcgtcacggtaacaacgacgacctgaggaaacagctaggtatatctcacaattaccacattcaactctga

SEQ ID NO: 64318 - protein, 621 aa, Candida glabrata CBS 138
MNTIGFENDFLRPTSTIAPTSTTTLFKRDDVTGSDSATSTSSDSDSSSTSTSTKCTGSAQYCEKPTDAHWKETVGIAVGVPVGVIVLGLLIVLILVWKKGKKEADEDLDPEFQSGSEYLPYISNEKHIGSSSTNSSAGSKIDAPYKSRADPFQLPDASTDSLRDFARMAHDPSLDKYKLATSSLRNKSNLSLVNNQTRHTTSGDSEKDSFDFANNSTTSTLEDESTPIKKMPNNDAEEVGNDTTLNPFESEDDPAEMRPQIIITDSDPSNDDAPLTPREEEDIQRIKSIYNVYLDQNGNQIVVDPTDENKLGNTETVSTEDSENIEGLGIQTGTGIQAQRASRIASSVYSENPLAGSENKEDYFNHKDMNDNVQYDMQSQQQYIPQTVQYPNNGFVYDQQYHDQQQAYYMQHYQQPNAQQMMYYQPPINQTYHQYHPQTLEAIDELPTPTELAYSPSYHSLTSFKKPMKQQLLIKNQIATLNGLTLNPIDHPEMFFTQDDSYSKYQEKIAPMSGKPSNKNPASNVPLPHHLRQSVVMTNPHDLSLSTTHKPAGSFRKVHNAAQSPHLGVDPRYGNNTRVSGLLDDTDVVQPASVGEILPRHGNNDDLRKQLGISHNYHIQL

SEQ ID NO: 64319 - DNA, 2106 bp, Candida glabrata CBS 138
  CDS (1)..(2106)
atgatttgtgccgatggtcgcaaaccagcgatgatttttaggcgggatagtgatagtgatagtgatggtgatggtgctggtagtggaaacagtgggaagtgtgaagggagcaagcagcagtgtgagctgcccactgatcacaacctaggtgtgcgtgttggtgtggcagtggctattcctgtgggtgtgattattatagtgctggtggggatacttatcgttgtgtacaggaggagcaagcgggaggagaaagaggaccacgaccctgagttcgagggcgataacgagtatataccagtggcccggcatggtgctctgcagaagcacagggagaacatgatgatggcgacggacccgttccagctgccggggtctacgggcagcgatgctgacctgcgcgacttcgccaagcgtgtgcagagtgatgggttcggcgggtaccaattggcctctatgagtgcatcgaacaacgcgtcgcaggtgtcgctgacacacctggaccagtcgcggggaagcgcgggccctcgtatgctgatgaaaaacatgaggccgcccatgacacacatggcttactcttctagctcgctgagaaacgctaccaatggccacagcacagacgactccacaggaacttccacagatagatcgccaacagcattatcaacagacgaaaaactgtcccataatctgcacagcaacttatctgagaagccaaaaccttctttcgaatttgagaccatggttattgaatccaacgatctcgacgacgacgacgacgatgatgatgatgatgatgagtataacaaagggcgcacaaacgagcgtaacaactatcacagagatacagacaaatatgacatggaggatgataacgcatctgagttcgttacagaactgagccccgatgaggaagaaaatattcaacggatgaagagtatatacaaagtttacctcgataggagtaaaacgataaaagaacgggaagataacccgttaccgtccgatgatgagcaggaatcactggccttaaacagagaagagaatgaagacacattgaatgcgctcacgacaagtaacaaccaacttgctgtacaagagggttctaatcacgggagagctgcgtcgtcgatatattctgagttaccagttctatcacagcacgagaaaaaagtttctgaagtatctaatcaaatgcagatgaatgacagaaatgtggtacctccacagacttctcaagatatcactggtggtcaacaatacggccagccatataatacggctatggatggtgctacacaggcctatccataccagtcacaagaaggctacaatcagtttcctcaagaggcatattaccagcaatcatcacagaatggattatatggtcaacagattccagaagaaggtaactacccacagtcacaatatattcaatacccacagcaaatgtatcaacctacttataatgtcagtttacaacaaaacatgatgagttataacaacaacaacgcatctcaagagttccaccatccacaaaccctggaaacaattggtgaactacctacccctgcatacttggcctcatccgagtccactaattccctcacagcatttaagaaaaatcaaaaacaacaactgcatcaaattcaaaccgcaagaataaacggtaccgcattaaacccaatggatcatcctgagatgttctattctccaagcacagacacttatctaaacaacggtggcatgcaaccaagcaatggaagtgtatactctgcaaacacttatagaggacaggtcaatggtgctccacttccatatcaactgcgtcaaagtgtggtgatgacaaacccctcagaactgtcgttgaatacacttcataaaccagcaggctcattgaggaactacatcaactctaactccaggaacaatagcttgactacccagggaaatccttacaatcaaccaaaccaaagcagagttagtggtattcttgatcacatagacactatacaaccgcctggtgtgggtaatattttacctcacaacggtagtagcagtgatttaaggaaacagctagggtcttcgaacaattacaatttttcatag

SEQ ID NO: 64320 - protein, 701 aa, Candida glabrata CBS 138
MICADGRKPAMIFRRDSDSDSDGDGAGSGNSGKCEGSKQQCELPTDHNLGVRVGVAVAIPVGVIIIVLVGILIVVYRRSKREEKEDHDPEFEGDNEYIPVARHGALQKHRENMMMATDPFQLPGSTGSDADLRDFAKRVQSDGFGGYQLASMSASNNASQVSLTHLDQSRGSAGPRMLMKNMRPPMTHMAYSSSSLRNATNGHSTDDSTGTSTDRSPTALSTDEKLSHNLHSNLSEKPKPSFEFETMVIESNDLDDDDDDDDDDDEYNKGRTNERNNYHRDTDKYDMEDDNASEFVTELSPDEEENIQRMKSIYKVYLDRSKTIKEREDNPLPSDDEQESLALNREENEDTLNALTTSNNQLAVQEGSNHGRAASSIYSELPVLSQHEKKVSEVSNQMQMNDRNVVPPQTSQDITGGQQYGQPYNTAMDGATQAYPYQSQEGYNQFPQEAYYQQSSQNGLYGQQIPEEGNYPQSQYIQYPQQMYQPTYNVSLQQNMMSYNNNNASQEFHHPQTLETIGELPTPAYLASSESTNSLTAFKKNQKQQLHQIQTARINGTALNPMDHPEMFYSPSTDTYLNNGGMQPSNGSVYSANTYRGQVNGAPLPYQLRQSVVMTNPSELSLNTLHKPAGSLRNYINSNSRNNSLTTQGNPYNQPNQSRVSGILDHIDTIQPPGVGNILPHNGSSSDLRKQLGSSNNYNFS

SEQ ID NO: 64321 - DNA, 2067 bp, Kluyveromyces lactis NRRL Y-1140
  CDS (1)..(2067)
atggctactagtaccactggatcttcttctacgtcgagttccacttcgacatcgacatccacttcgaaaagttcaaaatgtactggttcaagccagcattgtgaaaagccatctgattcgactaatactactgcagtggtagtagcggtcgtagttccggtagtagtggttggactggtattgatattcattttgtacaaagtatacaagagaaacaagaaggaagaactggaggacaatgatccagactttgatggtgacgcggaattcttaccggattttggacaagagtttgagatggaacgcaacgtcgatccttctgggatgagaataccctcatcagctactcgtgcattttcggtacaaccaaatcctttcaacgatgagaccaaatcgttcgcttattctcagagcgcaacaaatccattccaactgccaactgtgaccgatgattccgaaacgttaaggaattttgccaagactttccagaatagtgattttgatgggtacaaacttgcgacgcgttctgcttctcaaatatctatctcgagacccacgtcagcggcaggtgggtctgtccctaataatgggaacattcaactgtcgaatttgtcaaagttctccacagtttcgaatggtaataactctaacggtgatgataagattttgaagtacagtgaaattgtacaggattccggtagtcctgcagacgaggacgatgacgatgacgaagaggactcaaaggatagcgacctatacagtgagcctagccctgttaaatattccagaggaaacgtaacacaatcttatattcatcaagaccaagaagggttccaaccagaagtttcaatgcaggagtccgaacgcacatcagagggaattcaattacagaaaaagccgttcttggaaaatgaagatgatgtctacattcaacgtgatgaagaagactccgatgaagatgtggctagaatgaaatcgatatatcaggtttatttggatagaaacggtactgtgaaaaccattagagaaggaaatccggtgcccgaagggttccaaccggttgcagagttaccgaaggatgcatcaaacataattactgagagctccaactccaatgagcctacgaatccatccaatatacctgaaaattatcaagcccaaccgcaacatgagtattaccagaatggctattctcttcagccggaagccccacagtacccagaggaaaattatggtagaggtactcaagctgatggcaatacccaatcacaagatacagcagcgtttgaaaatcctaactcgaacgcaccaaaccaatattcagaccctgcgccaagggtagcgtcatcaatttatgacacccagtctcagtatcataatgaccatcaacaaaatcaatactactacaatcatcagtattacggacagaatcagtacgatggaagtttcccaacatatcacaaccaaatacagcataatctcccccctcctaatatggaaagcatcgaagagctcccacgaccatctaatttaccatttagcggttcctctcattcgttaacgtcatttaaatcaaaaaccacccttaagtcaccagcagcagcagctatgacaccacaaaataaccataactacaatccaatcgaccatccagaactttatttccaccaaacaaacggatcagatttgggattatcctcagatcaagcctccagcaatacaacaccatcacaaattaactctgcaggaagcaaggtattacctcatcatttgagacaatccgtggtgatgacaaatccaaacgagttgtctcaaaataaccttttcaagccagctggatcattctctcgtgctgtagcggattcaagatccaacagtttgatgtcaaatactaacacttatcaacaacagttacaagacacttatattaaatcgagagtaagcggtattcttgacgacaccgacgttatgcatccaccaagcatggggactattctaccgcactccggatcgcaagaagatctaagaaagcagttgggctcatcacacaattacaatgtcatgtaa

SEQ ID NO: 64322 - protein, 688 aa, Kluyveromyces lactis NRRL Y-1140
MATSTTGSSSTSSSTSTSTSTSKSSKCTGSSQHCEKPSDSTNTTAVVVAVVVPVVVVGLVLIFILYKVYKRNKKEELEDNDPDFDGDAEFLPDFGQEFEMERNVDPSGMRIPSSATRAFSVQPNPFNDETKSFAYSQSATNPFQLPTVTDDSETLRNFAKTFQNSDFDGYKLATRSASQISISRPTSAAGGSVPNNGNIQLSNLSKFSTVSNGNNSNGDDKILKYSEIVQDSGSPADEDDDDDEEDSKDSDLYSEPSPVKYSRGNVTQSYIHQDQEGFQPEVSMQESERTSEGIQLQKKPFLENEDDVYIQRDEEDSDEDVARMKSIYQVYLDRNGTVKTIREGNPVPEGFQPVAELPKDASNIITESSNSNEPTNPSNIPENYQAQPQHEYYQNGYSLQPEAPQYPEENYGRGTQADGNTQSQDTAAFENPNSNAPNQYSDPAPRVASSIYDTQSQYHNDHQQNQYYYNHQYYGQNQYDGSFPTYHNQIQHNLPPPNMESIEELPRPSNLPFSGSSHSLTSFKSKTTLKSPAAAAMTPQNNHNYNPIDHPELYFHQTNGSDLGLSSDQASSNTTPSQINSAGSKVLPHHLRQSVVMTNPNELSQNNLFKPAGSFSRAVADSRSNSLMSNTNTYQQQLQDTYIKSRVSGILDDTDVMHPPSMGTILPHSGSQEDLRKQLGSSHNYNVM

SEQ ID NO: 64323 - DNA, 2205 bp, Saccharomyces cerevisiae
  CDS (1)..(2205)
atgtaccacacccatatgcatgaaagtttaatatctgtgacttcaacggtaagtgtttctgatgcgtcttatgcttatgcaaggctcactagaagagacgatagcgattcatcttcttcctcagcatccagcacgaaaaatagcaaatctgctgaatgtacaggctctaaacagcaatgtcaattacccacagattcgagtcacagcaccagtgtaactgttggtgtggctgttgcggtaccagtaggtgtcattatcattgttctggctgtgatactttgcattgtgtataggagaagcaaaaaggaagctgaggaagataatgatccagatttcgaaggagattctgaatttttaccgacaatgaaggattattcacctggaataaatcatttgtactctagcgactcgcagcaagacttcatggaaaagaccttgcaacagccgccttcagatccctttgttggtagcatgcatagtagtaaatataatgtgagaagcgctaccccacctgcaattggtcggtcatggtacgtagacccgtttcagcttccacaggaatcgaacgactctaacagtttgagagattttgccatgagagtacaagaagatggactaggtggctataaagttgcggccgagtctagaaatgccagtcaaacgtccttgcatcctgataacttttcgaattgtacaccaataagagcgtcttcaagatttcaagagagtgaaagctttcgatctcacggtagcccaatccataataaccagctttcccgtggttctgccacagaaggtgccaacaagcagtttacatttcctaatgaagacaatgattcgtcctcagttagtgaagaggctgaggttttgaatgagtcaaatgagtctgcaagcaatgacgcgttcgaattcgaacttgataatagttcagaaaagacacatgaaaggaatctgcgttttggtaaggatgatgataattatgaacttcaagatatcagagaagctgaacatatgaatgatcgtagtagcagtaaaagtcaagatgatgattactatgtatcactcttatcccctaatgaagaagaagatattaagagaatgaaaagtatttatcaagtttatttggatagagctaaaacaatgaaaaaggaagaggataaagcagataatgcaaatgatatatcgcaggaggagaatagagtggataatatagtccagaatccactgccttctatcaaaattaataataacgacaatatcgacaataatgaggtaccggaagcaaaacacctggtgaaagaagcacttcctctaaacaatactaacttggcagaatatggtccagaaatggcccaaagccagaaacaatatccagtgcaggatacactcaccgtgaacgatacggaagcagcgccttccaatagaattgcttcctcaatttattccgaagcaattcagccgttgaattatcaggatcaatatcaacaacaggaacaatcaccagtatataatggccacacacagtatcctggcaatggatatagcggaaatcctcagcaacaggggtatactgcgcaattcgtgcaaaatccacaatggtacggtgtaccaactcctcaacaacagcaacataatcatcctcagaccctggaaactattggagaattaccaactcccgcatatttagctcaatcagcttcctcgcattcattgacctcttttaaaagaccaaacaagcaacaacttcttcaattacagactgccagactaaacggaactgcgttaaatccggtcgatcatccggaaatgttttattcaccgacaaacgatgcctattatgctccacagcagcaaggccaatatatgaagtttaacgaaaatggggcggttccttcaccttatcaacttagacaaagtgtggtaatgaccaatccttcggatttgacggcaaaaccatcttataagccagcaggttctttcagaagtgtaagcgcaaccaattcaagaaataacagtctgaccacacaaaataatatctatctgcaacagcagcagcagcaactgtataattctcgtgttagtgggatattagaagagacagatgttgtacagccaccaagtgttggtggaattttgccacatagtggttcacaggacgatttaagaaaacaattaggctcttcacataattataccgtcaactga

SEQ ID NO: 64324 - protein, 734 aa, Saccharomyces cerevisiae
MYHTHMHESLISVTSTVSVSDASYAYARLTRRDDSDSSSSSASSTKNSKSAECTGSKQQCQLPTDSSHSTSVTVGVAVAVPVGVIIIVLAVILCIVYRRSKKEAEEDNDPDFEGDSEFLPTMKDYSPGINHLYSSDSQQDFMEKTLQQPPSDPFVGSMHSSKYNVRSATPPAIGRSWYVDPFQLPQESNDSNSLRDFAMRVQEDGLGGYKVAAESRNASQTSLHPDNFSNCTPIRASSRFQESESFRSHGSPIHNNQLSRGSATEGANKQFTFPNEDNDSSSVSEEAEVLNESNESASNDAFEFELDNSSEKTHERNLRFGKDDDNYELQDIREAEHMNDRSSSKSQDDDYYVSLLSPNEEEDIKRMKSIYQVYLDRAKTMKKEEDKADNANDISQEENRVDNIVQNPLPSIKINNNDNIDNNEVPEAKHLVKEALPLNNTNLAEYGPEMAQSQKQYPVQDTLTVNDTEAAPSNRIASSIYSEAIQPLNYQDQYQQQEQSPVYNGHTQYPGNGYSGNPQQQGYTAQFVQNPQWYGVPTPQQQQHNHPQTLETIGELPTPAYLAQSASSHSLTSFKRPNKQQLLQLQTARLNGTALNPVDHPEMFYSPTNDAYYAPQQQGQYMKFNENGAVPSPYQLRQSVVMTNPSDLTAKPSYKPAGSFRSVSATNSRNNSLTTQNNIYLQQQQQQLYNSRVSGILEETDVVQPPSVGGILPHSGSQDDLRKQLGSSHNYTVN

SEQ ID NO: 64325 - DNA, 25 bp, Artificial sequence
  primer
atgtttagtcactaccgctataaag

SEQ ID NO: 64326 - DNA, 25 bp, Artificial sequence
  primer
ttatacatgtacattctcgtacggt

SEQ ID NO: 64327 - protein, 732 aa, Artificial sequence
  consensus sequence
  Variant (2)..(10): Xaa in position 2 to 10 is any amino acid
  Variant (12)..(12): Xaa in position 12 is any amino acid
  Variant (15)..(15): Xaa in position 15 is any amino acid
  Variant (18)..(18): Xaa in position 18 is any amino acid
  Variant (20)..(20): Xaa in position 20 is any amino acid
  Variant (22)..(23): Xaa in position 22 to 23 is any amino acid
  Variant (27)..(31): Xaa in position 27 to 31 is any amino acid
  Variant (32)..(34): Xaa in position 32 to 34 is any or no amino acid
  Variant (36)..(36): Xaa in position 36 is any amino acid
  Variant (40)..(40): Xaa in position 40 is any amino acid
  Variant (47)..(48): Xaa in position 47 to 48 is any amino acid
  Variant (51)..(53): Xaa in position 51 to 53 is any amino acid
  Variant (55)..(56): Xaa in position 55 to 56 is any amino acid
  Variant (59)..(59): Xaa in position 59 is any amino acid
  Variant (61)..(61): Xaa in position 61 is any amino acid
  Variant (65)..(66): Xaa in position 65 to 66 is any amino acid
  Variant (69)..(69): Xaa in position 69 is any amino acid
  Variant (72)..(72): Xaa in position 72 is any amino acid
  Variant (74)..(77): Xaa in position 74 to 77 is any amino acid
  Variant (79)..(80): Xaa in position 79 to 80 is any amino acid
  Variant (82)..(99): Xaa in position 82 to 99 is any amino acid
  Variant (100)..(140): Xaa in position 100 to 140 is any or no amino acid
  Variant (147)..(150): Xaa in position 147 to 150 is any amino acid
  Variant (151)..(151): Xaa in position 151 is any or no amino acid
  Variant (153)..(154): Xaa in position 153 to 154 is any amino acid
  Variant (160)..(169): Xaa in position 160 to 169 is any amino acid
  Variant (171)..(172): Xaa in position 171 to 172 is any amino acid
  Variant (174)..(215): Xaa in position 174 to 215 is any amino acid
  Variant (216)..(239): Xaa in position 216 to 239 is any or no amino acid
  Variant (241)..(297): Xaa in position 241 to 297 is any amino acid
  Variant (298)..(327): Xaa in position 298 to 327 is any or no amino acid
  Variant (329)..(331): Xaa in position 329 to 331 is any amino acid
  Variant (333)..(333): Xaa in position 333 is any amino acid
  Variant (338)..(338): Xaa in position 338 is any amino acid
  Variant (343)..(370): Xaa in position 343 to 370 is any amino acid
  Variant (371)..(391): Xaa in position 371 to 391 is any or no amino acid
  Variant (393)..(417): Xaa in position 393 to 417 is any amino acid
  Variant (419)..(467): Xaa in position 419 to 467 is any amino acid
  Variant (468)..(480): Xaa in position 468 to 480 is any or no amino acid
  Variant (482)..(486): Xaa in position 482 to 486 is any amino acid
  Variant (488)..(499): Xaa in position 488 to 499 is any amino acid
  Variant (500)..(501): Xaa in position 500 to 501 is any or no amino acid
  Variant (503)..(513): Xaa in position 503 to 513 is any amino acid
  Variant (514)..(533): Xaa in position 514 to 533 is any or no amino acid
  Variant (537)..(538): Xaa in position 537 to 538 is any amino acid
  Variant (540)..(540): Xaa in position 540 is any amino acid
  Variant (542)..(542): Xaa in position 542 is any amino acid
  Variant (548)..(549): Xaa in position 548 to 549 is any amino acid
  Variant (551)..(552): Xaa in position 551 to 552 is any amino acid
  Variant (554)..(554): Xaa in position 554 is any amino acid
  Variant (556)..(556): Xaa in position 556 is any amino acid
  Variant (564)..(569): Xaa in position 564 to 569 is any amino acid
  Variant (570)..(571): Xaa in position 570 to 571 is any or no amino acid
  Variant (573)..(577): Xaa in position 573 to 577 is any amino acid
  Variant (579)..(580): Xaa in position 579 to 580 is any amino acid
  Variant (583)..(584): Xaa in position 583 to 584 is any amino acid
  Variant (588)..(588): Xaa in position 588 is any amino acid
  Variant (595)..(612): Xaa in position 595 to 612 is any amino acid
  Variant (613)..(628): Xaa in position 613 to 628 is any or no amino acid
  Variant (632)..(633): Xaa in position 632 to 633 is any amino acid
  Variant (644)..(645): Xaa in position 644 to 645 is any amino acid
  Variant (648)..(652): Xaa in position 648 to 652 is any amino acid
  Variant (658)..(658): Xaa in position 658 is any amino acid
  Variant (660)..(669): Xaa in position 660 to 669 is any amino acid
  Variant (670)..(673): Xaa in position 670 to 673 is any or no amino acid
  Variant (675)..(684): Xaa in position 675 to 684 is any amino acid
  Variant (685)..(692): Xaa in position 685 to 692 is any or no amino acid
  Variant (697)..(697): Xaa in position 697 is any amino acid
  Variant (700)..(700): Xaa in position 700 is any amino acid
  Variant (703)..(704): Xaa in position 703 to 704 is any amino acid
  Variant (711)..(711): Xaa in position 711 is any amino acid
  Variant (715)..(716): Xaa in position 715 to 716 is any amino acid
  Variant (719)..(720): Xaa in position 719 to 720 is any amino acid
  Variant (728)..(728): Xaa in position 728 is any amino acid
SXXXXXXXXXSXKCXGSXQXCXXPTDXXXXXXXXVXVAVXVPVGVIXXVLXXXLXXVYXRXKKEXXEDXDPXFXXXXEXXPXXXXXXXXXXXXXXXXXXXXXXXXXXXXXXXXXXXXXXXXXXXXXXXXXXXXXXXXXXXDPFQLPXXXXXSXXLRDFAXXXXXXXXXXYXXAXXXXXXXXXXXXXXXXXXXXXXXXXXXXXXXXXXXXXXXXXXXXXXXXXXXXXXXXXXXXXXXXXXDXXXXXXXXXXXXXXXXXXXXXXXXXXXXXXXXXXXXXXXXXXXXXXXXXXXXXXXXXXXXXXXXXXXXXXXXXXXXXXXXXXXXXXXEXXXRXKSIYXVYLDXXXXXXXXXXXXXXXXXXXXXXXXXXXXXXXXXXXXXXXXXXXXXXXXXNXXXXXXXXXXXXXXXXXXXXXXXXXSXXXXXXXXXXXXXXXXXXXXXXXXXXXXXXXXXXXXXXXXXXXXXXXXXXXXXXXXXXXXXXQXXXXXQXXXXXXXXXXXXXXQXXXXXXXXXXXXXXXXXXXXXXXXXXXXXXXHPQXXEXIXELPTPXXLXXSXSXHSLTSFKXXXXXXXXLXXXXXAXXNGXXLNPXDHPEMFXXXXXXXXXXXXXXXXXXXXXXXXXXXXXXXXXXPLPXXLRQSVVMTNPXXLSXXXXXKPAGSXRXXXXXXXXXXXXXXLXXXXXXXXXXXXXXXXXXRVSGXLDXTDXXQPPSVGXILPXXGSXXDLRKQLGXSHNY

SEQ ID NO: 64328 - protein, 41 aa, Artificial sequence
  protein pattern
  Variant (5)..(5): Xaa in position 5 is Ile or Leu
  Variant (7)..(8): Xaa in position 7 to 8 is Asp or Glu
  Variant (11)..(11): Xaa in position 11 is Ile or Val
  Variant (12)..(12): Xaa in position 12 is Leu, Met or Val
  Variant (13)..(13): Xaa in position 13 is any amino acid
  Variant (15)..(15): Xaa in position 15 is Ala or Pro
  Variant (17)..(17): Xaa in position 17 is Met or Val
  Variant (19)..(19): Xaa in position 19 is Glu, Gly or Thr
  Variant (23)..(24): Xaa in position 23 to 24 is any amino acid
  Variant (25)..(25): Xaa in position 25 is Ala or Gly
  Variant (26)..(26): Xaa in position 26 is Asn or Ser
  Variant (27)..(27): Xaa in position 27 is Asn, Gln or Thr
  Variant (28)..(28): Xaa in position 28 is Asp or Glu
  Variant (36)..(36): Xaa in position 36 is any or no amino acid
  Variant (38)..(38): Xaa in position 38 is any or no amino acid
RVSGXLXXTDXXXPXSXGXILPXXXXXXDLRKQLGXSXHNY

SEQ ID NO: 64329 - protein, 39 aa, Artificial sequence
  protein pattern
  Variant (2)..(3): Xaa in position 2 to 3 is any amino acid
  Variant (6)..(7): Xaa in position 6 to 7 is any or no amino acid
  Variant (10)..(10): Xaa in position 10 is Gly or Val
  Variant (12)..(12): Xaa in position 12 is Ile or Val
  Variant (13)..(13): Xaa in position 13 is Gly, Ile or Val
  Variant (14)..(14): Xaa in position 14 is Ile or Leu
  Variant (15)..(15): Xaa in position 15 is Gly or Val
  Variant (17)..(17): Xaa in position 17 is Ala, Ile, Leu or Val
  Variant (18)..(18): Xaa in position 18 is any amino acid
  Variant (19)..(19): Xaa in position 19 is Ile or Val
  Variant (21)..(22): Xaa in position 21 to 22 is any amino acid
  Variant (24)..(24): Xaa in position 24 is Trp or Tyr
  Variant (25)..(26): Xaa in position 25 to 26 is Lys or Arg
  Variant (27)..(27): Xaa in position 27 is Gly, Asn or Ser
  Variant (29)..(29): Xaa in position 29 is Lys or Arg
  Variant (31)..(31): Xaa in position 31 is Ala or Glu
  Variant (32)..(32): Xaa in position 32 is any amino acid
  Variant (35)..(35): Xaa in position 35 is any amino acid
  Variant (38)..(38): Xaa in position 38 is Asp or Glu
VXXAVXXPVXVXXXXLXXXLXXVXXXXKXEXXEDXDPXF

SEQ ID NO: 64330 - protein, 31 aa, Artificial sequence
  protein pattern
  Variant (2)..(2): Xaa in position 2 is any amino acid
  Variant (4)..(4): Xaa in position 4 is His or Tyr
  Variant (5)..(5): Xaa in position 5 is any amino acid
  Variant (16)..(16): Xaa in position 16 is any amino acid
  Variant (17)..(17): Xaa in position 17 is Asp or Glu
  Variant (19)..(19): Xaa in position 19 is Ser or Thr
  Variant (20)..(21): Xaa in position 20 to 21 is any amino acid
  Variant (22)..(22): Xaa in position 22 is Pro or Thr
  Variant (23)..(23): Xaa in position 23 is any amino acid
  Variant (24)..(24): Xaa in position 24 is His or Tyr
  Variant (30)..(30): Xaa in position 30 is Phe or Leu
PXPXXLRQSVVMTNPXXLXXXXXXKPAGSXR

SEQ ID NO: 64331 - protein, 36 aa, Artificial sequence
  protein pattern
  Variant (4)..(4): Xaa in position 4 is Asn or Thr
  Variant (5)..(5): Xaa in position 5 is any amino acid
  Variant (7)..(7): Xaa in position 7 is Ala, Asn or Thr
  Variant (9)..(9): Xaa in position 9 is Asp or Gly
  Variant (10)..(10): Xaa in position 10 is Asp or Glu
  Variant (15)..(15): Xaa in position 15 is Ala or Thr
  Variant (16)..(16): Xaa in position 16 is any amino acid
  Variant (17)..(17): Xaa in position 17 is Phe or Leu
  Variant (18)..(18): Xaa in position 18 is Ala or Ile
  Variant (19)..(19): Xaa in position 19 is any amino acid
  Variant (21)..(21): Xaa in position 21 is any amino acid
  Variant (23)..(24): Xaa in position 23 to 24 is any amino acid
  Variant (28)..(28): Xaa in position 28 is Ala or Ser
  Variant (31)..(33): Xaa in position 31 to 33 is any or no amino acid
  Variant (35)..(36): Xaa in position 35 to 36 is Pro or Gln
HPQXXEXIXXLPTPXXXXXSXSXXSLTXFKXXXKXX

SEQ ID NO: 64332 - protein, 19 aa, Artificial sequence
  protein pattern
  Variant (2)..(2): Xaa in position 2 is any amino acid
  Variant (3)..(3): Xaa in position 3 is Ile or Leu
  Variant (6)..(6): Xaa in position 6 is any or no amino acid
  Variant (8)..(8): Xaa in position 8 is any or no amino acid
  Variant (12)..(12): Xaa in position 12 is Ile, Met or Val
  Variant (19)..(19): Xaa in position 19 is Phe or Tyr
AXXNGXTXLNPXDHPEMFX

SEQ ID NO: 64333 - protein, 19 aa, Artificial sequence
  protein pattern
  Variant (2)..(2): Xaa in position 2 is Asp or Asn
  Variant (3)..(3): Xaa in position 3 is Ile or Val
  Variant (4)..(4): Xaa in position 4 is any amino acid
  Variant (6)..(6): Xaa in position 6 is Ile or Met
  Variant (11)..(11): Xaa in position 11 is any amino acid
  Variant (16)..(16): Xaa in position 16 is Gln or Arg
  Variant (17)..(17): Xaa in position 17 is Ala, Asn or Ser
  Variant (18)..(18): Xaa in position 18 is any amino acid
  Variant (19)..(19): Xaa in position 19 is Asn or Thr
EXXXRXKSIYXVYLDXXXX

SEQ ID NO: 64334 - protein, 13 aa, Artificial sequence
  protein pattern
  Variant (2)..(2): Xaa in position 2 is Glu or Thr
  Variant (5)..(5): Xaa in position 5 is any amino acid
  Variant (7)..(7): Xaa in position 7 is any amino acid
  Variant (9)..(9): Xaa in position 9 is Glu or Gln
  Variant (10)..(10): Xaa in position 10 is any amino acid
  Variant (12)..(12): Xaa in position 12 is Ser or Thr
CXGSXQXCXXPXD

SEQ ID NO: 64335 - protein, 18 aa, Artificial sequence
  protein pattern
  Variant (2)..(2): Xaa in position 2 is any amino acid
  Variant (5)..(8): Xaa in position 5 to 8 is any amino acid
  Variant (9)..(9): Xaa in position 9 is Asp, Glu, Asn or Ser
  Variant (10)..(10): Xaa in position 10 is Asp, Pro or Ser
  Variant (11)..(11): Xaa in position 11 is Asp, Gly or Ser
  Variant (12)..(12): Xaa in position 12 is Phe or Leu
  Variant (13)..(13): Xaa in position 13 is Asp or Gly
  Variant (14)..(14): Xaa in position 14 is any amino acid
  Variant (16)..(16): Xaa in position 16 is any amino acid
  Variant (17)..(17): Xaa in position 17 is Leu or Val
RXFAXXXXXXXXXXYXXA

SEQ ID NO: 64336 - DNA, 1449 bp, Saccharomyces cerevisiae
  CDS (1)..(1449)
atgctaaggaacggcgttcagaggttgtactctaacatcgctagaaccgataattttaagctttcgtcactagcgaatggactgaaagtggcgacatcaaatactcctggacactttagtgccttaggcctatacatcgacgcaggatcacggtttgaaggtaggaatttgaagggttgtacacatatcttggatagactagcattcaaatcaaccgaacacgtcgagggccgagcaatggcagagacgttggagttactgggtgggaattaccagtgtacctcgtctagagaaaatttgatgtatcaggcttctgtgttcaaccaggatgtgggtaaaatgcttcaattaatgtcagaaactgtgaggttccctaagattactgagcaagaactgcaagaacagaagctgtcggcagagtatgaaatcgatgaagtttggatgaagccagaattggtattacctgagctgttgcacacagcagcatactccggagaaactttggggtcccctttaatctgccctagagagctcattccttctatttctaaatactacttattggactacagaaataaattctacaccccagaaaatactgttgcggcatttgttggtgttcctcacgaaaaggcattagagcttacagaaaagtatctcggtgactggcaatctacacaccctccgatcaccaaaaaagttgcccaatatacgggcggggaaagttgtattccaccagcaccagtgtttgggaatttaccagaattattccacatccagatcggatttgaaggtctccctatagatcatccagacatttatgctttagcaacattacaaactttacttggaggtggtggttctttcagtgctggtgggccaggaaaggggatgtattctcgtttgtatacccacgttttgaaccagtattactttgttgaaaattgtgttgcgttcaaccattcttattcggattctggtattttcggtatttcattatcttgtataccgcaggcagctcctcaagcggttgaggtaattgcacagcaaatgtataatacatttgctaataaggatttgaggttaactgaagacgaagtctccagggccaagaatcagttgaagtcttcactactaatgaacctagagtctaaactggtagaattggaagatatgggcagacaagttctcatgcatggtcgcaaaatcccagtcaacgaaatgataagtaagatcgaagatttgaagccagatgatatctcacgtgttgccgaaatgatatttacgggaaatgtaaataatgctggcaatggtaagggtagagctactgttgtaatgcaaggagacagaggatcctttggagatgtggaaaatgtactgaaggcatatggattgggtaacagctcctcctccaaaaacgatagtcccaagaagaagggttggttttga

SEQ ID NO: 64337 - protein, 482 aa, Saccharomyces cerevisiae
MLRNGVQRLYSNIARTDNFKLSSLANGLKVATSNTPGHFSALGLYIDAGSRFEGRNLKGCTHILDRLAFKSTEHVEGRAMAETLELLGGNYQCTSSRENLMYQASVFNQDVGKMLQLMSETVRFPKITEQELQEQKLSAEYEIDEVWMKPELVLPELLHTAAYSGETLGSPLICPRELIPSISKYYLLDYRNKFYTPENTVAAFVGVPHEKALELTEKYLGDWQSTHPPITKKVAQYTGGESCIPPAPVFGNLPELFHIQIGFEGLPIDHPDIYALATLQTLLGGGGSFSAGGPGKGMYSRLYTHVLNQYYFVENCVAFNHSYSDSGIFGISLSCIPQAAPQAVEVIAQQMYNTFANKDLRLTEDEVSRAKNQLKSSLLMNLESKLVELEDMGRQVLMHGRKIPVNEMISKIEDLKPDDISRVAEMIFTGNVNNAGNGKGRATVVMQGDRGSFGDVENVLKAYGLGNSSSSKNDSPKKKGWF

SEQ ID NO: 64338 - DNA, 1584 bp, Glycine max
  CDS (1)..(1584)
atgtccctcaaccgcctcctttccgcggcccgccgctccgaccggcgggcctccgccctctcctccctccgatccctctccgcctccaccgccgtggcccccgccgcctcctcccctcccgcccctcctccccccaccgccatgatctatgaccgcgctgccgaggccgtgaagtccaagctccggctgctcgagaaccccgacccccgcttcctcaagcacgggtccccccggccgaccctctcggaccacacgcgcatcctctccgcccccgagacgcgcgtgaccacgctccccaacggcctccgcatcgccaccgagtccaccctcagcgcccgcaccgccaccgtcggcgtctggatcgacgccgggtctcggttcgagaccgaggagactaacggcaccgcgcacttcctcgagcacatgatcttcaagggcaccgagaggcgcaacgcgcgtgagctcgaggaagagatcgagaacatgggaggacacctcaacgcctacacctccagggagcagaccacctattatgccaaggtcaccgacaaggatgtcccccaggcccttgacatcctcgccgacatcctccagaactcccgattcgaggaaaaccgcatcagccgcgagcgcgaagtcattctccgggagatggaggaggttgagggtcaaactgaggaagtgatctttgatcacctacacgccaccgcattccagtacactcctcttggaagaaccattcttggacctgctcagaacattaagacaatcaccaaagcccatttgcagagctacattcagacacattatgcggctcctaggatggtgatagctgcatctggagctgtcaagcatgaagacattgttgaacaagtgaaaaagttgtttaccaagttgtcaacagatcccactaccacatctcaattagttgctaaagagccagctatttttactggttctgaggttagaatgcttgatgatgatattcccctagcacaatatgctgtggcttttgaaggggcatcttggaaggatcccgattcaattcctctcatggtcatgcaagctattttgggttcttggaataagacagcaggaggtggaaaacacatgggttcggagttagcacagcgaattggcattaatgaagttgctgagagcattatggctttcaacaccaattacaaggacacgggtctttttggtgtttatgctgttgccaagcctgatagcttggatgatttgtcttatgctataatgtatgagacaaccaagttggcttatcgcgtttcagaagatgatgttacacgtgctcgtaatcagttgaaatcttcactgctactacacatagatggaacaagcccggtggctgaagatattggccgtcagttactcacatatggtcgaagaatcccgtttgctgaattgtttgctagaattgatgctgttgatgccagtacgattaaacgtgttgccaatcgatttatctatgacaaggatgttgttattgctgccatgggtcctattcagcgtttgcctgattacaactggttcagacgtagaacctactggaaccgttactag

SEQ ID NO: 64339 - protein, 527 aa, Glycine max
MSLNRLLSAARRSDRRASALSSLRSLSASTAVAPAASSPPAPPPPTAMIYDRAAEAVKSKLRLLENPDPRFLKHGSPRPTLSDHTRILSAPETRVTTLPNGLRIATESTLSARTATVGVWIDAGSRFETEETNGTAHFLEHMIFKGTERRNARELEEEIENMGGHLNAYTSREQTTYYAKVTDKDVPQALDILADILQNSRFEENRISREREVILREMEEVEGQTEEVIFDHLHATAFQYTPLGRTILGPAQNIKTITKAHLQSYIQTHYAAPRMVIAASGAVKHEDIVEQVKKLFTKLSTDPTTTSQLVAKEPAIFTGSEVRMLDDDIPLAQYAVAFEGASWKDPDSIPLMVMQAILGSWNKTAGGGKHMGSELAQRIGINEVAESIMAFNTNYKDTGLFGVYAVAKPDSLDDLSYAIMYETTKLAYRVSEDDVTRARNQLKSSLLLHIDGTSPVAEDIGRQLLTYGRRIPFAELFARIDAVDASTIKRVANRFIYDKDVVIAAMGPIQRLPDYNWFRRRTYWNRY

SEQ ID NO: 64340 - DNA, 1536 bp, Glycine max
  CDS (1)..(1536)
atgtacagaaacgctgcttcacgtcttagggccatcaaggcccgttcgtgcagcagcagcagcagggtacctgccagtgccagatttgcaagttccgttgccacgcaacaatcctcttcttctggtttgggtggtttatttggatggctcactggagaccgaaccagttctttaccatctctgggttttccacttccaggcgttacacttccccctccattgcctgattatgttgcgccgggtaaaactattattactacactcccaaatggactcaaagtggcctctgaaacatcaccgagtcccactgcgtcaataggtttatatgtagattgtggttcaatatatgagagtccgataagttttggggctacgcatctgcttgaacgaatggctttcaagaccactagaaaccggagtcactttcgggtagttcgtgaggtagaggcaattggtggcaatgtgcaggcctcagcttctagagagcagatgggttacacttttgatgctttgaagacctatgttcctgaaatggtggaactgcttgttgattgtgtcaggaatcctgttttccttgattgggaggttaacgagcagcttctgaaagtgaaggctgagattggtgaagcttccaaaaatcctcaagatttacttttggaagcaattcattctgctggtttttctggtgccttggcaaatcctcttttagcttcagaatcagcagtaaatagactaaatagtacaattctggaggagtttgttgctgagaactatacggcacctcggatagtacttgcagcatctggtgttgaacatgaggaattgttatctattgcagaacctcttttgtctgatctacccagtgtcccgcgtccagaggagccaaaatcagtgtatactggtggtgattatagatgtcaaaaggaatcagggaggacccattttgctctagcatttgaacttcctggtggctggcataagttgaaggatgctatggttttgactgttcttcagatgctattgggaggcggtggatcattctcagctggtggacctggtaaagggatgtattcacggctatatcaaaatgttctgaatgaatatccacaagttcatgaaatttcagcattcaacaatatttacaatgacactggcatttttggtatccaagttacaacaggctcagattttgtatcaaaagccattgatatagctgctaatgagattcttgctgttgctactcctggacaagttgaccaggtacagctggatcgagccaaacaggctaccaaatctgcaattttgatgaatttggaatcaagaatggttgtttcagaagatataggaagacaaattttgacatatggtgagaggaaacctgtggaggatttcttgaaggcagtggatgaagtaacctcgaaggatatcacttcaatttcgcgaaagctcatttgttctcctctcacaatggcatcatatggagatgttctctatgttccaagctatgaatcagtgagtctcaaattccgtgcctaa

SEQ ID NO: 64341 - protein, 511 aa, Glycine max
MYRNAASRLRAIKARSCSSSSRVPASARFASSVATQQSSSSGLGGLFGWLTGDRTSSLPSLGFPLPGVTLPPPLPDYVAPGKTIITTLPNGLKVASETSPSPTASIGLYVDCGSIYESPISFGATHLLERMAFKTTRNRSHFRVVREVEAIGGNVQASASREQMGYTFDALKTYVPEMVELLVDCVRNPVFLDWEVNEQLLKVKAEIGEASKNPQDLLLEAIHSAGFSGALANPLLASESAVNRLNSTILEEFVAENYTAPRIVLAASGVEHEELLSIAEPLLSDLPSVPRPEEPKSVYTGGDYRCQKESGRTHFALAFELPGGWHKLKDAMVLTVLQMLLGGGGSFSAGGPGKGMYSRLYQNVLNEYPQVHEISAFNNIYNDTGIFGIQVTTGSDFVSKAIDIAANEILAVATPGQVDQVQLDRAKQATKSAILMNLESRMVVSEDIGRQILTYGERKPVEDFLKAVDEVTSKDITSISRKLICSPLTMASYGDVLYVPSYESVSLKFRA

SEQ ID NO: 64342 - DNA, 1482 bp, Glycine max
  CDS (1)..(1482)
atgtacagagcagtagcttcacgtctcacccttcccaagggaaatgggagaaccttgggagcctccagaggtttattcaactggcttactggggaatcttcaaatcctcttcctccccttgacaccccacttagaggggtttccctgccaccttcattgccagattatgttgaaccaagcaagaccaagatcacaactctccccaatggtctaaaaattgcatcagaaacctcaccaaaccctgctgcctcaattgggttatatgttgactgtggttccctctatgagacgccattgtcaagcggggcgtcacacctgttagagaaaatgtctttcaagagcacggcaaaccgaagtcactttcgtgttgtaagggaagtggaagcagttggtggcaatgtaggagcctcggcctctcgggagcaaatgggctacacttttgatgctctaaaaacttatgttccacaaatgattgagttgctggttgactgcgtaaggaacccggccttcttagattgggaggtcaatgaagagcttcggaaggtgaaatcagaacttggagaactatcaaacaatccccaaggcttacttttggaggcagttcactctgctggttattctggagcattggctaatccacttttggcttctgaatcagcactgaacacattaaatagctcccttttagaggaatttgttgctgagaattatactgcatctagaatggtacttgcagcatctggggttgagcatgaagaacttttatctgtcgctgaaccacttctctctgatctaccaagtgttccctgtcctgaagaaccaaaatctgaatatgttggtggagatttccgtcgtcaagaactgtcacaagggcaggttgcacatgtagctattgcttttgaagtgcctggtggctggaaaaaagagaaagaagctattgttttgactgttctacagatgcttatgggaggaggtgggtcattctcagccggagggcctgggaaagggatgcactcaaggctgtttcttcgtgtcttgaatgaacatcaacagattcattctttttctgcattcaacagtctcttcaacaatacagggttatttggcatctatgcaagcacgggctctgattttgtggcaaaagctgtggatttagcagccagagaattaattgcaattgcatcaccaggacaagtttcacaggtacagcttgaccgtgctaaggtatccacgaagtctgcagttctaatgaatttggagtccagaatgattgcatcagaggatataggaaggcagatattgacttatggagaaaggaagccactggagcagttctttaaggcagtagatggaatcactttgaatgatatcactaaaatttctcagaagattatttcctcacctctcactatggcatcctatggggatgtattcaatgtccccagttacgaatccgttagcaggaagttccatgcaaaatga

SEQ ID NO: 64343 - protein, 493 aa, Glycine max
MYRAVASRLTLPKGNGRTLGASRGLFNWLTGESSNPLPPLDTPLRGVSLPPSLPDYVEPSKTKITTLPNGLKIASETSPNPAASIGLYVDCGSLYETPLSSGASHLLEKMSFKSTANRSHFRVVREVEAVGGNVGASASREQMGYTFDALKTYVPQMIELLVDCVRNPAFLDWEVNEELRKVKSELGELSNNPQGLLLEAVHSAGYSGALANPLLASESALNTLNSSLLEEFVAENYTASRMVLAASGVEHEELLSVAEPLLSDLPSVPCPEEPKSEYVGGDFRRQELSQGQVAHVAIAFEVPGGWKKEKEAIVLTVLQMLMGGGGSFSAGGPGKGMHSRLFLRVLNEHQQIHSFSAFNSLFNNTGLFGIYASTGSDFVAKAVDLAARELIAIASPGQVSQVQLDRAKVSTKSAVLMNLESRMIASEDIGRQILTYGERKPLEQFFKAVDGITLNDITKISQKIISSPLTMASYGDVFNVPSYESVSRKFHAK

SEQ ID NO: 64344 - DNA, 1530 bp, Glycine max
  CDS (1)..(1530)
atgtacaggaacgctgcttcacgtcttagggtcatcagtgcccgttcgtgcagcagcagcaggatacctgccagtgccagattttcaagttccgttgccacacaacaatcctcttctggtttgggtggtttatttggatggctcactggagaccgatccagttctttaccatctctggatttcccgcttccgggcgttacacttcccccttcattgcctgattttgttgcgcccggaaaaactattattactacactcccaaatggactcaaagtggcctctgaaacatcaccgactcccactgcgtcggttggcttatatgtagattgtggttcaatatacgagactccgataagttttggggctacacatctgctagaacgaatggctttcaagaccactagaaaccggagtcactttcgggttgttcgtgaggtagaggcaattggtggcaatgtgcaggcctccgcttctagagagcagatgggttacacttttgatgccttgaaaacctatgttcctgaaatggtcgagctacttgttgattgtgtcaggaaccctgttttccttgattgggaggttaacgagcagcttctgaaagtgaaggctgagattggtgaagcttccaaaaatccccaagacttgcttttggaagcaattcattctgctggtttttctggtgccttggcaaatcctcttttagcttcagaatcagctctaaatagactaaatggtacaattctggaggagtttgttgctgagaactatacagcacctcggatagtacttgcagcatctggtgttgaacatgaggaattgttatctgttgcagaacctctcttgtctgatctacccagtgtcccacgtctagaggagccaaaatcagtgtatactggtggtgattatagatgtcaaagtgaatcagggaggacccattttgctctagcatttgaacttcctggtggctggcataagttgaaggatgctatggttttgactgttcttcagatgctattgggaggtggtggatcattctcagctggtggacctggtaaagggatgtattcacggctatatctcaatgttctgaatgaatatccacaagttcattcaatttcagcattcaacaatatttacaatggcactggtatttttggtatccaagttacaacaggctcagattttgtatcaaaagccattgatatagctgctaatgagattcttggtgttgctactcctggacaagttgaccaggcacagcttaatcgagccaaacaggctaccaaatctgcaattttgatgaatttggaatcaagaatggttgtttcagaagatataggaagacaaattttgacatatggtgagaggaaacctgtggaggatttcttgaaggcagtggatgaagtaacctcaaaggatatcacttcaatttcgcaaaaactcatttcttctcctctcacaatggcatcatatggagatgttctctatgttccaagctatgaatcagtgagcctcaagttccgttcctaa

SEQ ID NO: 64345 - protein, 509 aa, Glycine max
MYRNAASRLRVISARSCSSSRIPASARFSSSVATQQSSSGLGGLFGWLTGDRSSSLPSLDFPLPGVTLPPSLPDFVAPGKTIITTLPNGLKVASETSPTPTASVGLYVDCGSIYETPISFGATHLLERMAFKTTRNRSHFRVVREVEAIGGNVQASASREQMGYTFDALKTYVPEMVELLVDCVRNPVFLDWEVNEQLLKVKAEIGEASKNPQDLLLEAIHSAGFSGALANPLLASESALNRLNGTILEEFVAENYTAPRIVLAASGVEHEELLSVAEPLLSDLPSVPRLEEPKSVYTGGDYRCQSESGRTHFALAFELPGGWHKLKDAMVLTVLQMLLGGGGSFSAGGPGKGMYSRLYLNVLNEYPQVHSISAFNNIYNGTGIFGIQVTTGSDFVSKAIDIAANEILGVATPGQVDQAQLNRAKQATKSAILMNLESRMVVSEDIGRQILTYGERKPVEDFLKAVDEVTSKDITSISQKLISSPLTMASYGDVLYVPSYESVSLKFRS

SEQ ID NO: 64346 - DNA, 1518 bp, Glycine max
  CDS (1)..(1518)
atgtacagagttgcagcatcatcattcagaaggcatctcaagggccatggaggtaacttgggatccactaggttttcaacttcagccgcggtagctgcaaggacttcatcaggtggtttgtttagctggcttactggagagcgttctagtgctcttcctcctctggacatgccccttggtggtgttgctctccccgattcacttccagattacgtcgaacaaagcaagaccaagatcacaacactccccaatggactcaaaattgcgtcagagacctctcctaaccctgcagcttcaattgggttatatcttgactgtggttccatctatgaaacgccattgtcaagcggggtttcacacttgctagagagaatggctttcaaaagcacaacaaaccgtagtcactttcgtattgtaagggaagtagaagcaattggtggaaatataggagcctcagcctctcgggagcaaatgggttatacatttgatgcattaaagacctatgctccacaaatggttgaattactggttgactgtgtaaggaacccagccttcttggattgggaagtcaatgaagagcttcggaaggtgaaagcagagcttggagaactctctaacaatccccaaggcttgcttttggaagcaattcactctgctggttattctggtgcattggcttttcctcttttggctcctgaagcagcactgaacagattggacggccccaatttagaggaatttgttgttgagaattacacagcacctagaatggtacttgcagcatctggggttgagcacgaagagcttctatctattgctgagccacttctctctgatctaccaaaggttccccgtcctgaagaaccaaagtctatctatgttgggggtgattttcgccgtcatggtgaagggggtacacatgttgctattgcttttgaagtgcctggtggctggcaaaaagagaaagatgctatagctttaactgttttacagatgcttatgggaggaggtggatcattctcagcaggggggcctggaaaagggatgcactcaaggctatatcttaatgtgctgaatgaatatcaacagattcaatctttttctgcattcaacagtatcttcaataatacaggactgtttggcatctatgcaagcactagccctgattttgtgccaaaaactgttgatatagcagccaaagaactaatagcaattgcttcccctggacaagttacacaggtacagcttgaccgagccaaaaaatccacaaagtctgcagttctaatgaatctggaatctagaatgattgcatcagaagatataggaaggcagattttgacttatggagaaaggaagcctgtggaacagttcttgaaggccgtagatgaaatcacgttgaatgatatcactaaaattgctcagaagattatttcctcacctttgacgatggcatcatatggggatgtcatgaatgtgccaagttatgaatctgttaacagcaagttccatgcaaaatga

SEQ ID NO: 64347 - protein, 505 aa, Glycine max
MYRVAASSFRRHLKGHGGNLGSTRFSTSAAVAARTSSGGLFSWLTGERSSALPPLDMPLGGVALPDSLPDYVEQSKTKITTLPNGLKIASETSPNPAASIGLYLDCGSIYETPLSSGVSHLLERMAFKSTTNRSHFRIVREVEAIGGNIGASASREQMGYTFDALKTYAPQMVELLVDCVRNPAFLDWEVNEELRKVKAELGELSNNPQGLLLEAIHSAGYSGALAFPLLAPEAALNRLDGPNLEEFVVENYTAPRMVLAASGVEHEELLSIAEPLLSDLPKVPRPEEPKSIYVGGDFRRHGEGGTHVAIAFEVPGGWQKEKDAIALTVLQMLMGGGGSFSAGGPGKGMHSRLYLNVLNEYQQIQSFSAFNSIFNNTGLFGIYASTSPDFVPKTVDIAAKELIAIASPGQVTQVQLDRAKKSTKSAVLMNLESRMIASEDIGRQILTYGERKPVEQFLKAVDEITLNDITKIAQKIISSPLTMASYGDVMNVPSYESVNSKFHAK

SEQ ID NO: 64348 - DNA, 1587 bp, Glycine max
  CDS (1)..(1587)
atgtccctcaaccgcctcctctccgtggcccgccgctccgatcggcgggcctccgccctctcctccctccgatccctctctgcctccgccgccgctgtggctccctccgcctcctcccctcccgcccctcttccccccaccgccatgatctacgaccgcgccgccgaggccgtgaagtccaagctccggcagctcgagaaccccgacccccgcttcctgaagcatgggtccccccggcccaccctctctgaccacacgcgcatcctgtcctcccccgagacgcgcgtgaccacgcttcccaacggcctccgcatcgccaccgagtccaccctcagcgcccgcaccgccaccgtcggcgtctggatcgacgccggttcgcggttcgagaccgaggagaccaacggcaccgcacacttcctcgagcacatgatctttaagggcaccgagaggcgcaacgcgcgtgagctcgaggaagagattgagaacatgggaggacacctcaacgcctacacctcaagggagcaaaccacctactacgccaaggtcaccgacaaggacgtcccccaggccctcgacatcctcgccgacatcctccagaactcccgattcgaggaaactcgcatcaaccgcgagcgcgatgtcattctccgggagatggaggaggttgagggtcaaactgaggaagtgatttttgaccacctacacgctactgcattccagtacactcctcttggaagaaccattcttggacctgctcagaacattaagacgatcaccaaagctcatctgcagagttacattcagacacattacacagctcctaggatggtgatagctgcatctggagctgtcaagcatgaagacattgttgagcaagtgaaaaagttgtttactaagttgtcaacagatcccactaccacatctcaattagttgctagagagccggctatttttactggttctgaggttagaatgcttgatgatgatattcccctagctcaatttgctgtggcttttgaaggggcatcttggaaggatccggattcaattcctctcatggtcatgcaagctatgttgggttcttggaataaggcagcaggaggtggaaaacacatgggttctgagttagcacagcgaattggcattaatgaagttgccgagagcattatggctttcaacaccaattacaaggacacaggtctttttggtgtttatgccgttgccaagcctgattgcttggatgatttgtcctatgcaataatgtatgagacaaccaagttggcttatcgtgtttcagaagatgatgttacacgtgctcgtaatcagttgaaatcttcactgctactacacatagatggaacaagcccagtggctgaagatattggtcgtcagctactcacatatggtcgaagaatcccatttgctgaattgtttgctagaattgatgctgttgatgccagtacaattaaacgtgttgcgaaccgatttatctatgacaaggatgttgttattgctgccacgggtcctattcagcgtttgcctgattacaactggttccgacgcagaacctactggaaccgctattag

SEQ ID NO: 64349 - protein, 528 aa, Glycine max
MSLNRLLSVARRSDRRASALSSLRSLSASAAAVAPSASSPPAPLPPTAMIYDRAAEAVKSKLRQLENPDPRFLKHGSPRPTLSDHTRILSSPETRVTTLPNGLRIATESTLSARTATVGVWIDAGSRFETEETNGTAHFLEHMIFKGTERRNARELEEEIENMGGHLNAYTSREQTTYYAKVTDKDVPQALDILADILQNSRFEETRINRERDVILREMEEVEGQTEEVIFDHLHATAFQYTPLGRTILGPAQNIKTITKAHLQSYIQTHYTAPRMVIAASGAVKHEDIVEQVKKLFTKLSTDPTTTSQLVAREPAIFTGSEVRMLDDDIPLAQFAVAFEGASWKDPDSIPLMVMQAMLGSWNKAAGGGKHMGSELAQRIGINEVAESIMAFNTNYKDTGLFGVYAVAKPDCLDDLSYAIMYETTKLAYRVSEDDVTRARNQLKSSLLLHIDGTSPVAEDIGRQLLTYGRRIPFAELFARIDAVDASTIKRVANRFIYDKDVVIAATGPIQRLPDYNWFRRRTYWNRY

SEQ ID NO: 64350 - DNA, 1746 bp, Aspergillus fumigatus
  CDS (1)..(1746)
atgcgtcgctccgtcttgcgcgccatcgagtctgcgaagcctctcgctcgcgtgcctcgttcagcctccagaagctttgctacgctcaatgagtccaaggaccctgctgagctagaccaaatcaccacattgcctaatggaatccgcgtcgccacggaatccttacccggaccctttgccggcgttggtgtctacgtcgatgcgggatcccggtacgaagacgagagcctacgaggcgtgagccacatcatggaccgactagccttcaaatcgaccaagtcccgaacaagcgatgagatgctggagactcttgagagtctaggagggaacatccagtgcgcttcgtctcgggagtcgttgatgtaccagtcagccagtttcaactcggcagttcccgcgaccctgggccttctggcggagacaatccgtgaccctctgatcactgatgaggaagttctccagcagttggctacggcagagtacgagatcaatgagatttgggccaaacctgaacttatcctaccagagctggtgcatatggcggcctacaaggacaacacattagggaacccgctactctgtcctcgtgagagattggaagagattaacaaggctgttgttgagagatacagggaggtctttttcaagccggagaggatggttgttgcctttgccggtgtgccgcacgaggaggctgttaagctaacagaacaatactttggtgatatgaaggccgcaaatcaggccaaagggcccgtattatccgggactggaattgagacgaccttgtcagattcagagacagcagctcaggaaggacaggtgccgaccgtccctcaattcacaccatcgtcgacaatcaccacaaccccaacctcaaaaacccagtcagtcctttccaggcttcctttcctgaagaacctctctacaaccgcgtcgaagcctgcatctgtggcgccccttgatccttcgttggtgcagccatcatcgctggacttgacaagaccttctcactacactggtggtttcctctctcttcccccgattcccccaccagcaaaccccatgcttcccagactgagctacatacatcttgcctttgaagctctccctatctcgagccctgacatctacgccctcgccacccttcagactttgctcggcggcggcgggtctttctccgctggcggtcccggcaagggtatgtattctcgtctctatacaaatgtgctgaaccagcacggatgggtggaaagttgcatcgctttcaatcacagctacacagacagtggaatcttcggtatctccgcctcgtgcagtcctacccgtacgaccgagatgcttgaagtcatgtgccgcgaactgcaggcactgactctcgacacgggctacagcgccttgcagccacaggaggtcaaccgtgcgaagaaccaactgcgctcttcactgttgatgaacttggaatcccgcatggtggaattggaggatctcggccgtcaagtccaggttcatggccataaggttggcgtcaaggagatgtgcgaccgcatcgaggctctgaccgtggatgatctccgtcgcgtggcccgccatgtatttggaggccatgttcagaacaagggccagggcaccggtatcccgacggtggtcttgcaggaaggtgagctggaagggtacaaacttcgtcctttcccatgggaggaaatccaagaacggattgcacggtggaagctgggaagaagatag

SEQ ID NO: 64351 - protein, 581 aa, Aspergillus fumigatus
MRRSVLRAIESAKPLARVPRSASRSFATLNESKDPAELDQITTLPNGIRVATESLPGPFAGVGVYVDAGSRYEDESLRGVSHIMDRLAFKSTKSRTSDEMLETLESLGGNIQCASSRESLMYQSASFNSAVPATLGLLAETIRDPLITDEEVLQQLATAEYEINEIWAKPELILPELVHMAAYKDNTLGNPLLCPRERLEEINKAVVERYREVFFKPERMVVAFAGVPHEEAVKLTEQYFGDMKAANQAKGPVLSGTGIETTLSDSETAAQEGQVPTVPQFTPSSTITTTPTSKTQSVLSRLPFLKNLSTTASKPASVAPLDPSLVQPSSLDLTRPSHYTGGFLSLPPIPPPANPMLPRLSYIHLAFEALPISSPDIYALATLQTLLGGGGSFSAGGPGKGMYSRLYTNVLNQHGWVESCIAFNHSYTDSGIFGISASCSPTRTTEMLEVMCRELQALTLDTGYSALQPQEVNRAKNQLRSSLLMNLESRMVELEDLGRQVQVHGHKVGVKEMCDRIEALTVDDLRRVARHVFGGHVQNKGQGTGIPTVVLQEGELEGYKLRPFPWEEIQERIARWKLGRR

SEQ ID NO: 64352 - DNA, 1668 bp, Drosophila pseudoobscura pseudoobscura
  CDS (1)..(1668)
atgaacgcgcgaggcatcggcatgctgaaaacgctcaagcaatcctggcgcacatttccacgtcgtttcgccaccaaaattacgaaagttggcagcgatgaaattggcagtggcactggcatagggagaatcactggcggcgtgcgagacaaagatggccacaacaaggttaatacgccgtcgaagcaaatcgtaacgcaccttccgccactaacagaacccctgccaaacatgccggaggctgtatacgcagagccaatggctgagagtgccgccacaaaggtaacgaccctttccaatggactgcgcattgcctcggagccgcgttacggacaattctgtactgtcggactggttataaactcgggcccacgctatgaggtggcctatccgggaggtgtgtcgcattttctggaaaagctagccttcaattccacagttaactttcccaacagagatgccatactgaaagagctggagaagaacggtggcatctgcgactgtcagacctcgcgcgataccctcatctatgctgccagcattgacagcagggccattgactcggttacgcgtctcttggcggatgtcactctacgacccacgataagcgagcaggaagtgaatctagcagcgcgtgccgtcaacttcgagctggagacgctgggcatgcgccccgagcaggaaccgatactgatggacatgatacacgcagctgcgtacagggacaatactctaggcctgccaaagctctgccctccagagactctggaaagcatagatcgggctgtgctaatgaactacctgaagcatcatcactctcccagccgcatggttttcgcaggcgttggtgtggatcacgacgaactggtggagcacgtgaggaagtactttgtagaagaggaagccatctgggagaccgagccagaaagcaacgtgggacctaatgaggtagacacgtctatcgcccagtacactggcggtattgtgaaggagcaatgcgaaattcccatttatgcggctgcgggtctgccagaactggcgcatgtcgtccttggctttgaaggatgcgctcaccaggatccagactttgtgcccctctgcgtgctcaacataatgatgggtggcgggggctccttctcttccggcggtcctggcaagggcatgtactcgcgcctctacacaaaagtcctaaatcgctaccattggatgtacagtgccacggcatacaatcatgcctataccgacagcggcttgttctgcatacacggcagtgcgccgccgcagcacttgaacgacatggtcgaggtgataatacgcgaactgttgagcatggcagccgaaccgggtcgcgaggagttgatgcgctcgaaaatacagctgcaatcgatgctactgatgaacctggaatcgcgaccagtagttttcgaggatgtcgggcgtcaggtgctcgtgtctgggcatcgtaagcggccagagcatttcattaaggagatagagaaagtgtccgccgctgatatacaacgtgtggccacacgactgctcagctccccaccatcactggccgcacgtggagacatttccggcctgcccgaaatgagccatgtaacctccgcgcttggtggtgctggacgcaccggtctggggcgacgattgtccctcttcaaatag

SEQ ID NO: 64353 - protein, 555 aa, Drosophila pseudoobscura pseudoobscura
MNARGIGMLKTLKQSWRTFPRRFATKITKVGSDEIGSGTGIGRITGGVRDKDGHNKVNTPSKQIVTHLPPLTEPLPNMPEAVYAEPMAESAATKVTTLSNGLRIASEPRYGQFCTVGLVINSGPRYEVAYPGGVSHFLEKLAFNSTVNFPNRDAILKELEKNGGICDCQTSRDTLIYAASIDSRAIDSVTRLLADVTLRPTISEQEVNLAARAVNFELETLGMRPEQEPILMDMIHAAAYRDNTLGLPKLCPPETLESIDRAVLMNYLKHHHSPSRMVFAGVGVDHDELVEHVRKYFVEEEAIWETEPESNVGPNEVDTSIAQYTGGIVKEQCEIPIYAAAGLPELAHVVLGFEGCAHQDPDFVPLCVLNIMMGGGGSFSSGGPGKGMYSRLYTKVLNRYHWMYSATAYNHAYTDSGLFCIHGSAPPQHLNDMVEVIIRELLSMAAEPGREELMRSKIQLQSMLLMNLESRPVVFEDVGRQVLVSGHRKRPEHFIKEIEKVSAADIQRVATRLLSSPPSLAARGDISGLPEMSHVTSALGGAGRTGLGRRLSLFK

SEQ ID NO: 64354 - DNA, 1668 bp, Drosophila ananassae
  CDS (1)..(1668)
atgaacgcgcgcagcattggcatgcttaaaaagctccggcactcttggcgcacgttaccaaggcatttcgccaacaaggtgagttcacccgccggcgatgaagtgggtagcggtaccggcattggacagatcaccggcggtgtgcgcaccaccgatgggccccacacggtgaacacgccgtccaaggaaatcgtgacgcacctgccacctctcactgatccactgcccaatcttcctgaggctgtctatgcgtcaccgatggccgagagcgccgtcaccaaggtgactactcttcccaacggcctgcggatcgcgtcggagccgcggtatgggcaattctgtaccgtgggtctggtcatcgattccggaccacgctacgaagtagcctacccaagtggtgtatcacatttcctggagaagctggccttcaattccaccataaattttcccaacaaagacgccattcttaaggagctggagaagaacggcggcatttgcgactgccagagttcacgggatacgctcatctacgccgccagcattgacagccgagccatcgactctgtcacccgtctgctggcggacgtaaccctgaggccaaccctgagcgaacaggaggtgagcttggctcggcgcgctgtcaacttcgaactggaaacactcggcatgcgaccggaacaagagcccatactgatggacatgattcattcggcagcctatagagacaacaccttggggctgccgaagttgtgcccactggaaaacttggaccacatcgatcgcaaggtgttgatgaactacctcaagcaccatcattcgcctacgcgaatggtcattgccggcgttggcgttgaccatgacgaactggttgagcgtgtgcagaagtactttgtggatgataaggccatttgggacattgaggcgttagaagattcgggacccacacaagtggatacatccatcgcacagtacacgggcggcttagtaaaagaacagtgtgagattcccatctatgcggctgctgggctgcccgaactagcccacgtcgtgcttggatttgagggttgctcccaccaggacaaggactttgtgccattgtgcgtcttgaacatcatgatgggcggcggtggctccttctctgccggtggacccggcaaaggaatgtactcgcgactatacaccaaggttctgaaccgctaccattggatgtacagcgccacggcgtacaaccacgcctacgctgataccggggtcttctgcatccacggcagtgccccgccacagcatatgaacgaaatggttgaggtaatcacccgtgaaatggtggcaatggctgctgaaccgggacgagaagaactgatgcgttctaagatccagctgcagtccatgttgctgatgaatctggagtcgcggcccgtcgttttcgaagacgttggccgtcaggttttagttacgggtcatcgcaaacggcccgagcatttcattagagaaattgagagtgttactgccgccgacattcagcgtgtggcccagcgccttcttagctccgcgccgtcggtggcggcccgaggcgacatccaaaacctgcccgagatgagccacattaagaatgcggtaagcggatctggacgttccggtctgggccggcgactgtccctcttcaaatag

SEQ ID NO: 64355 - protein, 555 aa, Drosophila ananassae
MNARSIGMLKKLRHSWRTLPRHFANKVSSPAGDEVGSGTGIGQITGGVRTTDGPHTVNTPSKEIVTHLPPLTDPLPNLPEAVYASPMAESAVTKVTTLPNGLRIASEPRYGQFCTVGLVIDSGPRYEVAYPSGVSHFLEKLAFNSTINFPNKDAILKELEKNGGICDCQSSRDTLIYAASIDSRAIDSVTRLLADVTLRPTLSEQEVSLARRAVNFELETLGMRPEQEPILMDMIHSAAYRDNTLGLPKLCPLENLDHIDRKVLMNYLKHHHSPTRMVIAGVGVDHDELVERVQKYFVDDKAIWDIEALEDSGPTQVDTSIAQYTGGLVKEQCEIPIYAAAGLPELAHVVLGFEGCSHQDKDFVPLCVLNIMMGGGGSFSAGGPGKGMYSRLYTKVLNRYHWMYSATAYNHAYADTGVFCIHGSAPPQHMNEMVEVITREMVAMAAEPGREELMRSKIQLQSMLLMNLESRPVVFEDVGRQVLVTGHRKRPEHFIREIESVTAADIQRVAQRLLSSAPSVAARGDIQNLPEMSHIKNAVSGSGRSGLGRRLSLFK

SEQ ID NO: 64356 - DNA, 1668 bp, Drosophila grimshawi
  CDS (1)..(1668)
atgaacgtgagaagcttcagtatgctgaaactgctaaaaaactcctggcgcacatttccccggcgcttcgccacaaaagtaacaacagtcggtggtgatgaaattggcagcggtactggcattggtcaaatcactggacgcgtccgcagcgatgagggtggaccacacaaggtgaacacgccgtctaaagagattgttacgcatctgccgccgctaactgaaccactgccaaacatgccggaggccgtctatgctaaatcattagcggagagtgcgaccacaaaggtcaccacactggcaaatgggctgcgtatcgcatctgagccgcgctacggccaattttgcactgtgggtctggtgctggactctgggccacgttatgaagttgcatatcccagtggcgtatcacatttccttgagaagcttgcgttcaattccacagttaattttcctaacaaggacgccatactcaaggagttggagaagaacggtggcatctgcgattgtcaaagctctcgtgacactctaatatatgcggccagcattgacagccgtgcccttgagtcggtgacccgtttactgggcgatgttacgctgcgacccacgctcaacgaacaggaggtgaacttggcgcgtcgcgctgtcagcttcgaattggaaacacttggcatgagacccgaacaggaaccaatactcatggacatgatacacgcagcggcatacagagacaatacgcttggtttaccaaagctctgcccgccccagaatctggacagcatcgatcgcaatgtgttgatgaactatttaaagtatcatcactcaccaagccggatggtcatcgctggcgtgggcgtggatcatgatgagctcgttgagcacgtggaaaagtactttgtcgaaaatgaggcaatctggatgaaggaaacgttaccaagtgaggctcccaagcaagtcgacacttcggtcgcgcaatacacaggcggcttggttaaggaacattgtgaaattcccatttatgcggccgcagggctgcccgagctggcgcacgttgtactcggctttgagggctgctcccaccaggatccggactttgtgcccctgtgcgtgctcaacattatgatgggtggcggtggctcattctccgccggtggtcccggcaagggcatgtactctcgtctctataccaaagtgctgaatcgctatcattggatgtacagcgccacggcgtacaatcatgcctacgtggacactggcctcttctgcatacacggcagtgccccaccacagcatatgcgagacatggtcgaggtgctgacgcgcgaactgatgaacatggccttcgagccgggcactgaggagctgatgcgctccaaaatccaactgcaatcgatgctcttgatgaacttggaatcacgaccagttgtgttcgaggatgtgggtcgccaggtgctggtcacgggtaatcgcaagcgccccgagcatttcattagggaaattgaaaaagtaacagccgccgacattcagcgcgtggcacaaagactgctcagctcagtgccgtcggtggctgcgcgtggcgacattcagaatctgcccgagatggcacacataaccagcgcattcaatggaactggacgctcgcttggacgccgtctgtcgctctttaagtaa

SEQ ID NO: 64357 - protein, 555 aa, Drosophila grimshawi
MNVRSFSMLKLLKNSWRTFPRRFATKVTTVGGDEIGSGTGIGQITGRVRSDEGGPHKVNTPSKEIVTHLPPLTEPLPNMPEAVYAKSLAESATTKVTTLANGLRIASEPRYGQFCTVGLVLDSGPRYEVAYPSGVSHFLEKLAFNSTVNFPNKDAILKELEKNGGICDCQSSRDTLIYAASIDSRALESVTRLLGDVTLRPTLNEQEVNLARRAVSFELETLGMRPEQEPILMDMIHAAAYRDNTLGLPKLCPPQNLDSIDRNVLMNYLKYHHSPSRMVIAGVGVDHDELVEHVEKYFVENEAIWMKETLPSEAPKQVDTSVAQYTGGLVKEHCEIPIYAAAGLPELAHVVLGFEGCSHQDPDFVPLCVLNIMMGGGGSFSAGGPGKGMYSRLYTKVLNRYHWMYSATAYNHAYVDTGLFCIHGSAPPQHMRDMVEVLTRELMNMAFEPGTEELMRSKIQLQSMLLMNLESRPVVFEDVGRQVLVTGNRKRPEHFIREIEKVTAADIQRVAQRLLSSVPSVAARGDIQNLPEMAHITSAFNGTGRSLGRRLSLFK

SEQ ID NO: 64358 - DNA, 1668 bp, Drosophila persimilis
  CDS (1)..(1668)
atgaacgcgcgaggcatcggcattctgaaaacgctcaagcactcctggcgcacatttccacgtcgtttcgccaccaaagttacgaaagttggcagcgatgaaattggcagtggcactggcatagggagaatcactggcggcctgcgagacaaagatggccacaacaaggttaatacgccgtcgaagcaaatcgtaacgcaccttccgccactaacagaaccactgccaaacatgccggaggctgtatatgcagagccaatggctgagagtgccgccacaaaggtaacgaccctttccaatggactgcgcattgcctcggagccgcgttacggacaattctgtactgtcggactggttataaactcgggcccacgctatgaggtggcctatcccggaggtgtgtcgcattttctggaaaagctagccttcaattccacagttaactttcccaacagagatgccatactgaaagagctggagaagaacggtggcatctgcgactgtcagacctcgcgcgataccctcatctatgctgccagcattgacagcagggccattgactcggttacgcgtctcttggcggatgtcactctacgacccacgataagcgagcaggaagtgaatctagcagcgcgtgccgtcaacttcgagctggagacgctgggcatgcgccccgagcaggaaccgatactgatggacatgatacacgcagctgcgtacagggacaatactctaggcctgccaaagctctgccctccagagactctggaaagcatagatcgggctgtgctaatgaactacctgaagcatcatcactctcccagccgcatggttttcgcaggcgttggtgtggatcacgacgaactggtggagcacgtgaggaagtactttgtagaagaggaagccatctgggagaccgagccagaaagcaacgtgggacctaatgaggtagacacgtctatcgcccagtacactggcggtattgtgaaggagcaatgcgaaattcccatttatgcggctgcgggtctgccagaactggcgcatgtcgtccttggctttgaaggatgcgctcaccaggatccagactttgtgcccctctgcgtgctcaacataatgatgggtggcgggggctccttctcttccggcggacctggcaagggcatgtactcgcgcctctacacaaaagtcctaaatcgctaccattggatgtacagtgccacggcatacaatcatgcctataccgacagcggcttgttctgcatacacggcagtgcgccgccgcagcacttgaacgacatggtcgaggtgataatacgcgaactgttgagcatggcagccgaaccgggtcgcgaggagttgatgcgctcgaaaatacagctgcaatcgatgctactgatgaacctggaatcgcgaccagtagtgttcgaggatgtcgggcgtcaggtgctcgtgtctgggcatcgtaagcggccagagcatttcattaaggagatagagaaagtgtccgccgctgatatacaacgtgtggccacacgactgctcagctccccaccatcactggccgcacgtggagacatttccggcctgcccgaaatgagccatgtaacctccgcccttggtggtgccgggcgcaccggtctggggcgacgattgtccctctttaaatag

SEQ ID NO: 64359 - protein, 555 aa, Drosophila persimilis
MNARGIGILKTLKHSWRTFPRRFATKVTKVGSDEIGSGTGIGRITGGLRDKDGHNKVNTPSKQIVTHLPPLTEPLPNMPEAVYAEPMAESAATKVTTLSNGLRIASEPRYGQFCTVGLVINSGPRYEVAYPGGVSHFLEKLAFNSTVNFPNRDAILKELEKNGGICDCQTSRDTLIYAASIDSRAIDSVTRLLADVTLRPTISEQEVNLAARAVNFELETLGMRPEQEPILMDMIHAAAYRDNTLGLPKLCPPETLESIDRAVLMNYLKHHHSPSRMVFAGVGVDHDELVEHVRKYFVEEEAIWETEPESNVGPNEVDTSIAQYTGGIVKEQCEIPIYAAAGLPELAHVVLGFEGCAHQDPDFVPLCVLNIMMGGGGSFSSGGPGKGMYSRLYTKVLNRYHWMYSATAYNHAYTDSGLFCIHGSAPPQHLNDMVEVIIRELLSMAAEPGREELMRSKIQLQSMLLMNLESRPVVFEDVGRQVLVSGHRKRPEHFIKEIEKVSAADIQRVATRLLSSPPSLAARGDISGLPEMSHVTSALGGAGRTGLGRRLSLFK

SEQ ID NO: 64360 - DNA, 1500 bp, Oryza sativa (japonica cultivar-group)
  CDS (1)..(1500)
atgtaccgcatcgccgggagccacttgcgctctctcaagagatacagttatagtaggtttgctagtacaagtgttgtgaagcagtcttcaggtggtttgtttagctggcttcttggggagaagtcaagccaattgcctcctcttgatgtccctctcccgggtattacccttcctccaccactgccagactttgttgaaccgtctaagacaaaagtcaccactctcccgaatggcatcaagattgcttcagaaacgtcagtgagtccagcagcatctgtgggactgtatattgactgtggttcaatatatgaaacacctgcttcatctggagcatcacatctgttggagagaatggcgttcaagagcactacaaacaggagtcatttgcggctagtacgtgaagtagaagccattggagggaatgtctctgcatcagcctctcgtgaacaaatgtgctatacctatgatgcattcaaggcctatgtacctgagatggttgaagtgcttattgatagtgtgaggaacccagccttttttaactgggagattaaagagcagctggagaagatcaaggctgaaatagctgaagtttctgataatcctcaaggtttacttctagaggcactccattctgctggctattctggggcactggcgaagcccctaatggcacctcagtccgctattcataggttggacagtagtatccttgaggaattcattgctgaaaattacacagcacctaggatggtccttgcggcatctggagttgaacatgatgaactagtttcaattgctgagccacttctgtcggatcttcccagtgtgaagcgtccagaagagccaaaatcagtttatgtgggaggagactatcgttgtcaagcggactctgacaagacacatattgctcttgcttttgaagtaccaggtggatggtttgaagagaaaactgccatcattgttactgttcttcagatgctcatgggaggaggtggttctttctctgctggtggtcctgggaagggcatgcattctcgattgtatctccggatattaaacaactaccatcagatcgagtcattctctgcattcaacagtatctacaaccattctggtctttttggaattcatgcaacaactagcccaaattttgcttccaaggctgtggatttggcagcaggagagcttcttgaggttgcaactcctggaaaagttacacaagaacagcttgatcgagctaaacaggcaaccaagtctgcagttttgatgaacttggaatccagagtcgtagcatctgaagacatagggaggcagattttgacgtatggggaaaggaaacccattgagcatttcttgaaagatcttgaagcaatcaccttgaatgacatttcttctactgccaagaagatcatttcatcaccccttacactggcatcatggggtgacgttattcatgtcccgagctatgaatctgttagccagaagtttttctcaaagtaa

SEQ ID NO: 64361 - protein, 499 aa, Oryza sativa (japonica cultivar-group)
MYRIAGSHLRSLKRYSYSRFASTSVVKQSSGGLFSWLLGEKSSQLPPLDVPLPGITLPPPLPDFVEPSKTKVTTLPNGIKIASETSVSPAASVGLYIDCGSIYETPASSGASHLLERMAFKSTTNRSHLRLVREVEAIGGNVSASASREQMCYTYDAFKAYVPEMVEVLIDSVRNPAFFNWEIKEQLEKIKAEIAEVSDNPQGLLLEALHSAGYSGALAKPLMAPQSAIHRLDSSILEEFIAENYTAPRMVLAASGVEHDELVSIAEPLLSDLPSVKRPEEPKSVYVGGDYRCQADSDKTHIALAFEVPGGWFEEKTAIIVTVLQMLMGGGGSFSAGGPGKGMHSRLYLRILNNYHQIESFSAFNSIYNHSGLFGIHATTSPNFASKAVDLAAGELLEVATPGKVTQEQLDRAKQATKSAVLMNLESRVVASEDIGRQILTYGERKPIEHFLKDLEAITLNDISSTAKKIISSPLTLASWGDVIHVPSYESVSQKFFSK

SEQ ID NO: 64362 - DNA, 1473 bp, Oryza sativa (japonica cultivar-group)
  CDS (1)..(1473)
atgttccggctgcgctcctccgctcgcctgctgagagagctacgggaggcgtcgcggtcgtcggggcgccgccgggaatggctctccggcggcgcagtagcctccgccgcgcggacgacctcgctcctgcaccctctgcccgggctcgacgtcccgcagtgcctccccgaccagctcggcgtccagcccacccgcgtcaccacgctccccaacggcgtccgcgtcgcctccgaggacctcccgggcccgtcggcgtgcgtaggggtgttcgtggattccggctcggtttacgagacggcggagacggccggcgtgtcacacctgctcgagaggctgtccttcaaggacacggcgcaccgcagccacctgcagattgtgcaggatgtggaggccaccggaggaaacatcggggcgtctgcatcaagggagcagacggtgtacagctacgagactctcaaggcctacttgccgcaggccatcgaggtgctcatcgactgtgtccgcaatccattgttcctccaagacgaagtcgagcgacaggtggcctttgccagagaagaagttcaggagctacagaagaaccctgagagatttcttcaggaatcacttaatctagttggatacacaggtgctcttgcaaatccactagtagcccctgaggagagtctcacacgaatcaatggcagtattattcaaaagttctatcacgagaacttcactgctgatcgcttggttgtagcagcatcaggtgttgatcatcaataccttttagatgttgcagagcctttattgtctgattggcacaagggctccccagtggaaaggccagagtctaagtatatcggtggggattttagacatagagcagactcagagatgacccatgttgctttggctttcgaagtgcccgggggctggcttgaagagagagatgccacaattatgactgtagtacagactttaatgggcggtggtggttcattctcttctggtggtcctggaaaagggatgcattcacggctttatctgcgtgtcttaactaaataccacacggtcgaatcattttcggtatttagcaatgcatttgatagaagtggcctctttggtatttacttgaccacgccttcagattttgttgcaaaggctgttgatattgcgacaaaagaactgattgctattgcaacacctggacaagtgacagacattgaattggcacgagcgaaaaactcaacaatttctgccgtgctgatgaatcttgaatccagggtaattgttgcagaagatatagggaggcagatattgacttatggttgcaggaagcctgttgaccattttcttcaatgtatggacgaaatgactctagatgatataacagcttttgccaagaagatgttgtcttcaccacccacaatggctagttggggagatgttgataaagttcctccatatgaatttgtttgcaagaggttttga

SEQ ID NO: 64363 - protein, 490 aa, Oryza sativa (japonica cultivar-group)
MFRLRSSARLLRELREASRSSGRRREWLSGGAVASAARTTSLLHPLPGLDVPQCLPDQLGVQPTRVTTLPNGVRVASEDLPGPSACVGVFVDSGSVYETAETAGVSHLLERLSFKDTAHRSHLQIVQDVEATGGNIGASASREQTVYSYETLKAYLPQAIEVLIDCVRNPLFLQDEVERQVAFAREEVQELQKNPERFLQESLNLVGYTGALANPLVAPEESLTRINGSIIQKFYHENFTADRLVVAASGVDHQYLLDVAEPLLSDWHKGSPVERPESKYIGGDFRHRADSEMTHVALAFEVPGGWLEERDATIMTVVQTLMGGGGSFSSGGPGKGMHSRLYLRVLTKYHTVESFSVFSNAFDRSGLFGIYLTTPSDFVAKAVDIATKELIAIATPGQVTDIELARAKNSTISAVLMNLESRVIVAEDIGRQILTYGCRKPVDHFLQCMDEMTLDDITAFAKKMLSSPPTMASWGDVDKVPPYEFVCKRF

SEQ ID NO: 64364 - DNA, 1602 bp, Oryza sativa (japonica cultivar-group)
  CDS (1)..(1602)
atggcgttccgccgcctcctctccgccgcagtgcgccgtcgctccgccgccgcggcggcggcggcggggcccgggaatgcgcgcgaggcatccaccgcggtcgccgccgcggggcccggcgtcatcgcccccgacgcggccccggtccgccccccgatgatggtgtacgaccgcatcgccgaggccgtcaacgccaggctccgtcggctcgagcacccggacccccgcttcctccgctacgcgagcccagtccccgcccacgccgaccacaccgccatcctcgccgcgccggagacccgcgtcacgacgctccccaacgggctccgcgtcgccacggagtcctcgctcgcctcgcgcaccgccaccgtcggcgtgtggatcgacgccgggagcaggtacgagacggaggactcggccggggtcgcgcatttcgtcgagcacatgctgttcaagggcacgggtgaccgcaacgccgcgcagctcgaggaggagatcgagaacatcggcggccacctcaacgcatacacgtcgcgggagcagacgacctactatgccaaagtactcgacaaggatgtgccgcgtgcacttaatattcttgcggacattctgcagcactcaaagttggaagagtcccgcattgaacgtgagcgcgatgttattctgcgagagatggaagaggttgagggacaatatgaggaagttatattcgatcatctccatgcaactgcattccagtacacttctcttggcagaccaatcttgggttctgcagaaaatgtcaagtcaattacccaagaggacctccagaagtatattgaaacacattatacggctcctagaatggttatcactgctgctggtgctgttaagcatgatgatattgtagagatggcaacaaaactgtttaatgacctaccaactgaccctacaacaacaagcatgttggtttctacccaaccagcctgctttactggttctgaggtccgcatcattgatgatgacatgccccttgctcaatttgctgttgcctttaatggagcatcatggatagatcctgattctattgccttgatggtcatgcaatccatgcttggctcatggaacaagagtgctggaggagggaaacacatgggttcagagcttgtacaaagggtagcgatcaatgacattgctgagagtataatggcatttaatacaaattacaaggacactggcctctttggtgtctacgctgttgctaagcctgactgcttggatgatttggcttttgcaatcatgcaagagattagcaaactgtcataccgggttactgaggaagatgttatccgtgcacgtaatcagctgaaatcttccatccaactgcacctcgatggttccactgctgttgttgaggatattggccgtcagttactcatctatggtcgaagaattcctattcctgagctttttgcaagaatagatgcagttgacgcaagcacagtcaagcgagtggccaaccgtttcatttttgaccaggatatcgctattgctgcaatgggacccattcagggtcttccggactacaactggttcaggcgccggacctacatgctccgttactag

SEQ ID NO: 64365 - protein, 533 aa, Oryza sativa (japonica cultivar-group)
MAFRRLLSAAVRRRSAAAAAAAGPGNAREASTAVAAAGPGVIAPDAAPVRPPMMVYDRIAEAVNARLRRLEHPDPRFLRYASPVPAHADHTAILAAPETRVTTLPNGLRVATESSLASRTATVGVWIDAGSRYETEDSAGVAHFVEHMLFKGTGDRNAAQLEEEIENIGGHLNAYTSREQTTYYAKVLDKDVPRALNILADILQHSKLEESRIERERDVILREMEEVEGQYEEVIFDHLHATAFQYTSLGRPILGSAENVKSITQEDLQKYIETHYTAPRMVITAAGAVKHDDIVEMATKLFNDLPTDPTTTSMLVSTQPACFTGSEVRIIDDDMPLAQFAVAFNGASWIDPDSIALMVMQSMLGSWNKSAGGGKHMGSELVQRVAINDIAESIMAFNTNYKDTGLFGVYAVAKPDCLDDLAFAIMQEISKLSYRVTEEDVIRARNQLKSSIQLHLDGSTAVVEDIGRQLLIYGRRIPIPELFARIDAVDASTVKRVANRFIFDQDIAIAAMGPIQGLPDYNWFRRRTYMLRY

SEQ ID NO: 64366 - DNA, 1293 bp, Brucella suis 1330
  CDS (1)..(1293): transl_table=11
atgggtgttgaagtaacgcgtcttcccaacgggttgacaatagccaccgataccatgccgcatgttgaaagcgtggcgttgggaatctgggtaaaggtgggagcgcgtaacgaagcccccgaccgtcacggaattgcgcatcttctggagcatatggctttcaagggcacggaaaaccgtacagcctggcagatcgcatcggacattgaaaatgtgggtggcgagatcaacgccgccaccagcgtggagaccacctcctattatgcccgcgtgctgcgcaacgatatgccgctggccatcgacattctttccgatatcctgaccgcctccaaattcgacgagggcgagctggaacgcgaaaagcaggtcatcatgcaggagatcggcgcggcgcacgatacgcccgacgatatcgtcttcgaccgtttcaccgaaaccgcctatcgccaccagcccatcggccgcgcgatcctgggcgagccggaaacggtgatgtcattcacatccgacgacctgcgccaatatatgcaggagcaatatagcgtcgaccgcatggtggtgacggcggctggcggcatcgaccatgacgaattcgtgcgcgaggttgaaaagcggctcggcagtttccgtccgcacaataccgcgccaacactcgaccttgctcattatgtcggcggcgatttccgcgaaaaccgcgaattgatggatgcgcaggtgctgatcggttttgaaggccgcgcctatcatgtgcgcgacttctacgcttcgcagcttctttcgatgatcctcggcggcggcatgtcctcgcggcttttccaggaagtgcgcgaaaagcgcgggctttgctattcggtctatgccttccattggggcttttccgatacggggctgtttggcatccatgccgcaacggggcgcgacgagcttgtggaactcgtgccggtcattatcgacgaattgcacaaggcagccgattccatcggcatcgaggaagtggaccgcgcccgtgcgcaatatcgcgcaagcctcctcatgtcgcaggaaagcgcggcaagccgtgcgggccagattgcgcgccagttcctgctctatggacgcccggtggaaaacagcgaattgctggaccgcctgtccctcatcaccccggaacgcctgaccgaccttgccggacggcttttcctcaacaacaaaccaaccatcgcaggcgtcggtcccgttggctgcctcatgagcttcgatcgcctgaccgatgcgctttcgaccaatgcgcatacgaggaagatagctgtctag

SEQ ID NO: 64367 - protein, 430 aa, Brucella suis 1330
MGVEVTRLPNGLTIATDTMPHVESVALGIWVKVGARNEAPDRHGIAHLLEHMAFKGTENRTAWQIASDIENVGGEINAATSVETTSYYARVLRNDMPLAIDILSDILTASKFDEGELEREKQVIMQEIGAAHDTPDDIVFDRFTETAYRHQPIGRAILGEPETVMSFTSDDLRQYMQEQYSVDRMVVTAAGGIDHDEFVREVEKRLGSFRPHNTAPTLDLAHYVGGDFRENRELMDAQVLIGFEGRAYHVRDFYASQLLSMILGGGMSSRLFQEVREKRGLCYSVYAFHWGFSDTGLFGIHAATGRDELVELVPVIIDELHKAADSIGIEEVDRARAQYRASLLMSQESAASRAGQIARQFLLYGRPVENSELLDRLSLITPERLTDLAGRLFLNNKPTIAGVGPVGCLMSFDRLTDALSTNAHTRKIAV

SEQ ID NO: 64368 - DNA, 1290 bp, Bradyrhizobium japonicum USDA 110
  CDS (1)..(1290): transl_table=11
atgagcgtcgagatctccaagcttgcgtccggcctcaccgtcgtcaccgacaagatgccccatctcgagactgcggcgctcggggtctgggccggcgtcggcggacgcgacgagaagcccaacgagcacggtatctcgcatctcctcgagcacatggcgttcaagggcacgaccaagcgctcgtcgcgcgagatcgtcgaggagatcgaggctgtcggcggcgacctcaatgccggcacctcgaccgagaccacgtcctattatgcgcgggtgctgaaggccgacgtgccgctggcgctcgacgtgctcgccgacatcctggccaatcccgccttcgagcccgacgagctggagcgcgagaagaacgtcatcgtgcaggagatcggtgccgcgcaggacacgcccgacgacgtcgtgttcgagcatctcaacgagctctgctatcccgaccagccgatgggccgctcgctgctcggcaccgccaagacgctgcgcgccttcaaccgcgacatgctgcgcggctatctgtcgacgcattatcgcgggcccgacatggtggtggcggccgccggcgcggtcgatcacagccaggtggtcgccgaggccgagaagcgctttgcaagctttgaaggaacgccgggcccgaagccgcaggccgcccagttcggcaagggcggcgctaaggtcgtgcatcgcgagctcgagcaggcgcatctgacgctggcgctggaaggtgtgccgcagaacgatctgtcgctgttctcgctccaggtcttcaccaacatcctcggcggcggaatgtcgtcgcggctgttccaggaggtgcgcgagaagcgcggcctctgctactcgatctacagcttccacgcgccctataccgataccggcttcttcggcctctacaccggtaccgatccggccgatgcgccggagatgatggaagtcgtggtcgacgtcatgaatgattcggtggagaccctgaccgaggccgagattgcacgggccaaggcgcagatgaaggcgggcctcctgatggcgctggagagctgctcctcccgtgccgagcagctcgcccgccacgtcctggcctatggccggccgcagacggtgcaggagctggtggcccggatcgacgccgtcagcgtcgaatcgacccgggacgcggcgcgtgcactgctttcgcgcagccgccctgcggttgtcgcattaggcagtggcaggggtctggacacggcggtgtcttttgcggaaggattgacccgggcacgtgccaaggcgcgactgcattag

SEQ ID NO: 64369 - protein, 429 aa, Bradyrhizobium japonicum USDA 110
MSVEISKLASGLTVVTDKMPHLETAALGVWAGVGGRDEKPNEHGISHLLEHMAFKGTTKRSSREIVEEIEAVGGDLNAGTSTETTSYYARVLKADVPLALDVLADILANPAFEPDELEREKNVIVQEIGAAQDTPDDVVFEHLNELCYPDQPMGRSLLGTAKTLRAFNRDMLRGYLSTHYRGPDMVVAAAGAVDHSQVVAEAEKRFASFEGTPGPKPQAAQFGKGGAKVVHRELEQAHLTLALEGVPQNDLSLFSLQVFTNILGGGMSSRLFQEVREKRGLCYSIYSFHAPYTDTGFFGLYTGTDPADAPEMMEVVVDVMNDSVETLTEAEIARAKAQMKAGLLMALESCSSRAEQLARHVLAYGRPQTVQELVARIDAVSVESTRDAARALLSRSRPAVVALGSGRGLDTAVSFAEGLTRARAKARLH

SEQ ID NO: 64370 - DNA, 1290 bp, Rhodopseudomonas palustris CGA009
  CDS (1)..(1290): transl_table=11
atgaccgtcgaagtcagcaagcttccttccggcctcaccatcgtcaccgacaccatgccgcatctcgagaccgccgcactcggcgtctggaccggcgtcggcggccgcgacgaaaagccggacgagcacggcatctcacatctcctcgaacacatggcgttcaagggcaccacgcgccgcacctcgcgcgagatcgccgaggagatcgaggcggtcggcggcgacctcaatgccggcacttcgaccgagaccaccgcgtattacgcgcgggtgatgaaggcagacgtgccgctggcgctcgacgtcttgtccgacattctcgccaatccgtcgttcgaggccgaagagctcgaacgcgagaagagcgtgatcgtgcaggagatcggcgccgcgcaggacacgcctgacgacgtcgtgttcgaatacctgaacgagctgtgctacccggagcagccgatcggccgctctctgctcggcaccgccaagacgctgaagagcttcagccgcgaaaagctgcagtcgtatctgtcgacgcattatcgcggccccgacatggtggtggctgcggctggcgcggtggatcacgcccgcatcgtcgaagaggtttcccaccgcttcgccagcttcgacggcacgccggcaccgaagccgcagccggctatgttcggcgcgggaggctcccgcgtcgtgcaccgcgacctcgagcaggcgcatctgacgctggcgctcgaagggctgccgcagagcgcgccgacgctgttcagcctgcaggtgttcaccaacatcctcggcggcggaatgtcgtcgcggctgttccaggaggtgcgggagaagcgcgggctgtgctactcgatctacaccttccatgcgccctacagcgacaccgggttcttcggtctctataccggcacagatccggccgatgcgccggagatgatggaagtgatcgtcgatgtcatcaacgatgcggtcgacaccctgaccgacgccgagatctcccgggccaaggctcagatgaaggcaggcctgctgatggcgctggaaagctgttcgtcgcgtgccgagcagctcgcgcggcacatcctggcctacggccggccgttgccggtcgacgagctggtcgggcgaatcgatgccgtcactatcgataccgcgcgggaagcagggcgcacgctgctggcgcgcagccggccggccgtggtggcgctcggcagcggccgcggtctcgacagagctgtcagctttgctgaaggcttgacacaatccaaggccaagacgtcctatcattga

SEQ ID NO: 64371 - protein, 429 aa, Rhodopseudomonas palustris CGA009
MTVEVSKLPSGLTIVTDTMPHLETAALGVWTGVGGRDEKPDEHGISHLLEHMAFKGTTRRTSREIAEEIEAVGGDLNAGTSTETTAYYARVMKADVPLALDVLSDILANPSFEAEELEREKSVIVQEIGAAQDTPDDVVFEYLNELCYPEQPIGRSLLGTAKTLKSFSREKLQSYLSTHYRGPDMVVAAAGAVDHARIVEEVSHRFASFDGTPAPKPQPAMFGAGGSRVVHRDLEQAHLTLALEGLPQSAPTLFSLQVFTNILGGGMSSRLFQEVREKRGLCYSIYTFHAPYSDTGFFGLYTGTDPADAPEMMEVIVDVINDAVDTLTDAEISRAKAQMKAGLLMALESCSSRAEQLARHILAYGRPLPVDELVGRIDAVTIDTAREAGRTLLARSRPAVVALGSGRGLDRAVSFAEGLTQSKAKTSYH

SEQ ID NO: 64372 - DNA, 1521 bp, Magnaporthe grisea 70-15
  CDS (1)..(1521)
atgccgctccttcgccgaggggttgcctccgaggccctccccggggccttttcaggggttggcgtttatatcgatgcaggctctaggtatgagaacgactatttacgcggcgctagccatattatggaccgccttgctttcaagtcgacacaaaagcacaccgcggatgagatgctggaggcagttgagcatctgggaggaaatatccagtgcgcctcctcgcgggagtccatgatgtaccaggctgccaccttcaaccaggccattccgactaccgttggcctgctggccgagacgatacgaacccctaaccttacagacgatgaaatctctcagcaacttgagaccgcccaatacgaagttacggaaatctggtcaaagcccgatctgatattgcctgagctcgtgcacacggcagctttcaaggacaacactcttggaaacccgttgctttgcccccaggaaagactaggttccatcgaccgacacgtcatctcagcttatagggatgcgttctaccgcccggagaggatggttgtggccttcgctggcattccgcacatggatgctgtcaagctcactgagcagtactttggggacatgagggggaagcctccgccaaaagcccaagaaacctccacaatagcgttagatgaggccgcagctgcacaacaacagcagcagcaacagcctggcctgcttagcaagctgccgttcttcaaaaacacctctaaacccacctctcctagcccattacccacggctcccctggataccggtgcttcccactacaccggtggcttcctcactctagcccctcaaccgccccctttgaaccccaacatacccaacttcactcacattcagctcgctttcgagggtctccccatcctcgacgacgacatctatgccctcgcagccctgcagaccctgctaggcggtggcggctccttctccgccggcggtcctggcaagggcatgtactcgcgcctttacacaaacgtcctcaaccaacacggttgggtcgagtcatgcgtggcgttcaaccactcttataccgactctggcctcttcggcatcgcagcttcgtgcttccccggccgcacggccagcatgctggaggtcatgtgccgtgagctcaggtccctgacgcttgacaagggctactcggccgtgaccgaggttgaggtcaatcgggccaagaaccagctgaggtcaagcctgctgatgaacctcgagagccgcatgattgagctcgaggacctcggtaggcaggtccaggtccacggccgcaaggtgcctgtgcacgagatgacgcgccgcatcaacgcgctgaccgtcgaggatctgcgcaacgtcgcccggagggtggtcggcggcatggtcgagaacccgggcaagggcagcggtgccccgaccgtcgttcttcaggaggcgaccgctgttggtgtcacaaacaagcagctgacttgggacgagatccagaacatcattcgccagtggcagcttggcaggcaatga

SEQ ID NO: 64373 - protein, 506 aa, Magnaporthe grisea 70-15
MPLLRRGVASEALPGAFSGVGVYIDAGSRYENDYLRGASHIMDRLAFKSTQKHTADEMLEAVEHLGGNIQCASSRESMMYQAATFNQAIPTTVGLLAETIRTPNLTDDEISQQLETAQYEVTEIWSKPDLILPELVHTAAFKDNTLGNPLLCPQERLGSIDRHVISAYRDAFYRPERMVVAFAGIPHMDAVKLTEQYFGDMRGKPPPKAQETSTIALDEAAAAQQQQQQQPGLLSKLPFFKNTSKPTSPSPLPTAPLDTGASHYTGGFLTLAPQPPPLNPNIPNFTHIQLAFEGLPILDDDIYALAALQTLLGGGGSFSAGGPGKGMYSRLYTNVLNQHGWVESCVAFNHSYTDSGLFGIAASCFPGRTASMLEVMCRELRSLTLDKGYSAVTEVEVNRAKNQLRSSLLMNLESRMIELEDLGRQVQVHGRKVPVHEMTRRINALTVEDLRNVARRVVGGMVENPGKGSGAPTVVLQEATAVGVTNKQLTWDEIQNIIRQWQLGRQ

SEQ ID NO: 64374 - DNA, 1698 bp, Gibberella zeae PH-1
  CDS (1)..(1698)
atgcttcgccaattcagtgctggcctgccaaaggctcgggcctcgtgctcgaaagtcttgggccaggcctccaagttctcgatggcgcggagatctatggctaccgtcaaggtgaagggcattgaaaaggatcctacagagcttgacaaggtcacgacacttcccaatggtctccgagttgcgtcagaagccctgcccgggtcattcgctggtgtgggcgtctatatcgaaggcggttcacgattcgaaaacgactctcttcgcggtgtatcccatattatggaccgactcgctttcaagtccacatcgaagcgctccgcagacgatatgctcgagcaggtcgaagctttgggtggaaatatccagtgtgcttcatcgcgagagagcatgatgtaccaagcggctaccttcaacaacgcagtcccccaaaccattgagctccttgccgagacgatccgcgacccccagattaccgacttggaagttgccgagcagatcgagacagcacgatatgagattcgcgagatttggagcaagccggaacttatcttgcctgagctggtacatactgctgcgttcaaggataacactctcggaaacccgctattgtgcccagaagacaggttgggttctatcgacaaaaacaccgtcatggcgtaccgcgacctcttctaccgacctgagagaatggttgtggcatatgctggtattgagcacagcgaggctgtcagactgacagagaagttctttggcgatatgaagaagggcgcacgacagatcacagaggcaactggttccgagaccagcgagagtgaactctcagatagcgaagccagcgcatcgtcagcctcttcatcaccacagcaatcctccggactcctttcacgatttttcaagaacacgccttccgctcctcagaacctcaacaacctcccctctcaagccgatattatccgcccctccaaatacacaggcggcttctcctggctccccgctcaaccacctaacctgagcggtctccctaccttcacacatatccacctcgcctttgaaggtctccctgtctcttcagacgatatctacgcccttgccacactccagactctccttggtggtggcggttctttctctgccggtggacccggcaagggcatgtactctcgcctgtacaccaatgtcctgaaccagcacggctgggtcgagtcatgcatggccttcaaccactcctacactgactccggcctcttcggtatctcagcaagctgcttgcctggacgaacagctgctatgctcgatgttatgtgccaggagctccgcgcacttaccctgacaacaggcttctcacgcttgcaagagactgaggttgcacgcgcaaagaaccaattgcgatccagcctccttatgaacctcgagagccgcatggttgagctcgaagatctcggccgttcaattcaggtccacggccgcaagattcccgtcaaggatatgtgccgtcgtattgagaacctgacagtagctgatctccgccgtgtggccactatgattgttggcggccaagtgaaaaaccctggtggcggtagcggtgctcctaccgtggtgctacaggaggcccaggcatatggtgtcagcagccacacaatgagctgggaccagatccaagatcgtattgacagctggaagcttggcagcttgtcatag

SEQ ID NO: 64375 - protein, 565 aa, Gibberella zeae PH-1
MLRQFSAGLPKARASCSKVLGQASKFSMARRSMATVKVKGIEKDPTELDKVTTLPNGLRVASEALPGSFAGVGVYIEGGSRFENDSLRGVSHIMDRLAFKSTSKRSADDMLEQVEALGGNIQCASSRESMMYQAATFNNAVPQTIELLAETIRDPQITDLEVAEQIETARYEIREIWSKPELILPELVHTAAFKDNTLGNPLLCPEDRLGSIDKNTVMAYRDLFYRPERMVVAYAGIEHSEAVRLTEKFFGDMKKGARQITEATGSETSESELSDSEASASSASSSPQQSSGLLSRFFKNTPSAPQNLNNLPSQADIIRPSKYTGGFSWLPAQPPNLSGLPTFTHIHLAFEGLPVSSDDIYALATLQTLLGGGGSFSAGGPGKGMYSRLYTNVLNQHGWVESCMAFNHSYTDSGLFGISASCLPGRTAAMLDVMCQELRALTLTTGFSRLQETEVARAKNQLRSSLLMNLESRMVELEDLGRSIQVHGRKIPVKDMCRRIENLTVADLRRVATMIVGGQVKNPGGGSGAPTVVLQEAQAYGVSSHTMSWDQIQDRIDSWKLGSLS

SEQ ID NO: 64376 - DNA, 1446 bp, Candida glabrata CBS 138
  CDS (1)..(1446)
atgttgagaaattctttaagagttgcgcaaagacgaggctattttcaagtctcgcggttgaagaatggcctgagagttgccacgagtgatacacctgggcacttcagtgcattgggtatgtacgtaagcagtgggtcccgttacgagacaggtagtttaaaaggttgtacacatattgttgatagactagcgttcaaatcgacaaagaatatcgatgcgcgttcgatgatggagactttagaactattagggggaaattaccagtgcacttcctcgagagaatcaatgatgtaccaggcctctgtgttcaatagggatgtggaaaagatgctaaacttacttgcagagactattcgctttccaaaaattactgaagaagagttacaagaacaaaaatttaccgcacaatatgaaatagacaacatttggaccaagccggacttgatcttgcctgaactgttacataacactgcatactcaggggagactttgggttcccctcttatttgccccagagaaatattaccatccattacaaagaaaagcttgctgaactatagggaaaagttctacaatcccgaaaataccgtcgctgcctttgttgggcaacctcatgagaaatccattgaattagcagaaaaatatttgggtgattggactacaacaggtgagcctttagataaaactgctgcacattataccggtggtgaaacatgcataccatctgctcctgtatttggaacaatgccagaactaatgcacatacaaattggttttgaagggttacctattgaccaccctgacatatatgctctagccacattacagacattgcttggaggtggtggctcatttagtgcaggtggacctggcaagggtatgtattcccgtttatacactcatgttttgaaccagtactatttcgttgaaaactgtgtctcttttaaccatgcttactctgattctggtatttttggcatatcactttcatgcatacctcaagcagcacctcaagcagcagaagttatcgcacaacaattttataattgtttcgcaaatggcgccttacgtctaacagatgcagaggtttcaagggccaaaaatcaactaaaatcgtccttgctaatgaacttagaatcaaaactagtagaactagaagacatgggtagacaagttttgatgcatggcaaaaagatacctgtatctgaaatggtttctaaaatcgagtccctcacaacaaaagatattagtagagtcgcagagatggtatttacaggtaaagctcacaacaagggcaatggaaccggtagggcgacgattgttatgcaaggtgatagagctgcttttggtgatgttcaggaagtgcttggtcactacggtcttggttcaagctcttttagcactgaccaatcaaaatcatcaacaacaaagctgaaatggttttag

SEQ ID NO: 64377 - protein, 481 aa, Candida glabrata CBS 138
MLRNSLRVAQRRGYFQVSRLKNGLRVATSDTPGHFSALGMYVSSGSRYETGSLKGCTHIVDRLAFKSTKNIDARSMMETLELLGGNYQCTSSRESMMYQASVFNRDVEKMLNLLAETIRFPKITEEELQEQKFTAQYEIDNIWTKPDLILPELLHNTAYSGETLGSPLICPREILPSITKKSLLNYREKFYNPENTVAAFVGQPHEKSIELAEKYLGDWTTTGEPLDKTAAHYTGGETCIPSAPVFGTMPELMHIQIGFEGLPIDHPDIYALATLQTLLGGGGSFSAGGPGKGMYSRLYTHVLNQYYFVENCVSFNHAYSDSGIFGISLSCIPQAAPQAAEVIAQQFYNCFANGALRLTDAEVSRAKNQLKSSLLMNLESKLVELEDMGRQVLMHGKKIPVSEMVSKIESLTTKDISRVAEMVFTGKAHNKGNGTGRATIVMQGDRAAFGDVQEVLGHYGLGSSSFSTDQSKSSTTKLKWF

SEQ ID NO: 64378 - DNA, 1479 bp, Kluyveromyces lactis NRRL Y-1140
  CDS (1)..(1479)
atgttcaggctcggaagaaactccaccgttggtagattagccagagggaaatggtactcgcaaattagtaaaaatgctgagaattcacaggtcactactttggataacggtgtgaaagttgctacttcaaatgttcctggacacttttcagctctgggtttatacgttaatgcaggatcacggtttgaggataagaatttgaaaggatgtacccatattatggaccgtttggcattcaaatctactgatcatatttccggaagagacatgacagagacgttagaactcttgggggacaactatcaatgttcttcatctagggaaacgatgatgtatcaatcgtcagttttcaatcctgatgtggaaaagatgttccatttgatgtcggagactgtgaggtatccgaggatcacagaggaagaattagaagaacagaagactaccgcgttatatgagatcgatggtgtttggcagaaacatgatttgatcttacctgagctattgcatcagacggcatactctggtgagactcttggatcccctttattgtgtccaaaagaattgatcccgtctatctccaaatattacttgaccgattatagaaacaagttctacaacccagagaacatcgttgcagcattcgttagtgttcctcacgatgacgccgttcaattgacagagaaatactttggtgatatgaagagtaaatacccgcccgttactaagaaaccagcgaagtatacaggcggtgagtattgcattcctccgggtcctgtcttcggaggattacccgagttatatcatatgcaattagccttcgaagggctacctatagatcatccagatatttatgcgttggctactttacaaactcttctaggtggtggtggatcgttcagtgccgggggtccaggtaagggaatgtactctaggctgtatacgcacgttttgaaccaatactattacgtggaaaattgtgtttcattcaaccattcctacagcgattcaggtctattcggtgtatctatttcgtgtataccacaagctgctccattcgctgccgaaattattgcacaaactttatcgaatgtgtttgccaacgacaaactgaagttgacgaaggaagaagtgtcaagatcaaagaaccaactaaaatcatctttgttgatgaatctagaatctaaaatcgtagaacttgaagatttgggaagacaagtgttattgcatggtcgtaagataccaatgaaagaaatgatggaaaatatcgaaaagcttaccgtcgatgacattaaacgtgttgctgaaacggttttcacaggcaaagtcaataatcctggtaatggtaacgggaaggtgacggttgtaatgcaaggtgaaagagaatcctttggtgatattgaaacagtattaagattctatggtctaggtaactacccaaaactagacgtaccaaagatgaagaaacagggttggttttaa

SEQ ID NO: 64379 - protein, 492 aa, Kluyveromyces lactis NRRL Y-1140
MFRLGRNSTVGRLARGKWYSQISKNAENSQVTTLDNGVKVATSNVPGHFSALGLYVNAGSRFEDKNLKGCTHIMDRLAFKSTDHISGRDMTETLELLGDNYQCSSSRETMMYQSSVFNPDVEKMFHLMSETVRYPRITEEELEEQKTTALYEIDGVWQKHDLILPELLHQTAYSGETLGSPLLCPKELIPSISKYYLTDYRNKFYNPENIVAAFVSVPHDDAVQLTEKYFGDMKSKYPPVTKKPAKYTGGEYCIPPGPVFGGLPELYHMQLAFEGLPIDHPDIYALATLQTLLGGGGSFSAGGPGKGMYSRLYTHVLNQYYYVENCVSFNHSYSDSGLFGVSISCIPQAAPFAAEIIAQTLSNVFANDKLKLTKEEVSRSKNQLKSSLLMNLESKIVELEDLGRQVLLHGRKIPMKEMMENIEKLTVDDIKRVAETVFTGKVNNPGNGNGKVTVVMQGERESFGDIETVLRFYGLGNYPKLDVPKMKKQGWF

SEQ ID NO: 64380 - DNA, 1428 bp, Debaryomyces hansenii CBS767
  CDS (1)..(1428)
atgactaccttacaaaatggattaagaatagtaactgacagtacaccgggccatttcagtgctttaggtgcctacgttgatgctggatcaagattcgaaaacccagaaaagccggggctttctcatatttttgatagattagcatggaagtctacggatcaatataccgggatcgaaatgatggagaacttatcgaagttaggcggtaattatatgtgttcagcacaaagagaatccatgatttatcaggcttccgtttttaacaaggatgtggacaaaatgtttgattgtattgctcaaaccattcgggcaccaagaatcactgaccaggaacttgtagaaaccttgcaaaccgcagattatgaagttagtgaaattgctttaaaacatgacatgtttttacctgaagtgttacattgtgcagcatattcgaataatactttgggattgccgttattctgtccaccagagagaattccaatgatatcgaaggatgaagtattgaactatcataaaaccttttatcaaccacaaaatattgtggttgcgatggttggtgttcgtcatgatcatgcagtcaggttagctcaatcgcaattcggagattggaaatcatcatccttacaaagaccagatttgggtaccgtgaactatacggggggagagatagcattgcctcaccaacctccacttgcaggtaatttaccagaactttaccacatgcaaatcgggtttgaaactactggcttattaaatgatgatttatatgcgttagctacgttacagaagttattaggcggtggttcctcattttcggcaggcgggcccggtaaaggaatgttttcaagattatataccagagttttaaatcagtatgcatttgttgaaaattgcatgagtttcaatcatgcatatataaactctggtttgtttggcattacaatatcgtgttcacctaatgcagctcatgtaatgtcacagataatttgtttcgaactttctaagcttttagagaaggatccctctgaaggaggactcactgatagagaagttaagagagctaaaaaccagttaatcagttcattattgatgaatgttgaaagtaagcttgctgccttagaggatttaggtagacaaatccagtgtcaaggcaaattgactacaatagatgaaatgattgataaaattgagaaaataactgttgaggacttgagaaaagttgcagaaaagattttaacaggtaatgttgttaccaagggtgtaagctctggtaagccatcagtagtaatgcaaggtgatagagcagcattcggtgacgttgaatttgttcttcgtcattttggtttagggaagtttgatggacctccgttgacagaaccgagagatttctccagcggtcttggcaataagataagtaagtggttttaa

SEQ ID NO: 64381 - protein, 475 aa, Debaryomyces hansenii CBS767
MTTLQNGLRIVTDSTPGHFSALGAYVDAGSRFENPEKPGLSHIFDRLAWKSTDQYTGIEMMENLSKLGGNYMCSAQRESMIYQASVFNKDVDKMFDCIAQTIRAPRITDQELVETLQTADYEVSEIALKHDMFLPEVLHCAAYSNNTLGLPLFCPPERIPMISKDEVLNYHKTFYQPQNIVVAMVGVRHDHAVRLAQSQFGDWKSSSLQRPDLGTVNYTGGEIALPHQPPLAGNLPELYHMQIGFETTGLLNDDLYALATLQKLLGGGSSFSAGGPGKGMFSRLYTRVLNQYAFVENCMSFNHAYINSGLFGITISCSPNAAHVMSQIICFELSKLLEKDPSEGGLTDREVKRAKNQLISSLLMNVESKLAALEDLGRQIQCQGKLTTIDEMIDKIEKITVEDLRKVAEKILTGNVVTKGVSSGKPSVVMQGDRAAFGDVEFVLRHFGLGKFDGPPLTEPRDFSSGLGNKISKWF

SEQ ID NO: 64382 - DNA, 1425 bp, Yarrowia lipolytica CLIB122
  CDS (1)..(1425)
atgaactctcttctgcgactgcccgccctcaagcgaggtgtcttcaccatgtccaagcgaggtcttgccaccacggtttcccccaagactcgaacctccaacctcaagaacggactgaccattgcctccgagtccaaccctctggtgcagaccgccaccgtgggcgtgtggatcgacgccggctcgcgaaacgagaacgcctacaacaacggaaccgcccatttcttcgagcatctggccttcaagggcaccgacaagcgatcccagcaccagctcgagctcgacattgagaacatgggcggccacctcaacgcctacacctcgcgagagtccaccgtctactacgccaagtcgttcaaggacgacgtgcccaagtcggtggagatcctcgccgacattctgcagcactccaagctggccgagtctgccattgaccgagaacgagaggtcatcacccgggagctcgaggaggtcaacaagcagtacgaggaggttgtcttcgaccacctgcacgccaccgccttcatgaaccagcccctgggccgaaccatcctgggcccccgagagaacatccagaccatcaccaacaccgagctgcgaaagttcatcaccgagaactacaccgccgaccgaatggtcctggtcggagccggagccgtcgaccacgacgccctcgtcgagctcgccgagaagtacttctcccacctgccctcttcccagtctcccgttcccctcggtaccccccgatcttctggtgaggacgccaaccagaaccccatccccaactttgtgggatccgaggtccgactccgagacgacaccatgcccgtggcccacattgccattgccgtcgagggtgtctcttggacctccgaggactactacactgccctggtcgcccaggccatcatcggcaactacgaccgagccgtcggcacctcccgacaccagggctctcgtctctccaacattgtgtctgagaacaacctggccaactctttccagtccttctccacttcttactccgacaccggtctgtggggtatctacctgacctccgagaacaccactcagattgacgatctcgtccactttactctcaaggagtggaaccgactgtccacctctgtgtccaacctgcaggttgagcgagccaagtcccagctcaaggccggtctccttctgtctctggacggcaccacctacgttgccgaggacattggacgacagctcaccaccctgggccgacgagtcacccccgctgaggtcgaggccaagctcgaggccgtcaccgagcacgacgtccgagcctgggcccagaagactctctacgacaaggatattgctctggtcggactgggtcctatcgagggtctctacgattacaaccgaatccgaaacgacatgagcatgatgagatggtaa

SEQ ID NO: 64383 - protein, 474 aa, Yarrowia lipolytica CLIB122
MNSLLRLPALKRGVFTMSKRGLATTVSPKTRTSNLKNGLTIASESNPLVQTATVGVWIDAGSRNENAYNNGTAHFFEHLAFKGTDKRSQHQLELDIENMGGHLNAYTSRESTVYYAKSFKDDVPKSVEILADILQHSKLAESAIDREREVITRELEEVNKQYEEVVFDHLHATAFMNQPLGRTILGPRENIQTITNTELRKFITENYTADRMVLVGAGAVDHDALVELAEKYFSHLPSSQSPVPLGTPRSSGEDANQNPIPNFVGSEVRLRDDTMPVAHIAIAVEGVSWTSEDYYTALVAQAIIGNYDRAVGTSRHQGSRLSNIVSENNLANSFQSFSTSYSDTGLWGIYLTSENTTQIDDLVHFTLKEWNRLSTSVSNLQVERAKSQLKAGLLLSLDGTTYVAEDIGRQLTTLGRRVTPAEVEAKLEAVTEHDVRAWAQKTLYDKDIALVGLGPIEGLYDYNRIRNDMSMMRW

SEQ ID NO: 64384 - DNA, 1524 bp, Yarrowia lipolytica CLIB122
  CDS (1)..(1524)
atgaaatttcagttgggttattatcgcaacaaaacacacacaaaaaaaatgcttcggggaatcaaacgtgtgcctcgactcaatgtgggtgcctctaagcggctatactcgaccgaagccggcgacaccaaaatccacactctttccaacggcctgagagtcgcagtccgaccttccccaggcttcttctcagccctgggtctctatgtcgatgcaggctcccggttcgagccccgaaacctcagtggcgtcagtcatatcatggatcgactggcattcaagcaggcgacccagcgacggtctgccgacgaggttgctgacaccatcgagtctctaggaggcaactttttcggctccagtgcccgagagagcatcatttaccaggccacagtgttcaacaaggacgtagagacggctctggcgctgctggccgaaagcgtgattgtgccccagatcaccgaggaggacgtgggcgaaaaaaagaagaccatggagttcgagctggaccagctgtggaaggagccttcgctgattctgcctgaggtggtccacatgactgcatacgacggcactctgggcaaccctctggtgtgtccctacgagcagcttccccacatcaacgcccgggccgtcaacgagtaccgggatctcttttaccatcccgagcggtttgttctgggttttgtgggagtgcctgaggagaacgccattgagctggccgaaaagtactttggatggatgaagcggtccgataagcagctcgaaaaccccgccagtgtctacgttggaggcgagcagttcatggacgctgccgataccgagtttgcccacattcacgttgcttacgagggtcttcccgctgatgatcctgatgtgtacgctctgtcttgtctgcagactctgctcggaggaggaggctccttttccgcaggaggtcccggaaagggtatgtattcgcgactctatctcaatgttctcaaccggtttggctacattgaatcgtgccaggctttcaactaccatcacagtgactccggtatctttggaatctctgcctcgtgtgtccccaacgccgctccctacatggctgacgttattggtcgacagctggctctcactttcaccgagggcgagggcagtctgactcaccaggaggttgagcgagccaagaaccagctgcggtcttctctgctgatgcagctcgagtccaaggtggtgcaactcgacgatatgggccggcagatccagctgcatggccgaacggtgcccgtgacggaaatgtgcaagaacattgaaaacctgaccgtcaaggacatcaagagagtagcccagcgggtgctgaccggcaactccaacaaccccggcaacggcagcggcaagcccacagttgtcatgaacggagtgcgagcatggttcggagacgtggagcttgtgctggccaagtacggactgggaaagcagtccaagggcggaattcacacttcctctagagcccgaaacgaggccagaaagaactggtggtga

SEQ ID NO: 64385 - protein, 507 aa, Yarrowia lipolytica CLIB122
MKFQLGYYRNKTHTKKMLRGIKRVPRLNVGASKRLYSTEAGDTKIHTLSNGLRVAVRPSPGFFSALGLYVDAGSRFEPRNLSGVSHIMDRLAFKQATQRRSADEVADTIESLGGNFFGSSARESIIYQATVFNKDVETALALLAESVIVPQITEEDVGEKKKTMEFELDQLWKEPSLILPEVVHMTAYDGTLGNPLVCPYEQLPHINARAVNEYRDLFYHPERFVLGFVGVPEENAIELAEKYFGWMKRSDKQLENPASVYVGGEQFMDAADTEFAHIHVAYEGLPADDPDVYALSCLQTLLGGGGSFSAGGPGKGMYSRLYLNVLNRFGYIESCQAFNYHHSDSGIFGISASCVPNAAPYMADVIGRQLALTFTEGEGSLTHQEVERAKNQLRSSLLMQLESKVVQLDDMGRQIQLHGRTVPVTEMCKNIENLTVKDIKRVAQRVLTGNSNNPGNGSGKPTVVMNGVRAWFGDVELVLAKYGLGKQSKGGIHTSSRARNEARKNWW

SEQ ID NO: 64386 - DNA, 1440 bp, Aspergillus nidulans FGSC A4
  CDS (1)..(1440)
atggcttcccggcgcctagcgtacaacttcaaccaggctctgcgcagtcgcgccgccctgaagtccatccagcccgtcaagcgtggctttgcttctcccgtcgctctcccgtccaccactcagtccaccaccctctccaacggtttcacgatcgccactgaatactcgccgtgggcccagacatcgaccgtcggcgtctggatcgatgccggtagccgagcagagactgacaagaccaacggaaccgcgcacttcctggagcaccttgccttcaagggcactagcaagcgctcgcagcatcagctggagctcgagattgagaacatgggtgctcacctcaacgcctacacatcgagggaaaatactgtctactacgccaagtctttcaacaacgatgtccccaaggccgtcgatatcctcgccgatattctgcagaactccaagctcgagtccgctgccattgagcgtgagagggacgtgatcctccgtgagcaggaggaggttgacaagcagctcgaggaagttgtcttcgaccaccttcacgctaccgcttaccagcaccagccccttggccgcaccatcctcggccccaaggagaacattcagaccatcacccgcgacaacctgaccgactacatcaagaccaactacactgctgaccgcatggtcctcgttggtgctggtggtatcccccacgagcagctcgtcaagctcgctgagcagcactttggctcgctcccaagcaagcccccaacctccgcccttgccgccctcaccgctgagcagaagcgccagcctgagttcattggatccgagatccgtatccgtgatgatactcttcccactgctcacatcgctcttgccgtcgagggtgtcagctggaaggacgacgactacttcactgcccttgttgcccaggccatcgtcggcaactgggaccgtgccatgggcaactctccctaccttggcagcaagctcagctccttcgttgagcgcaacaaccttgccaacagcttcatgagcttctccaccagctacagcgacactggtctctggggtatctacctcgtctccgagaacatgaccggtcttgacgaccttatccactttgccctccgcgagtggtctcgtctgtcctttaacgtcaccgcggccgaggttgagcgcgccaaggcccagctcaaggcttccatcctcctctccctcgacggtaccaccgccattgctgaagacattggtcgccagatcatcaccaccggacgccgtctctcccctgaggacatcgagcgcacgattggccagatcaccgagaaggacgtgatggactttgccaaccgcaagctgtgggatcaggatatcgccatgagcgccgtcggcagcatcgagggtatcctcgattataaccgtatccgatcggacatgagccgaaacgcctactaa

SEQ ID NO: 64387 - protein, 479 aa, Aspergillus nidulans FGSC A4
MASRRLAYNFNQALRSRAALKSIQPVKRGFASPVALPSTTQSTTLSNGFTIATEYSPWAQTSTVGVWIDAGSRAETDKTNGTAHFLEHLAFKGTSKRSQHQLELEIENMGAHLNAYTSRENTVYYAKSFNNDVPKAVDILADILQNSKLESAAIERERDVILREQEEVDKQLEEVVFDHLHATAYQHQPLGRTILGPKENIQTITRDNLTDYIKTNYTADRMVLVGAGGIPHEQLVKLAEQHFGSLPSKPPTSALAALTAEQKRQPEFIGSEIRIRDDTLPTAHIALAVEGVSWKDDDYFTALVAQAIVGNWDRAMGNSPYLGSKLSSFVERNNLANSFMSFSTSYSDTGLWGIYLVSENMTGLDDLIHFALREWSRLSFNVTAAEVERAKAQLKASILLSLDGTTAIAEDIGRQIITTGRRLSPEDIERTIGQITEKDVMDFANRKLWDQDIAMSAVGSIEGILDYNRIRSDMSRNAY

SEQ ID NO: 64388 - DNA, 1713 bp, Aspergillus nidulans FGSC A4
  CDS (1)..(1713)
atgcgccgctcattattacgggctgtcgagtccaccaaaccccttgctcgggtgtcacgctcagtttcgcgaggttacagcaccgtcaacgaaactggcaccaaggatcccgccgagttagaccaaatcactacgctgccgaatggcatccgcgtcgccaccgaatctcttcccggccccttcgcaggtgtcggagtttacgttgacgccgggtctcgctacgaggatgcgagcttgcgaggtgtgagccatatcatggatcgtttggcctttaagtcaaccaagacacgcactgcggatcaaatgcacgagacgctagagtcactgggtgggaacattcagtgcgcctcttcccgtgagtcgttaatgtaccagtccgccagcttcaactcggccgtcccgacaacgctcgggttgttggcggagaccatacgcgatccccttattacagaggaagaggttctacagcaacttgctaccgcggaatacgagatcaacgagatttgggcgaaaccggagcttatcctgcccgagttggtgcacacggccgcctacaaagataatacgttagggcatcctctgctctgtccgcgcgagagattgactgagatcaacaaggctgttgtggaaaagtatagagcaactttcttccgtcccgaacgcatggttgttgcctttgctggtgtgccgcatcacgaagcagtaaggctcacagagtcgttgttcggtgatatgcaaggacctagcacgaacaatggacctagcctgtcggggaccggtgttgacaccaccttgtcagattcaaagtctgaaggacaatttgcggccgctcctcagtttacaccgacctcaacggtcgcgtctgcccctgccacaaccgactcaagcattctttcgaaactcccctttctcaaaaaattcgggtccaataatccctcatcctcagagtctgcaccagtagatctgacccaagcttcccactacaccggtggatttctaactctcccccctattcctccgccagcgaatcctatgctccctcgattgagctatatccacctcgccttcgaggcgcttcccatttccgaccctgacatctacgctcttgcaaccctccaaacactccttggaggtggcggatccttctccgccggcggcccggggaagggaatgtactctcgtctgtatacaaacgtgcttaatcaacacggctgggtcgaaagttgcattgcgttcaatcacggctacacagacagcggtatcttcggtatctccgcttcatgcagtcccacccgcatcaaccaaatggtcgaagtgatgtgccgcgaacttcaaaacctcaccctcgacaccgggtacacgtctctccagccgcaggaggtcaaccgcgcgaagaaccagctgcgctcgtcacttttaatgaaccttgagtcgcgcatggttgagctcgaggatctaggccgccaggtgcaagttcacggccggaagatcggcgtcacggagatgtgcaagcacattgagtctcttaccgttgaggatctgcgacgcgtcgcgcgcaaggtcttcggtggccaggtccataacaaaggacagggtactggtaagcctactgttgtgcttcaggagggtgagctggaaggattcaagttgcgtcccttcgcgtgggatgagattcaggaacggatagcaagatggaagctggggaggttgtag

SEQ ID NO: 64389 - protein, 570 aa, Aspergillus nidulans FGSC A4
MRRSLLRAVESTKPLARVSRSVSRGYSTVNETGTKDPAELDQITTLPNGIRVATESLPGPFAGVGVYVDAGSRYEDASLRGVSHIMDRLAFKSTKTRTADQMHETLESLGGNIQCASSRESLMYQSASFNSAVPTTLGLLAETIRDPLITEEEVLQQLATAEYEINEIWAKPELILPELVHTAAYKDNTLGHPLLCPRERLTEINKAVVEKYRATFFRPERMVVAFAGVPHHEAVRLTESLFGDMQGPSTNNGPSLSGTGVDTTLSDSKSEGQFAAAPQFTPTSTVASAPATTDSSILSKLPFLKKFGSNNPSSSESAPVDLTQASHYTGGFLTLPPIPPPANPMLPRLSYIHLAFEALPISDPDIYALATLQTLLGGGGSFSAGGPGKGMYSRLYTNVLNQHGWVESCIAFNHGYTDSGIFGISASCSPTRINQMVEVMCRELQNLTLDTGYTSLQPQEVNRAKNQLRSSLLMNLESRMVELEDLGRQVQVHGRKIGVTEMCKHIESLTVEDLRRVARKVFGGQVHNKGQGTGKPTVVLQEGELEGFKLRPFAWDEIQERIARWKLGRL

SEQ ID NO: 64390 - DNA, 1569 bp, Candida albicans SC5314
  CDS (1)..(1569): transl_table=12
atgctaagtagaagaacaataactaggaaactaaataaaggtgtttcaaaatctttactatcatttgcaagatataatcattccataaccagtaccacgacaccggcatcactgcaaccccatattgaattaaccacatttgccaatggattgagattaattactgattctacaccgggacatttcaatgctgttggagcgtatattgatgctggttcaagatacgaagatcctaaggcaccaggattatcttatttgcgcgatagattatcctggaaatcaacagaagattttacggggcaacaaatgttggaaaatttatcgaaattgggtggtaattatatgagttcggctcaaagagagtcaatgatttatcaagcatctgtttttaataaagatattgatagaatggttggtatgattggacaaaccatcagatatcctattttcagtgatcaagaattccaagaagcattacaaaccgctgaatatgaagtagcagaattggcatacaaatctgatttatatttacctgaagaattacatactgtggcgtataaggaaaacactttaggactaccattattcatccctcaggaaagaatccccttggtatctaaatcagacgttattgattataataataagtttttccaaccacaaaacactgtcattgccatggttggtgttcctcatgaatatgcattgaaactaattatggaaaattttggtgattgggcaaatacaaccacaacaaaaccaaatccaggaattaagaattatactggtggtgaaatttcattaccttatactccaccattatatgccaatttacctgaattatatcatattcaaattggattcgaaaccacgggacttttaaatgacgatttatatgctttagccactttacaaaaattattaggtggtggctcttcattttccgctggaggtcctggaaaggggatgttttctcgattatatactaaagtattgaacaaatatccatttgttgaaaattgtatgagtttcaatcattcttatattgatagtggtattttcggtataacattatctttagtccctgaagctgctcatgtttcatcacaaatcattgctcatgaattgagtcaattgttagtcacagaagaatcacaaggcggaatgaatgcaaaagaggttcaacgtgctaaaaatcaattaattagttcattattaatgaatgttgaaagtaaattggcaagattagaagatttgggtcgtcaaatacaatgtcaagggaaaatcactactattgatgaaatggttgataaaattaatcgtttaactataaaagatttacaaaatgttgcagaaaaagtattgacaggtaaggttataacttctaatggtggtactagtttgggtcttccatcaattgttatgcaaggagaaagagaaacttttggtgatgtggaatttattcttcgaagatatggattaggtaattacaaaggtccagaaatcacggaaccaagagatttcagtagtaatcaaaatgaaaagaagaaaaagagtcgttggttttag

SEQ ID NO: 64391 - protein, 522 aa, Candida albicans SC5314
MLSRRTITRKLNKGVSKSLLSFARYNHSITSTTTPASSQPHIELTTFANGLRLITDSTPGHFNAVGAYIDAGSRYEDPKAPGLSYLRDRLSWKSTEDFTGQQMLENLSKLGGNYMSSAQRESMIYQASVFNKDIDRMVGMIGQTIRYPIFSDQEFQEALQTAEYEVAELAYKSDLYLPEELHTVAYKENTLGLPLFIPQERIPLVSKSDVIDYNNKFFQPQNTVIAMVGVPHEYALKLIMENFGDWANTTTTKPNPGIKNYTGGEISLPYTPPLYANLPELYHIQIGFETTGLLNDDLYALATLQKLLGGGSSFSAGGPGKGMFSRLYTKVLNKYPFVENCMSFNHSYIDSGIFGITLSLVPEAAHVSSQIIAHELSQLLVTEESQGGMNAKEVQRAKNQLISSLLMNVESKLARLEDLGRQIQCQGKITTIDEMVDKINRLTIKDLQNVAEKVLTGKVITSNGGTSLGLPSIVMQGERETFGDVEFILRRYGLGNYKGPEITEPRDFSSNQNEKKKKSRWF

SEQ ID NO: 64392 - DNA, 1884 bp, Ustilago maydis 521
  CDS (1)..(1884)
atgaggctatcagtgtcagcttgctcctctgccgtgacacgggcattgcctctctcacgagctagccagattcgctcaatcgccacagcgcctgctacatcttcggcactgcccaaacaagctacgacagctcctcgaactactgctgccaagtcgactgcaactctccctgtaccattaagcgtcgcttccccacaacccctcatttcacacaacagtgccttggcacgcttcgtgtcgtcatctgcgattgcgactgctcccgtcgcgtcgtccgtctcctcttcgtccgaggcttcgccttatgcatctccgctgcccacctcgtcgctcatcaacgtaaccacgctacccaatcgagtgcgagtagcgacagaagctacgccaggccattttagtgctgtcggtgtctacatcgacgccggctctcggtatgaacgcccttgggtagctggcgaatctggctcttctcatcttctcgaccgccttgccttcaagtcgaccaccaaccgctcctcccagcaaatgacgtccgagatcgaggcgctaggcggaaatgtcatgtgctcctcttctcgcgaaaccatcatgtaccaatcgagtgtcttcaacaaggatgtatctgctgtactctccattcttgctgacaccatcctcaaccccctcctcagccccgaggagctcgacgtccagagggaagccgctgcctacgagatccaagagatttggtccaagcccgagatgatcctgcctgaactcttgcatactacggcataccaatccaacacgcttggtaaccctcttctctgccctatcgagagtcttgagcaaatgacggccgaaaacctgcgcaactttatgtccacttggtacaaacccgagaggatcgtggtcgcaggtagtggcatgccccacgagcagcttgtcgagctgtcccaaaagctctttggtgatctcaagccttcctcggatcctggtcgcctcagctctggctcctcgtcgctttcgagctcgcccgcttcgtcgacgtccacatcatcctcgtcgcgctcttcatctctgtcgtcgctcttctcccgctcttcctccaacttttcaacctcgtcgtcgtcgtcggccacaccttctccagctgagctggctgacctcgtctcgacaccatcgcactacacgggcggcgagctttacatcccgcagtccgatctcgaattcacgcacgtctacgtcgcttttgaaggcctcagtatccacgacaaagacatctacgccctcgccaccctacagatcctccttggcggcggtggcagcttcagcgccggtggaccgggcaaaggcatgtattcgcggctctacaccaatgtgctcaatcagcatcacagcgtcgactactgtgctgccttccaccattgttattccgactctggcctttttggcatctcggcctcggtccatcccagcttcaatgcgagcattgtccacgtcattgcacgcgagcttgagctttgcaccagctccatctaccaaggctctgttacacaggccgagctcaatcgcgctaagaaccagctcaagagttcgctcgtcatggcgctcgaatcgaggttggtcgaagtcgaggatctgggccgtcagatccaggcgcacggtaagaaggtttcggtggaagaaatgtgccagaagattgaccaggtggatctcagcacgctcaacagggtagcaacgcgcgtcttgaggcctcaaaagatgtcggtgtctgcagcaaagtcgccacgcggatcgggtcaagctaccgttgtcgctcagggccagctcgagggtttgggcgatgtccgtgacttgcttgccagacgcgggctcggtgtttcgcccaagcacgccgcatga

SEQ ID NO: 64393 - protein, 627 aa, Ustilago maydis 521
MRLSVSACSSAVTRALPLSRASQIRSIATAPATSSALPKQATTAPRTTAAKSTATLPVPLSVASPQPLISHNSALARFVSSSAIATAPVASSVSSSSEASPYASPLPTSSLINVTTLPNRVRVATEATPGHFSAVGVYIDAGSRYERPWVAGESGSSHLLDRLAFKSTTNRSSQQMTSEIEALGGNVMCSSSRETIMYQSSVFNKDVSAVLSILADTILNPLLSPEELDVQREAAAYEIQEIWSKPEMILPELLHTTAYQSNTLGNPLLCPIESLEQMTAENLRNFMSTWYKPERIVVAGSGMPHEQLVELSQKLFGDLKPSSDPGRLSSGSSSLSSSPASSTSTSSSSRSSSLSSLFSRSSSNFSTSSSSSATPSPAELADLVSTPSHYTGGELYIPQSDLEFTHVYVAFEGLSIHDKDIYALATLQILLGGGGSFSAGGPGKGMYSRLYTNVLNQHHSVDYCAAFHHCYSDSGLFGISASVHPSFNASIVHVIARELELCTSSIYQGSVTQAELNRAKNQLKSSLVMALESRLVEVEDLGRQIQAHGKKVSVEEMCQKIDQVDLSTLNRVATRVLRPQKMSVSAAKSPRGSGQATVVAQGQLEGLGDVRDLLARRGLGVSPKHAA

SEQ ID NO: 64394 - DNA, 1266 bp, Xanthobacter autotrophicus Py2
  CDS (1)..(1266): transl_table=11
atgagcgtgaagatttcggtcctcgacaacggcgtcaccgtcatcaccgacgagatgagccatctcggcaccgcctccctcggcatctgggtgggcgcgggggcgcgggacgagcaggaggacgagcacggcatctcccatctgctggagcacatggccttcaagggcacgcgccggcgctccgcccgccgcatcgccgaggagatcgagcaggtgggcggcgacatcaatgccgccacctcggtggagcagaccacctacaatgtccgcgtgctgggggaggatgtgggcctcggcatcgacatcctcgccgacatcctcaccgagccggccttcgcccccgacgagctggagcgggagaagaacgtgattgtgcaggagatcggcgcggtcatggacacgcccgacgacctggtgttcgacctgttccaggagcaggccttccccggccagagcgtgggccgctctatcctcggcacgccggacacggtgcgcgccttcagtcgggaccagctcggcgcctatctcgggcgcacctatcgcggcccccgcatggtggtggccgccgccggcgcggtggagcacgaccggctggtggaagaggccggccaacggctgaagatcatcgcccccgccaccaagccggagctgccccaggccacctatggcggcggcacccgactgctcgcccgtgacctggaacaggtgcatgtgttgctggggctggagggctgctccttcaaggaccccgaatatcacgccgtgcaggtgctcgcgaacgtgctgggcggcggcatgtcctcgcgcctgttccaggacgtgcgtgaggatcgcggcctctgctattcgatctatgcttttcactggagctatcaggataccggcctgttcggcgtctatgccggcaccgacaccggcgacgtggaggaactgtccaacgcggtcatcgaccagattctcgacacggccgaaaccgtgaccgagctggaggtggcccgcgccaaggcgcagatgaaggtggggctgctcgccgcgctggaaagctccggcgcgcgagcggaccagctcgcccggcagatcctcggcttcggccgggtgatcccggtggaggagatcgtggcgcgggtggatgcggtggacgtggcaggggtgcgccgggcggcgcagggcctcatcggccgtggccggcccacattgaccgccatcggtccgggcggcggccttgagcctgccgcacgggccgtggagcgtttgaaggttcactag

SEQ ID NO: 64395 - protein, 421 aa, Xanthobacter autotrophicus Py2
MSVKISVLDNGVTVITDEMSHLGTASLGIWVGAGARDEQEDEHGISHLLEHMAFKGTRRRSARRIAEEIEQVGGDINAATSVEQTTYNVRVLGEDVGLGIDILADILTEPAFAPDELEREKNVIVQEIGAVMDTPDDLVFDLFQEQAFPGQSVGRSILGTPDTVRAFSRDQLGAYLGRTYRGPRMVVAAAGAVEHDRLVEEAGQRLKIIAPATKPELPQATYGGGTRLLARDLEQVHVLLGLEGCSFKDPEYHAVQVLANVLGGGMSSRLFQDVREDRGLCYSIYAFHWSYQDTGLFGVYAGTDTGDVEELSNAVIDQILDTAETVTELEVARAKAQMKVGLLAALESSGARADQLARQILGFGRVIPVEEIVARVDAVDVAGVRRAAQGLIGRGRPTLTAIGPGGGLEPAARAVERLKVH

SEQ ID NO: 64396 - DNA, 1593 bp, Ixodes scapularis
  CDS (1)..(1593)
atgaagcttgtgtcgatgaaatggcggcggacgttctcccgccagcgcacggggtgcgcgggcaggcgcgccctgtgcacgtccagtgcggttccccccaaggacgagatcaccaagatctcgctgtcgaagcccctcccgggctttccccagcccgtgtatgcggtgccttccccccacgaccaggccaccgaggtgaccaccctcgaaaacgggctcaaggtggcctcccagaataagtttggacagttctgcaccgtgggagtggtgatcgactctggctcgcggtacgaggccccctaccccagcggcatctcgcacttcctggaaaagctcgcatttaactccaccaaagagtttcgggaccgggatgccgtgctgcaggaactggaaaaacagggtggcatctgcgactgccagggatccagagacacaatgatctacgctgcctcggccgatgcgagggggcttggacccgtggtcaagctcctgggggacgtcgtcctcaggcccctcttcaaagaagaggaggtggagaggacgcggcagacgatccagttcgaactggaggacatcgacatgaagccagaccaggagcagctcctctttgaaatgatccacgccgcggcgtacacggacaacaccctgggcctgcccaagctgtgcccccgggaaaacctgggagtggtgaacagggaggtgctgtacaccttcctgagccaccactacgtgccccagagaatggtggtggcgggggtcggggtggagcacgggcctctcgtcgagatggtgcacaggcactttgtggagaaggcacccctctggaaggagaaccccgagctcatcctcgacagcaaaatggagcctgacaactccatagcacagtacacgggaggtatcgtaaaggtgcccaaggacctgtccaaggtgagccccggccagacacccatcccggacctggcccactttgtgctgggcctggagagctgctcccaccaggacccggacttcattgcgttctgcgtgctcaacatgatcatgggcggagggggctccttctccgcgggaggcccgggcaagggcatgtacacccgcctctacaccaatgtcctcaaccggtatcactggatgtacaatgccacagcatacaaccatgcttatggagattcaggcatcttctgcatccacgccagtgccgacccatcgcagctgcgtgaggtggtgaacgtcattgtgagagaattcgccatcatggcaggaagggttgctgaaatggagctggagcgtgccaagacccagctgcagtcgatgctgctcatgaacctggaggcaaggccagtcatgtttgaggacattgggcgtcaggtcttggccagcgggcaccgcaaggacgccggctactacatctcggagattggcaagattaaggaggaggacatccaccgagtggtgcagcggatgctccgcggccgagcctcggtggcggcgttaggcaatctgtccggcctgccccccctggaggacatagagacggggctgctgaataaggagggcatgctccccaccaagcgcttctccatcttcaggcagtga

SEQ ID NO: 64397 - protein, 530 aa, Ixodes scapularis
MKLVSMKWRRTFSRQRTGCAGRRALCTSSAVPPKDEITKISLSKPLPGFPQPVYAVPSPHDQATEVTTLENGLKVASQNKFGQFCTVGVVIDSGSRYEAPYPSGISHFLEKLAFNSTKEFRDRDAVLQELEKQGGICDCQGSRDTMIYAASADARGLGPVVKLLGDVVLRPLFKEEEVERTRQTIQFELEDIDMKPDQEQLLFEMIHAAAYTDNTLGLPKLCPRENLGVVNREVLYTFLSHHYVPQRMVVAGVGVEHGPLVEMVHRHFVEKAPLWKENPELILDSKMEPDNSIAQYTGGIVKVPKDLSKVSPGQTPIPDLAHFVLGLESCSHQDPDFIAFCVLNMIMGGGGSFSAGGPGKGMYTRLYTNVLNRYHWMYNATAYNHAYGDSGIFCIHASADPSQLREVVNVIVREFAIMAGRVAEMELERAKTQLQSMLLMNLEARPVMFEDIGRQVLASGHRKDAGYYISEIGKIKEEDIHRVVQRMLRGRASVAALGNLSGLPPLEDIETGLLNKEGMLPTKRFSIFRQ

SEQ ID NO: 64398 - DNA, 1866 bp, Arabidopsis thaliana
  CDS (112)..(1596)
ccccgaaaactgagaaaaagcctccgtctcctcctctctctctattcatcagcctcaacctctctttcgtcgtcgactcagtttccgatttagggttacccaatcttcgccatgtatcgcacggcagcttcacgagccagggctcttaagggagttcttactcgtagtttgagaccagcgcgttatgctagttctagtgctgttgcggagacgagttcgtcaacgccggcttacttgagctggttgagtggtgggtctcgtgctgcgcttacttcattggatatgcctctacaaggtgtttctcttcctccgccgcttgctgataaagtcgagccgagcaaacttcagatcactactcttccaaatggtcttaagatagcctcagagacgactccgaatccggcagcttcgattggtttatatgttgattgcggttctatttatgaggcgccttatttccatggagctacacatttgcttgaaagaatggctttcaagagcacgttgaacagaactcattttcgtcttgtgagggaaattgaggctattggaggcaacacatccgcttctgcgtctcgagagcaaatgagttacactattgatgctcttaagacctatgtccctgaaatggttgaagttcttattgacagtgttagaaaccctgctttcttggactgggaagtgaatgaagagctacggaagatgaaggtagagatagcggaacttgcaaagaaccctatgggtttcctcttggaggccattcattctgctggttactctggtccattggcaagtcctctgtacgcaccggagtctgctttagatagattgaatggggagctcttggaagagtttatgactgagaatttcactgctgcacggatggtattggcggcaagtggagtagaacatgaggaacttttaaaagttgctgagccattaacttctgaccttcctaatgtaccaccccaattggctccaaaatctcagtatgtcggtggagattttcgccaacatactggtggagaggctacacactttgcggttgctttcgaggtgcctggctggaataacgagaaagaagcagtcaccgccactgttctccagatgcttatgggaggaggtggctcattctctgcgggaggtcctggaaaaggaatgcactcgtggctttatcgccgtgttctaaacgaatatcaggaggttcagtcatgcactgcattcactagcatctttaacgacaccgggttgtttggaatctatggttgctcgagtcctcaattcgctgcaaaagcaattgaattagcagctaaagaactcaaagatgttgcaggaggaaaagttaaccaggcacatcttgatcgtgccaaggcagccacaaaatctgcagttctgatgaatttggaatctcggatgattgcagcagaagacattggtagacagatacttacatacggagagaggaaaccagttgatcaattcttgaagtcagtagaccaactaaccttgaaagacattgcagacttcaccagcaaggttatttcaaagcctttgacaatgggttcctttggagatgttggctgttccgagctatgacacaataagcagcaaatttcgttgaagcaaaacaaacaatttgccaaatcaacaatattttgggacttgtaaaataaagaagatcttggggagaagaagacccaaccaattttaattttaatttttttttttacaattacagtttcgtatttttatgaaatggattttgtttccatcgacagatataaatgactggattttgtccggtttgtctctccaattttcaggagtatttgtattccaataaataatcttttactaaaaaaaaaa

SEQ ID NO: 64399 - protein, 494 aa, Arabidopsis thaliana
MYRTAASRARALKGVLTRSLRPARYASSSAVAETSSSTPAYLSWLSGGSRAALTSLDMPLQGVSLPPPLADKVEPSKLQITTLPNGLKIASETTPNPAASIGLYVDCGSIYEAPYFHGATHLLERMAFKSTLNRTHFRLVREIEAIGGNTSASASREQMSYTIDALKTYVPEMVEVLIDSVRNPAFLDWEVNEELRKMKVEIAELAKNPMGFLLEAIHSAGYSGPLASPLYAPESALDRLNGELLEEFMTENFTAARMVLAASGVEHEELLKVAEPLTSDLPNVPPQLAPKSQYVGGDFRQHTGGEATHFAVAFEVPGWNNEKEAVTATVLQMLMGGGGSFSAGGPGKGMHSWLYRRVLNEYQEVQSCTAFTSIFNDTGLFGIYGCSSPQFAAKAIELAAKELKDVAGGKVNQAHLDRAKAATKSAVLMNLESRMIAAEDIGRQILTYGERKPVDQFLKSVDQLTLKDIADFTSKVISKPLTMGSFGDVGCSEL

SEQ ID NO: 64400 - DNA, 1440 bp, Aspergillus oryzae
  CDS (1)..(1440)
atggcctcccggcgcctagcatttaatttcaaccaggctctccggagccgggctgctctgaagtccatccagcccgtcaagcgaggcttctcttccccggttaccctcccatccaccacccagtcgaccaccctctccaacggcttcacgatcgccactgagtactccccatgggcccagacctcgactgttggcgtgtggatcgatgccggcagcagggcagagactgacaagaccaacggaaccgcgcacttccttgagcaccttgctttcaagggcaccaacaagcgcagccagcaccaattggagcttgagatcgagaacatgggcgctcacttgaacgcctacacatcgagagaaaacaccgtttactacgccaagtccttcaacaacgatgttcccaaggccgttgatatcctcgccgacatccttcagaactccaagctcgagcctggtgctattgagcgtgagagggacgtgatcctccgtgagcaggaggaggttgacaagcagttcgaggaggttgtcttcgaccaccttcacgccaccgcttaccagaaccagccccttggtcgcaccatcctcggccccaaggagaacatccagaccatctcccgcgacaacctggttgactacatcaagaccaactacactgctgaccgcatggtccttgttggtgccggtggtattcctcacgagcagcttgtccgcctcgccgaggagcacttcggcagcctccccagcaagccccctacctctgctgctctcgccctcaccgctgagcagaagcgcacccccgagttcattggatccgaagtgagactccgtgatgacaccatccccactgctcacattgccctcgccgttgagggtgtcagctggaaggacgatgactacttcactgccctcgtcgcccaggccattgttggcaactgggaccgtgccatgggcaactctccctacctcggtagcaagctcagctccctcgttgagcaccacggccttgccaacagcttcatgagcttctccaccagctacagcgacactggtctctggggtatctacctcgtgtctgagaacctgaccgccctcgacgacctcactcacttcgccatgcgtgagtggtctcgcctgtgcttcaacgtcacctctgccgaggttgagcgtgccaaggctcagctcaaggcttccatcctcctctcccttgacggcaccaccgccgtcgccgaagacattggtcgccaaatcatcaccactggccgccgcctctcccccgaggacattgagcgcacaatcggtcagatcagcgagaaggatgtcatggactttgccaaccgccgcatctgggatcaggacgtcgctgtcagcgccttcggcagcgttgagggtctcctcgactacaaccgtatccgcgcggacaccagccgtaacaccctgtaa

SEQ ID NO: 64401 - protein, 479 aa, Aspergillus oryzae
MASRRLAFNFNQALRSRAALKSIQPVKRGFSSPVTLPSTTQSTTLSNGFTIATEYSPWAQTSTVGVWIDAGSRAETDKTNGTAHFLEHLAFKGTNKRSQHQLELEIENMGAHLNAYTSRENTVYYAKSFNNDVPKAVDILADILQNSKLEPGAIERERDVILREQEEVDKQFEEVVFDHLHATAYQNQPLGRTILGPKENIQTISRDNLVDYIKTNYTADRMVLVGAGGIPHEQLVRLAEEHFGSLPSKPPTSAALALTAEQKRTPEFIGSEVRLRDDTIPTAHIALAVEGVSWKDDDYFTALVAQAIVGNWDRAMGNSPYLGSKLSSLVEHHGLANSFMSFSTSYSDTGLWGIYLVSENLTALDDLTHFAMREWSRLCFNVTSAEVERAKAQLKASILLSLDGTTAVAEDIGRQIITTGRRLSPEDIERTIGQISEKDVMDFANRRIWDQDVAVSAFGSVEGLLDYNRIRADTSRNTL

SEQ ID NO: 64402 - DNA, 1752 bp, Aspergillus oryzae
  CDS (1)..(1752)
atgcgtcgctcagtattgcgggcagttgagtccgcgaaaccactcgcccgcgcgcctcgttccgtttcaaggagcttcgctactgtcaacgaggccggttccaaggatcctgttgagctcgaccagatcaccactttgccgaatggaattcgtgtcgctactgagtctttgccaggccccttctctggtgttggagtttacgtcgacgccggttcccgatacgaggatgagagtctacgaggagttagccacataatggatcgactagcattcaagtcgactaagaagcggtctagtgacgagatgcttgaagttcttgagggccttggaggaaatattcagtgcgcctcttcacgagagtcgctgatgtaccagtccgccagtttcaactcggctgtcccaacaactctggggcttttggctgagacaattcgtgatccgctcatcacagaagaggaggtgctccagcagctgggtacagctgagtatgagattggcgagatctgggccaagccggagcttattctaccggagctggtacatatggccgcctacaaggataacacattgggaaaccctctattatgcccggaggaaagattgggagagattaacaaagcggttgtggataaatatcgcgaagtcttcttcaaccctgacaggatggtcgttgcgttcgccggtgtgccgcatgatgtagctgtcaagctcacggagcagtacttcggtgatatgcaggggaaaaagtcgagcaatggtcctgttctatcgggaaccggcattgaaactactttgtcgaactcccagtcggccgtcgaagaagggcaagtgcctacaattccccagttcacgccatcgtctaccacatcgaccactcctgcatccccgaagtccgagtccagtctcctttcaaaacttccattcctcaaaagcctttccggatcgcagaagggctccgtgtcaccattggatccttctttggtggaaccgtcaacattcaacttgacacgcccttctcattatactggcggtttcctcgctctccctccaattcgccctccggcgaaccctatgcttcctcgcttgagccatatccatctcgcatttgaggctcttcccatctccaaccctgacatctatgctctcgcaaccctccagacactgctcggtggtggtggatcattctctgcaggcggtcccggcaagggtatgtactcacgcctttacacaaacgtgttgaaccagcatggatgggttgagagctgtattgcttttaaccatagctacactgacagcggaatctttggaatctctgcctcctgcagtccgacccggacgcctgagatgcttgaggtcatgtgccgcgaactgcaggcactgactctcgacaacggttactctgccttgcaggcccaggaagttaaccgtgcaaagaatcagctccgctcctctcttctcatgaacctggagtcacgaatggtcgaattggaggacctcggacgccaggttcaggtgcatggccgcaaggttggagtgaaagagatgtgcgatcatatcgatgcattgaccgtggaggatctgcgccgggttgcccgacaggttttcggtggtaacgtccagaacaagggacaaggcactggtaagccaactgtggttctgcaggaaggcgaactggagggatataaacttcgttctttcccatgggaggagattcaagaaaggatcgccaggtggaagttgggaagaaggtga

SEQ ID NO: 64403 - protein, 583 aa, Aspergillus oryzae
MRRSVLRAVESAKPLARAPRSVSRSFATVNEAGSKDPVELDQITTLPNGIRVATESLPGPFSGVGVYVDAGSRYEDESLRGVSHIMDRLAFKSTKKRSSDEMLEVLEGLGGNIQCASSRESLMYQSASFNSAVPTTLGLLAETIRDPLITEEEVLQQLGTAEYEIGEIWAKPELILPELVHMAAYKDNTLGNPLLCPEERLGEINKAVVDKYREVFFNPDRMVVAFAGVPHDVAVKLTEQYFGDMQGKKSSNGPVLSGTGIETTLSNSQSAVEEGQVPTIPQFTPSSTTSTTPASPKSESSLLSKLPFLKSLSGSQKGSVSPLDPSLVEPSTFNLTRPSHYTGGFLALPPIRPPANPMLPRLSHIHLAFEALPISNPDIYALATLQTLLGGGGSFSAGGPGKGMYSRLYTNVLNQHGWVESCIAFNHSYTDSGIFGISASCSPTRTPEMLEVMCRELQALTLDNGYSALQAQEVNRAKNQLRSSLLMNLESRMVELEDLGRQVQVHGRKVGVKEMCDHIDALTVEDLRRVARQVFGGNVQNKGQGTGKPTVVLQEGELEGYKLRSFPWEEIQERIARWKLGRR

SEQ ID NO: 64404 - DNA, 1851 bp, Solanum tuberosum
  CDS (113)..(1627)
aactcagtcttcctccatctctgcagctaaatcccgagccctcagtcaccattgaaacagagggaaaagcactttccactttctcctcagctatcgcatcctcacattcatcatgtacagagccacatcttctcgcctcagagcacttaaggttcgcggaacgaatagggtcttggcaagatttttatgttcaactgctgttgcaaccaagccatcagggggcctctttagttggttaactggtggtgggtcagattcattaccccctctggatttccccctcaaggatattcagctccctccaccattacctgattatgttgaacctggaaagaccaagataacaactctcacaaatggtctcaaaatagcatcagaaatatcagcaagccctgctgcctctattggtttatacgtcgattgtggctcaatttacgaagcaccagcttcatatggagccacacacctcctggaacgcatggcctttaaaagcacattaaaccgaagccacttacgtattgtacgggaagttgaagcaattggtggtaatgtaactgctgctgcctcacgagagcatttgatatacacttacgatgctttgaaaacatatgttcctcaaatggtggagctgcttgttgactctgttagaaatccagcatttttagattgggaagttagcgaacagcttgagaaggttaaatcggagattgatgagtacaccaaaaacccacaacacttgcttctggaggcagttcactctgctggttattctggtccgtatgggaattctcttgcagccacagaagccacagtgaacaggttgaacagcactgtattggaagagtttgtagctgagaattatactgctcctcgtattgttcttgctgcatcaggtgttgaacatgaagaattgttaaaagttgcagagcctcttttatcggacttacctaaggtgccccgcgctgaggagccaacacctgtgtatgtaggaggtgattaccgccgccaagctgattcagggatgactcattttgcacttgcttttgaagttcctggtggctggctaaaggaaaaggatgcaatgactttaactgttcttcagatgcttatgggaggaggtggatctttctcagctggtggtcctggaaaagggatgtattctagactatatcttcgtgtcttgaatgcatacccgcagatccatgccttttccgcattcagcagtatttataataacactggactatttggaattcaagcagccacaacctcagattttgcaccaagagctattgaagtagcggttaaagagcttactgcagttgcaaacccgggcgaagttgacatggtacagctagaccgtgcaaaacagtcaacgaagtctgctattctgatgaacctggaatctcgtatggttgcatccgaagatattgggagacaacttttgatatacggagagaggaaaccagtggagcatgtcctgaaagccattgatgcaatttcagcaaatgatattgcttctgtagcacaaaagcttatttcttctcccttgacaatggcatcctatggagacgttctttcactccccacatatgacgtggttagcagcaggtttcattccaaataaaaaatttctaacttgggaatttagacgttcgctgttgcctcaatttgtggaaaataaggaaatgcacaagctatagataaattagccatctgccaagcttttggtgagcagcttttcggcacaatttattctttggtgtaccttttgcaagttattcagcactttattcttcattcatgtgataatactctttgatttgaaatgctaataaatgcgactttaaa

SEQ ID NO: 64405 - protein, 504 aa, Solanum tuberosum
MYRATSSRLRALKVRGTNRVLARFLCSTAVATKPSGGLFSWLTGGGSDSLPPLDFPLKDIQLPPPLPDYVEPGKTKITTLTNGLKIASEISASPAASIGLYVDCGSIYEAPASYGATHLLERMAFKSTLNRSHLRIVREVEAIGGNVTAAASREHLIYTYDALKTYVPQMVELLVDSVRNPAFLDWEVSEQLEKVKSEIDEYTKNPQHLLLEAVHSAGYSGPYGNSLAATEATVNRLNSTVLEEFVAENYTAPRIVLAASGVEHEELLKVAEPLLSDLPKVPRAEEPTPVYVGGDYRRQADSGMTHFALAFEVPGGWLKEKDAMTLTVLQMLMGGGGSFSAGGPGKGMYSRLYLRVLNAYPQIHAFSAFSSIYNNTGLFGIQAATTSDFAPRAIEVAVKELTAVANPGEVDMVQLDRAKQSTKSAILMNLESRMVASEDIGRQLLIYGERKPVEHVLKAIDAISANDIASVAQKLISSPLTMASYGDVLSLPTYDVVSSRFHSK

SEQ ID NO: 64406 - DNA, 1581 bp, Cryptococcus neoformans
  CDS (1)..(1581)
atgatgaggataccagcagccccccgcttcgcttcaaaagcgagcaccagctcgagactgctagtgccttcccgacgggccacaacagccgccacttcttccgctcacacattgaaccctgctggaacggtcacaacacttcctaacaaacttcgtgttgctaccgagtctattcctgggcatttccacgctgtgggagtctacatcgatgccggtagtcgatatgaaagtcagaggactagtggcgtatcccatcttttggacagactggctttcaagagcacagacaagcatactgatgcccagatgaccaccctcatcgactctttgggttcacaagttacttgtgcttcttcccgtgagaccatcatgtaccagtcaaccgttttcccccagtctctccctctcgcattcgaactcatctcttccactatccgacaccctctccttctcccagaagagcttttggcgcaaaaggaggctgctgcgtatgagattcgggaaatctgggcgaagccggaattgatcttgccggaaatattgcataccgtcgctttccgggacaacacccttggtatgcccctgctctgtcctgagagtcagttgggcgtgcttggagaggaggaagttagaggatttatgagggactggtaccgaccagagaggatggtggttgctggtgtcggtatgccgcacgaagaactcgtcatgcttgccgaaaagttcttcggagacatgcccgctaccactaccagccctggatctctccacccctctgttactcaagcgcaacagcctttggggagtaaatcgtttgcgaccgcgtctgctttgcccgtctctcaagattacaccgacctcgcgcacgctaaagcccagtataccggcggcgagctttacatggaaaagccagaagaagaatttgtccatattcacattggcttcgaaggattgggaattcatgatcctgatatctatgctctcgcgacccttcaaactctgctgggcggaggcggctccttctccgccggagggccaggtaaaggcatgtacacccgcctctacacaaaagttctgaaccaataccacgccgttgatttctgtgccgcctttcaccactgttacgctgattccggcctgttcggcatctcagcctctgtgtatccccaattcgcgtctaggatagttgatgtcatggcgggacaactgcatgcgttgacgggacccatgtttggtggtgtggaggagaaggaggtgaggagggcaaagaatatgttgaagagtactttggtcatggcgctggagagtcgcttgactgccgtcgaagatctcggtcgtcaagtacagatccacggccacaaggtccctgtcgaagacatgtgcgccaaggtcgatgcgctcactatggcggacctccaccgcgtcgcaaaccgtattttaagaccgggcaactcgtcagaagggagggtgaattacggattaggatcgggcaaggcgacggtagtggcgcagggaccaggattgggtgcgttgggcgacgtgagacggatactgaaggataggtgggtgttgggtgtgtaa

SEQ ID NO: 64407 - protein, 526 aa, Cryptococcus neoformans
MMRIPAAPRFASKASTSSRLLVPSRRATTAATSSAHTLNPAGTVTTLPNKLRVATESIPGHFHAVGVYIDAGSRYESQRTSGVSHLLDRLAFKSTDKHTDAQMTTLIDSLGSQVTCASSRETIMYQSTVFPQSLPLAFELISSTIRHPLLLPEELLAQKEAAAYEIREIWAKPELILPEILHTVAFRDNTLGMPLLCPESQLGVLGEEEVRGFMRDWYRPERMVVAGVGMPHEELVMLAEKFFGDMPATTTSPGSLHPSVTQAQQPLGSKSFATASALPVSQDYTDLAHAKAQYTGGELYMEKPEEEFVHIHIGFEGLGIHDPDIYALATLQTLLGGGGSFSAGGPGKGMYTRLYTKVLNQYHAVDFCAAFHHCYADSGLFGISASVYPQFASRIVDVMAGQLHALTGPMFGGVEEKEVRRAKNMLKSTLVMALESRLTAVEDLGRQVQIHGHKVPVEDMCAKVDALTMADLHRVANRILRPGNSSEGRVNYGLGSGKATVVAQGPGLGALGDVRRILKDRWVLGV

SEQ ID NO: 64408 - DNA, 1733 bp, Morus alba
  CDS (30)..(1550)
gataaattggaaagtggaaaaggaaagaaatgtatagggcgaccgcctctaggttaagagctttgaaagccagaaattttaagcttggcaatcgattcctctcatctgctgctgttgctacttccggaggtaacatttcttggttatccgggggtgggggatattcttcctcactgccatccttaatgattcccttagccgatgttaaattacctcctcctttacctgatcatgttgaacctgctaaaactaaaattaccactctcgcgaatgggctcaaaatagcttctcaaacatcagtgactccggctgcttcaattggtttgtatgttgattgtggttcaatctatgagacaccagtgtcatttggtgcctcacacctgctggagagaatggctttcaagactacaagaaaccggagccacttgcgcgttgtaagggagattgaggcaattggtggacatgtgcaagcctcagcttctcgcgaacagatgggttacacttttgatgctctaaagacacatgttcccgaaatggtagagctccttgttgattgtgcaaggaatcctgtttttctggactgggaggtgaatgagcagcttcagaaggtgaaagctgagattagtgaagcttccaaaaaccctgaagctttggttttggaagctattcactctgctggttatgcaggtgccctagctaacccacttctagctcctgaatcagcaataaatagattggaatgggtacaattctgggagggaatttattggccgaaaactacactgctccaagaaatagtacttgcagcttatggggggttgaacatgaagattagtatccattgcggagccacttttgggctgatctccctgctgtccctcgccctgaggagccaaaatctgtgtatacgggagggtgattatcgttgtcaagctgattcagggagcacccattttgctcttgcatttgaggttcctggcggctggcataaggaaaaggaagctataaaattgactgttattcagatgcttttgggaggaggtggatctttctcaaccggtggacctggaaaagggatgcactcacggctttatgcacgtgtcttgaataaccatccacaattccagtctatttcggcattcagcaacatctacaacaatactggcatttttggcatccaagctactactagttctgattttgcggcaaaagcagtcgatgtagtcgctaatgagcttattgcaatttcaaaacctggagaagttgaccaggtgcagttagatcgtgctaaaaagtcgacgaagtctgccattctcatgaatttggaatctagagtgattgcttcagaagatatagggagacaagttctgacttatgggaagaggatggaagtggatcatttcttgaatgccgtggatgaggttactgtaaaagatattgcttcaactgcccaaaagcttctatcttctcctgtcacattggcatcatacggagatgtcctttacttcccgagctacgatacagttagcagcaagttcaattcaaagtgatttttttgtacactgaactgggccggcaccccacctttgtgactatagcctttgagagttccatctctcaagttctcttttgagccaatttctgttttgaaataagaaggaagtcttattgtccatgaatcaataaatttttggttctagcacgcatcacttttatgttaggaaaaaaaaaaa

SEQ ID NO: 64409 - protein, 506 aa, Morus alba
MYRATASRLRALKARNFKLGNRFLSSAAVATSGGNISWLSGGGGYSSSLPSLMIPLADVKLPPPLPDHVEPAKTKITTLANGLKIASQTSVTPAASIGLYVDCGSIYETPVSFGASHLLERMAFKTTRNRSHLRVVREIEAIGGHVQASASREQMGYTFDALKTHVPEMVELLVDCARNPVFLDWEVNEQLQKVKAEISEASKNPEALVLEAIHSAGYAGALANPLLAPESAINRLEWVQFWEGIYWPKTTLLQEIVLAAYGGLNMKISIHCGATFGLISLLSLALRSQNLCIREGDYRCQADSGSTHFALAFEVPGGWHKEKEAIKLTVIQMLLGGGGSFSTGGPGKGMHSRLYARVLNNHPQFQSISAFSNIYNNTGIFGIQATTSSDFAAKAVDVVANELIAISKPGEVDQVQLDRAKKSTKSAILMNLESRVIASEDIGRQVLTYGKRMEVDHFLNAVDEVTVKDIASTAQKLLSSPVTLASYGDVLYFPSYDTVSSKFNSK

SEQ ID NO: 64410 - DNA, 1870 bp, Avicennia marina
  CDS (60)..(1643)
caaaaccctagtctttccagagtagatattccgataccggctctgcctccgccgcagccatggcgatccgccagctaataacacttgctcgccgcactagaaaaccggtgcaagcttgcgcctctctgcgacctttctccaccgccgtcgccaccgctcctgacgcctccctaccttctcctccacccccaactggcatgatctacgatcgattgtccgaatccgtcaagcaaaagctcaaaaaactagaagagccagactcgcgcttcctccggtataactccccacaccctaccgtagattctcacaccgaaatcctctccgctccactgaccagagtcacaactctccccaatggcctccgaatcgccacagagtcgactctcgtctctacaacggccactgtcggtgttttcattgacgctggatcgaggtttgagagtgaagaatccaacggcactgcacattttttggagcatatgatttttaaggggacagagaggaggaacgcgagggaattggaggaggagattgagaatatgggcgggcatttgaatgcttatacttctagggagcagactacgtattacgcaaaggtcatggataaagacgtgcctcgcgcgctggatattttatccgatattctgcagaattctaggtttgatgagcagaggattattcgggagagggatgtcattcttcgcgagatggaggaggttgaaggacaaacagaagaagttatatttgatcacctacatgcctctgcttttcaatacactccactgggtagaacaatacttggccctgctgaaaatatcaagaaaattggcaaagaacatctacgaacctacatatcaactcactacactgctcccagaacggtagttgttgcctctggtgctgttaagcatgaagattttgttgaggaagtgaagaaattatttacaagactgtcatcagatccaacaacagcttctgagttagttgctaaagaacctgcaatcttttttactggttcagaggtgaggatgctcgatgatgacattcctcttgcccaatttgctgttgcctttgaaggggcttcatggacagatccagattccattgctttaatggtcatgcagtcgatgttaggttcttggaataaaaatgctgttggtggaaagcatatgggttctgagcttgcacagagagttgggatcaatgaaatagccgagagcatgatggctttcaataccaactataaagacactggtttatttggtgtttatgctattgctaagcctgactgcttggacgatttggcctatgcgattatgtatgagattaccaaactatgttaccgagtatcagaggctgatgtgattcgtgctcgtaaccagttgaaatcttctctgctgcttcacatggatggaaccagtcctgttgctgaagatattggacgccagcttcttacgtatggtagaaggattccgtatgctgaactatttgccaggatagacgccgtagatcccagcaccatcaagcgtgttgcaaaccgattcatatttgatagagatgtggcaatcagcgccgttggacccatccaggggttgccagattacaactggttcaggcgcagaacctactggctccgttactagcttcttcttttcgaccgagttacccagttttccttcaacccacaaggcatcattttccattttggctgttcattgtaaaattattgtcaagataatctacaaaaagctgtagtgacttggctgttattattttgagacacagttgacttctaccgtatcaagagtaaagcatgcttgcagcaacacaataaagataagcatggtgttaaaaaaaaaaaaaaaaaaaa

SEQ ID NO: 64411 - protein, 527 aa, Avicennia marina
MAIRQLITLARRTRKPVQACASLRPFSTAVATAPDASLPSPPPPTGMIYDRLSESVKQKLKKLEEPDSRFLRYNSPHPTVDSHTEILSAPLTRVTTLPNGLRIATESTLVSTTATVGVFIDAGSRFESEESNGTAHFLEHMIFKGTERRNARELEEEIENMGGHLNAYTSREQTTYYAKVMDKDVPRALDILSDILQNSRFDEQRIIRERDVILREMEEVEGQTEEVIFDHLHASAFQYTPLGRTILGPAENIKKIGKEHLRTYISTHYTAPRTVVVASGAVKHEDFVEEVKKLFTRLSSDPTTASELVAKEPAIFFTGSEVRMLDDDIPLAQFAVAFEGASWTDPDSIALMVMQSMLGSWNKNAVGGKHMGSELAQRVGINEIAESMMAFNTNYKDTGLFGVYAIAKPDCLDDLAYAIMYEITKLCYRVSEADVIRARNQLKSSLLLHMDGTSPVAEDIGRQLLTYGRRIPYAELFARIDAVDPSTIKRVANRFIFDRDVAISAVGPIQGLPDYNWFRRRTYWLRY

SEQ ID NO: 64412 - DNA, 1906 bp, Cucumis melo
  CDS (40)..(1626)
gccgctgtaaaccctaggagcaaggggccaaaatcaaccatggcgatcaagcagatactcaccctcgctcgcacctctcaccggcgatcccccgccttgttctcccaagctgttagatcggcgtccacattccccgcagtagcctcttcttctccacttccctctcctcctcctcccaatgccatgatctacgatcgcctcgccgaggctgtcaagtccaagctcaaacagctcgagaatcccgaccctaggttcctcaaatatggctcccctcaccccaccatcactgaccacactcggattctctccgcccctgaaactcgcgttactactctctcgaacggcctccgcgtagcaaccgagtcaaaccttgccgctcggactgcgaccgttggagtgtggatcgatgccgggtcgaggttcgaaaccgaggagaccaacggcactgctcatttcctcgagcatatgatcttcaagggaacggagaaacggtcagctaggcagctcgaggaggagatcgagaacatgggtggtcatttgaatgcgtacacctccagggagcagactacgtattatgccaaggtcttggacaaggatgttcctaaggctttggatattttggctgacatcttgcagaattcgaagttcgatgagcacaggattagtcgtgagcgtgatgtgattttgagagaaatggaagaggtagaggggcaaacagaagaagttatctttgaccatttgcacgcaactgcattccagtatactcccctcggtagaacaattcttggaccagctcaaaatatcaggacaattaccaaggatcatcttcaaagttatattcaaacacattacaccgccccaagaatggttattgctgcttccggagctgttaagcatgaggattttgttgagcaagtaaagaaattgtttacgaagttgtcagcagagccaaccacagctgctcagttggttgcaaaggagccagcaatttttactggctccgaggttcggatagttgatgacgatgttcccttggctcaatttgctattgcttttaatggagcatcctggacagatccagactccattgccctgatggtcatgcaagctatgttgggttcctggaataaaagtgctggaggtggaaagcatatgggttctgagctggcccaaagagttgccatcaatgaggtagcagaaagtatgatggctttcaacaccaattacaaggacactggtctttttggtgtctatgctgttgcaaagcctgactgcttggatgatttggcttatgcaataatgtacgagacaaccaagttagcttaccgagtttcagaagctgatgttacccgtgcgcgcaatcagttgaaatcttctctattgcttcacattgatggaacaagcccagtagctgaagatattggtcgtcagctgcttacgtacggccgtagaattccgtttgccgaattgtttgcaagaattgatgctgttgatgcaagcactataaaacgtgttgcaaatcggtttatttatgatagggatattgcaattgcggcattgggtcccatccagggtttacccgactacaattggttcagacgtaggacatactggaaccgttattagatgatacccatatcgttactgtgttattcttgttcacattcagcagcagtgttctcgcaaaataatcttccttgccaaaaaaattacatcttcatccagagaatctcaggcggatgagttatttttatttgccagtttttgttaaagtgtcatacaaaggaataagagtttgtatctttcttgtccaggtgtgataactatggcattcccatgtcccaatctttgacatttacgctgaaattttatttaatcatttttggtaaaaaaaaaaaaaaaaaaa

SEQ ID NO: 64413 - protein, 528 aa, Cucumis melo
MAIKQILTLARTSHRRSPALFSQAVRSASTFPAVASSSPLPSPPPPNAMIYDRLAEAVKSKLKQLENPDPRFLKYGSPHPTITDHTRILSAPETRVTTLSNGLRVATESNLAARTATVGVWIDAGSRFETEETNGTAHFLEHMIFKGTEKRSARQLEEEIENMGGHLNAYTSREQTTYYAKVLDKDVPKALDILADILQNSKFDEHRISRERDVILREMEEVEGQTEEVIFDHLHATAFQYTPLGRTILGPAQNIRTITKDHLQSYIQTHYTAPRMVIAASGAVKHEDFVEQVKKLFTKLSAEPTTAAQLVAKEPAIFTGSEVRIVDDDVPLAQFAIAFNGASWTDPDSIALMVMQAMLGSWNKSAGGGKHMGSELAQRVAINEVAESMMAFNTNYKDTGLFGVYAVAKPDCLDDLAYAIMYETTKLAYRVSEADVTRARNQLKSSLLLHIDGTSPVAEDIGRQLLTYGRRIPFAELFARIDAVDASTIKRVANRFIYDRDIAIAALGPIQGLPDYNWFRRRTYWNRY

SEQ ID NO: 64414 - DNA, 1799 bp, Dactylis glomerata
  CDS (78)..(1595)
ctccaccacctccgccgcttcctccgcgccaccggcgacgactccgtcgagcgaattttccgcaggcgccggccaccatgtaccgagccgcgtccggcctcggcgccctcaagaagcatggggcggatacacaaatgttgaatatggccattaggtctgctagcacaagtgttgcacagcgttcgtcgggtggattcttaagctggctcacaggtgcacgttcaagtgcattgcccccacctgactttgcactcgccggagtcaccattcctgatccgctacccgatcatgtggaacctgccaagacaaaaatcacaacactttcaaatggtgtcaaaattgcctctgaaacatctccgggatcatcatgttccgttggagtttatgtcaactgtgggtctgtttatgaagcacctgaaacactcggtgccactcagctgttgaacaaactggcctttacaaccactagaaacaggagccagttgcgtgttgtgcgtgaaatcggtgctataggtggcaatgccaaagcatcatctacccgtgagctcacaagctacagttatggagctctaaagacttacatgcctgaaatggttgaagttcttgttgattgtgttcggaatcctgctttgcttgactgggaagtaaaggaagagataacaaaactgaaggcagagcttgcaaaagcttcaattaatccaaaaagtttcctcttggacgccctccattccgctggctattctggtgctttggcaaacccattgattgcctcagaagcttccattagcagattaaatacagatgttctggaagacttcctagctgagaactacacttcctctcgaattgttctagctgcatctggtgtcgaccatgatgaacttgtatcaattgctgaacctctcctgtctgacattcccaatgcaactggaacagcaaagccaaaatctgtctatgttggtggagaatatagacgggcagcagattcatcgaacacagaaattgctctggcttttgagcttcctggtggatggttgaaggaaaaagattatgttactgcatcagttcttcaggcacttctgggtggtggtggtttgttttcttggggaagacctggaaagggcttgcattcccgcctaaatcatctcgtgaatgaatttgaccaaatcaaatcaatctctgctttcaaggatgttcacagtaccactggcatttttggaattcatacatctactgatgcagcatttgctcctaaagctattgacttagcagccagagaactcacttcactcgcaactcctggtcaagttgaccagacccaactagatcgtgctaaagcattagctaaatcagcaatcttggcaagcctggaatcaaaggcatcagcaactgaagatatggggcgccaagttttggcatttggtgaaaggaaacctgttgagcaacttcttaagattgtcgatggtgtttctctgaaagatgtatcagctctcgctgagaaaatcatctcatcaccattgacaatggcatcccatggagacgttctcaacgtaccagcttacgagacagtgcgcggcaagttcagctcgaaatgagtaggcgtctggacaagataactgttgatatattttcatccaagatcatttctggtcacattttcacagaaaataaggaacgtacaattttgatcattaactactgctgcgggccactttggggtcttatttttctgcagagcatgtaatgttgttctcatgagttattcgcttgtaaatttagtcaaaaaaaaaaaaaaaaaa

SEQ ID NO: 64415 - protein, 505 aa, Dactylis glomerata
MYRAASGLGALKKHGADTQMLNMAIRSASTSVAQRSSGGFLSWLTGARSSALPPPDFALAGVTIPDPLPDHVEPAKTKITTLSNGVKIASETSPGSSCSVGVYVNCGSVYEAPETLGATQLLNKLAFTTTRNRSQLRVVREIGAIGGNAKASSTRELTSYSYGALKTYMPEMVEVLVDCVRNPALLDWEVKEEITKLKAELAKASINPKSFLLDALHSAGYSGALANPLIASEASISRLNTDVLEDFLAENYTSSRIVLAASGVDHDELVSIAEPLLSDIPNATGTAKPKSVYVGGEYRRAADSSNTEIALAFELPGGWLKEKDYVTASVLQALLGGGGLFSWGRPGKGLHSRLNHLVNEFDQIKSISAFKDVHSTTGIFGIHTSTDAAFAPKAIDLAARELTSLATPGQVDQTQLDRAKALAKSAILASLESKASATEDMGRQVLAFGERKPVEQLLKIVDGVSLKDVSALAEKIISSPLTMASHGDVLNVPAYETVRGKFSSK

SEQ ID NO: 64416 - DNA, 1543 bp, Arabidopsis thaliana
  CDS (1)..(1512)
atgtatcgcacggcagcttcacgagccagggctcttaagggagttcttactcgtagtttgagaccagcgcgttatgctagttctagtgctgttgcggagacgagttcgtcaacgccggcttacttgagctggttgagtggtgggtctcgtgctgcgcttacttcattggatatgcctctacaaggtgtttctcttcctccgccgcttgctgataaagtcgagccgagcaaacttcagatcactactcttccaaatggtcttaagatagcctcagagacgactccgaatccggcagcttcgattggtttatatgttgattgcggttctatttatgaggcgccttatttccatggagctacacatttgcttgaaagaatggctttcaagagcacgttgaacagaactcattttcgtcttgtgagggaaattgaggctattggaggcaacacatccgcttctgcgtctcgagagcaaatgagttacactattgatgctcttaagacctatgtccctgaaatggttgaagttcttattgacagtgttagaaaccctgctttcttggactgggaagtgaatgaagagctacggaagatgaaggtagagatagcggaacttgcaaagaaccctatgggtttcctcttggaggccattcattctgctggttactctggtccattggcaagtcctctgtacgcaccggagtctgctttagatagattgaatggggagctcttggaagagtttatgactgagaatttcactgctgcacggatggtattggcggcaagtggagtagaacatgaggaacttttaaaagttgctgagccattaacttctgaccttcctaatgtaccaccccaattggctccaaaatctcagtatgtcggtggagattttcgccaacatactggtggagaggctacacactttgcggttgctttcgaggtgcctggctggaataacgagaaagaagcagtcaccgccactgttctccagatgcttatgggaggaggtggctcattctctgcgggaggtcctggaaaaggaatgcactcgtggctttatcgccgtgttctaaacgaatatcaggaggttcagtcatgcactgcattcactagcatctttaacgacaccgggttgtttggaatctatggttgctcgagtcctcaattcgctgcaaaagcaattgaattagcagctaaagaactcaaagatgttgcaggaggaaaagttaaccaggcacatcttgatcgtgccaaggcagccacaaaatctgcagttctgatgaatttggaatctcggatgattgcagcagaagacattggtagacagatacttacatacggagagaggaaaccagttgatcaattcttgaagtcagtagaccaactaaccttgaaagacattgcagacttcaccagcaaggttatttcaaagcctttgacaatgggttcctttggagatgtgttggctgttccgagctatgacacaataagcagcaaatttcgttgaagcaaaacaaacaatttgccaaatcaacaat

SEQ ID NO: 64417 - protein, 503 aa, Arabidopsis thaliana
MYRTAASRARALKGVLTRSLRPARYASSSAVAETSSSTPAYLSWLSGGSRAALTSLDMPLQGVSLPPPLADKVEPSKLQITTLPNGLKIASETTPNPAASIGLYVDCGSIYEAPYFHGATHLLERMAFKSTLNRTHFRLVREIEAIGGNTSASASREQMSYTIDALKTYVPEMVEVLIDSVRNPAFLDWEVNEELRKMKVEIAELAKNPMGFLLEAIHSAGYSGPLASPLYAPESALDRLNGELLEEFMTENFTAARMVLAASGVEHEELLKVAEPLTSDLPNVPPQLAPKSQYVGGDFRQHTGGEATHFAVAFEVPGWNNEKEAVTATVLQMLMGGGGSFSAGGPGKGMHSWLYRRVLNEYQEVQSCTAFTSIFNDTGLFGIYGCSSPQFAAKAIELAAKELKDVAGGKVNQAHLDRAKAATKSAVLMNLESRMIAAEDIGRQILTYGERKPVDQFLKSVDQLTLKDIADFTSKVISKPLTMGSFGDVLAVPSYDTISSKFR

SEQ ID NO: 64418 - DNA, 1531 bp, Arabidopsis thaliana
  CDS (1)..(1500)
atgtaccgtacggcagcttctcgagccaaggcccttaagggcattctaaaccacaattttcgagcttctcgttatgcaagttctagtgctgttgcaacgagctcttcttcctccagctggctaagtggaggctactctagttcacttccttctatgaacattcccttggctggtgtctctcttccaccaccactctctgaccatgttgagcctagcaaacttaagaccactactcttccaaatggtctgactatagccactgagatgtctccgaatccagcagcttccattggtttatacgttgactgtggttctatttatgagactcctcaattccgtggagcgacgcacttgcttgaaaggatggcattcaagagtacattgaacagaagccattttcgccttgtaagggaaatagaggctattggaggtaatacttcagcttctgcatcccgagagcagatgggttacacaattgatgctctcaaaacctatgttcccgaaatggttgaagtgcttattgatagtgtgaggaaccccgcttttttggattgggaagtgaatgaagagctccgaaaggtgaaagtagagataggagaattcgcaacgaatccaatgggttttcttttggaggcagttcattctgctggttactctggcgcattggcaaatccattgtatgcacctgaatctgcaattactggattgactggggaggtcttggagaattttgtttttgagaattacactgcttcacgaatggtcctagcagctagtggagttgatcatgaagaacttctaaaagtggttgagccattactatctgacctccctaatgtaccccgacctgcggagccaaagtctcaatatgtcggtggagatttccgtcaacatacgggtggagaggctacgcattttgcgcttgcttttgaagtgccaggatggaataacgagaaggaagctatcattgcaactgttcttcagatgcttatgggaggaggtggctcattttctgcgggaggccctggaaaaggaatgcactcttggctctatcttcgccttttgaaccaacatcagcagtttcaatcatgcactgcattcactagcgtctttaacaataccggattgtttggaatctatggttgcacgagtcctgaatttgcttcacagggaattgaattagtagctagtgaaatgaacgctgttgctgatggaaaagttaatcagaaacatcttgatcgcgccaaagcagcaacaaaatctgcgattctgatgaatctggaatctcggatgattgcagcagaagacattggtagacagattcttacttacggagagaggaaaccagtagaccaattcttgaagacagtagaccaacttaccttaaaggacattgcagatttcactagcaaggttatcacaaagcctttgacaatggcaactttcggagacgtgttgaatgttccaagctatgactccgtaagcaaaagatttcgctgaagagtgaagaagtaaaaaagatctttttaca

SEQ ID NO: 64419 - protein, 499 aa, Arabidopsis thaliana
MYRTAASRAKALKGILNHNFRASRYASSSAVATSSSSSSWLSGGYSSSLPSMNIPLAGVSLPPPLSDHVEPSKLKTTTLPNGLTIATEMSPNPAASIGLYVDCGSIYETPQFRGATHLLERMAFKSTLNRSHFRLVREIEAIGGNTSASASREQMGYTIDALKTYVPEMVEVLIDSVRNPAFLDWEVNEELRKVKVEIGEFATNPMGFLLEAVHSAGYSGALANPLYAPESAITGLTGEVLENFVFENYTASRMVLAASGVDHEELLKVVEPLLSDLPNVPRPAEPKSQYVGGDFRQHTGGEATHFALAFEVPGWNNEKEAIIATVLQMLMGGGGSFSAGGPGKGMHSWLYLRLLNQHQQFQSCTAFTSVFNNTGLFGIYGCTSPEFASQGIELVASEMNAVADGKVNQKHLDRAKAATKSAILMNLESRMIAAEDIGRQILTYGERKPVDQFLKTVDQLTLKDIADFTSKVITKPLTMATFGDVLNVPSYDSVSKRFR

SEQ ID NO: 64420 - DNA, 1485 bp, Schizosaccharomyces pombe
  CDS (1)..(1485)
atgttatcagaataccagtgtctaaaaaacatcgggttttcgcacaaaacggtattaaaacggaggctatttagaaaagaatgtacaccggcattaaaatcattttacagcactcaagaccctgcattaaacgaggtccgaactgaaaagcttaaaaatggtgtaacatatgtttgtgatccaagaccagggcacttttctggtttaggggtttatgtgaaagctggttcaagatacgaaacaaaaaaattctctggtgtgagccattttatggataggcttgcgtttcaggctactgagcgtactcccgttggagaaatgaaagcaaaactagaaaatttaggaggtaactatatgtgttctacgagtcgcgaatccatgatataccaagcagctgtttttaatgatgatgttaagtcaatgtccaagctattagcagaaaccgttttggcaccaaaaatacaagaagatgatctagttcattatcgtgatagtataatatatgaaaactccgagttgtggacgaaaccagatgctctactcggagagtttgctcacgttacggcattccaaaacaacacgcttggcaattgtctattgtgtacacctgataaagtcaacggtattactgctacttcaattagggaatacttaaaatatttttaccgaccggaacaccttactttggcgtatgctggaattcctcaagaaatagcaaaagaaattacgaaggagctatacggacatttacccagctcttctctacctccactggaagctataccttcgcattatactggaggctttatgggaattaaaaaatcggaagcacctcctgttccataccaacaggagtttacacatgttgtcattgctatggaaggattacctgttaccgatccggatatctatgctttggcatgcttacaatttctattaggtggaggtggttcatttagcgcaggaggtcctggaaaaggaatgtattctcgattgtacttgaatgttttaaatcagtatccttgggtcgaaacatgtatggctttcaatcatagctatacagatagcggtcttttcggtatgtttgttaccattttagatgatgcagctcatttagctgcaccactaataatacgtgaactctgtaatacagttttgtctgtcacctctgaggaaacagagcgggctaagaatcagctaaaaagctctctattaatgaatcttgagagcaggatgatctcactagaggacttggggagacagatccaaactcagaatggtctttatattactcccaaggaaatgattgagaaaattgatgcattgactccatccgatttaagtagggtcgcaagaagagttctgacgggaaacgtttccaatcctggaaatggtactggaaagccaacggtactcattcacggaaatgtggatgaagttggagatgtctttgctctttgtaaaaaagctgggattggtcattaa

SEQ ID NO: 64421 - protein, 494 aa, Schizosaccharomyces pombe
MLSEYQCLKNIGFSHKTVLKRRLFRKECTPALKSFYSTQDPALNEVRTEKLKNGVTYVCDPRPGHFSGLGVYVKAGSRYETKKFSGVSHFMDRLAFQATERTPVGEMKAKLENLGGNYMCSTSRESMIYQAAVFNDDVKSMSKLLAETVLAPKIQEDDLVHYRDSIIYENSELWTKPDALLGEFAHVTAFQNNTLGNCLLCTPDKVNGITATSIREYLKYFYRPEHLTLAYAGIPQEIAKEITKELYGHLPSSSLPPLEAIPSHYTGGFMGIKKSEAPPVPYQQEFTHVVIAMEGLPVTDPDIYALACLQFLLGGGGSFSAGGPGKGMYSRLYLNVLNQYPWVETCMAFNHSYTDSGLFGMFVTILDDAAHLAAPLIIRELCNTVLSVTSEETERAKNQLKSSLLMNLESRMISLEDLGRQIQTQNGLYITPKEMIEKIDALTPSDLSRVARRVLTGNVSNPGNGTGKPTVLIHGNVDEVGDVFALCKKAGIGH

SEQ ID NO: 64422 - DNA, 2098 bp, Solanum tuberosum
  CDS (299)..(1813)
cgctaaaaagagaaccttgatctctgttctggatcacctggctttcaaaaataaaacacccaaaagggagtttgatttttctataaaatttctcaaagattttgaaattgaaaatctcttttgaaagacagacgacaacagaaagggatctaaagaagcgggatgttagagagggggaaacgaaaatgtaaatacacacttaatattttaggtagcctcactgattttttcccccctacaaaatcgcttttctcatcttcccggagctctactcagttctccgatcatcaccgtcaaaatgtacagatgcgcatcgtctcgcctcagctctcttaaggcacgtcaaggcaacagggtcttgacaagattttcaagttcagctgctgttgcaaccaagccatctgggggtctttttagttggataactggtgatacgtcaagttcagtgactcccttggatttccccctcaatgatgttaaactctcgccaccattacctgattatgtagaacctgcaaagacccagataacgactctcgccaatggtctcaaagtggcctctgaagcatcggtgaaccctgctgcctcaattggcctctatgttgactgtggctctatttatgagacaccagcttcatatggagccacacacctcttggaacgcatggccttcaaaagcacattaaaccggagtcacttgcgtattgtacgagaaattgaagcaattggtggtaatgtaacagcttcagcctcacgagagcatatgatctacacttatgatgctttgaaaacttatgtaccacaaatggtggagatgcttgctgactgtgttagaaatcctgcattcctggattgggaagttaaagaacagcttgagaaggttaaagctgagattagcgagtactccaaaaaccctcaacacttgcttttggaggcagttcattctgctggttatgctggtccatatgggaattctctgatggccacagaagctacaataaacaggttaaacagcacagtgctggaggagtttgtagctgagaattatactgctcctcggatggttcttgctgcatctggtgttgaacatgaagagttcttaaaagttgcagaacctcttctgtctgatttacctaaggtggccaccattgaagaacctaaacctgtgtatgtgggaggagattaccgctgtcaagccgatgcagagatgactcattttgctcttgcctttgaagttcccggtggctggatgtctgaaaaagaatcaatgactttaacagttcttcagatgcttatgggaggaggtggatctttctcagctggcggtcctggaaaagggatgtactcaagattatatcttcgtgtcttaaatcagtacccacagattcacgcattctctgcattcagcagcatttacaataacactggactatttggaattcaaggaactacgagctctgattttgggcctcaagctgttgatgtagcagttaaagagcttattgcggtagcaaaccctagtgaagttgaccaagtacagctaaaccgtgctaaacaggcaacaaagtctgccattctgatgaacttggaatcccggatggttgcatcagaagatatcggcagacaacttttgacatatggagagaggaatccagtggagcatttcttgaaagccattgatgcagtttcagcaaaagatattgcttccgttgtgcagaagcttatttcttctcctctgaccatggcatcctatggagatgttctctccctcccatcatacgatgcagtcagcagcaggttccgttccaaataaatcaattgtcaactacgaagtacacagcaggactatcatgctgttattttttaggtttttagaaaatctttacgcgtgtggctgtaattttcggaaaataagaagggttacgagctatcgataaattcagctctgtcaaagctttgagataaagagcatctgggcacatggtttttgtgtatacagtttgtaattcattcagctttctttgatatttgataacataatgtcatagggcattactgctgcagctggaagtcatcagatttctctagttaacaattt

SEQ ID NO: 64423 - protein, 504 aa, Solanum tuberosum
MYRCASSRLSSLKARQGNRVLTRFSSSAAVATKPSGGLFSWITGDTSSSVTPLDFPLNDVKLSPPLPDYVEPAKTQITTLANGLKVASEASVNPAASIGLYVDCGSIYETPASYGATHLLERMAFKSTLNRSHLRIVREIEAIGGNVTASASREHMIYTYDALKTYVPQMVEMLADCVRNPAFLDWEVKEQLEKVKAEISEYSKNPQHLLLEAVHSAGYAGPYGNSLMATEATINRLNSTVLEEFVAENYTAPRMVLAASGVEHEEFLKVAEPLLSDLPKVATIEEPKPVYVGGDYRCQADAEMTHFALAFEVPGGWMSEKESMTLTVLQMLMGGGGSFSAGGPGKGMYSRLYLRVLNQYPQIHAFSAFSSIYNNTGLFGIQGTTSSDFGPQAVDVAVKELIAVANPSEVDQVQLNRAKQATKSAILMNLESRMVASEDIGRQLLTYGERNPVEHFLKAIDAVSAKDIASVVQKLISSPLTMASYGDVLSLPSYDAVSSRFRSK

SEQ ID NO: 64424 - DNA, 1374 bp, Schizosaccharomyces pombe
  CDS (1)..(1374)
atgctgaggcttcagaatttgccaaagctagtacgtcgttttgcgactactgctttaccaaaaacagaaaccactactttaaaaaatgggcttacagttgctacggaacatcatccgtatgcccaaacagcgaccgtccttgtgggcgttgatgctggctcaagagctgagacggcaaaaaataatggcgctgctcactttttggaacatttggcgttcaaaggaacgaaaaatcgctcccaaaaagcattggaattggaatttgaaaatactggtgcacatttgaacgcatacacctctcgtgaacaaaccgtttattatgcacatgcgttcaaaaacgctgtacctaatgcagttgccgttttggccgatatcctgacaaattcaagcatttctgcctcggcggttgagcgtgaacgccaagtcatcttaagagagcaagaagaggttgacaaaatggccgatgaagtagtctttgatcatttacatgctaccgcttatcagggtcatcctcttggacgtacaattttgggtcctaaggaaaacatcgaatctcttacccgtgaggaccttctccagtatattaaggacaactaccgtagtgatagaatgattatctcttctgccggttcgatatctcatgaggagcttgtaaagctcgccgaaaaatattttggccatttggagccttcagctgagcaattgtcgcttggtgctcctcgtggactcaaacctcgtttcgtcgggtctgaaatccgtgctcgtgacgatgattcaccaactgccaacattgccattgctgttgaaggtatgagttggaaacacccagattactttactgcattagtcatgcaagccatcattggtaactgggaccgtgctatgggagcatctccccatttgtcttctcgtcttagtactattgttcaacaacatcaacttgccaatagcttcatgagtttcagtactagttatagtgatactggactttggggtatttatcttgtcactgagaaccttggccgtattgatgatctcgtccactttaccctccaaaactgggctcgtttaaccgttgcaactcgtgctgaggttgaacgtgccaaggcacaactccgtgcttcgcttttactttctttggattcaacgaccgccattgcagaggacattggtcgccaattgcttacaactggtcgtcgtatgagccctcaagaggttgatctccgtatcggtcaaatcactgaaaaagatgtagcccgcgttgcttccgagatgatttgggacaaggacattgctgtttctgctgttggttccattgagggtttgttggactacaaccgtattcgtagcagtatttctatgaaccgttggtaa

SEQ ID NO: 64425 - protein, 457 aa, Schizosaccharomyces pombe
MLRLQNLPKLVRRFATTALPKTETTTLKNGLTVATEHHPYAQTATVLVGVDAGSRAETAKNNGAAHFLEHLAFKGTKNRSQKALELEFENTGAHLNAYTSREQTVYYAHAFKNAVPNAVAVLADILTNSSISASAVERERQVILREQEEVDKMADEVVFDHLHATAYQGHPLGRTILGPKENIESLTREDLLQYIKDNYRSDRMIISSAGSISHEELVKLAEKYFGHLEPSAEQLSLGAPRGLKPRFVGSEIRARDDDSPTANIAIAVEGMSWKHPDYFTALVMQAIIGNWDRAMGASPHLSSRLSTIVQQHQLANSFMSFSTSYSDTGLWGIYLVTENLGRIDDLVHFTLQNWARLTVATRAEVERAKAQLRASLLLSLDSTTAIAEDIGRQLLTTGRRMSPQEVDLRIGQITEKDVARVASEMIWDKDIAVSAVGSIEGLLDYNRIRSSISMNRW

SEQ ID NO: 64426 - DNA, 1389 bp, Saccharomyces cerevisiae
  CDS (1)..(1389)
atgttttcaagaacagcatccaagttccgtaatacacggaggcttttaagtacaatttcctcacaaattccaggaaccagaacctctaaacttcctaatgggttgacaattgccacagagtacatccccaacacatcttcggctactgttggaatatttgtcgatgctggttctagggcagaaaacgtaaaaaacaatggtacagcgcattttctagaacacttggctttcaagggtactcagaataggtcacaacaaggaattgaattggaaattgaaaatatcggatctcatttgaatgcatatacatcaagagaaaacacagtttattatgctaagtccctacaagaagatatcccaaaggctgttgatattctaagtgatattttgactaagtcagttttagataatagtgctattgagagagaaagggatgtcatcatcagagaaagtgaagaggtggacaagatgtatgatgaagttgtttttgaccatcttcatgagattacgtataaggaccaacctttaggaagaaccattctgggtcctataaaaaacataaaatcaataacaagaactgatttgaaagactatataaccaagaactataaaggcgacagaatggtattggcaggtgcgggcgctgttgatcatgaaaaattggtacagtatgctcaaaaatactttggccatgtgcccaaatctgaatcgcctgtcccgttgggatcaccaaggggcccattaccagttttttgtagaggtgaaaggtttatcaaagaaaacacgttacctacaacacatattgctatcgcattagaaggcgtgtcatggtctgcacctgattattttgtagctctggcaacacaagcgattgttggtaactgggacagagccattggcacaggtacaaactccccctctccattagctgttgcagcaagtcaaaatggttctttggctaattcttatatgtcattttccacctcttacgctgattcaggtctgtggggaatgtacatagtaactgattctaatgagcataacgtgcagttaattgttaatgagatcctgaaagagtggaagagaataaaatctggcaaaatatcggatgcagaggtgaatagggcaaaagctcagctaaaggcagctctgttgctatcgttggatggatcgacagccattgtagaagatataggcagacaagtggtgaccacaggtaaaagattatcaccagaagaagttttcgagcaggttgataaaatcactaaggatgatattattatgtgggcaaattacagattacaaaacaaaccagtttcaatggttgccctaggaaatacatccactgtccctaatgtatcctatatcgaagaaaaactgaaccaatga

SEQ ID NO: 64427 - protein, 462 aa, Saccharomyces cerevisiae
MFSRTASKFRNTRRLLSTISSQIPGTRTSKLPNGLTIATEYIPNTSSATVGIFVDAGSRAENVKNNGTAHFLEHLAFKGTQNRSQQGIELEIENIGSHLNAYTSRENTVYYAKSLQEDIPKAVDILSDILTKSVLDNSAIERERDVIIRESEEVDKMYDEVVFDHLHEITYKDQPLGRTILGPIKNIKSITRTDLKDYITKNYKGDRMVLAGAGAVDHEKLVQYAQKYFGHVPKSESPVPLGSPRGPLPVFCRGERFIKENTLPTTHIAIALEGVSWSAPDYFVALATQAIVGNWDRAIGTGTNSPSPLAVAASQNGSLANSYMSFSTSYADSGLWGMYIVTDSNEHNVQLIVNEILKEWKRIKSGKISDAEVNRAKAQLKAALLLSLDGSTAIVEDIGRQVVTTGKRLSPEEVFEQVDKITKDDIIMWANYRLQNKPVSMVALGNTSTVPNVSYIEEKLNQ

SEQ ID NO: 64428 - DNA, 1518 bp, Oryza sativa
  CDS (1)..(1518)
atgtaccgcgccgcctccggcctcggggccatcaagcggcatggactggatggtcaaatgttgaatgttgcgattaggtgtgctagcacaagtgttgcacagaggtcatcaggtggcttctggacctggctgacaggtgcacggtcaaatgcattacctcctccagattttacacttccaggggtcaccattccacctccgctacctgaccttgtggagcctggcaagacaaaaatcacaacacttgcaaatggtgtaaaaattgcttctgagacaactccaggaccatcttgttcagttggagtatatgttaattgtggttctgtacatgaagcacctgaaacactaggtgccactcagctgttgaagaagatggcctatacaaccactacaaacaggagccatttgcgtgttgtgcgtgaaatcgaggcagtaggtggcaatgtgaaagcatctgctaaccgtgagatgatgagctacagttatgcagccctgaaaacttacatgcctgaaatggttgaggtgcttattgattgtgtacgcaatcctgcttttcttgattgggaagtcaaggaacagataatgaaactgaaggcagagcttgcagaagcttcaagtaaccctgaaacttttcttttggaggctcttcattctactggttattctggtgctttggcaacccctctgattgcctcagaatcctcagttagccgattgaatacgaatgtcctagaatacttcttagctgagaattacactgctccccgaattgttctagctgcaacaggtgttgatcatgatgaattggtatctattgctgaaccacttctgtctgacatgcctggtgtaactggaccagcaaagccaaagtctacctatgttggtggggaatatagaagaactgctgattcatcgaacacagatgttgctttggcatttgaggtccctggtgggtggctcaaagaaaaagaatttgtaacagtatcagttcttcagacccttcttggtggcggtggcacatattcctggggaaggcatggaaaaggcttgcattcaagtctaaatcatctcgcaaatgaattcgaccagattagatcgatagctgctttcaaggatgttcacagtaacactggcatttttggaattcatacatctactgatgcagcattcgttcctaaggctattgacttggcaaccagagagctcacttctcttgccactcctggaaaagttgaccaaactcaacttgaccgtgctaaagcgacagctaaatcagcaatcttgatgaacctggaatcaaaggcatcagcaactgaagacatgggacggcaaatattggcctttggtgaaaggaaacctgttgagcaccttctcaaggctgttgatggtgttactctgaaagacattacagcccttgctgagaaaatcatatcatcaccattgacaatggcatctcatggaaacgttctgaacgtgccaacttatgattcagtcagtggcaagtttcgctcgaaatga

SEQ ID NO: 64429 - protein, 505 aa, Oryza sativa
MYRAASGLGAIKRHGLDGQMLNVAIRCASTSVAQRSSGGFWTWLTGARSNALPPPDFTLPGVTIPPPLPDLVEPGKTKITTLANGVKIASETTPGPSCSVGVYVNCGSVHEAPETLGATQLLKKMAYTTTTNRSHLRVVREIEAVGGNVKASANREMMSYSYAALKTYMPEMVEVLIDCVRNPAFLDWEVKEQIMKLKAELAEASSNPETFLLEALHSTGYSGALATPLIASESSVSRLNTNVLEYFLAENYTAPRIVLAATGVDHDELVSIAEPLLSDMPGVTGPAKPKSTYVGGEYRRTADSSNTDVALAFEVPGGWLKEKEFVTVSVLQTLLGGGGTYSWGRHGKGLHSSLNHLANEFDQIRSIAAFKDVHSNTGIFGIHTSTDAAFVPKAIDLATRELTSLATPGKVDQTQLDRAKATAKSAILMNLESKASATEDMGRQILAFGERKPVEHLLKAVDGVTLKDITALAEKIISSPLTMASHGNVLNVPTYDSVSGKFRSK

SEQ ID NO: 64430 - DNA, 1518 bp, Oryza sativa
  CDS (1)..(1518)
atggcggccacctccatcgtgcgatcgaagcgcaggctcgccctgccctacctccaccgcctcctccactccggccccgcgaccccttcccccaaccgcttcctccgccacgcctcgccggtgccccgcgaccccgaccactcccccttcctccgcctccccgacgcgcgcgtctccacgctccccacgggcctccgcatcgtcacgcaggcctacccggccgccacgcggatggcctccgtcggcgtctgggtcgacgccggcagccggttcgagctgcccggcaccaacggcacggcgcacttcctcgagcacatggccttcaagggcaccacgcgccggcccaccgcgaacgcgctcgaggtggagatcgagaacatgggcgcgcgcctcaacgcctacacctcccgcgagcagaccacctacttcgccgatgtgcaggggcgggacgtgcccatcgcgctcgacgtcctaagcgatatcctccagtacccgtgcttccccgcgaatgccctccagcgcgagcgcggcgtcatcctccgcgagatggaggaggtgcaaggaatgatggacgaggtgatatttgatcacttgcatgccgcagcattccaaggtcatccgctgggtgacacaatattaggtcctgtagagaatattaaatcgatctctaagaaagatttggagcaatacattacaactcactatacctgtcctcgaatggttgtgtctgctgctggagctgtcaatcatgatgaggttgttgatcaagtgagagaattttttacaggattctctactgacccaactactgtagatcaacttgttgaagcaaatccagctatttttactggatctgaggtccgtgtggagcaaccagagatgcctctaacgcactttgcaattgctttcaagggttcatcatgggctaaccctagctcaattcctcttatggtgatccaaagcatattgggaacttggaataggagcattggggttgggaactgctcagggtctgctttagctcgtggtatcagcaacggtaatttagctgagagcatgattgcattcaacactaactaccgagatacaggattgtttggcatctgcactattgctcagccggattccctatatgacctatcacagttaataatgcaagaatttagaagacttgcatttgaagtgtcggaaacagaggttgctcgtgctcgtaatcagttgaaatctgctcttttacttcacattgacggatccactgctgtttctgaaaataacggccgtcagatgctaacgtatgggcgagtaatgccattcttagagctttttgctcgcattgatgctgttgaccgtgatacagtaatggaaacagctaaggatttcataattgacaaggatatcgccctagctgcagtgggaccgctcacgaatttgccggagcttagttggtttcgctcacatacatactcggatgatgaatttagttcaagaacgttcttgcaggatgcacagaataattga

SEQ ID NO: 64431 - protein, 505 aa, Oryza sativa
MAATSIVRSKRRLALPYLHRLLHSGPATPSPNRFLRHASPVPRDPDHSPFLRLPDARVSTLPTGLRIVTQAYPAATRMASVGVWVDAGSRFELPGTNGTAHFLEHMAFKGTTRRPTANALEVEIENMGARLNAYTSREQTTYFADVQGRDVPIALDVLSDILQYPCFPANALQRERGVILREMEEVQGMMDEVIFDHLHAAAFQGHPLGDTILGPVENIKSISKKDLEQYITTHYTCPRMVVSAAGAVNHDEVVDQVREFFTGFSTDPTTVDQLVEANPAIFTGSEVRVEQPEMPLTHFAIAFKGSSWANPSSIPLMVIQSILGTWNRSIGVGNCSGSALARGISNGNLAESMIAFNTNYRDTGLFGICTIAQPDSLYDLSQLIMQEFRRLAFEVSETEVARARNQLKSALLLHIDGSTAVSENNGRQMLTYGRVMPFLELFARIDAVDRDTVMETAKDFIIDKDIALAAVGPLTNLPELSWFRSHTYSDDEFSSRTFLQDAQNN

SEQ ID NO: 64432 - DNA, 1353 bp, Oryza sativa
  CDS (1)..(1353)
atgtccctctcccgggtattacccttcctccaccactgccagactttgttgaaccgtctaagacaaaagtcaccactctcccgaatggcatcaagattgcttcagaaacgtcagtgtccagcagcatctgtgggactgtatattgactgtggttcaatatatgaaacacctgcttcatctggagcatcacatctgttggagagaatggcgttcaagagcactacaaacaggagtcatttgcggctagtacgtgaagtagaagccattggagggaatgtctctgcatcagcctctcgtgaacaaatgtgctatacctatgatgcattcaaggcctatgtacctgagatggttgaagtgcttattgatagtgtgaggaacccagccttttttaactgggagattaaagagcagctggagaagatcaaggctgaaatagctgaagtttctgataatcctcaaggtttacttctagaggcactccattctgctggctattctggggcactggcgaagcccctaatggcacctcagtccgctattcataggttggacagtagtatccttgaggaattcattgctgaaaattacacagcacctaggatggtccttgcggcatctggagttgaacatgatgaactagtttcaattgctgagccacttctgtcggatcttcccagtgtgaagcgtccagaagagccaaaatcagtttatgtgggaggagactatcgttgtcaagcggactctgacaagacacatattgctcttgcttttgaagtaccaggtggatggtttgaagagaaaactgccatcattgttactgttcttcagatgctcatgggaggaggtggttctttctctgctggtggtcctgggaagggcatgcattctcgattgtatctccggatattaaacaactaccatcagatcgagtcattctctgcattcaacagtatctacaaccattctggtctttttggaattcatgcaacaactagcccaaattttgcttccaaggctgtggatttggcagcaggagagcttcttgaggttgcaactcctggaaaagttacacaagaacagcttgatcgagctaaacaggcaaccaagtctgcagttttgatgaacttggaatccagagtcgtagcatctgaagacatagggaggcagattttgacgtatggggaaaggaaacccattgagcatttcttgaaagatcttgaagcaatcaccttgaatgacatttcttctactgccaagaagatcatttcatcaccccttacactggcatcatggggtgacgttattcatgtcccgagctatgaatctgttagccagaagtttttctcaaagtaa

SEQ ID NO: 64433 - protein, 450 aa, Oryza sativa
MSLSRVLPFLHHCQTLLNRLRQKSPLSRMASRLLQKRQCPAASVGLYIDCGSIYETPASSGASHLLERMAFKSTTNRSHLRLVREVEAIGGNVSASASREQMCYTYDAFKAYVPEMVEVLIDSVRNPAFFNWEIKEQLEKIKAEIAEVSDNPQGLLLEALHSAGYSGALAKPLMAPQSAIHRLDSSILEEFIAENYTAPRMVLAASGVEHDELVSIAEPLLSDLPSVKRPEEPKSVYVGGDYRCQADSDKTHIALAFEVPGGWFEEKTAIIVTVLQMLMGGGGSFSAGGPGKGMHSRLYLRILNNYHQIESFSAFNSIYNHSGLFGIHATTSPNFASKAVDLAAGELLEVATPGKVTQEQLDRAKQATKSAVLMNLESRVVASEDIGRQILTYGERKPIEHFLKDLEAITLNDISSTAKKIISSPLTLASWGDVIHVPSYESVSQKFFSK

SEQ ID NO: 64434 - DNA, 1488 bp, Oryza sativa
  CDS (1)..(1488)
atgtaccgcgccctccgctctctcaagcatcatggtgctagtaggtttgctagtacaagtgttgtgaagcagtcttcaggtggtctgcttggctggtttcttggtggtaactcaagccagcttcctccgcttgatgttccactcccaggcgttataatttctccacctctgccagattttgtagagccatctaagacaaagatcaccactcttccaaatggcatcaagatcgcatcggagacatcaccgattccggctgtatcagtgggactgtacattgattgtggttctgtttatgagacatcttcttcatctggaacatcacatctattggagagaatggccttcaagagcacgacaaaccggagtcacttgcggttagttagggaggtagaagccattggaggaaatgtctttgcatctgcttctcgcgaacaaatgagctatacttatgatgcactgaagtgttatgcaccagaaatggttgaagttctcatcgacagtgtgaggaacccagcatttttagaatgggaggtcaaagagcagctccagaagataaaatctgaaatatctgaagtgtctggtgatccacatggtctacttatggaagcgctccattcggctggatattctggggctctggcaaaacctttgatggcttcagaatccgcggtgaacagattggatgttgctaccttggaggaattcgtttctgaaaactacactgcccccaggatggtacttgcagcatcaggaattgagcacgatgagttggtttcagtcgcagaaccacttctatcagaccttcccagtgtgaaacgtcctgaagagccaaaatcagtgtatgtaggaggggattatcattgccaagcagattctacaagtacacacattgcacttgcctttgaggttccaggtggctggcgtcaagagaaaactgcaatgattgtgactgtgcttcaggtgctcatgggtggaggagggtccttctcgaccggtggccctgggaaaggaatgcattcttggttgtatctccgtgtcttgaacaattatggacagatcgaatcattctctgctttcagcagtatttacaacaattctggcctttttggaatacatgcaaccactaacccagattttgtatcaagtgctgtggatttggcagcaagggaactccatgaagttgcaactcctggaaaagttacacaagaacaacttgatcgtgctaaagaggctaccaagtcttcagttctgatggacttggaatcaagaatcgtggcctctgaagatattggaagacaggtactgacttatggtgaaaggaaacctattgagtacttcctgaaaactgttgaggagatcactttaaatgacatttcttcaactgcaaagaagattatttcttcgccgcttacattggcatcatggggtgatgttattcatgtgcctagctacgaatctgtcaggcgcaagttccattccaagtga

SEQ ID NO: 64435 - protein, 495 aa, Oryza sativa
MYRALRSLKHHGASRFASTSVVKQSSGGLLGWFLGGNSSQLPPLDVPLPGVIISPPLPDFVEPSKTKITTLPNGIKIASETSPIPAVSVGLYIDCGSVYETSSSSGTSHLLERMAFKSTTNRSHLRLVREVEAIGGNVFASASREQMSYTYDALKCYAPEMVEVLIDSVRNPAFLEWEVKEQLQKIKSEISEVSGDPHGLLMEALHSAGYSGALAKPLMASESAVNRLDVATLEEFVSENYTAPRMVLAASGIEHDELVSVAEPLLSDLPSVKRPEEPKSVYVGGDYHCQADSTSTHIALAFEVPGGWRQEKTAMIVTVLQVLMGGGGSFSTGGPGKGMHSWLYLRVLNNYGQIESFSAFSSIYNNSGLFGIHATTNPDFVSSAVDLAARELHEVATPGKVTQEQLDRAKEATKSSVLMDLESRIVASEDIGRQVLTYGERKPIEYFLKTVEEITLNDISSTAKKIISSPLTLASWGDVIHVPSYESVRRKFHSK

SEQ ID NO: 64436 - DNA, 1590 bp, Brassica napus
  CDS (1)..(1590)
atggcgatgaagaacctattgacctccgccctccgatctcagaggcgtctcgccctgaaccgagccgcacgagctttgtcctccgtttcagctctcgattcggcttctctgacgtctcactccccctcccccacgccgccgattctcatgccctacgaccactccgccgagatcgtcaaagagaagctcaagaggctagagaacccagatcagagattcctcaaatacgcatctccgcatccaatcctcgcctcacacaaccacatcttgtcatcccccgagacgcgcgtcaccactttacccaacggcctccgagtcgccaccgaatcgaatctctccgcgaagaccgcaaccgtcggggtatggatcgacgctggatcgaggttcgagtcggacgagacgaacgggacggctcattttctggagcatatgatattcaaaggcacggagaggcgtacggtgagggcgttggaggaggagatcgaggacattggtggtcatttgaatgcgtatacgtcgagggagcagactacttactatgccaaggtgatggattcggatgtgaaccaggcgttggatgtgttggctgatatcttgcagaactctaagttcgaggagcagaggattaaccgggagcgtgatgtcatcctcagggaaatgcaagaggtggagggacaaactgatgaagttgttcttgaccatctacatgccactgctttccaatacacacctcttggaagaactattctaggacctgctcagaatatcaagtctatcaccagaaatgatcttcagaactacatcaagactcactacacagcttccaggatggtgattgctgcggcaggagctgtcaagcatgaggaagttgttgagcaagtgaagaagctatttaacaagttgtcatctgatccgactactactactcaactagttgccaaagaacctgctagttttactggttctgaggttcgaatgattgatgacgacctaccccttgcacaatttgctgtggccttcgaaggagcatcttggacagatccagattccgttgctcttatggttatgcaaaccatgttgggttcttggaacaaaaacgttggtggtggcaagcacatggggtctgccctgacccagagggttgccgttaatgaaatagcggaaagcataatggcattcaacaccaactacaaggatactggacttttcggcgtgtacgcagttgctaaggctgattgcttagatgatttatcatatgcgattatgcatgaggtaaccaagttggccttccgagtttcagacgatgatgtgacacgtgcgcgcaatcagctgaaatcatcgctattacttcacatggatggaactagcccagttgctgaagatattggtcgtcagctgctgacatatgggagaagaatcccaacggctgaactctttgcaaggatcgatgctgttgatgccagcacggtaaaacgtgttgccaacaagtatatctatgacaaggacattgcaatctcagctattggtccgatccaagatttgccagactacaacaagttcagacgcggaacctactggaaccgttactaa

SEQ ID NO: 64437 - protein, 529 aa, Brassica napus
MAMKNLLTSALRSQRRLALNRAARALSSVSALDSASLTSHSPSPTPPILMPYDHSAEIVKEKLKRLENPDQRFLKYASPHPILASHNHILSSPETRVTTLPNGLRVATESNLSAKTATVGVWIDAGSRFESDETNGTAHFLEHMIFKGTERRTVRALEEEIEDIGGHLNAYTSREQTTYYAKVMDSDVNQALDVLADILQNSKFEEQRINRERDVILREMQEVEGQTDEVVLDHLHATAFQYTPLGRTILGPAQNIKSITRNDLQNYIKTHYTASRMVIAAAGAVKHEEVVEQVKKLFNKLSSDPTTTTQLVAKEPASFTGSEVRMIDDDLPLAQFAVAFEGASWTDPDSVALMVMQTMLGSWNKNVGGGKHMGSALTQRVAVNEIAESIMAFNTNYKDTGLFGVYAVAKADCLDDLSYAIMHEVTKLAFRVSDDDVTRARNQLKSSLLLHMDGTSPVAEDIGRQLLTYGRRIPTAELFARIDAVDASTVKRVANKYIYDKDIAISAIGPIQDLPDYNKFRRGTYWNRY

SEQ ID NO: 64438 - DNA, 1509 bp, Brassica napus
  CDS (1)..(1509)
atgtatcgcacggcagcttcacgagccagggctctcaagggatctcttagccgaggtttgggacctgcgcgttatgcaagcgcaagtgccgttgctacgagctcttcttctccaggtttcttgggatggttgactggtggatcctctggttcccttacttcactggatatgccacttcagggcgtatctcttcctccacctcttgctgaccgcgtcgagccaagcaaactcaagatcaccactcttccaaatgggctcaaaatcgcctcagagatgtctcccaatccggcagcttctattggtttgtatgttgattgtggttctatctatgaggctccttatttccatggagcgacgcatttgcttgaaaggatggctttcaagagcacgacaaacaggagccatctacgtcttgtgagggaaatagaagctattggagggaacacctccgcatctgcttcaagggagcagatgagttacactattgatgctcttaaaacctatgtacctgaaatggttgaggttcttattgacagtgtgaggaaccctgctttcttggattgggaagtcaatgaagagctacgtaagatgaaggtagagatagcggaacttgcaaagaaccctatgggattcctcatggaggctgttcactctgctggttattcaggtgcattggcaaatcctctgtacgcacctgagtctgctttgcacagattgaatggggaactcttggaggagtttatgactgagaatttcactgctgcacgtatggtactggcggcaagtggagttgaacacgaggaacttttaaaagttgctgagccattaacttctgaccttcctaacgtaccacgccaagctgagccaaaatctcagtatactggtggagattttcgccaacatagtggtggagaggctacacactttgcgcttgcctttgaggtgcccggctggaaggacgagaaagaagcactcatcgcctctgttctccagatgcttatgggaggaggtggctcattctcagctggaggccctggaaaaggaatgcactcatggctatatctccgtattctgaacgaatatcagcaagttcagtcatgcaccgcattcactagcatctttgacaacaccggactgtttggaatatatggttactcgagtcctgagtttgctgcaaaagcaattgaattagcagctaaagaactgaaagatgtagcaggaggaaaagttaaccagaagcatctagatcgtgccaaggcagccacaaaatctgcagttctgatgaatttggaatctcggatgattgcagcagaagacattggcaggcagatacttacatacggagagaggaaaccagttgagcagttcttgaaggcagtagacgaacttacgttgaaagacattacagatttcaccagcaagataatttcaaagcctttgacaatgggttcctttggagatgtgttgtctgttccgagctacgacaccgtaagcagtaagttttgttga

SEQ ID NO: 64439 - protein, 502 aa, Brassica napus
MYRTAASRARALKGSLSRGLGPARYASASAVATSSSSPGFLGWLTGGSSGSLTSLDMPLQGVSLPPPLADRVEPSKLKITTLPNGLKIASEMSPNPAASIGLYVDCGSIYEAPYFHGATHLLERMAFKSTTNRSHLRLVREIEAIGGNTSASASREQMSYTIDALKTYVPEMVEVLIDSVRNPAFLDWEVNEELRKMKVEIAELAKNPMGFLMEAVHSAGYSGALANPLYAPESALHRLNGELLEEFMTENFTAARMVLAASGVEHEELLKVAEPLTSDLPNVPRQAEPKSQYTGGDFRQHSGGEATHFALAFEVPGWKDEKEALIASVLQMLMGGGGSFSAGGPGKGMHSWLYLRILNEYQQVQSCTAFTSIFDNTGLFGIYGYSSPEFAAKAIELAAKELKDVAGGKVNQKHLDRAKAATKSAVLMNLESRMIAAEDIGRQILTYGERKPVEQFLKAVDELTLKDITDFTSKIISKPLTMGSFGDVLSVPSYDTVSSKFC

SEQ ID NO: 64440 - DNA, 1509 bp, Brassica napus
  CDS (1)..(1509)
atgtatcgcacggccgcttcacgagccagggctctcaagggatctcttagccgaggtttgggacctgcgcgttatgcaagttcaagtgccgttgctacgagttcttcttctcaaggtttcttgggatggttgactggtggatcctctggttcccttacttcactggatatgccacttcagggcgtatctcttcctccaccgcttgctgaccgcgtcgagccaagcaaactcaagatcaccactcttccaaatgggctcaaaatcgcctcagagatgtctaccaatccggcagcttctattggtttgtacgttgattgtggttctatctatgaggctccttatttccatggagcgacgcatttgcttgaaaggatggcgttcaagagcacgacgaacagaagccatctacgtcttgtgagggaaattgaagctattggaggcaacacctctgcatctgcgtctcgggagcagatgagttacactattgatgctcttaaaacctatgtacctgaaatggttgaggttcttattgacagtgtgaggaaccctgctttcttggattgggaagtcaatgaagagctacgtaagatgaaggtagagatagcggaacttgcaaagaaccctatgggattcctcatggaggctgttcactctgctggttattcaggtgcattggcaaatcctctgtacgcacctgagtctgctttgcacagattgaatggggaactcttggaggagtttatgactgagaatttcactgctgcacgtatggtactggcggcaagtggagttgaacacgaggaacttttacaagttgttgagccattaacttctgaccttcctaatgtaccgcgccaaggggagccgaaatctcagtatactggtggagattttcgccaacatactggtggagaggctacacactttgcgcttgcttttgaggtgcctggctggaataacgagaaagaagcagtcattgccactgttctccagatgctcatgggaggaggcggctcattctcagctggaggccctggcaaaggaatgcactcatggctatatctccgtattctaaacgaatatcagcaagttcagtcatgcactgcattcactagcatctttaacaacaccggattgtttggaatctatggttgctcgagtcctgagttcgctgcaaaagcgattgaattagcagctaaagaactgaaagatgttgccggaggaaaagttaaccagaagcatcttgatcgtgccaaggcagccacaaaatctgcagttctgatgaatttggaatctcggatgattgcagcagaagacattggcaggcagatacttacatacggagagaggaaaccagttgagcagttcttgaaggcagtagacgaacttacgttgaaagacattacagatttcaccagcaagataatttcaaagcctttgacaatgggttcctttggagatgtgttgtctgttccgagctacgacaccgtaagcagtaagttttgttga

SEQ ID NO: 64441 - protein, 502 aa, Brassica napus
MYRTAASRARALKGSLSRGLGPARYASSSAVATSSSSQGFLGWLTGGSSGSLTSLDMPLQGVSLPPPLADRVEPSKLKITTLPNGLKIASEMSTNPAASIGLYVDCGSIYEAPYFHGATHLLERMAFKSTTNRSHLRLVREIEAIGGNTSASASREQMSYTIDALKTYVPEMVEVLIDSVRNPAFLDWEVNEELRKMKVEIAELAKNPMGFLMEAVHSAGYSGALANPLYAPESALHRLNGELLEEFMTENFTAARMVLAASGVEHEELLQVVEPLTSDLPNVPRQGEPKSQYTGGDFRQHTGGEATHFALAFEVPGWNNEKEAVIATVLQMLMGGGGSFSAGGPGKGMHSWLYLRILNEYQQVQSCTAFTSIFNNTGLFGIYGCSSPEFAAKAIELAAKELKDVAGGKVNQKHLDRAKAATKSAVLMNLESRMIAAEDIGRQILTYGERKPVEQFLKAVDELTLKDITDFTSKIISKPLTMGSFGDVLSVPSYDTVSSKFC

SEQ ID NO: 64442 - DNA, 1590 bp, Brassica napus
  CDS (1)..(1590)
atggcgatgaagaacctattgacctccgccctccgatctcagaggcgtctcgccctgaaccgagccgcacgagctttgtcctccgtttcagctctcgattcggcttctctgacgtctcactccccctcccccacgccgccgattctcatgccctacgaccactccgccgagatcgtcaaagagaagctcaagaggctggagaacccagatcagagattcctcaaatacgcatctccgcacccaatcctcgcctcccacaaccacatcttatcagctcccgagacgcgcgtcaccactttacccaacggcctccgagtcgccaccgaatcgaatctctccgcgaagaccgcaaccgtcggggtatggatcgacgctggatcgaggttcgagtcggacgagacgaacgggacggctcattttctggagcatatgatattcaaaggcacggagaggcgtacggtgagggcgttggaggaggagatcgaggacattggtggtcatttgaatgcgtatacgtcgagggagcagactacttactatgccaaggtgatggattcggatgtgaaccaggctttggatgtgttggctgatatcttgcagaactctaagttcgaggagcagaggattaaccgggagagagatgtcatcctcagggaaatgcaagaggtggagggacaaactgatgaagttgttcttgaccatctacatgccactgctttccaatacacacctcttggaagaactattctgggacctgctcagaatatcaagtctatcaccagaaatgatcttcagaactacatcaagactcactacacagcttccaggatggtgattgctgcggcaggagctgtcaagcatgaggaagttgttgagcaagtgaagaagctatttaacaagttgtcatctgatccgactactactactcaactagttgccaaagaacctgctagttttactggctctgaggttcgaatgattgatgacgatctaccccttgcacaatttgctgtggccttcgaaggagcttcttggacagatccagattccgttgctcttatggttatgcaaaccatgttgggttcttggaacaaaaacgttggtggtggcaagcacatggggtctgccctgacccagagggttgccgttaatgaaatagcggaaagcataatggcattcaacaccaactacaaggatactggacttttcggcgtgtacgcagttgctaaggctgattgcttagatgatttatcatatgcgattatgcatgaggtaaccaagttggccttccgagtttcagacgatgatgtgacacgtgcgcgcaatcagctgaaatcatcgctattacttcacatggatggaactagcccagttgctgaagatattggtcgtcagctgctgacatatgggagaagaatcccaacggctgaactctttgcaaggatcgatgctgttgacgccagcacggtaaaacgtgttgccaacaagtatatctatgacaaggacattgcaatctcagctattggtccgatccaagatttgccagactacaacaagttcagacgcggaacctactggaaccgttactaa

SEQ ID NO: 64443 - protein, 529 aa, Brassica napus
MAMKNLLTSALRSQRRLALNRAARALSSVSALDSASLTSHSPSPTPPILMPYDHSAEIVKEKLKRLENPDQRFLKYASPHPILASHNHILSAPETRVTTLPNGLRVATESNLSAKTATVGVWIDAGSRFESDETNGTAHFLEHMIFKGTERRTVRALEEEIEDIGGHLNAYTSREQTTYYAKVMDSDVNQALDVLADILQNSKFEEQRINRERDVILREMQEVEGQTDEVVLDHLHATAFQYTPLGRTILGPAQNIKSITRNDLQNYIKTHYTASRMVIAAAGAVKHEEVVEQVKKLFNKLSSDPTTTTQLVAKEPASFTGSEVRMIDDDLPLAQFAVAFEGASWTDPDSVALMVMQTMLGSWNKNVGGGKHMGSALTQRVAVNEIAESIMAFNTNYKDTGLFGVYAVAKADCLDDLSYAIMHEVTKLAFRVSDDDVTRARNQLKSSLLLHMDGTSPVAEDIGRQLLTYGRRIPTAELFARIDAVDASTVKRVANKYIYDKDIAISAIGPIQDLPDYNKFRRGTYWNRY

SEQ ID NO: 64444 - DNA, 1518 bp, Glycine max
  CDS (1)..(1518)
atgtacagagttgcagcatcatcattcagaaggcatctcaagggccatggaggtaacttgggatccactaggttttcaacttcagccgcggtagctgcaaggacttcatcaggtggtttgtttagctggcttactggagagcgttctagtgctcttcctcctctggacatgccccttggtggtgttgctctccccgattcacttccagattacgtcgaacaaagcaagaccaagatcacaacactccccaatggactcaaaattgcgtcagagacctctcctaaccctgcagcttcaattgggttatatcttgactgtggttccatctatgaaacgccattgtcaagcggggtttcacacttgctagagagaatggctttcaaaagcacaacaaaccgtagtcactttcgtattgtaagggaagtagaagcaattggtggaaatataggagcctcagcctctcgggagcaaatgggttatacatttgatgcattaaagacctatgctccacaaatggttgaattactggttgactgtgtaaggaacccagccttcttggattgggaagtcaatgaagagcttcggaaggtgaaagcagagcttggagaactctctaacaatccccaaggcttgcttttggaagcaattcactctgctggttattctggtgcattggcttttcctcttttggctcctgaagcagcactgaacagattggacggccccaatttagaggaatttgttgttgagaattacacagcacctagaatggtacttgcagcatctggggttgagcacgaagagcttctatctattgctgagccacttctctctgatctaccaaaggttccccgtcctgaagaaccaaagtctatctatgttgggggtgattttcgtcgtcatggtgaagggggtacacatgttgctattgcttttgaagtgcctggtggctggcaaaaggagaaagatgctattgttttgactgttttacagatgcttatgggaggaggtgggtcattctcagcaggggggcctggaaaagggatgcactcaaggctatatcttaatgtgctgaatgaatatcagcagattcaatctttttctgcattcaacagtatcttcaataatacaggactgtttggcatttatgcaagcactagccctgattttgtgccaaaaactgttgatatagcagccaaagaactaatagcaattgcttcccctggacaagttacacaggtacagcttgaccgagccaaaaaatccacaaagtctgcagttctaatgaatctggaatctagaatgattgcatcagaagatatagggaggcagattttgacttatggagaaaggaagcctgtggaacagttcttgaaggctgtagatgaaatcacgttgaatgatatcactaaaattgctcaaaagattatttcctcacctttgaccatggcatcatatggggatgtcatgaatgtgccaagttatgaatctgttaacagcaagttccatgcaaaatga

SEQ ID NO: 64445 - protein, 505 aa, Glycine max
MYRVAASSFRRHLKGHGGNLGSTRFSTSAAVAARTSSGGLFSWLTGERSSALPPLDMPLGGVALPDSLPDYVEQSKTKITTLPNGLKIASETSPNPAASIGLYLDCGSIYETPLSSGVSHLLERMAFKSTTNRSHFRIVREVEAIGGNIGASASREQMGYTFDALKTYAPQMVELLVDCVRNPAFLDWEVNEELRKVKAELGELSNNPQGLLLEAIHSAGYSGALAFPLLAPEAALNRLDGPNLEEFVVENYTAPRMVLAASGVEHEELLSIAEPLLSDLPKVPRPEEPKSIYVGGDFRRHGEGGTHVAIAFEVPGGWQKEKDAIVLTVLQMLMGGGGSFSAGGPGKGMHSRLYLNVLNEYQQIQSFSAFNSIFNNTGLFGIYASTSPDFVPKTVDIAAKELIAIASPGQVTQVQLDRAKKSTKSAVLMNLESRMIASEDIGRQILTYGERKPVEQFLKAVDEITLNDITKIAQKIISSPLTMASYGDVMNVPSYESVNSKFHAK

SEQ ID NO: 64446 - DNA, 1572 bp, Glycine max
  CDS (1)..(1572)
atggcctccaaccaccttctcaccctaacccgccgcctccgccgccgcctaccctccctccgcctcttctccacctttccggcggccaccaagtccccctcccctcctgcccctacccctcccgacgccatgctctacgaccgcctcgcggaggcgaccaaagccaaactccgccggctcgataacccggacccacgcttcctgaaacacgggtccccggtgcccgcgctggcggaccacacgcgggtcctgggcgcgcccgagacccgcgtgacgaccctccccaacggcctccgcgtcgccacggagtcctccctcgcctcccagaccgcgactgtgggcgtctggatcgacgccgggtcgcggttcgagacggaggagaccaacggcaccgcgcacttcctcgagcacatgatcttcaagggcaccgcgaagcgcaccgtcagggagctcgaggaggagatcgagaacatgggaggccacctcaacgcgtacacgtcgagggagcagacaacgtattacgctaaggtcacggagaaggatgttcctaaggcgcttgatattttggctgatatattgcagaattcgaagtttgatgaaaaaaggattagccgcgagcgtgacgtgattcttagagaaatggaagaggttgaggggcaaatggaggaagtaatttttgaccatttacatgcaactgctttccagtacactccacttggtagaacaattcttggtcctgctcagaatattatgacaatcactaaagatcatctacaaaactacattcagacacactacacggctcctaggatggtggttgctgcatctggagctgtcaagcacgaagaaattgttgagcaagtaaaaacattgtttacgaagttgtcaacagatcccaccacagcttctcaattagttgcaaaagaaccagccatttttaccggttctgaggttagaattttggatgatgatattccccttgcacaatttgccgtagcttttgaaggtgctgcttggacagatcccgattccgttgctctgatggtcatgcaagctatgttgggttcttggaataaaaccgcaggaggtggaaaacacatgggttctgagttggcacaacgagttggcattaatgaagttgcagaaagcatgatggccttcaataccaattacaaggatacaggtctttttggtgtttatgctgttgctaacaaagattgtttggatgacttaagctatgcaataatgtacgagacaaccaagttggcttatcgggtttcagaagatgatgtcacacgtgcttgtaatcagttgaaatcttcactcctgctccacatagatggaacaagtccagtagctgaagatattgggcgtcagctactcacctacggcagaagaatcccatttgcagaattgtttgctagaattgacgctgttgatgcaagcacaataaaacgtgttgctaaccgatttatttatgacaaggatattgcaattgctgctatgggacctattcagcgtttgcctgattacaactggttcaggcgcagaacctactggaaccgctactag

SEQ ID NO: 64447 - protein, 523 aa, Glycine max
MASNHLLTLTRRLRRRLPSLRLFSTFPAATKSPSPPAPTPPDAMLYDRLAEATKAKLRRLDNPDPRFLKHGSPVPALADHTRVLGAPETRVTTLPNGLRVATESSLASQTATVGVWIDAGSRFETEETNGTAHFLEHMIFKGTAKRTVRELEEEIENMGGHLNAYTSREQTTYYAKVTEKDVPKALDILADILQNSKFDEKRISRERDVILREMEEVEGQMEEVIFDHLHATAFQYTPLGRTILGPAQNIMTITKDHLQNYIQTHYTAPRMVVAASGAVKHEEIVEQVKTLFTKLSTDPTTASQLVAKEPAIFTGSEVRILDDDIPLAQFAVAFEGAAWTDPDSVALMVMQAMLGSWNKTAGGGKHMGSELAQRVGINEVAESMMAFNTNYKDTGLFGVYAVANKDCLDDLSYAIMYETTKLAYRVSEDDVTRACNQLKSSLLLHIDGTSPVAEDIGRQLLTYGRRIPFAELFARIDAVDASTIKRVANRFIYDKDIAIAAMGPIQRLPDYNWFRRRTYWNRY

SEQ ID NO: 64448 - DNA, 1530 bp, Glycine max
  CDS (1)..(1530)
atgtacaggaacgctgcttcacgtcttagggtcatcagtgcccgttcgtgcagcagcagcaggatacctgccagtgccagattttcaagttccgttgccacacaacaatcctcttctggtttgggtggtttatttggatggctcactggagaccgatccagttctttaccatctctggatttcccgcttccgggcgttacacttcccccttcattgcctgattttgttgcgcccggaaaaactattattactacactcccaaatggactcaaagtggcctctgaaacatcaccgactcccactgcgtcggttggcttatatgtagattgtggttcaatatacgagactccgataagttttggggctacacatctgctagaacgaatggctttcaagaccactagaaaccggagtcactttcgggttgttcgtgaggtagaggcaattggtggcaatgtgcaggcctccgcttctagagagcagatgggttacacttttgatgccttgaaaacctatgttcctgaaatggtcgagctacttgttgattgtgtcaggaaccctgttttccttgattgggaggttaacgagcagcttctgaaagtgaaggctgagattggtgaagcttccaaaaatccccaagacttgcttttggaagcaattcattctgctggtttttctggtgccttggcaaatcctcttttagcttcagaatcagctctaaatagactaaatggtacaattctggaggagtttgttgctgagaactatacagcacctcggatagtacttgcagcatctggtgttgaacatgaggaattgttatctgttgcagaacctctcttgtctgatctacccagtgtcccacgtctagaggagccaaaatcagtgtatactggtggtgattatagatgtcaaagtgaatcagggaggacccattttgctctagcatttgaacttcctggtggctggcataagttgaaggatgctatgattttgactgttcttcagatgctattgggaggtggtggatcattctcagctggtggacctggtaaagggatgtattcacggctatatctcaatgttctgaatgaatatccacaagttcattcaatttcagcattcaacaatatttacaatggcactggcatttttggtatccaagttacaacaggctcagattttgtatcaaaagccattgatatagctgctaatgagattcttggtgttgctactcctggacaagttgaccaggcacagcttaatcgagccaaacaggctaccaaatctgcaattttgatgaatttggaatcaagaatggttgtttcagaagatataggaagacaaattttgacatatggtgagaggaaacctgtggaggatttcttgaaggcagtggatgaagtaacctcaaaggatatcacttcaatttcgcaaaaactcatttcttctcctctcacaatggcatcatatggagatgttctctatgttccaagctatgaatcagtgagcctcaagttccgttcctaa

SEQ ID NO: 64449 - protein, 509 aa, Glycine max
MYRNAASRLRVISARSCSSSRIPASARFSSSVATQQSSSGLGGLFGWLTGDRSSSLPSLDFPLPGVTLPPSLPDFVAPGKTIITTLPNGLKVASETSPTPTASVGLYVDCGSIYETPISFGATHLLERMAFKTTRNRSHFRVVREVEAIGGNVQASASREQMGYTFDALKTYVPEMVELLVDCVRNPVFLDWEVNEQLLKVKAEIGEASKNPQDLLLEAIHSAGFSGALANPLLASESALNRLNGTILEEFVAENYTAPRIVLAASGVEHEELLSVAEPLLSDLPSVPRLEEPKSVYTGGDYRCQSESGRTHFALAFELPGGWHKLKDAMILTVLQMLLGGGGSFSAGGPGKGMYSRLYLNVLNEYPQVHSISAFNNIYNGTGIFGIQVTTGSDFVSKAIDIAANEILGVATPGQVDQAQLNRAKQATKSAILMNLESRMVVSEDIGRQILTYGERKPVEDFLKAVDEVTSKDITSISQKLISSPLTMASYGDVLYVPSYESVSLKFRS

SEQ ID NO: 64450 - DNA, 1530 bp, Glycine max
  CDS (1)..(1530)
atgtacaggaacgctgcttcacgtcttagggtcatcagtgcccgttcgtgcagcagcagcaggatacctgccagtgccagatttgcaagttccgttgccacacaacaatcctcttctggtttgggtggtttatttggatggctcactggagaccgatccagttctttaccatctctggatttcccgcttccgggcgttacacttcccccttcattgcctgattttgttgcgcccggaaaaactattattactacactcccaaatggactcaaagtggcctctgaaacatcaccgactcccactgcgtcggttggcttatatgtagattgtggttcaatatacgagactccgataagttttggggctacacatctgctagaacgaatggctttcaagaccactagaaaccggagtcactttcgggttgttcgtgaggtagaggcaattggtggcaatgtgcaggcctccgcttctagagagcagatgggttacacttttgatgccttgaaaacctatgttcctgaaatggtcgagctacttgttgattgtgtcaggaaccctgttttccttgattgggaggttaacgagcagcttctgaaagtgaaggctgagattggtgaagcttccaaaaatccccaagacttgcttttggaagcaattcattctgctggtttttctggtgccttggcaaatcctcttttagcttcagaatcagctctaaatagactaaatggtacaattctggaggagtttgttgctgagaactatacagcacctcggatagtacttgcagcatctggtgttgaacatgaggaattgttatctgttgcagaacctctcttgtctgatctacccagtgtcccacgtctagaggagccaaaatcagtgtatactggtggtgattatagatgtcaaagtgaatcagggaggacccattttgctctagcatttgaacttcctggtggctggcataagttgaaggatgctatgattttgactgttcttcagatgctattgggaggtggtggatcattctcagctggtggacctggtaaagggatgtattcacggctatatctcaatgttctgaatgaatatccacaagttcattcaatttcagcattcaacaatatttacaatggcactggcatttttggtatccaagttacaacaggctcagattttgtatcaaaagccattgatatagctgctaatgagattcttggtgttgctactcctggacaagttgaccaggcacagcttaatcgagccaaacaggctaccaaatctgcaattttgatgaatttggaatcaagaatggttgtttcagaagatataggaagacaaattttgacatatggtgagaggaaacctgtggaggatttcttgaaggcagtggatgaagtaacctcaaaggatatcacttcaatttcgcaaaaactcatttcttctcctctcacaatggcatcatatggagatgttctctatgttccaagctatgaatcagtgagcctcaagttccgttcctaa

SEQ ID NO: 64451 - protein, 509 aa, Glycine max
MYRNAASRLRVISARSCSSSRIPASARFASSVATQQSSSGLGGLFGWLTGDRSSSLPSLDFPLPGVTLPPSLPDFVAPGKTIITTLPNGLKVASETSPTPTASVGLYVDCGSIYETPISFGATHLLERMAFKTTRNRSHFRVVREVEAIGGNVQASASREQMGYTFDALKTYVPEMVELLVDCVRNPVFLDWEVNEQLLKVKAEIGEASKNPQDLLLEAIHSAGFSGALANPLLASESALNRLNGTILEEFVAENYTAPRIVLAASGVEHEELLSVAEPLLSDLPSVPRLEEPKSVYTGGDYRCQSESGRTHFALAFELPGGWHKLKDAMILTVLQMLLGGGGSFSAGGPGKGMYSRLYLNVLNEYPQVHSISAFNNIYNGTGIFGIQVTTGSDFVSKAIDIAANEILGVATPGQVDQAQLNRAKQATKSAILMNLESRMVVSEDIGRQILTYGERKPVEDFLKAVDEVTSKDITSISQKLISSPLTMASYGDVLYVPSYESVSLKFRS

SEQ ID NO: 64452 - DNA, 1518 bp, Zea mays
  CDS (1)..(1518)
atgtaccgagtcgcctccgggctcggcgccctcaagaggcatggggcaaatgctcaaatgatgaatgctgcaattaggtgtgccagcacaagtgttgcacagaggtcttccggtggcttctggacctggttgactggtgcgcgttcaaatgaaatacctcctccagatttcacacttccgggagtgactattcctcctccgctgcctgaccatgtggaggctggcaaaacaagagtcacaacacttcccaatggtgttaaaatagcctctgagacatctgcgggatcatcttgttctgttggagtttatgttgattgtggttctgtatatgaagcacctgaaacaacaggcgccagtcaactgttgaagacaatggccttcacaaccactgccaacaggagtgagttgcgggttgtgcgtgaaattgaggcaataggtggcagtgccaaagcatctgctagccgtgagatgatgagctacacttacggagccctgaagacttacatgcctgaaatggttgaggtgcttattgattgtgtacgcaaccctgcttttcttgattgggaggtcaaggaacagattttgaggctacaggcagagcttgcaaaatcatcaagttatcctgaaaattttcttttggaggctcttcattctactggctattctggtgctttagcaaacccactaattgtgccagaatattcagttagcagattgaatgcagatgtcctggagcaatttataactgagaactacactgcttcccgaattgttctagctgcatcaggtgttgatcatgatgaattggtatctattgccgaaccccttctgtctgacattcccagtgtatctggaacaacaaggccaaaatcaacctacattggtggagaatacagaagaagtgcagattcatcgaacacagacgttgcattggcattcgaggtcccaagtggttggctcaaagaaaaagattgcgtcactgtatcagttcttcaggcacttctgggtggtggtggcaagttttcttggggaaggcaaggaaaggggttacattcacgtctaaaccgcctcgtaaatgaatttgatcagatcaagtcaatctctgctttcaaggatgttcacagtaatactggcatctttggaatccatacatctactgatgcatcatttgttcctaaagctattgacctagcagccagagagctcacttcccttgcaactcctggacaagttgaccaaagccaactggaccgcgctaaagcctcagctaaatatgcgatactggcaaatttggaatcacaggcatcgctaacagaggacatggggcgccaagttttggcatttggtgaaaggaaacctgctgagcaccttctcaaggctgtagatggtgttactatgaaagatataacgtctgttgctgaaaagatcatttcatccccattgacaatggcatctcatggaaacgttctgaatatgcctacttatgagtcggtcagtggcaagttccgctcaaaatga

SEQ ID NO: 64453 - protein, 505 aa, Zea mays
MYRVASGLGALKRHGANAQMMNAAIRCASTSVAQRSSGGFWTWLTGARSNEIPPPDFTLPGVTIPPPLPDHVEAGKTRVTTLPNGVKIASETSAGSSCSVGVYVDCGSVYEAPETTGASQLLKTMAFTTTANRSELRVVREIEAIGGSAKASASREMMSYTYGALKTYMPEMVEVLIDCVRNPAFLDWEVKEQILRLQAELAKSSSYPENFLLEALHSTGYSGALANPLIVPEYSVSRLNADVLEQFITENYTASRIVLAASGVDHDELVSIAEPLLSDIPSVSGTTRPKSTYIGGEYRRSADSSNTDVALAFEVPSGWLKEKDCVTVSVLQALLGGGGKFSWGRQGKGLHSRLNRLVNEFDQIKSISAFKDVHSNTGIFGIHTSTDASFVPKAIDLAARELTSLATPGQVDQSQLDRAKASAKYAILANLESQASLTEDMGRQVLAFGERKPAEHLLKAVDGVTMKDITSVAEKIISSPLTMASHGNVLNMPTYESVSGKFRSK

SEQ ID NO: 64454 - DNA, 1593 bp, Zea mays
  CDS (1)..(1593)
atggcgttccgccgcatcctatccaccgcggtgcgccgccgctcggccgtggccgccgcggcggccgggaacgcgcgcgaggcctccacggccgtcgctgcggcgccaggtgtgctcgcccccgatgcgaccgcggtgcgcgctcccgtgatgccgtatgaccgcatcgccgacgccgtcaacgccaggctccggcggctcgagcacccagacccgcgcttcctccgctacgccagccccgtgccgtcccacgcggaccacatggccatccttgcggcgccagagacccgggtcaccacactgcccaacggcctgcgcatcgccacggagtcttccctcgccgcgcgcacggctacggtcggcgtgtggatcgatgcgggcagcaggtacgagaacgaggaggcggtcggcgtcgcgcattttgtcgagcacatgctgttcaagggcacggggaagcgcagcgccgcgcagctggagctggagatcgaggacatgggtggccaccttaatgcgtacacgtcgcgggagcagacgacctactacgccaaggtgcttgacaaggacgtgccccgtgcgatggaggtcctctcggacatcctccagaactctaatctcgaccaggcccgcattgaacgtgagcgcgaagtgatcctacgagagatgggggaggttgagggacagtctgaggaagttatatttgatcatctccatgcaactgcattccaatatacatctcttggcagaccaatcttgggttctgcagagaatgtcaagtcaatcaccaaagaggaccttgagaactacattgcaactcattatacagctcctagaatggttatcacagctgcaggcaatgtgaaacatgaagacattgttgagcaggcaaagaagttgttcaataagctatcaactgaccctacaacaacaaacatgttggtcgctaagcaaccagcctctttcacgggttctgaggttcgaatcattgacgatgacatgccccttgctcaatttgctgttgctttcaatggagcatcatgggtagatcctgattctgttgcactgatggttatgcaatcaatgcttggttcatggaacaagagtgctggtggaggaaagcacatgggttcggagcttgtacagaaagcagcaatcaatgacattgctgagagtgtaatgtcattcaacatgaattacaaggacactggtctttttggtgtctatgctgttgctaaggctgattgcttggatgatttggcttttgcaattatgcatgagatgagcaaattgtcataccgggttacagaggaagatgttatccgtgcacgtaatcagctgaagtcctcaatccaactccaccttgatggttcaactgctgttgtcgaggacattggccgccagctgctgacctatggacgaagaattcctaccccagagctttttgcaagaatagatgctgttgatgcaagcactgtgaagcgtgttgcaaaccgcttcatctttgatcaggatgttgctattgctgcgatgggaccgatccaaggacttccagactacaactggttcagacgccggacctacatgctccgttactaa

SEQ ID NO: 64455 - protein, 530 aa, Zea mays
MAFRRILSTAVRRRSAVAAAAAGNAREASTAVAAAPGVLAPDATAVRAPVMPYDRIADAVNARLRRLEHPDPRFLRYASPVPSHADHMAILAAPETRVTTLPNGLRIATESSLAARTATVGVWIDAGSRYENEEAVGVAHFVEHMLFKGTGKRSAAQLELEIEDMGGHLNAYTSREQTTYYAKVLDKDVPRAMEVLSDILQNSNLDQARIEREREVILREMGEVEGQSEEVIFDHLHATAFQYTSLGRPILGSAENVKSITKEDLENYIATHYTAPRMVITAAGNVKHEDIVEQAKKLFNKLSTDPTTTNMLVAKQPASFTGSEVRIIDDDMPLAQFAVAFNGASWVDPDSVALMVMQSMLGSWNKSAGGGKHMGSELVQKAAINDIAESVMSFNMNYKDTGLFGVYAVAKADCLDDLAFAIMHEMSKLSYRVTEEDVIRARNQLKSSIQLHLDGSTAVVEDIGRQLLTYGRRIPTPELFARIDAVDASTVKRVANRFIFDQDVAIAAMGPIQGLPDYNWFRRRTYMLRY

SEQ ID NO: 64456 - DNA, 1518 bp, Zea mays
  CDS (1)..(1518)
atgtaccgagtcgcctccgggctcggcgccctcaagaggcatggggcaaatgctcaaatgatgaatgctgcaattaggtgtgccagcacaagtgttgcacagaggtcttcgggtggcttctggacctggttgactggtgcgcgttcaaatgaaatacctcctccagatttcacacttccaggagtgactattcctcctccgctgcctgaccatgtggaggctggcaaaacaagagtcacaacacttcccaatggtgttaaaatagcctctgagacatctgcgggatcatcttgttctgttggagtttatgttgattgtggttctgtatatgaagcacctgaaacaacagtcgccagtcaactgttgaagacaatggccttcacaaccactgccaacaggagtgagttgcgggttgtgcgtgaaattgaggcaataggtggcagtgccaaagcatctgctagccgtgagatgatgagctacacttacggagccctgaagacttacatgcctgaaatggttgaggtgcttattgattgtgtacgcaaccctgcttttcttgattgggaggtcaaggaacagattttgaggctacaggcagagcttgcaaaatcatcaagttttcctgaaaattttcttttggaggctcttcattctactggctattctggtgctttagcaaatccactaattgtgccagaatattcagttagcagattgaatgcagatgtcctggaacaatttataactgagaactacactgcttcccgaattgttctagctgcatcaggcgttgatcatgatgaattggtatctattgccgaaccccttctgtctgacattcccagtgtatctggaacaacaaggccaaaatcaacctacattggtggagaatacagaagaagtgcagattcatcgagcacagacgttgcattggcattcgaggtcccaagtggttggctcaaagaaaaagattgcgtcactgtatcagttcttcaggcacttctgggtggtggtggcaagttttcttggggaaggcaaggaaaggggttacattcacgtctaaaccgcctcgtaaatgaatttgatcagatcaagtcaatctctgctttcaaggatgttcacagtaatactggcatctttggaatccatacatctactgatgcatcatttgttcctaaagctattgacctagcagccagagagctcacttcccttgcaactcctggacaagttgaccaaagccaactggaccgcgctaaagcctcagctaaatatgcgatactggcaaatttggaatcacaggcatcgctaacagaggacatggggcgccaagttttggcatttggtgaaaggaaacctgctgagcaccttctcaaggctgtagatggtgttactatgaaagatataacgtctgttgctgaaaagatcatttcatccccattgacaatggcatctcatggaaacgttctgaatatgcctacttatgagtcggtcagtggcaagttccgctcaaaatga

SEQ ID NO: 64457 - protein, 505 aa, Zea mays
MYRVASGLGALKRHGANAQMMNAAIRCASTSVAQRSSGGFWTWLTGARSNEIPPPDFTLPGVTIPPPLPDHVEAGKTRVTTLPNGVKIASETSAGSSCSVGVYVDCGSVYEAPETTVASQLLKTMAFTTTANRSELRVVREIEAIGGSAKASASREMMSYTYGALKTYMPEMVEVLIDCVRNPAFLDWEVKEQILRLQAELAKSSSFPENFLLEALHSTGYSGALANPLIVPEYSVSRLNADVLEQFITENYTASRIVLAASGVDHDELVSIAEPLLSDIPSVSGTTRPKSTYIGGEYRRSADSSSTDVALAFEVPSGWLKEKDCVTVSVLQALLGGGGKFSWGRQGKGLHSRLNRLVNEFDQIKSISAFKDVHSNTGIFGIHTSTDASFVPKAIDLAARELTSLATPGQVDQSQLDRAKASAKYAILANLESQASLTEDMGRQVLAFGERKPAEHLLKAVDGVTMKDITSVAEKIISSPLTMASHGNVLNMPTYESVSGKFRSK

SEQ ID NO: 64458 - DNA, 1491 bp, Zea mays
  CDS (1)..(1491)
atgacgacgctctccaggatgctgccgcggttgcgctcctccgccacgcgcgccctccgcaaggtgttcggactggaacccgcggcgccgccgcgacggctccccgcccctgaagccttcgtcgcgtctgagagatcactcctgcgccctcttcctggcctggacctcccgccgtgcctccccgacaacctgagccgcagccccacccgggtcaccacgctccccaacggcctccgcgtcgccaccgaggacatcccgggtccttctgcgtgcatcggtttcttcgtcaactccggctccgtctacgagtccggggagaccaccggcgtgtcatacctgctggagaggatgggcttcaaggacaccaagcaccggagccacctcagcatcgtgagcgagctcgagcttgccggggccagcgtcagcgtctccgcctcccgggagcagatggtctacagctacgacacactcaagggatacatgcccgaggctctcgagatcctcatcgactgcatgcgcaacccgctcttcctccaggaagaagtccaacggcagctggtccttgctcgagaaggattccaggagctgcagaggagccctgaaagatttctccatgaacagcttaacattgttggattttcgggtgctcttgcgaatccactaatagctcctgagcatgtccttgctagaattaatgacaggattattcaaaagttctatcatgaaaattttactgctgatcgtgtggttctagcagcagcaggtgttgatcacgaacacatgctaggctatgcagattttttgttgaaagattggcacaggggggccccaatggaaaagccaaagtctacatatgttggtggatattccaaacacagagcttattcagatatgacagatgttgcattagcttttgaagtgccagggggctggtttcaagagagagacgccgcgattatgactgtcatacagactttaatgggtggtggtggttcattttccactggtggtcctggaaaagggatgcattcacggctttctctacgtgtcctaaataaatatcactttgtcgagtccctttctgcatttagtaatgtatatgacaacactggcctctttggtatctacttgaccacgtcaccatatcatgtggcaaaggctgttgatatcgcaataagtgaattaattgctgttgcaactcccggagaagtgacagaggttgaactgcgacgagcaaaaaactcaacgatttcatctgtattaatgaacctcgaatctagggtagttgttgcagaagatattggaagacagatgttatcttacggtagcaggaagcctatggacaacttccttcaacgtatggaaggaattactctagatgatgtcgcaacatttgccaggaagatgctagcttcacgacccacaatggttagctggggagatgttgacaaagttcctccatatgaatctatttgcaagcggctacgataa

SEQ ID NO: 64459 - protein, 496 aa, Zea mays
MTTLSRMLPRLRSSATRALRKVFGLEPAAPPRRLPAPEAFVASERSLLRPLPGLDLPPCLPDNLSRSPTRVTTLPNGLRVATEDIPGPSACIGFFVNSGSVYESGETTGVSYLLERMGFKDTKHRSHLSIVSELELAGASVSVSASREQMVYSYDTLKGYMPEALEILIDCMRNPLFLQEEVQRQLVLAREGFQELQRSPERFLHEQLNIVGFSGALANPLIAPEHVLARINDRIIQKFYHENFTADRVVLAAAGVDHEHMLGYADFLLKDWHRGAPMEKPKSTYVGGYSKHRAYSDMTDVALAFEVPGGWFQERDAAIMTVIQTLMGGGGSFSTGGPGKGMHSRLSLRVLNKYHFVESLSAFSNVYDNTGLFGIYLTTSPYHVAKAVDIAISELIAVATPGEVTEVELRRAKNSTISSVLMNLESRVVVAEDIGRQMLSYGSRKPMDNFLQRMEGITLDDVATFARKMLASRPTMVSWGDVDKVPPYESICKRLR

SEQ ID NO: 64460 - DNA, 1500 bp, Zea mays
  CDS (1)..(1500)
atgtaccgcgccgccgggagccacctccgctccctcaagcatcatggtgcttctaggcttgccagtacaagtgttgcgaagcagtcctcaggtggtctgttcagctggcttcttggtggaaaatcaagcgaactccctccccttgatgttccactcccaggcattagcattccctcacctctaccagattttgtagagccatctaagacaaaagtcactactcttccaaatggcgtcaagatcgcctcggagacatcatcgagcccagcagcatctgtgggtctgtacattgactgtggttccatttacgaaacacctgcttcatctggagtatcacatctgttggagagaatggccttcaagagcacagtgaatcggactcacttacggttagttcgtgaggtagaagccattggaggaaatgtctctgcatcagcttcccgtgaacaaatgagctatacctatgatgcattgaagagctatacaccagaaatggttgaagttctcattgacagtgtgaggaatccagcattcctcgattgggaggtcaaagagcagctccagaacataaaatctgaaatagctgatgcgtctgctaatcctcaaggtctacttctggaggcccttcattcggttggatattccggggcactggcaaaacctttgatggcttcagaatctgctgtaaaccggttggatgttagcagcttggaggaatttgttgctgaacattacactgctcccaggatggttcttgcagcatcaggagttgatcatgatgcgctgatttcagttgtagaaccacttctgtctgaccttccgtgcgtgaaacgtcctgaagagccaaaatctgtgtacgtgggaggagactatcgctgccaagcagattctccaaacacacacatcgcacttgcttttgaggtgccaggtggttggaatcaagagaaaactgcaatggttgtgacagtgcttcagatgctcatgggaggaggagggtccttctctgctggtgggcctggaaagggaatgcattctcgattgtatctccgtgtcttgaccaacttccaacagattgaatcattctctgctttcaatagcgtctataacaattcgggcctttttggaatttatgcagtcactagcccagacttttcatcgaaggctgtggatttggcagcaggggaactcctggagattgcgacacctggaaaagttacacaagaacaacttgatcgtgctaaagaggcaaccaaatctgcagttctgatgaacttggaatcaaggtctatagcatctgaagatattggaagacaggttcttacttatggggaaaggaagcccatcgagtatttcctgaaaacagttgaggagatcactttgaatgacattttgtcaaccgcaaaggagatgatgtctacaccactcacaatggcatcgtggggcgacgttattcatgttcctagctacgagtctgttagccgcaagtttcactcgaagtga

SEQ ID NO: 64461 - protein, 499 aa, Zea mays
MYRAAGSHLRSLKHHGASRLASTSVAKQSSGGLFSWLLGGKSSELPPLDVPLPGISIPSPLPDFVEPSKTKVTTLPNGVKIASETSSSPAASVGLYIDCGSIYETPASSGVSHLLERMAFKSTVNRTHLRLVREVEAIGGNVSASASREQMSYTYDALKSYTPEMVEVLIDSVRNPAFLDWEVKEQLQNIKSEIADASANPQGLLLEALHSVGYSGALAKPLMASESAVNRLDVSSLEEFVAEHYTAPRMVLAASGVDHDALISVVEPLLSDLPCVKRPEEPKSVYVGGDYRCQADSPNTHIALAFEVPGGWNQEKTAMVVTVLQMLMGGGGSFSAGGPGKGMHSRLYLRVLTNFQQIESFSAFNSVYNNSGLFGIYAVTSPDFSSKAVDLAAGELLEIATPGKVTQEQLDRAKEATKSAVLMNLESRSIASEDIGRQVLTYGERKPIEYFLKTVEEITLNDILSTAKEMMSTPLTMASWGDVIHVPSYESVSRKFHSK

SEQ ID NO: 64462 - DNA, 23 bp, Artificial sequence
  primer
atgctaaggaacggcgttcagag

SEQ ID NO: 64463 - DNA, 24 bp, Artificial sequence
  primer
tcaaaaccaacccttcttcttggg

SEQ ID NO: 64464 - protein, 523 aa, Artificial sequence
  consensus sequence
  Variant (4)..(4): Xaa in position 4 is any amino acid
  Variant (7)..(8): Xaa in position 7 to 8 is any amino acid
  Variant (9)..(9): Xaa in position 9 is any or no amino acid
  Variant (11)..(16): Xaa in position 11 to 16 is any amino acid
  Variant (17)..(23): Xaa in position 17 to 23 is any or no amino acid
  Variant (25)..(29): Xaa in position 25 to 29 is any amino acid
  Variant (32)..(33): Xaa in position 32 to 33 is any amino acid
  Variant (35)..(39): Xaa in position 35 to 39 is any amino acid
  Variant (40)..(42): Xaa in position 40 to 42 is any or no amino acid
  Variant (44)..(45): Xaa in position 44 to 45 is any amino acid
  Variant (47)..(52): Xaa in position 47 to 52 is any amino acid
  Variant (55)..(68): Xaa in position 55 to 68 is any amino acid
  Variant (69)..(69): Xaa in position 69 is any or no amino acid
  Variant (71)..(72): Xaa in position 71 to 72 is any amino acid
  Variant (75)..(80): Xaa in position 75 to 80 is any amino acid
  Variant (84)..(86): Xaa in position 84 to 86 is any amino acid
  Variant (88)..(102): Xaa in position 88 to 102 is any amino acid
  Variant (104)..(126): Xaa in position 104 to 126 is any amino acid
  Variant (128)..(143): Xaa in position 128 to 143 is any amino acid
  Variant (144)..(145): Xaa in position 144 to 145 is any or no amino acid
  Variant (147)..(153): Xaa in position 147 to 153 is any amino acid
  Variant (154)..(154): Xaa in position 154 is any or no amino acid
  Variant (156)..(185): Xaa in position 156 to 185 is any amino acid
  Variant (186)..(187): Xaa in position 186 to 187 is any or no amino acid
  Variant (189)..(189): Xaa in position 189 is any amino acid
  Variant (191)..(191): Xaa in position 191 is any amino acid
  Variant (193)..(194): Xaa in position 193 to 194 is any amino acid
  Variant (196)..(196): Xaa in position 196 is any amino acid
  Variant (198)..(198): Xaa in position 198 is any amino acid
  Variant (200)..(227): Xaa in position 200 to 227 is any amino acid
  Variant (228)..(310): Xaa in position 228 to 310 is any or no amino acid
  Variant (312)..(331): Xaa in position 312 to 331 is any amino acid
  Variant (332)..(341): Xaa in position 332 to 341 is any or no amino acid
  Variant (343)..(355): Xaa in position 343 to 355 is any amino acid
  Variant (356)..(356): Xaa in position 356 is any or no amino acid
  Variant (358)..(360): Xaa in position 358 to 360 is any amino acid
  Variant (362)..(367): Xaa in position 362 to 367 is any amino acid
  Variant (368)..(369): Xaa in position 368 to 369 is any or no amino acid
  Variant (371)..(371): Xaa in position 371 is any amino acid
  Variant (374)..(374): Xaa in position 374 is any amino acid
  Variant (376)..(376): Xaa in position 376 is any amino acid
  Variant (378)..(378): Xaa in position 378 is any amino acid
  Variant (380)..(390): Xaa in position 380 to 390 is any amino acid
  Variant (391)..(391): Xaa in position 391 is any or no amino acid
  Variant (393)..(395): Xaa in position 393 to 395 is any amino acid
  Variant (397)..(403): Xaa in position 397 to 403 is any amino acid
  Variant (405)..(405): Xaa in position 405 is any amino acid
  Variant (408)..(426): Xaa in position 408 to 426 is any amino acid
  Variant (427)..(428): Xaa in position 427 to 428 is any or no amino acid
  Variant (430)..(442): Xaa in position 430 to 442 is any amino acid
  Variant (443)..(449): Xaa in position 443 to 449 is any or no amino acid
  Variant (453)..(456): Xaa in position 453 to 456 is any amino acid
  Variant (458)..(459): Xaa in position 458 to 459 is any amino acid
  Variant (461)..(462): Xaa in position 461 to 462 is any amino acid
  Variant (464)..(470): Xaa in position 464 to 470 is any amino acid
  Variant (473)..(473): Xaa in position 473 is any amino acid
  Variant (477)..(480): Xaa in position 477 to 480 is any amino acid
  Variant (481)..(481): Xaa in position 481 is any or no amino acid
  Variant (483)..(517): Xaa in position 483 to 517 is any amino acid
  Variant (518)..(522): Xaa in position 518 to 522 is any or no amino acid
TTLXNGXXXAXXXXXXXXXXXXXGXXXXXGSXXEXXXXXXXXGXXHXXXXXXFKXXXXXXXXXXXXXXXEXXGGXXXXXXSREXXXYXXXXXXXXXXXXXXXLXXXXXXXXXXXXXXXXXXXXXXXEXXXXXXXXXXXXXXXXXXHXXXXXXXXLXXXXXXXXXXXXXXXXXXXXXXXXXXXXXXXXRXVXAXXGXVXHXXXXXXXXXXXXXXXXXXXXXXXXXXXXXXXXXXXXXXXXXXXXXXXXXXXXXXXXXXXXXXXXXXXXXXXXXXXXXXXXXXXXXXXXXXXXXXXXXXXXXXXXXXXXXXXGXXXXXXXXXXXXXXXXXXXXXXXXXXXXXXGXXXXXXXXXXXXXXQXXXGXXXXXXXXGXGKXMXSXLXXXXXXXXXXXXSXXXFXXXXXXXGXFGXXXXXXXXXXXXXXXXXXXXXEXXXXXXXXXXXXXXXXXXXXRAKXXXXSXXLXXLXXXXXXXEDXGRQXXXXXGXXXXXXXXXXXXXXXXXXXXXXXXXXXXXXXXXXXXXXXXG

SEQ ID NO: 64465 - protein, 32 aa, Artificial sequence
  protein pattern
  Variant (2)..(2): Xaa in position 2 is Ala or Ser
  Variant (3)..(3): Xaa in position 3 is Lys or Arg
  Variant (4)..(4): Xaa in position 4 is any amino acid
  Variant (5)..(5): Xaa in position 5 is Ala, Gln or Ser
  Variant (6)..(9): Xaa in position 6 to 9 is any amino acid
  Variant (10)..(10): Xaa in position 10 is Ile, Leu or Val
  Variant (11)..(13): Xaa in position 11 to 13 is any amino acid
  Variant (14)..(14): Xaa in position 14 is Ile, Leu, Met or Val
  Variant (15)..(15): Xaa in position 15 is Asp or Glu
  Variant (16)..(16): Xaa in position 16 is Ala, Gly or Ser
  Variant (17)..(21): Xaa in position 17 to 21 is any amino acid
  Variant (24)..(24): Xaa in position 24 is Ile, Leu, Met or Val
  Variant (28)..(28): Xaa in position 28 is Ile, Leu, Met or Val
  Variant (29)..(31): Xaa in position 29 to 31 is any amino acid
RXXXXXXXXXXXXXXXXXXXXEDXGRQXXXXG

SEQ ID NO: 64466 - protein, 23 aa, Artificial sequence
  protein pattern
  Variant (2)..(2): Xaa in position 2 is Gly or Ser
  Variant (3)..(6): Xaa in position 3 to 6 is any amino acid
  Variant (7)..(7): Xaa in position 7 is Ala, Gly or Val
  Variant (8)..(9): Xaa in position 8 to 9 is any amino acid
  Variant (12)..(13): Xaa in position 12 to 13 is any or no amino acid
  Variant (15)..(16): Xaa in position 15 to 16 is any or no amino acid
  Variant (18)..(18): Xaa in position 18 is any amino acid
  Variant (20)..(22): Xaa in position 20 to 22 is any amino acid
  Variant (23)..(23): Xaa in position 23 is Ala, Ile, Leu or Val
GXXXXXXXXGKXXGXXSXLXXXX

SEQ ID NO: 64467 - protein, 18 aa, Artificial sequence
  protein pattern
  Variant (2)..(3): Xaa in position 2 to 3 is any amino acid
  Variant (5)..(5): Xaa in position 5 is Ala or Gly
  Variant (6)..(8): Xaa in position 6 to 8 is any amino acid
  Variant (9)..(9): Xaa in position 9 is Ala, Cys or Val
  Variant (10)..(10): Xaa in position 10 is any amino acid
  Variant (11)..(11): Xaa in position 11 is Ala, Gly, Ser or Thr
  Variant (14)..(14): Xaa in position 14 is Asp or Glu
  Variant (15)..(17): Xaa in position 15 to 17 is any amino acid
EXXGXXXXXXXSRXXXXY

SEQ ID NO: 64468 - protein, 14 aa, Artificial sequence
  protein pattern
  Variant (2)..(2): Xaa in position 2 is any amino acid
  Variant (3)..(3): Xaa in position 3 is Ala, Ser or Thr
  Variant (4)..(4): Xaa in position 4 is His or Tyr
  Variant (5)..(5): Xaa in position 5 is Phe, Ile or Leu
  Variant (6)..(6): Xaa in position 6 is Phe, Leu, Met or Val
  Variant (7)..(7): Xaa in position 7 is Asp or Glu
  Variant (8)..(8): Xaa in position 8 is His, Lys or Arg
  Variant (9)..(9): Xaa in position 9 is Leu or Met
  Variant (10)..(10): Xaa in position 10 is any amino acid
  Variant (13)..(13): Xaa in position 13 is Asp, Gly, Gln, Ser or Thr
  Variant (14)..(14): Xaa in position 14 is Ala or Thr
GXXXXXXXXXFKXX

SEQ ID NO: 64469 - protein, 10 aa, Artificial sequence
  protein pattern
  Variant (2)..(2): Xaa in position 2 is any amino acid
  Variant (5)..(5): Xaa in position 5 is Phe, Ile, Leu or Val
  Variant (6)..(6): Xaa in position 6 is any amino acid
  Variant (7)..(7): Xaa in position 7 is Ile or Val
  Variant (9)..(9): Xaa in position 9 is Ser or Thr
  Variant (10)..(10): Xaa in position 10 is Asp, Glu, Gln or Ser
LXNGXXXAXX

SEQ ID NO: 64470 - DNA, 177 bp, Saccharomyces cerevisiae
  CDS (1)..(177)
atgcatttgatgtacactttgggcccagacggcaagagaatctatacattgaaaaaggtcaccgaaagtggtgaaatcacgaagtctgctcacccagctagattttctccagacgacaaatattcaagacaaagagtaactttgaagaagagatttggtttggtaccaggccaatag

SEQ ID NO: 64471 - protein, 58 aa, Saccharomyces cerevisiae
MHLMYTLGPDGKRIYTLKKVTESGEITKSAHPARFSPDDKYSRQRVTLKKRFGLVPGQ

SEQ ID NO: 64472 - DNA, 195 bp, Sorghum bicolor
  CDS (1)..(195)
atgtatctccagtactacatcaacgagaagggagacaaggtttacaccaccaagaaggagtcgcctcttggggtaccaacgcagtctgctcacccggctcgcttctcaccagatgacaagtactctcgccagaggtacctgttgaagaaaagatttgcacttctgccaacccagaagccagcaccgaagtactga

SEQ ID NO: 64473 - protein, 64 aa, Sorghum bicolor
MYLQYYINEKGDKVYTTKKESPLGVPTQSAHPARFSPDDKYSRQRYLLKKRFALLPTQKPAPKY

SEQ ID NO: 64474 - DNA, 195 bp, Sorghum bicolor
  CDS (1)..(195)
atgtatctccagtactacatcaacgagaagggggacaaggtctacaccaccaagaaggagtcgcctcttggggtgccgacacagtctgctcacccagctcgcttctcaccagatgacaagtactctcgccagcggtacctattgaagaagagatttgcacttttgccaactcagcagccagcaccaaagtactga

SEQ ID NO: 64475 - protein, 64 aa, Sorghum bicolor
MYLQYYINEKGDKVYTTKKESPLGVPTQSAHPARFSPDDKYSRQRYLLKKRFALLPTQQPAPKY

SEQ ID NO: 64476 - DNA, 195 bp, Zea mays
  CDS (1)..(195)
atgtatctccagttctacataaatgagaatggtgacaaagtttacaccactaagggggaatcaccacatgggctgcctactcagtctgctcatccagctcgtttctcccccgatgacaaatactcaagacaaagagttcttttgaagaagcgtttcggattattgcctacccagcagtcgccactaaaatactga

SEQ ID NO: 64477 - protein, 64 aa, Zea mays
MYLQFYINENGDKVYTTKGESPHGLPTQSAHPARFSPDDKYSRQRVLLKKRFGLLPTQQSPLKY

SEQ ID NO: 64478 - DNA, 268 bp, Zea mays
  CDS (69)..(263)
cttttctcgcctgcatcgcaggatgctacctatatcgctgtgctctgcttcgattaggatcagtcaccatgtatcttcaggcttacatagacgatgacggtgacaaagtttacaccactaagatagattcgccgctagcgctacctacacaatctgctcatccagcccgggtttcacctgatgataaatattcaaggcagagagttcttctgaagaagcgttttggattgttaccgacccagcagccacctccaaagtattgagtgat

SEQ ID NO: 64479 - protein, 64 aa, Zea mays
MYLQAYIDDDGDKVYTTKIDSPLALPTQSAHPARVSPDDKYSRQRVLLKKRFGLLPTQQPPPKY

SEQ ID NO: 64480 - DNA, 384 bp, Zea mays subsp. mays
  CDS (57)..(251)
aaaaaaaccctaatcgacatctggaggagagattcgttgaaagcaaaggaccgaccatgtatcttcagtgctatatcaacgaaaagggcgacaaggtttacaccactaagaaggaatcaccgctcgggttagccactgaatctgcccatccagcccgattctcccctgacgataaatattcaaaggagagagttacattgaagaagcgttttggtctcttaccgatccagggcgcacctgtcaagtactgaaaggcccaaaacactcggcttcctttgccttttgatcttctattcttgtctcttaattttagcttgacttttgtactgtctccaaatagtggattacttatgagattatgattcgtaatattttcatttatcc

SEQ ID NO: 64481 - protein, 64 aa, Zea mays subsp. mays
MYLQCYINEKGDKVYTTKKESPLGLATESAHPARFSPDDKYSKERVTLKKRFGLLPIQGAPVKY

SEQ ID NO: 64482 - DNA, 195 bp, Glycine max
  CDS (1)..(195)
atgtatcttcagttttacataaacgataacggcgacaaagtctacaccactaagaaagagtcgccggtagggctacctacacaatctgctcatccagcccggttttcacccgatgataaatattcaagacagagagttcttctgaagaagcgttttggattattaccaacccagcagccacctccaaagtattga

SEQ ID NO: 64483 - protein, 64 aa, Glycine max
MYLQFYINDNGDKVYTTKKESPVGLPTQSAHPARFSPDDKYSRQRVLLKKRFGLLPTQQPPPKY

SEQ ID NO: 64484 - DNA, 195 bp, Triticum aestivum
  CDS (1)..(195)
atgtatctccagtactacatcaacgagaagggcgtcaaggtgtacaccaccaagaaggaatcccctctcggtgtgccgacgcagtctgcccacccagctcgtttctccccggatgacaagtacgcccgtcagcgttacctgttgaagaagaggtttggattgctgccaacccaacagccagcacaaaagtactga

SEQ ID NO: 64485 - protein, 64 aa, Triticum aestivum
MYLQYYINEKGVKVYTTKKESPLGVPTQSAHPARFSPDDKYARQRYLLKKRFGLLPTQQPAQKY

SEQ ID NO: 64486 - DNA, 195 bp, Zea mays
  CDS (1)..(195)
atgtatctccagtactacatcaacgagaagggggacaaggtctacaccaccaagaaggagtcacctcttggggtgccaacgcagtctgctcacccagctcggttctcaccagatgacaagtactctcgccagcgatacctgttgaagaagagatttggacttctgccaacgcagaatccaggaccgaagtactga

SEQ ID NO: 64487 - protein, 64 aa, Zea mays
MYLQYYINEKGDKVYTTKKESPLGVPTQSAHPARFSPDDKYSRQRYLLKKRFGLLPTQNPGPKY

SEQ ID NO: 64488 - DNA, 195 bp, Zea mays
  CDS (1)..(195)
atgtatctccagtattacatcaacgagaagggtgacaaggtctacaccaccaagaaggagtcgcctcttggggtgccgacgcagtctgctcacccagctcgcttctcactagatgacaagtactctcgccagcggtacctgttgaagaagagatttggacttctgccaacgcagaagccagcactgaagtactga

SEQ ID NO: 64489 - protein, 64 aa, Zea mays
MYLQYYINEKGDKVYTTKKESPLGVPTQSAHPARFSLDDKYSRQRYLLKKRFGLLPTQKPALKY

SEQ ID NO: 64490 - DNA, 195 bp, Linum usitatissimum
  CDS (1)..(195)
atgttgctgcagtactacatcaatgataacggcgacaaagtctacaccaccaagaaggaatcgccggttgggttagctacgcagtctgctcatcctgctcgcttctctcccgatgacaaatacgcaaggcaaaggtatctattgaagaagcgattcgggttgctgcctactcaacaacctcctcagaagtactga

SEQ ID NO: 64491 - protein, 64 aa, Linum usitatissimum
MLLQYYINDNGDKVYTTKKESPVGLATQSAHPARFSPDDKYARQRYLLKKRFGLLPTQQPPQKY

SEQ ID NO: 64492 - DNA, 210 bp, Eremothecium gossypii
  CDS (1)..(210)
atgcgcaggccatctcctccgccaccaccacgcgccatgcatttgatgtacacactgggcccggacggcaagagagtctacaccctcgagaaggtcacgccttccggcgagatcaccaagtccgcgcaccctgcgcgcttctcgcccgacgacaagtactcccgccagcgtgtcactctcaagcgccgcttcgacatgttgccccgctaa

SEQ ID NO: 64493 - protein, 69 aa, Eremothecium gossypii
MRRPSPPPPPRAMHLMYTLGPDGKRVYTLEKVTPSGEITKSAHPARFSPDDKYSRQRVTLKRRFDMLPR

SEQ ID NO: 64494 - DNA, 195 bp, Cryptococcus neoformans var. neoformans JEC21
  CDS (1)..(195)
atgcaccttatgtatactttggatgagaggggaaaccgagtttacactctcaaaaaagtgactgctgctggcaagcccacgaagtccgcccatcctgctcgattttctcccgatgacaagttttccagacaccgagtcaccatcaagaagcgatttgggatcctccccacccagcttccttgcaagcccttataa

SEQ ID NO: 64495 - protein, 64 aa, Cryptococcus neoformans var. neoformans JEC21
MHLMYTLDERGNRVYTLKKVTAAGKPTKSAHPARFSPDDKFSRHRVTIKKRFGILPTQLPCKPL

SEQ ID NO: 64496 - DNA, 195 bp, Arabidopsis thaliana
  CDS (1)..(195)
atgtatcttcagtgctatatcaacgagaagggtgagaaggtttacacaactaagaaggaatcaccgctagggctagccactgaatctgcccatccagcccggttcccccctgacgataaatactcaaagcagagagtattgttgaagaagcgatttggtctcttaccgacccaaaacgcacctctccagtactga

SEQ ID NO: 64497 - protein, 64 aa, Arabidopsis thaliana
MYLQCYINEKGEKVYTTKKESPLGLATESAHPARFPPDDKYSKQRVLLKKRFGLLPTQNAPLQY

SEQ ID NO: 64498 - DNA, 195 bp, Zea mays subsp. mays
  CDS (1)..(195)
atgtatctccagtattacatcaacgagaagggtgacaaggtctacaccaccaagaaggagtcgcctcttggggtgccgacgcagtctgctcacccagctcgcttctcaccagatgacaagtactctcgccagcggtacctgttgaagaagagatttggacttctgccaacgcagaagccagcactgaagtactga

SEQ ID NO: 64499 - protein, 64 aa, Zea mays subsp. mays
MYLQYYINEKGDKVYTTKKESPLGVPTQSAHPARFSPDDKYSRQRYLLKKRFGLLPTQKPALKY

SEQ ID NO: 64500 - DNA, 201 bp, Aspergillus fumigatus
  CDS (1)..(201)
atgcatcttatgtatgttctcgacaaggatggcaagagggtgtacaccctcaagaaggtcctgaacggcgaagtcaccaagtctgcccatcctgcccggttttcgccagatgacaagtactccagacatcgtgtcaccctcaagcggagatatggccttctgctgacccagcagcctgcgaagacgaacgcggcgctgtga

SEQ ID NO: 64501 - protein, 66 aa, Aspergillus fumigatus
MHLMYVLDKDGKRVYTLKKVLNGEVTKSAHPARFSPDDKYSRHRVTLKRRYGLLLTQQPAKTNAAL

SEQ ID NO: 64502 - DNA, 180 bp, Candida albicans
  CDS (1)..(180): transl_table=12
atgcatttgatgtacaccttagatgccgaaggcaaaagaatctacactttgaaaaagatatcagaagatggagaaatcaccaaatctgctcacccagctagattctctccagatgacaaatactccagacaaagagtgaccttgaaaaagaggttcggattgttaccaacccaaaactaa

SEQ ID NO: 64503 - protein, 59 aa, Candida albicans
MHLMYTLDAEGKRIYTLKKISEDGEITKSAHPARFSPDDKYSRQRVTLKKRFGLLPTQN

SEQ ID NO: 64504 - DNA, 192 bp, Arabidopsis thaliana
  CDS (1)..(192)
atgtatcttcagtgctatatcaacgagaagggtgagaaggtttacacaactaaggaatcaccgctagggctagccactgaatctgcccatccagcccggttctcccctgacgataaatactcaaagcagagagtattgttgaagaagcgatttggtctcttaccgacccaaaacgcacctctccagtactga

SEQ ID NO: 64505 - protein, 63 aa, Arabidopsis thaliana
MYLQCYINEKGEKVYTTKESPLGLATESAHPARFSPDDKYSKQRVLLKKRFGLLPTQNAPLQY

SEQ ID NO: 64506 - DNA, 195 bp, Apis mellifera
  CDS (1)..(195)
atgtatttaatgtattatttaaatgaagatggaaatcgagtatacacattaaagaaaattgatccaaatggaaaaccgacattatcagcccatccagctcgattttctccagaagataaatattcaagagaaagaataacattaaaaagaagatttggtttgttactcacacaacaaccagcacctacttattaa

SEQ ID NO: 64507 - protein, 64 aa, Apis mellifera
MYLMYYLNEDGNRVYTLKKIDPNGKPTLSAHPARFSPEDKYSRERITLKRRFGLLLTQQPAPTY

SEQ ID NO: 64508 - DNA, 195 bp, Nasonia vitripennis
  CDS (1)..(195)
atgtatctgatgtactatctggacaccaacggtgatcgtatttacacgttgaagaaaatggatccgtatggaaaaccaacactgtcagcacatcctgctcgattctcacctgaagataaatactccagggagcgtattactttgaagagaagatttggcttactgctcacacaaaaaccattaccatcctattaa

SEQ ID NO: 64509 - protein, 64 aa, Nasonia vitripennis
MYLMYYLDTNGDRIYTLKKMDPYGKPTLSAHPARFSPEDKYSRERITLKRRFGLLLTQKPLPSY

SEQ ID NO: 64510 - DNA, 204 bp, Magnaporthe grisea 70-15
  CDS (1)..(204)
atgcatctcatgtgcaacgtcgacgcctcgggcaagcgtgcctacaccctcaagaaggtgctcgagggcaaggtcaccaagtctgcgcacccggcgcgcttctcgcccgacgacaagtggtcgcgccaccgcataaccctcaagaagaggtttgggctgctgcagacggagaagaaggacctcaaggcgctccagtcatcatga

SEQ ID NO: 64511 - protein, 67 aa, Magnaporthe grisea 70-15
MHLMCNVDASGKRAYTLKKVLEGKVTKSAHPARFSPDDKWSRHRITLKKRFGLLQTEKKDLKALQSS

SEQ ID NO: 64512 - DNA, 204 bp, Gibberella zeae PH-1
  CDS (1)..(204)
atgcatctgatgtacaccctcgacgcccaaggcaaccgcctttacaccttgaagaaggtcgctcagggccaggtcaccaagtctgctcaccctgcccgtttctctcccgacgacaagtggtcgcgccagcgcgttactctcaagcgcagattcgagcttctcttgactcagcagaaaactaatgcttttccagaggaggaataa

SEQ ID NO: 64513 - protein, 67 aa, Gibberella zeae PH-1
MHLMYTLDAQGNRLYTLKKVAQGQVTKSAHPARFSPDDKWSRQRVTLKRRFELLLTQQKTNAFPEEE

SEQ ID NO: 64514 - DNA, 189 bp, Yarrowia lipolytica CLIB122
  CDS (1)..(189)
atgcatcttatgtacactactggaagcgacggcaagcgggtctatactctcaagaagaccaccgagtctggcgagattaccaagagcgcccaccccgcccgattctctcccgacgacaagtactctcgacagcgagtcactctcaagaagcgattcaacctgttgcctactcagcagggtgagtattaa

SEQ ID NO: 64515 - protein, 62 aa, Yarrowia lipolytica CLIB122
MHLMYTTGSDGKRVYTLKKTTESGEITKSAHPARFSPDDKYSRQRVTLKKRFNLLPTQQGEY

SEQ ID NO: 64516 - DNA, 204 bp, Aspergillus nidulans FGSC A4
  CDS (1)..(204)
atgcatcttatgtatactttggaccaggatggaaagcgggtttataccctgaagaaggtcactcccaccggggaggtcacaaagagcgctcaccccgctcgcttttctccggacgacaagtattctcgtcaccgtgttacgctgaagaagagatatggccttctgcttacccagcaggctggtatgttgattagtcccttttaa

SEQ ID NO: 64517 - protein, 67 aa, Aspergillus nidulans FGSC A4
MHLMYTLDQDGKRVYTLKKVTPTGEVTKSAHPARFSPDDKYSRHRVTLKKRYGLLLTQQAGMLISPF

SEQ ID NO: 64518 - DNA, 195 bp, Ustilago maydis 521
  CDS (1)..(195)
atgcatctcatgttcacagaagataaggatggcaagcgaatctacacgctcaagaaaaagactgtcgaaggcgtgatcaccaagtcggcccatcctgctcgcttctcgcctgacgacaaattttcacgacaccgcgttacgatcaagaagcgctttggtatcctgcctacgcagctgcccgctaagccactgtaa

SEQ ID NO: 64519 - protein, 64 aa, Ustilago maydis 521
MHLMFTEDKDGKRIYTLKKKTVEGVITKSAHPARFSPDDKFSRHRVTIKKRFGILPTQLPAKPL

SEQ ID NO: 64520 - DNA, 195 bp, Tribolium castaneum
  CDS (1)..(195)
atgtacttaatgtattatttggataaagacggtaaccgggtttacaccttaaataaatttgacccttcaggaaaacccacactttcggcacatccagcacgtttttcacccgaggacaaatactcacgtgagcgaatcacaatcaaaaaacgtttcgggttattaatgacgcaacagccggaaccaatttattga

SEQ ID NO: 64521 - protein, 64 aa, Tribolium castaneum
MYLMYYLDKDGNRVYTLNKFDPSGKPTLSAHPARFSPEDKYSRERITIKKRFGLLMTQQPEPIY

SEQ ID NO: 64522 - DNA, 376 bp, Chlamydomonas incerta
  CDS (49)..(243)
cgacaaagcaccggcgcatcgccttgtagactttgccacccagcaaccatgtacctgatgtactacgatgacgatgcgggcaaccgcgtgtacactctcaagaaggtcgctcctgatggaacgcctaccaaatcggcgcacccagcccgcttctcgcctgatgacaagttctctcgggaacgcatcacctgcaagaagcggttcggcctgctgcccattcagcagccccccgtggagctctgagcggcatggtggagatgcggcgtgtagcatagcattgtactaggtggtggggttgtagataggcgcgtctgtgatgcgtgtgtttcgtgtgcgcgctgtgccgcactgggcaagtgtgccgcgcgtgtcagtg

SEQ ID NO: 64523 - protein, 64 aa, Chlamydomonas incerta
MYLMYYDDDAGNRVYTLKKVAPDGTPTKSAHPARFSPDDKFSRERITCKKRFGLLPIQQPPVEL

SEQ ID NO: 64524 - DNA, 195 bp, Arabidopsis thaliana
  CDS (1)..(195)
atgtatcttcagtgctatatcaacgagaagggtgagaaggtttacacaactaagaaggaatcaccgctagggctagccactgaatctgcccatccagcccggttctcccctgacgataaatactcaaagcagagagtattgttgaagaagcgatttggtctcttaccgacccaaaacgcacctctccagtactga

SEQ ID NO: 64525 - protein, 64 aa, Arabidopsis thaliana
MYLQCYINEKGEKVYTTKKESPLGLATESAHPARFSPDDKYSKQRVLLKKRFGLLPTQNAPLQY

SEQ ID NO: 64526 - DNA, 195 bp, Drosophila melanogaster
  CDS (1)..(195)
atgtatctgatgtacacaattaacgaaaacggcgatcgcgtttacaccctgaagaaacgcaccgaggatggtcgtcccacactatctgctcatccagcacgtttttcaccggaggataagtactcccgccagaggctgaccatcaagaagcgctttggactgctgctcacccagaagccggagcccatttactaa

SEQ ID NO: 64527 - protein, 64 aa, Drosophila melanogaster
MYLMYTINENGDRVYTLKKRTEDGRPTLSAHPARFSPEDKYSRQRLTIKKRFGLLLTQKPEPIY

SEQ ID NO: 64528 - DNA, 210 bp, Ashbya gossypii; identical to SEQ ID NO: 64492
  CDS (37)..(210)

SEQ ID NO: 64529 - protein, 57 aa, Ashbya gossypii
MHLMYTLGPDGKRVYTLEKVTPSGEITKSAHPARFSPDDKYSRQRVTLKRRFDMLPR

SEQ ID NO: 64530 - DNA, 174 bp, Candida glabrata
  CDS (1)..(174)
atgcatttgatgtacactttggacaacgagggtaagagagtttacaccctgaagaagatgaccgaggaaggtgagattaccaagtctgctcatccagctagattttccccagatgacaagtactctagacaaagagttactctgaagaagagatataacttgcttccacaataa

SEQ ID NO: 64531 - protein, 57 aa, Candida glabrata
MHLMYTLDNEGKRVYTLKKMTEEGEITKSAHPARFSPDDKYSRQRVTLKKRYNLLPQ

SEQ ID NO: 64532 - DNA, 177 bp, Debaryomyces hansenii
  CDS (1)..(177)
atgcatttaatgtacacattagggccagacggcaagagagtctacactttaaacaaaaccacttcagatggtgaaattaccaagtctgctcatccagccagattttcaccagatgacaaatattccagacaaagagttaccttgaagaagagatttggtttattaccaacccaatag

SEQ ID NO: 64533 - protein, 58 aa, Debaryomyces hansenii
MHLMYTLGPDGKRVYTLNKTTSDGEITKSAHPARFSPDDKYSRQRVTLKKRFGLLPTQ

SEQ ID NO: 64534 - DNA, 174 bp, Kluyveromyces lactis
  CDS (1)..(174)
atgcatttgatgtacactttggatgcccaaggcaagagaatctatactttgaagaagatgactgaggataatgaaattacaaagtctgctcaccctgctagattctctccagatgacaaatactccagacaaagagttactttgaagaagagatacaaccttttgccaaactaa

SEQ ID NO: 64535 - protein, 57 aa, Kluyveromyces lactis
MHLMYTLDAQGKRIYTLKKMTEDNEITKSAHPARFSPDDKYSRQRVTLKKRYNLLPN

SEQ ID NO: 64536 - DNA, 195 bp, Schizosaccharomyces pombe
  CDS (1)..(195)
atgcatttgatgtattatttaaatgatgagggaaagcgtgtttatactttaaaaaaggtatctccagatggaagagtcacaaaatcttcgcatcctgctcgtttctctcctgacgataaatattctcgacaacgttatactctgaaaaaacggtttcatgtactacttactcaattgcctgcaaaaccttactga

SEQ ID NO: 64537 - protein, 64 aa, Schizosaccharomyces pombe
MHLMYYLNDEGKRVYTLKKVSPDGRVTKSSHPARFSPDDKYSRQRYTLKKRFHVLLTQLPAKPY

SEQ ID NO: 64538 - DNA, 195 bp, Brassica napus
  CDS (1)..(195)
atgtatcttcagtgctatatcaacgagaagggcgagaaggtttacacaactaagaaggaatcaccgcttggtacagccactgaatctgcccatccagcccgattctctcctgatgataaatattcaaaggagagagttttgttgaagaaacggtttggtcttttacccacccagggcgcacctgtcaagtactga

SEQ ID NO: 64539 - protein, 64 aa, Brassica napus
MYLQCYINEKGEKVYTTKKESPLGTATESAHPARFSPDDKYSKERVLLKKRFGLLPTQGAPVKY

SEQ ID NO: 64540 - DNA, 195 bp, Glycine max
  CDS (1)..(195)
atgtatcttcagttttacataaacgataacggtgacaaagtttacaccactaagaaagattcgccgctagggctacctacacaatctgctcatccagcccggttttcacctgatgataaatattcaaggcagagagttcttctgaagaagcgttttggattgttaccgacccagcagccacctccaaagtattga

SEQ ID NO: 64541 - protein, 64 aa, Glycine max
MYLQFYINDNGDKVYTTKKDSPLGLPTQSAHPARFSPDDKYSRQRVLLKKRFGLLPTQQPPPKY

SEQ ID NO: 64542 - DNA, 25 bp, Artificial sequence
  primer
atgcatttgatgtacactttgggcc

SEQ ID NO: 64543 - DNA, 25 bp, Artificial sequence
  primer
ctattggcctggtaccaaaccaaat

SEQ ID NO: 64544 - protein, 58 aa, Artificial sequence
  consensus sequence
  Variant (2)..(2): Xaa in position 2 is any amino acid
  Variant (4)..(10): Xaa in position 4 to 10 is any amino acid
  Variant (12)..(13): Xaa in position 12 to 13 is any amino acid
  Variant (17)..(17): Xaa in position 17 is any amino acid
  Variant (20)..(22): Xaa in position 20 to 22 is any amino acid
  Variant (23)..(23): Xaa in position 23 is any or no amino acid
  Variant (25)..(26): Xaa in position 25 to 26 is any amino acid
  Variant (28)..(28): Xaa in position 28 is any amino acid
  Variant (44)..(44): Xaa in position 44 is any amino acid
  Variant (46)..(47): Xaa in position 46 to 47 is any amino acid
  Variant (53)..(53): Xaa in position 53 is any amino acid
  Variant (56)..(56): Xaa in position 56 is any amino acid
MXLXXXXXXXGXXVYTXKKXXXXGXXTXSAHPARFSPDDKYSRXRXXLKKRFXLLXTQ

SEQ ID NO: 64545 - protein, 32 aa, Artificial sequence
  protein pattern
  Variant (2)..(2): Xaa in position 2 is any amino acid
  Variant (3)..(3): Xaa in position 3 is Ala, Ile, Pro or Val
  Variant (5)..(5): Xaa in position 5 is any amino acid
  Variant (15)..(15): Xaa in position 15 is any or no amino acid
  Variant (17)..(17): Xaa in position 17 is any or no amino acid
  Variant (19)..(19): Xaa in position 19 is Phe, Trp or Tyr
  Variant (21)..(21): Xaa in position 21 is Lys or Arg
  Variant (22)..(22): Xaa in position 22 is any amino acid
  Variant (24)..(26): Xaa in position 24 to 26 is any amino acid
  Variant (28)..(28): Xaa in position 28 is Lys or Arg
  Variant (30)..(30): Xaa in position 30 is Phe or Tyr
  Variant (31)..(31): Xaa in position 31 is Ala, Asp, Glu, Gly or Asn
  Variant (32)..(32): Xaa in position 32 is Ile, Leu or Met
GXXTXSAHPARFSPXDXKXSXXRXXXKXRXXX

SEQ ID NO: 64546 - DNA, 1581 bp, Saccharomyces cerevisiae
  CDS (1)..(1581)
atgacattgactatcaaaataggaaccttaaacgatagcgatcaatctgcagtgcataatggtacagaaaatggctctgattttcgaaagataactcccacagaggaagagatctgtgatgacgtagttttgttatggaaggaagagcccggaactgaagacgctacgattcagcatctttatgacaggattacggaaagaaatcaatcgtggaaattgagtgcttctcgttttcgaaaaattctaaatgagcaccatctttatgacacagatctagagaccgtttctctatataaagataaaatacattttccaaaagccctagattctgatgctaaggtcgaagtgaaatttattgatgacgaacatggaaggggccttttcgctaaaagagatttttccaagggccaaatcatcctgaaagaaaataaacctatcgtatatattccaccactggacaagctttttttaatatctaatggaaaggcatgtgctcgatgtggtaaggcgctatatgatttgacccagcacaaaattatggtccattatttggattgtgaagtttgcaaagctatttggtgcagtgaaaaatgtaaaaaagcacatgcgtcgttacatgagcttttataccactcatggagatcgaatagaatagacattcttcatgctggtaattggaaaagatttgttaactactgtgagaaatattgttttaccgctgccttttcagttggtcttatatatggatccatgcttttggatactacaggagaggtcaaagagcaatggcaaaaattggcaagcatctcacaaagggaaagaattaaattaagagacgccagcggtatcggcagtacgtttagtttactgaatggtacaactgtacatactgaagaggaatctgataatggtaccaaaaagggcgttgagaagaatattgatgacgagactgtttgggagaagtgctacgaattattttgcggtgcatttccaaaagcttctgaagaaatagatttcgagaaatttttgaccatgatcgggacgttcaatatcaatcaatataacggccaggtatatcattggatctccttcataaaccatgattgtgaaccaaacgcctatattgagcaagtagaagaacatgaggaactgaggttgcatgcaaggaaaccaataaagaagggggaacaaatacgtattacgtacgtcaatcccttacatggggtgaggttgaggcgtagggaattaagagttaactggggcttcttatgccagtgtgaccgctgtcaaaatgaactatctacatttgaaagagttccaaatctagagaaaaagaatgcggatgctaatttaggagtagaaaaaatagattccaatgatagtagtgaagatggctctaagaaatcaactggtaatcgtaaatcttccatgagagaggcccagccagatttaaaagaaatactgaagaatggaaaagaatttgaattagacataccagaaactgttgatacacaagggaatgtaagaaaaacctcagtcagattcgattcaaacgtttcggtcgcagtggatgaaagataa

SEQ ID NO: 64547 - protein, 526 aa, Saccharomyces cerevisiae
MTLTIKIGTLNDSDQSAVHNGTENGSDFRKITPTEEEICDDVVLLWKEEPGTEDATIQHLYDRITERNQSWKLSASRFRKILNEHHLYDTDLETVSLYKDKIHFPKALDSDAKVEVKFIDDEHGRGLFAKRDFSKGQIILKENKPIVYIPPLDKLFLISNGKACARCGKALYDLTQHKIMVHYLDCEVCKAIWCSEKCKKAHASLHELLYHSWRSNRIDILHAGNWKRFVNYCEKYCFTAAFSVGLIYGSMLLDTTGEVKEQWQKLASISQRERIKLRDASGIGSTFSLLNGTTVHTEEESDNGTKKGVEKNIDDETVWEKCYELFCGAFPKASEEIDFEKFLTMIGTFNINQYNGQVYHWISFINHDCEPNAYIEQVEEHEELRLHARKPIKKGEQIRITYVNPLHGVRLRRRELRVNWGFLCQCDRCQNELSTFERVPNLEKKNADANLGVEKIDSNDSSEDGSKKSTGNRKSSMREAQPDLKEILKNGKEFELDIPETVDTQGNVRKTSVRFDSNVSVAVDER

SEQ ID NO: 64548 - DNA, 1548 bp, Candida glabrata CBS 138
  CDS (1)..(1548)
atgagtgtgagtcagttgaaaattcaaacacttacacttaacgattcagagccttctctaccagggaagccaataacgccaagtaaggaacagatcagagatgacgttgtgttgctatggaaagaagaaccagctgccgaggatcttgatcttcctcacttgtatgataagatgaaaatcagaaatacggactggcaattcgacatcaatactctggaggatgtccttgtatcgaataatttgtactcggtagatgactcgcagatggactcatacaatgacaagattgaatttcctgacatatctgaagtgatgcatctggtcaatgacaaacttccaagtaaagttgaaataagggaatgtgaagagctcagaaagggaagaggtttgtacgcaactagagatattcagcaaggtgaacttttgtttcatgaaaaggtccccattgctatggtacctccaatggacaaattgaaacttattcgtagtggaaagtcatgttcaatgtgtggtgtttctttgagtaacagctcgcattttaccatgctacatgggttggactgtaatggatgtaattcgatatggtgtagcacaaattgcaaacagaaggatatcacacatccatatctaaagcattttggatcaaaaaataaaaacataagaccaatggattggaatatgtttgaaaggcattgccaggaaaatatttttgttgcggcatactctattggtgtgattcacgccgcatctcttatagataaagcacaatctgatgagattaaccaacaatttgaagcgttggcaaaaatctcacagcgtgtaagatatgaatcaagtgattcaaataatattggtgggacatttgatgcagaaatagggtccctaaaggaagagaatcctgaaccgctttggaaaaaagcatttgacttatttattagaacatttccagatacagcagaaatgggatatgaagtttttttagagtatcttggaagatttcatatcaatcaactttcgggtcagttatattttctttattcattcctaaatcataactgtgaacctaatgtgcgatatgatataaacaataagcttgaactaaaagtgtacgcaaggaaatttataaaaaaagacgaggaattggttacaacttatgttaatcctcttcatggcgtcagtttgcgaagaagagaactgagagttaattggggttttatatgtaattgtgatcgctgtgcaaaagaaatcgaattgagaaaaaaaaatgcagtctcgataagagaaactgttttgaattctaattccagctctgaagttagtttacgatctgggctgaacgttacatccccaattgcccttcagagaagtaatggaggaagtagtagtgatttgcgcagaaagtcgtctattagaaatcgaaaaccagatttgaaggaaatgcttaagaatagtaaagaatttgaacttgaagcccctgcagcactgggtagaaatagatctacatctgttagatttgatgacattgtatccatggcagttgaagaataa

SEQ ID NO: 64549 - protein, 515 aa, Candida glabrata CBS 138
MSVSQLKIQTLTLNDSEPSLPGKPITPSKEQIRDDVVLLWKEEPAAEDLDLPHLYDKMKIRNTDWQFDINTLEDVLVSNNLYSVDDSQMDSYNDKIEFPDISEVMHLVNDKLPSKVEIRECEELRKGRGLYATRDIQQGELLFHEKVPIAMVPPMDKLKLIRSGKSCSMCGVSLSNSSHFTMLHGLDCNGCNSIWCSTNCKQKDITHPYLKHFGSKNKNIRPMDWNMFERHCQENIFVAAYSIGVIHAASLIDKAQSDEINQQFEALAKISQRVRYESSDSNNIGGTFDAEIGSLKEENPEPLWKKAFDLFIRTFPDTAEMGYEVFLEYLGRFHINQLSGQLYFLYSFLNHNCEPNVRYDINNKLELKVYARKFIKKDEELVTTYVNPLHGVSLRRRELRVNWGFICNCDRCAKEIELRKKNAVSIRETVLNSNSSSEVSLRSGLNVTSPIALQRSNGGSSSDLRRKSSIRNRKPDLKEMLKNSKEFELEAPAALGRNRSTSVRFDDIVSMAVEE

SEQ ID NO: 64550 - DNA, 1479 bp, Kluyveromyces lactis NRRL Y-1140
  CDS (1)..(1479)
atggttcatttgaagctagagacacttcggttgaacgatgaagatcagagcaccgggtccagcttgatcactcctagccgaacccagctctgcgatgaagtggtccgttggtggaaggaagaaccggctgccgaagatatgctgatagatacgttgtacgaacatttgatccgacgacgctccaattggtcagtaaccaaagatgaattataccaagcattgaaatcgcataaattgtacactccagagttgaacgaattggacagttatactggcgacatcagacccagtaccgttacggatgctgatattgcccagttgaataaaaaattgttggataaagttaccattgctgatactgagtttgggaaaggattagtagccaccgatgatattaggaaaggtggattggtcttccatgaacagttaccattgactgtgattccgcaattggacaagcagcctttggtaagtagaggtaaatgttgtggtttgtgctctgctttcaccacattgtcatcacaattgatcatcaagaacaatttggattgtaacatgtgtaacaccatctggtgctcgaagcagtgcaagaaactagacactacccattccgtattgaaacatgccacttctagaaactcattatgcaatagctccaattggatcaagttcgagaatttctgtttacaagaaagtcttgttgccgcatatgccgttggtgtcatctatgcaaggcatgtgatgcagccaacatccaatttgtggaaactcttcacatccttgtgttctgttagtcagagagtacgctggcaagcttctgattccatcaatgttggtggtacttttgatgcgtcatgtaacggtaagctgtatgcggatgtctcagcaccgaatatggagacacaatggtccgatgcgtttgaaatgttcgccaaatctttccccaaatgtgatatggactatgaagatttcttaaacctcacaggcaccttcaatttgaaccaaattatgggtcaagtttaccctttagtggctcatattaatcatagctgtgaacctaatgtaaggtacgaattggaaccaaaacatgggattaaattatacgctagaaaggatatcaagaagggggaacagttgcgtttaacttacgtgaatccattgcatggtgtcaccttgagaagaagagaactaagggttaattatggattcctctgtcattgtcctcgttgttgtcaagaatgggagaaacgccaaaagatagtcagtgacccgtctaaccacgctatatcatcagaggctgcacattcatctaccacagcaaggaggaaatcctcaatgaaaagttgcagaccaagtctcaaggaacttttagaaaacggtgatgagttcgatctagaaatcccatccgatgtcaattccaagagaagaatgtctgtgcgattcaatagccatgtcacactggccgtcgaagaagaataa

SEQ ID NO: 64551 - protein, 492 aa, Kluyveromyces lactis NRRL Y-1140
MVHLKLETLRLNDEDQSTGSSLITPSRTQLCDEVVRWWKEEPAAEDMLIDTLYEHLIRRRSNWSVTKDELYQALKSHKLYTPELNELDSYTGDIRPSTVTDADIAQLNKKLLDKVTIADTEFGKGLVATDDIRKGGLVFHEQLPLTVIPQLDKQPLVSRGKCCGLCSAFTTLSSQLIIKNNLDCNMCNTIWCSKQCKKLDTTHSVLKHATSRNSLCNSSNWIKFENFCLQESLVAAYAVGVIYARHVMQPTSNLWKLFTSLCSVSQRVRWQASDSINVGGTFDASCNGKLYADVSAPNMETQWSDAFEMFAKSFPKCDMDYEDFLNLTGTFNLNQIMGQVYPLVAHINHSCEPNVRYELEPKHGIKLYARKDIKKGEQLRLTYVNPLHGVTLRRRELRVNYGFLCHCPRCCQEWEKRQKIVSDPSNHAISSEAAHSSTTARRKSSMKSCRPSLKELLENGDEFDLEIPSDVNSKRRMSVRFNSHVTLAVEEE

SEQ ID NO: 64552 - DNA, 1479 bp, Debaryomyces hansenii CBS767
  CDS (1)..(1479)
atggaaactgaatctaaagctgatactgcttctttggcaaataaatttgaagttgtagatatcaatgactacgaagctgaatcgtcagaacctattgttcctcatgagaggcaaattgtcgacgatgttatagcaatttggaaacaagatccttctacagaaaccttgggtataggtaaattacatgcgatggtaaaagggcgtcatccgaattggtctgtgtctgaaaaacgagtcaaaacgttgttgaaaaattttggtttgttgactaataatgccaatcaacaatttacgtacgctaacgagattaaatcactaaacacacctgatattgacctcccagagaaagtacacattgtaatgacggccaagagaggtaaagggttgtatgcaaaaaataagatttcgaaaggtgatttaatatgggaagaatctcagctattttatattgcgccattggcaaatgtaaacctcatcaaaggtggcaaggcttgttcttattgcggaaaattgcttacacaatcaagcagtaatgctggtatatctgtcttgaagggattagattgtaatgtttgttctgagatttggtgttctcaaacttgtaaaaagattgattctcagttgcatgggatgttaaaacataatttatacaacccaaattcaagtggaggttcgaagaaattgatcaatgcaaatgcatatttagagttgcaagattattgtttaaaagaacaatggaatgcattgtacgccattacaattatttatgctaatatcattactgataagtctggcataaaaggaaaacaatttagagcgatggcaagagtatcacaagatgttaggtataaggctttgaattcatcagctggtgcgtttgacaatttacaaggtggtgccttgtttgttggagaacaacaagaaaagttatggaaagatggttataatagatttaaaaatgtctttcctaaatcagtagataatggagatatttcctatcaagaatttatgtacatgatgggtacgtacaacatcaataatttggattcttgtatctatcttactcagtcgcatttgaaccacaattgtgatccaaatactaatgttgagacctcgactacggtaagaaccaatggactcaaggtatttgcagcaagagatataagagctggcgaagaattaactaccacatatgtgaatccagcgtatactgtccaacagagacaaagagaattgcgagttaattgggggttcatgtgtggatgtcagaaatgtaaggaagacttaaaatgccagcaacgaagaaaatcaagttctgcaccggctgctaaggatgataaaggaattagagaaatgttgatggatacgaaaaaggaaattggtgaccaagaaattgagttagaaattcctagtagttacgatggcgaaagaagaaaatctgttagatttgatgaaaaggttatagctgtcagcgaatag

SEQ ID NO: 64553 - protein, 492 aa, Debaryomyces hansenii CBS767
METESKADTASLANKFEVVDINDYEAESSEPIVPHERQIVDDVIAIWKQDPSTETLGIGKLHAMVKGRHPNWSVSEKRVKTLLKNFGLLTNNANQQFTYANEIKSLNTPDIDLPEKVHIVMTAKRGKGLYAKNKISKGDLIWEESQLFYIAPLANVNLIKGGKACSYCGKLLTQSSSNAGISVLKGLDCNVCSEIWCSQTCKKIDSQLHGMLKHNLYNPNSSGGSKKLINANAYLELQDYCLKEQWNALYAITIIYANIITDKSGIKGKQFRAMARVSQDVRYKALNSSAGAFDNLQGGALFVGEQQEKLWKDGYNRFKNVFPKSVDNGDISYQEFMYMMGTYNINNLDSCIYLTQSHLNHNCDPNTNVETSTTVRTNGLKVFAARDIRAGEELTTTYVNPAYTVQQRQRELRVNWGFMCGCQKCKEDLKCQQRRKSSSAPAAKDDKGIREMLMDTKKEIGDQEIELEIPSSYDGERRKSVRFDEKVIAVSE

SEQ ID NO: 64554 - DNA, 1422 bp, Candida albicans SC5314
  CDS (1)..(1422): transl_table=12
atgactcaagatatatctgaaaaaattgaagtgatatcgataaatgactcacagccagaggattcaagcccagtagttccacatgaacgtcaagtcgtagattgtgtgattgaaatttggaaggaagatccatcgaccgagtcattgggaatgagtaaattgcatgccttagtcaaacaaaaacatcctaattggtctatttctgaaaaacgggttaaaagtttgttgaaacaatttggattagcttttaacaatcaagaacagtttacatacgcgaaagagattacgtctgtcatgactcctgatatcgaattacctgcaaatgtccatattatcatgacctcaaaacgaggaaaaggtttatatgctaaaagagatatcgcaaaaggtgatttgatttggtctgaagaaccactttttttcattccacccttggcaaatgtgaacttgatgaaaactgcttctgcatgtacttattgtgggaaattgttgcaacgaactgaatctgctacagttttaaaaggtttggactgtaatgtctgttccgaagtatggtgttctatcaaatgtaaacatctagacggtaatttgcattccttgttgaagcacaatctatataatcctggctctaaaaagcacaaactcattgacgctgaagcattcttggaattacaagactattgtttagaagaacaatggaatgcactttacgcaattacattgatatacgctaattgcattaccgacaaactgggtgttaagcaaaaacagtttgatgctatggctagggtctcacaagatgttcgatacaaggcattaagctcttctgctggtacttttgatagcttgaacggtggtgccttgtttgtgcaagaacaacaagagcacttgtggaaaatagggtatgagaaattccttagagtatttcctaaaaaaccagttgaataccgtgagtttttattcatgatgggaacttataacatcaacaatttagactcaaatgtgtttttaacccaatctcatttaaatcacaattgtgcttcaaatacttctgtggaaactgagcttaaccgtactgcagggttgaaagtcattgctggtagagatatcaaaagtggcgaggaattgactaccacctatgtcaatcctagccatactgttcaccaaagacaaagagagttgcgtgttaattggggttttatttgtgcttgtgctaaatgtaaagacgatttgaaacaaaatgaacgtcgtaaatcgtcccataatcagcaacaaaatgctaacaatattagagacatgttgaaagaaacaaaagatgccgtaggtgaagaaggaattgagttggaaataccgactgagtttaacggagaaagaagaaaatcagttaggtttgacgagaaagtagttgcagtaaaggaatag

SEQ ID NO: 64555 - protein, 473 aa, Candida albicans SC5314
MTQDISEKIEVISINDSQPEDSSPVVPHERQVVDCVIEIWKEDPSTESLGMSKLHALVKQKHPNWSISEKRVKSLLKQFGLAFNNQEQFTYAKEITSVMTPDIELPANVHIIMTSKRGKGLYAKRDIAKGDLIWSEEPLFFIPPLANVNLMKTASACTYCGKLLQRTESATVLKGLDCNVCSEVWCSIKCKHLDGNLHSLLKHNLYNPGSKKHKLIDAEAFLELQDYCLEEQWNALYAITLIYANCITDKSGVKQKQFDAMARVSQDVRYKALSSSAGTFDSLNGGALFVQEQQEHLWKIGYEKFLRVFPKKPVEYREFLFMMGTYNINNLDSNVFLTQSHLNHNCASNTSVETELNRTAGLKVIAGRDIKSGEELTTTYVNPSHTVHQRQRELRVNWGFICACAKCKDDLKQNERRKSSHNQQQNANNIRDMLKETKDAVGEEGIELEIPTEFNGERRKSVRFDEKVVAVKE

SEQ ID NO: 64556 - DNA, 26 bp, Artificial sequence
  primer
atgacattgactatcaaaataggaac

SEQ ID NO: 64557 - DNA, 24 bp, Artificial sequence
  primer
ttatctttcatccactgcgaccga

SEQ ID NO: 64558 - protein, 554 aa, Artificial sequence
  consensus sequence
  Variant (2)..(7): Xaa in position 2 to 7 is any amino acid
  Variant (10)..(17): Xaa in position 10 to 17 is any amino acid
  Variant (18)..(27): Xaa in position 18 to 27 is any or no amino acid
  Variant (29)..(29): Xaa in position 29 is any amino acid
  Variant (31)..(33): Xaa in position 31 to 33 is any amino acid
  Variant (35)..(36): Xaa in position 35 to 36 is any amino acid
  Variant (38)..(38): Xaa in position 38 is any amino acid
  Variant (40)..(42): Xaa in position 40 to 42 is any amino acid
  Variant (46)..(46): Xaa in position 46 is any amino acid
  Variant (48)..(49): Xaa in position 48 to 49 is any amino acid
  Variant (51)..(56): Xaa in position 51 to 56 is any amino acid
  Variant (58)..(63): Xaa in position 58 to 63 is any amino acid
  Variant (65)..(67): Xaa in position 65 to 67 is any amino acid
  Variant (69)..(78): Xaa in position 69 to 78 is any amino acid
  Variant (80)..(83): Xaa in position 80 to 83 is any amino acid
  Variant (85)..(93): Xaa in position 85 to 93 is any amino acid
  Variant (94)..(94): Xaa in position 94 is any or no amino acid
  Variant (96)..(98): Xaa in position 96 to 98 is any amino acid
  Variant (100)..(108): Xaa in position 100 to 108 is any amino acid
  Variant (109)..(115): Xaa in position 109 to 115 is any or no amino acid
  Variant (117)..(119): Xaa in position 117 to 119 is any amino acid
  Variant (121)..(121): Xaa in position 121 is any amino acid
  Variant (123)..(127): Xaa in position 123 to 127 is any amino acid
  Variant (128)..(130): Xaa in position 128 to 130 is any or no amino acid
  Variant (132)..(132): Xaa in position 132 is any amino acid
  Variant (135)..(135): Xaa in position 135 is any amino acid
  Variant (137)..(138): Xaa in position 137 to 138 is any amino acid
  Variant (141)..(141): Xaa in position 141 is any amino acid
  Variant (144)..(144): Xaa in position 144 is any amino acid
  Variant (146)..(148): Xaa in position 146 to 148 is any amino acid
  Variant (150)..(150): Xaa in position 150 is any amino acid
  Variant (151)..(151): Xaa in position 151 is any or no amino acid
  Variant (153)..(155): Xaa in position 153 to 155 is any amino acid
  Variant (160)..(163): Xaa in position 160 to 163 is any amino acid
  Variant (165)..(167): Xaa in position 165 to 167 is any amino acid
  Variant (170)..(170): Xaa in position 170 is any amino acid
  Variant (172)..(173): Xaa in position 172 to 173 is any amino acid
  Variant (176)..(181): Xaa in position 176 to 181 is any amino acid
  Variant (182)..(182): Xaa in position 182 is any or no amino acid
  Variant (184)..(189): Xaa in position 184 to 189 is any amino acid
  Variant (190)..(192): Xaa in position 190 to 192 is any or no amino acid
  Variant (197)..(197): Xaa in position 197 is any amino acid
  Variant (199)..(200): Xaa in position 199 to 200 is any amino acid
  Variant (205)..(206): Xaa in position 205 to 206 is any amino acid
  Variant (209)..(210): Xaa in position 209 to 210 is any amino acid
  Variant (212)..(216): Xaa in position 212 to 216 is any amino acid
  Variant (218)..(223): Xaa in position 218 to 223 is any amino acid
  Variant (225)..(238): Xaa in position 225 to 238 is any amino acid
  Variant (239)..(246): Xaa in position 239 to 246 is any or no amino acid
  Variant (248)..(253): Xaa in position 248 to 253 is any amino acid
  Variant (255)..(255): Xaa in position 255 is any amino acid
  Variant (257)..(260): Xaa in position 257 to 260 is any amino acid
  Variant (264)..(267): Xaa in position 264 to 267 is any amino acid
  Variant (269)..(275): Xaa in position 269 to 275 is any amino acid
  Variant (276)..(277): Xaa in position 276 to 277 is any or no amino acid
  Variant (280)..(282): Xaa in position 280 to 282 is any amino acid
  Variant (284)..(285): Xaa in position 284 to 285 is any amino acid
  Variant (288)..(288): Xaa in position 288 is any amino acid
  Variant (291)..(295): Xaa in position 291 to 295 is any amino acid
  Variant (297)..(298): Xaa in position 297 to 298 is any amino acid
  Variant (299)..(300): Xaa in position 299 to 300 is any or no amino acid
  Variant (305)..(307): Xaa in position 305 to 307 is any amino acid
  Variant (309)..(318): Xaa in position 309 to 318 is any amino acid
  Variant (319)..(334): Xaa in position 319 to 334 is any or no amino acid
  Variant (336)..(341): Xaa in position 336 to 341 is any amino acid
  Variant (343)..(345): Xaa in position 343 to 345 is any amino acid
  Variant (348)..(352): Xaa in position 348 to 352 is any amino acid
  Variant (353)..(356): Xaa in position 353 to 356 is any or no amino acid
  Variant (358)..(359): Xaa in position 358 to 359 is any amino acid
  Variant (362)..(364): Xaa in position 362 to 364 is any amino acid
  Variant (367)..(367): Xaa in position 367 is any amino acid
  Variant (371)..(376): Xaa in position 371 to 376 is any amino acid
  Variant (378)..(380): Xaa in position 378 to 380 is any amino acid
  Variant (382)..(383): Xaa in position 382 to 383 is any amino acid
  Variant (386)..(386): Xaa in position 386 is any amino acid
  Variant (388)..(388): Xaa in position 388 is any amino acid
  Variant (391)..(392): Xaa in position 391 to 392 is any amino acid
  Variant (394)..(402): Xaa in position 394 to 402 is any amino acid
  Variant (403)..(403): Xaa in position 403 is any or no amino acid
  Variant (406)..(407): Xaa in position 406 to 407 is any amino acid
  Variant (409)..(411): Xaa in position 409 to 411 is any amino acid
  Variant (414)..(414): Xaa in position 414 is any amino acid
  Variant (417)..(417): Xaa in position 417 is any amino acid
  Variant (419)..(420): Xaa in position 419 to 420 is any amino acid
  Variant (426)..(426): Xaa in position 426 is any amino acid
  Variant (428)..(428): Xaa in position 428 is any amino acid
  Variant (430)..(431): Xaa in position 430 to 431 is any amino acid
  Variant (433)..(433): Xaa in position 433 is any amino acid
  Variant (443)..(443): Xaa in position 443 is any amino acid
  Variant (445)..(445): Xaa in position 445 is any amino acid
  Variant (447)..(448): Xaa in position 447 to 448 is any amino acid
  Variant (450)..(472): Xaa in position 450 to 472 is any amino acid
  Variant (473)..(507): Xaa in position 473 to 507 is any or no amino acid
  Variant (509)..(514): Xaa in position 509 to 514 is any amino acid
  Variant (516)..(521): Xaa in position 516 to 521 is any amino acid
  Variant (522)..(522): Xaa in position 522 is any or no amino acid
  Variant (524)..(524): Xaa in position 524 is any amino acid
  Variant (530)..(535): Xaa in position 530 to 535 is any amino acid
  Variant (536)..(538): Xaa in position 536 to 538 is any or no amino acid
  Variant (540)..(541): Xaa in position 540 to 541 is any amino acid
  Variant (547)..(548): Xaa in position 547 to 548 is any amino acid
  Variant (550)..(553): Xaa in position 550 to 553 is any amino acid
KXXXXXXNDXXXXXXXXXXXXXXXXXXIXPXXXQXXDXVXXXWKEXPXXEXXXXXXLXXXXXXRXXXWXXXXXXXXXXLXXXXLXXXXXXXXXXYXXXIXXXXXXXXXXXXXXXXLXXXVXIXXXXXXXXGXGLXAXXDIXKGXLXXXEXXPXXXIPPLXXXXLXXXGKXCXXCGXXXXXXXSXXXXXXXXXLDCNXCXXIWCSXXCKXXDXXXXXLXXXXXXNXXXXXXXXXXXXXXXXXXXXXXCXXXXXXAXYXXXXIYAXXXXDXXXXXXXXXQFXXXAXXSQXVRXXXXXSXXXXGTFDXXXGXXXXXXXXXXXXXXXXXXXXXXXXXXWXXXXXXFXXXFPXXXXXXXXXYXXFLXXXGTXNINXXXXXXYXXXSXXNHXCXPNXXVXXXXXXXXXXLKXXAXXXIKXGEXLXXTYVNPXHXVXXRXRELRVNWGFXCXCXXCXXXXXXXXXXXXXXXXXXXXXXXXXXXXXXXXXXXXXXXXXXXXXXXXXXXXXXXXXXRXXXXXXKXXXXXXXEXELEIPXXXXXXXXXRXXSVRFDXXVXXXXE

SEQ ID NO: 64559 - protein, 48 aa, Artificial sequence
  protein pattern
  Variant (2)..(4): Xaa in position 2 to 4 is any amino acid
  Variant (5)..(5): Xaa in position 5 is any or no amino acid
  Variant (7)..(7): Xaa in position 7 is any or no amino acid
  Variant (9)..(9): Xaa in position 9 is any amino acid
  Variant (10)..(10): Xaa in position 10 is any or no amino acid
  Variant (12)..(12): Xaa in position 12 is Lys or Arg
  Variant (13)..(13): Xaa in position 13 is any amino acid
  Variant (14)..(14): Xaa in position 14 is Asp or Gly
  Variant (16)..(16): Xaa in position 16 is Glu or Gln
  Variant (17)..(17): Xaa in position 17 is Ile or Leu
  Variant (18)..(19): Xaa in position 18 to 19 is any amino acid
  Variant (25)..(25): Xaa in position 25 is any amino acid
  Variant (26)..(26): Xaa in position 26 is His or Tyr
  Variant (27)..(27): Xaa in position 27 is Gly or Thr
  Variant (29)..(30): Xaa in position 29 to 30 is any amino acid
  Variant (32)..(32): Xaa in position 32 is Gln or Arg
  Variant (42)..(42): Xaa in position 42 is Ile, Leu or Met
  Variant (44)..(44): Xaa in position 44 is Ala, Gly, Asn or Gln
  Variant (46)..(46): Xaa in position 46 is Ala, Asp or Gln
  Variant (47)..(47): Xaa in position 47 is Lys or Arg
LXXXXAXRXXIXXXEXXXXTYVNPXXXVXXRXRELRVNWGFXCXCXXC

SEQ ID NO: 64560 - protein, 38 aa, Artificial sequence
  protein pattern
  Variant (2)..(5): Xaa in position 2 to 5 is any amino acid
  Variant (6)..(8): Xaa in position 6 to 8 is any or no amino acid
  Variant (11)..(11): Xaa in position 11 is Phe or Tyr
  Variant (13)..(13): Xaa in position 13 is Ile or Leu
  Variant (15)..(15): Xaa in position 15 is Asn or Gln
  Variant (16)..(17): Xaa in position 16 to 17 is any amino acid
  Variant (18)..(18): Xaa in position 18 is Gly or Ser
  Variant (19)..(19): Xaa in position 19 is any amino acid
  Variant (20)..(20): Xaa in position 20 is Ile or Val
  Variant (21)..(21): Xaa in position 21 is Phe or Tyr
  Variant (22)..(24): Xaa in position 22 to 24 is any amino acid
  Variant (25)..(25): Xaa in position 25 is Ala or Ser
  Variant (26)..(26): Xaa in position 26 is Phe or His
  Variant (27)..(27): Xaa in position 27 is Ile or Leu
  Variant (30)..(30): Xaa in position 30 is Asp, Asn or Ser
  Variant (32)..(32): Xaa in position 32 is Ala, Asp or Glu
  Variant (33)..(33): Xaa in position 33 is Pro or Ser
  Variant (35)..(35): Xaa in position 35 is Ala, Thr or Val
  Variant (36)..(37): Xaa in position 36 to 37 is any amino acid
FXXXXXXXGTXNXNXXXXXXXXXXXXXNHXCXXNXXXE

SEQ ID NO: 64561 - protein, 29 aa, Artificial sequence
  protein pattern
  Variant (2)..(3): Xaa in position 2 to 3 is any amino acid
  Variant (4)..(9): Xaa in position 4 to 9 is any or no amino acid
  Variant (11)..(11): Xaa in position 11 is Ala or Pro
  Variant (12)..(12): Xaa in position 12 is Pro or Gln
  Variant (14)..(14): Xaa in position 14 is Ala or Asp
  Variant (15)..(17): Xaa in position 15 to 17 is any amino acid
  Variant (19)..(19): Xaa in position 19 is Ile, Met or Val
  Variant (20)..(21): Xaa in position 20 to 21 is any amino acid
  Variant (22)..(22): Xaa in position 22 is Ala or Gly
  Variant (23)..(23): Xaa in position 23 is any amino acid
  Variant (24)..(24): Xaa in position 24 is Ala or Cys
  Variant (26)..(26): Xaa in position 26 is Ala, Gly, Ser or Thr
  Variant (27)..(27): Xaa in position 27 is any amino acid
  Variant (29)..(29): Xaa in position 29 is Gly or Ser
LXXXXXXXXIXXLXXXXLXXXXXXCXXCX

SEQ ID NO: 64562 - protein, 18 aa, Artificial sequence
  protein pattern
  Variant (2)..(2): Xaa in position 2 is any amino acid
  Variant (3)..(3): Xaa in position 3 is Leu or Val
  Variant (5)..(5): Xaa in position 5 is any or no amino acid
  Variant (7)..(10): Xaa in position 7 to 10 is any amino acid
  Variant (11)..(11): Xaa in position 11 is any or no amino acid
  Variant (13)..(14): Xaa in position 13 to 14 is any amino acid
  Variant (15)..(15): Xaa in position 15 is Ala, Thr or Val
  Variant (18)..(18): Xaa in position 18 is Asp or Lys
EXXWXKXXXXXFXXXFPX

SEQ ID NO: 64563 - DNA, 1410 bp, Saccharomyces cerevisiae
  CDS (1)..(1410)
atgtcttattcagctgccgataatttacaagattcattccaacgtgccatgaacttttctggctctcctggtgcagtctcaacctcaccaactcagtcatttatgaacacactacctcgtcgtgtaagcattacaaagcaaccaaaggctttaaaacctttttctactggtgacatgaatattctactgttggaaaatgtcaatgcaactgcaatcaaaatcttcaaggatcagggttaccaagtagagttccacaagtcttctctacctgaggatgaattgattgaaaaaatcaaagacgtacacgctatcggtataagatccaaaactagattgactgaaaaaatactacagcatgccaggaatctagtttgtattggttgtttttgcataggtaccaatcaagtagacctaaaatatgccgctagtaaaggtattgctgttttcaattcgccattctccaattcaagatccgtagcagaattggtaattggtgagatcattagtttagcaagacaattaggtgatagatccattgaactgcatacaggtacatggaataaagtcgctgctaggtgttgggaagtaagaggaaaaactctcggtattattgggtatggtcacattggttcgcaattatcagttcttgcagaagctatgggcctgcatgtgctatactatgatatcgtgacaattatggccttaggtactgccagacaagtttctacattagatgaattgttgaataaatctgattttgtaacactacatgtaccagctactccagaaactgaaaaaatgttatctgctccacaattcgctgctatgaaggacggggcttatgttattaatgcctcaagaggtactgtcgtggacattccatctctgatccaagccgtcaaggccaacaaaattgcaggtgctgctttagatgtttatccacatgaaccagctaagaacggtgaaggttcatttaacgatgaacttaacagctggacttctgagttggtttcattaccaaatataatcctgacaccacatattggtggctctacagaagaagctcaaagttcaatcggtattgaggtggctactgcattgtccaaatacatcaatgaaggtaactctgtcggttctgtgaacttcccagaagtcagtttgaagtctttggactacgatcaagagaacacagtacgtgtcttgtatattcatcgtaacgttcctggtgttttgaagaccgttaatgatatcttatccgatcataatatcgagaaacagttttctgattctcacggcgagatcgcttatctaatggcagacatctcttctgttaatcaaagtgaaatcaaggatatatatgaaaagttgaaccaaacttctgccaaagtttccatcaggttattatactaa

SEQ ID NO: 64564 - protein, 469 aa, Saccharomyces cerevisiae
MSYSAADNLQDSFQRAMNFSGSPGAVSTSPTQSFMNTLPRRVSITKQPKALKPFSTGDMNILLLENVNATAIKIFKDQGYQVEFHKSSLPEDELIEKIKDVHAIGIRSKTRLTEKILQHARNLVCIGCFCIGTNQVDLKYAASKGIAVFNSPFSNSRSVAELVIGEIISLARQLGDRSIELHTGTWNKVAARCWEVRGKTLGIIGYGHIGSQLSVLAEAMGLHVLYYDIVTIMALGTARQVSTLDELLNKSDFVTLHVPATPETEKMLSAPQFAAMKDGAYVINASRGTVVDIPSLIQAVKANKIAGAALDVYPHEPAKNGEGSFNDELNSWTSELVSLPNIILTPHIGGSTEEAQSSIGIEVATALSKYINEGNSVGSVNFPEVSLKSLDYDQENTVRVLYIHRNVPGVLKTVNDILSDHNIEKQFSDSHGEIAYLMADISSVNQSEIKDIYEKLNQTSAKVSIRLLY

SEQ ID NO: 64565 - DNA, 1812 bp, Arabidopsis thaliana
  CDS (1)..(1812)
atgtcagccaccgccgccgcctcctcctcgatcgccgttgccaccaactctctcaggaacgtgactctgtcttccagatcgccccttccatcagccatctccgtggctttcccttcccgtggacgcaatactcttcagcgacgcctcgttctcgtttcctgcagtactggagacggatctaagcctacgattctcgtggcggagaagctcggtgacgctggtattaagcttttggaggatgtcgcgaatgtcgactgttcgtataacatgactcctgaggagctcaacattaagatctcgctctgtgacgccttgatcgtgaggagtgggactaaggttggccgtgaggtgttcgaatcgtctcacggacggctcaaggttgttggtcgcgctggtgttgggatcgacaacgtggatctgagtgcagcgacggagtttgggtgtttggttgtcaacgctccgacggcgaacacgatcgctgccgctgagcacggaatcgctcttatggccgccatggctaggaacgtagctcaagctgatgcgtctgttaaggctggagagtggaagaggaacaagtatgtaggtgtttcacttgtgggaaagacccttgcagtgttgggattcgggaaagttgggacggaagttgctcgtcgtgctaagggtcttggtatgcgtgtcattgctcatgatccctatgccccagcagaccgtgcacacgccattggtgttgacttagtgagctttgatgaagcccttgccaccgcggatttcatttctcttcatatgcctcttacgccaacaacatcgaagatactaaacgacgaaacctttgccaaaatgaagaagggagttcgaattgttaatgttgctcgtggaggtgtcatagacgaagatgcgttagtgagagctctggatgctggtattgttgcgcaggctgcacttgatgttttcaccaaagagcctccggctaaagatagcaagctcgtgcagcacgagagggtcactgtgacacctcatcttggagctagtaccatggaggctcaggaaggagttgccatcgaaattgctgaagctgttgttggagctctgaatggagagcttgctgctactgcagtcaatgcacctatggtttctgctgaggttctgaccgagctgaaaccatatgtggtgctagccgagaaactaggaagactggcagtgcaactggtggccggaggaagcggtgtgaaaaacgcgaaaatcacatacgcctcagcaagagccactgatgatcttgacaccagacttctccgagccatgatcaccaagggaatcatcgagccaatctctgacgtatatgtcaatttggtcaacgctgatttcacagccaagcagagaggtctcagactctcagaggaacgtgtgcttttggatggttcaccagagagcccattggagacaataactgttcagctaagcaatgtggagtccaaattcgccagttccctgtctgaatcaggagaggttaaagtggaaggaaaggttaaagacggagtcccgcatttgacaaaggttggatcttttgaggtcgatgtaactcttgaaggtagtatcatactgtgcaggcaggtggatcaacctggtatgatcgggactgtcggaagcatccttggagagtctaatgtcaatgttaacttcatgagcgttgggagaattgcaccgaggaagcaagcgattatggcgattggagtagatgacataccaagcaaagagacactgaagaagattggggaaattccagcggttgaggagttcgttttcctcaagctctag

SEQ ID NO: 64566 - protein, 603 aa, Arabidopsis thaliana [sequence omitted]

SEQ ID NO: 64567 - DNA, 1230 bp, Vibrio cholerae O1 biovar eltor str. N16961
  CDS (1)..(1230): transl_table=11
atggccaaagtttcactggaaaaagacagaattaagatcctccttcttgaaggacttcacccctcttcggtggaagttttgcaagcggccggttacagcaatatcgaataccataaaggctcgctggaagaagctgagctgattaaagctatcaaagatgtgcattttgtcgggatccgctcgcgcagtaatctgacggagaaagtgatcaatgcggcagagaaactggtggcgattggctgtttctgtatcggtactaaccaagtcgaccttaatgccgccgccaaacgcggtattccagtgtttaacgcaccattctccaatactcgcagtgtggcggaactggtgctcggcgaaattttactgttactgcgtggcattccagagaaaaacgcacttgctcaccgtgggatctggaaaaaaagtgcagataactcttatgaagcacggggtaaacgcctaggcattatcggttacggtcatatcggtactcagttggggatcattgctgaaaacttggggatgcacgtatatttctatgacattgaaagcaaactctcgctcggtaacgctacccaagtacataccttaagcgagctactcaataagtgtgatgtcatatcactgcatgttccggaaaccgctggcactaaaaatatgatgggtgcggaagagtttgcgcgcatgaaaccgggtgctatcttcattaacgccgcccgcggtactgtggtcgatatcccggctctgtgcaatgcgctcgaatctggtcatattgcaggggcagcgattgacgtattcccagaagaaccggcatcaaacaaagagccgtttgaatcgccactgatgaagtttgataacgtgattttgacaccacacgtgggggggtcaacccaagaggcacaagagaacattggcattgaagtggctggcaagctggctaaatactcagataacggctcaacgctctctagtgtcaacttccctgaagtgtcactgccagagcatcgcagctgctctcgcttactgcatattcacgccaaccgtccgggcattttgacccaaattaacaccatcttcgccgaagaagggatcaacatcgcggctcaatatctgcaaaccaccgcagaaatcggctatgtggtcatcgatgtggaaacggctcgctctgaagaagcgttaactaagcttaaagcgatcgacggcacgattcgcgcccgtattctgcactga

SEQ ID NO: 64568 - protein, 409 aa, Vibrio cholerae O1 biovar eltor str. N16961
MAKVSLEKDRIKILLLEGLHPSSVEVLQAAGYSNIEYHKGSLEEAELIKAIKDVHFVGIRSRSNLTEKVINAAEKLVAIGCFCIGTNQVDLNAAAKRGIPVFNAPFSNTRSVAELVLGEILLLLRGIPEKNALAHRGIWKKSADNSYEARGKRLGIIGYGHIGTQLGIIAENLGMHVYFYDIESKLSLGNATQVHTLSELLNKCDVISLHVPETAGTKNMMGAEEFARMKPGAIFINAARGTVVDIPALCNALESGHIAGAAIDVFPEEPASNKEPFESPLMKFDNVILTPHVGGSTQEAQENIGIEVAGKLAKYSDNGSTLSSVNFPEVSLPEHRSCSRLLHIHANRPGILTQINTIFAEEGINIAAQYLQTTAEIGYVVIDVETARSEEALTKLKAIDGTIRARILH

SEQ ID NO: 64569 - DNA, 1233 bp, Pasteurella multocida subsp. multocida str. Pm70
  CDS (1)..(1233): transl_table=11
atgacgaccaaagtgtctttagataaatctaaaattaaatttctcttattagaaggtgtccatcaaacggcattggaagtgctacaaaatgctggctataccaacattgaataccataaaaaagccttagatgatgatgaattaaaagaagccattaaagatgcgcactttgtgggtatccgctcacgcacgttcttaacagaagaagtacttgcccatgcacaaaaattaattgcgattggttgtttctgtatcggtactaaccaagtcaatttacaagcggcaaaattacgtggtattccagtgtttaatgcgccgttttcaaatacccgttctgtagcagaattagtgttaggggaaattctcttgttaatgcgtaacgttccccaagccaatgccgaagtacaccgtgggatttggaataaatcagccaatggatcacatgaagtacgtggtaaaaaactgggtatcattggttacgggcatatcggttcacagttaagtattattgcggagtcactcgggatgcgcgtattcttctatgatatcgagaataaattgccattaggcaatgcacagcaattacgcacattagaagaacttctgtctagctgtgatgtagtgtcattacatgtgcctgaaaatgcctcaactaaaaacctcatcagtgcagaacgcatcgcacaattaaaagaaggcgccatcttaattaatgcggcaagaggcacagtagtagatattgatgctttagcacaagccttagaggctggcaaaatccgtggcgcagccttagatgtcttcccagaagaacccgcctccattcaagaggaatttgtttcaccgttacgtgcttttgataatgtgattcttacgccgcacatcggtggctccacgtcagaagcacaagaaaacattggtgcagaagtatccggtaaatttgtcaaatattcagataatggttctaccctttctgctgtcaacttccctgaagtgtcactccctgaacatgttggtactaaacgcttattacatattcaccacaataaacaaggggtactcaataagattaaccaagtgtttgtggatgctaatgtgaatatcgccgcacaatatttacaaacagacccagcgatcggttatgtcgtgatcgatgttgagacagaagacacacacagcttattaacgcaattaaaagagattgaaggcacgattcgcgcacgcgtcttgtactag

SEQ ID NO: 64570 - protein, 410 aa, Pasteurella multocida subsp. multocida str. Pm70
MTTKVSLDKSKIKFLLLEGVHQTALEVLQNAGYTNIEYHKKALDDDELKEAIKDAHFVGIRSRTFLTEEVLAHAQKLIAIGCFCIGTNQVNLQAAKLRGIPVFNAPFSNTRSVAELVLGEILLLMRNVPQANAEVHRGIWNKSANGSHEVRGKKLGIIGYGHIGSQLSIIAESLGMRVFFYDIENKLPLGNAQQLRTLEELLSSCDVVSLHVPENASTKNLISAERIAQLKEGAILINAARGTVVDIDALAQALEAGKIRGAALDVFPEEPASIQEEFVSPLRAFDNVILTPHIGGSTSEAQENIGAEVSGKFVKYSDNGSTLSAVNFPEVSLPEHVGTKRLLHIHHNKQGVLNKINQVFVDANVNIAAQYLQTDPAIGYVVIDVETEDTHSLLTQLKEIEGTIRARVLY

SEQ ID NO: 64571 - DNA, 1230 bp, Pseudomonas aeruginosa PAO1
  CDS (1)..(1230): transl_table=11
atgagcaagacctctctcgacaagagcaagatcaagttccttcttctcgaaggtgtccaccagaacgccgtggacacgctgaaggccgccggctacaccaacatcgagtacctcaagaccgcgctttccggcgacgagctgaaggaaaggatcgccgatgcgcacttcatcggcattcgctcccgcacccagctgaccgaagaggtcttcgactgcgcgaagaaactgatcgcggtcggctgcttctgcatcggcaccaaccaggtcgacctcaacgccgcccgcgaacgcggtatcgccgtgttcaacgcgccctactcgaacacccgctctgtggctgagctggtactggccgaggcgatcctgctgctgcgcggcatcccggaaaagaacgcctcctgccatcgcggcggctggatcaagagcgcggcgaattccttcgagatccgtggcaagaagctcggcatcgtcggctacggctcgatcggcacccagctctcggtactcgccgaggccctgggcatgcaggtgttcttctacgacaccgtgaccaagctgccgctgggcaacgcggtgcagatcggcagcctgcacgagctgctgggcatgtccgacatcgtctcgctgcacgttcccgaactgccctccacccagtggatgatcggcgagaaggaaatccgcgcgatgaagaagggcggcatcctgatcaacgccgcgcgcggcacagtggtcgagctggaccacctggccgccgcgatcaaggacgagcacctgatcggcgccgccatcgacgtgttcccggtcgagccgaaatccaacgacgaggaattcgccagcccgctgcgtggcctggaccgggtgatcctgaccccgcacatcggcggctccaccgccgaggcacaggccaacatcggcctggaagtggcggagaagctggtcaagtacagcgacaacggcacctcggtgtcctcggtcaacttccccgaagtggccctgccgtcgcacccaggcaagcaccgcctgctgcacatccacgccaacatccccggcgtgatgagcgagatcaacaaggtcttcgccgacaacggcatcaacgtttccggccagtacctgcaaaccaacgagaaggtcggctacgtagtgatcgacgtcgatgccgagtactcggacctggccctggagaaactccagcaggtcaacggtaccatccgtagccgcgtgctgttctaa

SEQ ID NO: 64572 - protein, 409 aa, Pseudomonas aeruginosa PAO1
MSKTSLDKSKIKFLLLEGVHQNAVDTLKAAGYTNIEYLKTALSGDELKERIADAHFIGIRSRTQLTEEVFDCAKKLIAVGCFCIGTNQVDLNAARERGIAVFNAPYSNTRSVAELVLAEAILLLRGIPEKNASCHRGGWIKSAANSFEIRGKKLGIVGYGSIGTQLSVLAEALGMQVFFYDTVTKLPLGNAVQIGSLHELLGMSDIVSLHVPELPSTQWMIGEKEIRAMKKGGILINAARGTVVELDHLAAAIKDEHLIGAAIDVFPVEPKSNDEEFASPLRGLDRVILTPHIGGSTAEAQANIGLEVAEKLVKYSDNGTSVSSVNFPEVALPSHPGKHRLLHIHANIPGVMSEINKVFADNGINVSGQYLQTNEKVGYVVIDVDAEYSDLALEKLQQVNGTIRSRVLF

SEQ ID NO: 64573 - DNA, 1239 bp, Brucella melitensis 16M
  CDS (1)..(1239): transl_table=11
atgaccgaacgcctctccctctcccgtgatcgcatcaatgttcttcttctggaaggcatcagccagaccgccgtggaatatttcaaatcctccggctacaccaatgtcacacatctgccgaaagcattggacaaggccgatctgatcaaggcgatttcttctgcgcatatcatcggcattcgctcgcgtacgcaattgaccgaggagattttcgccgctgccgaccgtctgatcgcagtcggctgcttttcggtcggcaccaatcaggtggaactgaaagctgcccgcaagcgcggtatccccgtcttcaatgcgccattctccaacacgcgctcggttgccgaactggtgattggcgagatcatcatgctgatgcgccgcattttcccgcgttccgtttcagcccatgcgggtggctgggaaaagacagccatcggaagccgcgaagtgcgcggcaagacgctcggcatcgtcggctacggcaatatcggctcgcaggtcggcaatctggctgaaagcctcggtatgaccgtgcgttattacgacacgtccgacaagctgcaatatggcaatgtgaagcctgcggcgagccttgatgaacttctgaaaacttccgatgtggtgagtctgcacgtcccgtcgagcaaatccacctcgaagctcatcaccgaagccaagctgcgcaagatgaagaagggcgctttcctcatcaataatgcgcgcggttccgttgtcgatctcgaagccttggccaaggttttgcaggagggtcatcttgcgggcgcggcgatcgatgttttccctgtggagccggcctccaatggcgagaggttctcaaccccgcttcaggggctggagaatgtcattctcacgccgcatatcggcggctcgaccgaggaagcgcaggaacgtatcggtacggaagtcacccgcaagctggtcgaatattccgatgtcggctccactgtgagcgccgtcaattttccgcaggtgcaattgccgccacgcccgaccggcacgcgcttcatgcatgtgcatgaaaaccgtccgggtattctgaacagcctcatgaacgtgttttcgcaccaccatatcaatatcgccagccagtttctccagacggatggcgaggttggctatctcgtgatggaagccgatggcgtgggcgaagcaagcgatgccgtcttgcaggaaatccgcgaaattcccggcacgattcgcgctcgcctgctatactga

SEQ ID NO: 64574 - protein, 412 aa, Brucella melitensis 16M
MTERLSLSRDRINVLLLEGISQTAVEYFKSSGYTNVTHLPKALDKADLIKAISSAHIIGIRSRTQLTEEIFAAADRLIAVGCFSVGTNQVELKAARKRGIPVFNAPFSNTRSVAELVIGEIIMLMRRIFPRSVSAHAGGWEKTAIGSREVRGKTLGIVGYGNIGSQVGNLAESLGMTVRYYDTSDKLQYGNVKPAASLDELLKTSDVVSLHVPSSKSTSKLITEAKLRKMKKGAFLINNARGSVVDLEALAKVLQEGHLAGAAIDVFPVEPASNGERFSTPLQGLENVILTPHIGGSTEEAQERIGTEVTRKLVEYSDVGSTVSAVNFPQVQLPPRPTGTRFMHVHENRPGILNSLMNVFSHHHINIASQFLQTDGEVGYLVMEADGVGEASDAVLQEIREIPGTIRARLLY

SEQ ID NO: 64575 - DNA, 1623 bp, Methanosarcina mazei Go1
  CDS (1)..(1623): transl_table=11
ttgttaaaatttagcatctcatgtttatcgtatttatctggagaaattgacatgaaagtattggtcagcgactcactctccaacgaagggttggagatcctaaaagaacattttgatattgatgtctgcaccgggctctgtgaagatgagctggtggaaaagatcaaaggctacgacgcccttgtaatacgcagcggtacccaggttactcagagaataatcgaggctgctgacaacctgaagattatcggaagggcaggggtcggagtcgacaatgtggatgtggatgcagccacaaagaaaggtatcatcgtggccaacgctcccgaagggaacatgatctcggcagcagagcacacaattgccatgatgatgtcaatgtcgaggaatatccctcaggccaacgcttccctgaaagccagggaatggaagcgcaataagttcatgggcgttgaggtcaagggaaagaccctgggagttataggtctcggaagaattgggtctgaagtcgcaaagagagctgcagggcttgaaatgaacctcatgggatatgaccccttcatctccgagaagcgggctatggaacttggagtcaagctggctacagttaacgaaatcgcaaaagaggctgactacataacagtacataccccacttatcaaggaaaccagaaacattcttgacgacgagcagttcgcccttatgaagaaaggagtccgggttcttaactgcgcccgcggaggcattatcaacgaagaagcccttgcaagagcccttgaaagcggcaaggtaggcggcgcagccattgacgtttttgtcgaagagcctcctttctccagccctcttcttaactttgacaatgttatcgtaactccccacctcggtgcctctacacaggaagctcaggttaatgttgcaatcgacattgcaaaggaagttgtttccgtccttacaggcgggtctgcaaagaacgcaatcaatatcccctccgtaaagcctgaagctatggcagtccttgccccgtatataaggctttcagaactcatgggcaaaattgcagggcagcttgtggacagcaattatgaaaaggtagaaattgcatacaacggggaaatctccggaaaagataccagaccacttacagtttctgctctcaaagggctgcttgaaatggctgttgggtccggggtaaattatgtcaacgctccaatccttgcgaagtccagaaaaatcgcagtggtagaaagcaagtctgaatctgcggaagagtattcttccactgtcagtatcaggctctccagcggagaatctacaaaaatggtcgcaggaaccgttgttggggatgagcccaagatagtttccatcgatgatgacaaggtagatatcttcccggctggtcgtatgatttttgccaaacatataaacaaaccgaacgttatcggtccctgttgcatggtccttgggaaaaacaatatcaacatttcaggcatgcaggttggcaggtcggaagtcggaggcgtgaccatgatggttcttaatgtcgacaccgatgtttccgatgctatccttgatgaggtcaggcaggttccgggcatccttaatgccaagcttgtaaccctctga

SEQ ID NO: 64576 - protein, 540 aa, Methanosarcina mazei Go1
MLKFSISCLSYLSGEIDMKVLVSDSLSNEGLEILKEHFDIDVCTGLCEDELVEKIKGYDALVIRSGTQVTQRIIEAADNLKIIGRAGVGVDNVDVDAATKKGIIVANAPEGNMISAAEHTIAMMMSMSRNIPQANASLKAREWKRNKFMGVEVKGKTLGVIGLGRIGSEVAKRAAGLEMNLMGYDPFISEKRAMELGVKLATVNEIAKEADYITVHTPLIKETRNILDDEQFALMKKGVRVLNCARGGIINEEALARALESGKVGGAAIDVFVEEPPFSSPLLNFDNVIVTPHLGASTQEAQVNVAIDIAKEVVSVLTGGSAKNAINIPSVKPEAMAVLAPYIRLSELMGKIAGQLVDSNYEKVEIAYNGEISGKDTRPLTVSALKGLLEMAVGSGVNYVNAPILAKSRKIAVVESKSESAEEYSSTVSIRLSSGESTKMVAGTVVGDEPKIVSIDDDKVDIFPAGRMIFAKHINKPNVIGPCCMVLGKNNINISGMQVGRSEVGGVTMMVLNVDTDVSDAILDEVRQVPGILNAKLVTL

SEQ ID NO: 64577 - DNA, 1242 bp, Xanthomonas campestris pv. campestris str. ATCC 33913
  CDS (1)..(1242): transl_table=11
atgtcgccgaagaaaacctcgtttcccaagcaggacatccgcgtcctgttgctggaaggcatcagccagaccgccgtggacgtgttccgcgccgccggttactcgcagatcgagctgcacgccaagtccctgcccgaggacgaactcaaggcgcgcatcgccgaggcgcacatcgtcggcattcgctcgcgcacccatttgagcgccgatgtgctggcgcacgccaagcggctgatcgcggtgggctgcttctgcatcgggaccaatcaggtcgacctagaggcggcggaactggccggcattccggtgttcaacgcgccctactccaacacccgcagcgtggccgaactggtcatcgccgaggccatcctgctgttgcgcggcatcccgcagaaaaatgcgcaatgccaccgcggcggctggtccaagtcggccgccggcagccacgaaacgcgcggcaaggtgctcggcatcgttggttacgggcacatcggcacccaggttggcgtgctggccgaatcgctaggcatgcaggtgattttccacgacatcgaaaccaagctgtcgctgggcaacgcgcgcgcggcgatcgacctggacgacctgctggcgcgctcggacgtggtgaccctgcacgtgccggagaccccgtccaccaaggacatgatcggcgcggcagaaatcgcccgcatgaagcccggcgcgcatctgatcaatgcctcgcgcggcaccgtcatcgacatcgatgcactggatgcggcgctcacctccggccagatcggcggcgcggccgtggacgtgttcccgatcgagcccaagggcaatggcgatgcgttcgagtccccgttgattgcgcacgacaacgtcatcctgaccccgcacgtgggcggcagcacgctggaagcacaggacaatatcggcgtggaagtagccgccaaactggtgcgctacagcgacaacggcagcaccttgtcggcggtgaacttccctgaagtcaccctgcccgagcaccccgacagcctgcggctgctgcacatccaccgcaacgtgccgggcgtgctgtcgcagatcaacgaactgttctcgcgccacaacctcaacatcgatggtcagtttttgcgcaccgaccccaaggtgggctatgtggtgatcgacgtcagcgccagcgaggagctggcgggcgtgttgaaggacgagctgggtcagatcaccggcaccttgcggacgcgggttctctactga

SEQ ID NO: 64578 - protein, 413 aa, Xanthomonas campestris pv. campestris str. ATCC 33913
MSPKKTSFPKQDIRVLLLEGISQTAVDVFRAAGYSQIELHAKSLPEDELKARIAEAHIVGIRSRTHLSADVLAHAKRLIAVGCFCIGTNQVDLEAAELAGIPVFNAPYSNTRSVAELVIAEAILLLRGIPQKNAQCHRGGWSKSAAGSHETRGKVLGIVGYGHIGTQVGVLAESLGMQVIFHDIETKLSLGNARAAIDLDDLLARSDVVTLHVPETPSTKDMIGAAEIARMKPGAHLINASRGTVIDIDALDAALTSGQIGGAAVDVFPIEPKGNGDAFESPLIAHDNVILTPHVGGSTLEAQDNIGVEVAAKLVRYSDNGSTLSAVNFPEVTLPEHPDSLRLLHIHRNVPGVLSQINELFSRHNLNIDGQFLRTDPKVGYVVIDVSASEELAGVLKDELGQITGTLRTRVLY

SEQ ID NO: 64579 - DNA, 1242 bp, Xanthomonas axonopodis pv. citri str. 306
  CDS (1)..(1242): transl_table=11
atgtcgccgaagaaaacctcgtttcccaagcaggacatccgcgtgctgttgctggaagggatcagcccgaccgccgtggacgtgttccgcgccgccggctactcgcagatcgaactgcacgccaaatcgctgccggaagacgagttgatcgcccgcatcgcagacgcgcatatcgtcggtatccgctcgcgcacgcagctgagcgccgacgtgctggcgcacgccaagcgcctgatcgcagtcggctgcttctgcatcggcaccaaccaggtcgacctggacgcggccgagctggctggcatcccggtattcaacgcaccctactccaacacccgcagcgtggccgaactggtcatcgccgaggcgatcctgctattgcgcggcattccgcagaagaacgcgcaatgccatcgcggtggctggtcgaaatcggccgccggcagccacgaaacgcgcggcaaggtgctgggcatcgtcggctacgggcatatcggcacccaggtcggcgtgctggccgaatcgctgggcatgcaggtgatcttccacgatatcgaaaccaagctgtcgttgggcaatgcccgcgcggcgatcgatctggacgacctgctggcacgcgcagacgtggtgaccttgcacgtgccggaaacgccgtcgaccaaggacatgatcggcgcgccggagatcgcccgcatgaaacccggcgcgcatctcatcaacgcctcgcgtggcaccgtcatcgacatcgacgcgctggatgcggcgctcacctccggccagatcggcggcgcggcggtggatgtcttcccgatcgagcccaagggcaatggcgatgcgttcgaatcgccgctcactgcgcacgacaacgtgatcctgaccccgcacgtgggcggcagcacgctggaagcgcaggacaacatcggcatcgaggtcgccgccaaactggtgcgctatagcgacaacggcagcaccttgtcggcggtgaacttcccggaggtcaccctgcccgagcacgctgaaagcctgcgtttgctgcacatccatcgcaacgtgccgggcgtgctgtcgcagatcaacgaactgttttcgcgccataacgtcaatatcgatggccagttcctgcgcaccgaccccaaggtgggctacgtggtcatcgatgtcggcgccagcgaggaacttgccggcgtactgaaggacgagctggggcagatcaccggcaccttgcggacccggatcctttattga

SEQ ID NO: 64580 - protein, 413 aa, Xanthomonas axonopodis pv. citri str. 306
MSPKKTSFPKQDIRVLLLEGISPTAVDVFRAAGYSQIELHAKSLPEDELIARIADAHIVGIRSRTQLSADVLAHAKRLIAVGCFCIGTNQVDLDAAELAGIPVFNAPYSNTRSVAELVIAEAILLLRGIPQKNAQCHRGGWSKSAAGSHETRGKVLGIVGYGHIGTQVGVLAESLGMQVIFHDIETKLSLGNARAAIDLDDLLARADVVTLHVPETPSTKDMIGAPEIARMKPGAHLINASRGTVIDIDALDAALTSGQIGGAAVDVFPIEPKGNGDAFESPLTAHDNVILTPHVGGSTLEAQDNIGIEVAAKLVRYSDNGSTLSAVNFPEVTLPEHAESLRLLHIHRNVPGVLSQINELFSRHNVNIDGQFLRTDPKVGYVVIDVGASEELAGVLKDELGQITGTLRTRILY

SEQ ID NO: 64581 - DNA, 1344 bp, Yersinia pestis KIM
  CDS (1)..(1344): transl_table=11
ttgtattgctgcttacgtaatatttgttatgttgacagggtgctgaccggattcattcgatatcggcagccgcatctgaagtctgaaaatagggtcggggacatggcaaaagtatcactggagaaagacagaattaagtttctgttagtggaaggggtgcaccagagcgcggttgataacctgcgtgcagccggatatagcaatattgaataccataaaggtgccttagacgccgaatcactgaaggcatccattcgtgatgctcactttatcggaattagatcgcgcactcatctttccgaagacgtttttgcggcagcagaaaaattggttgctgtggggtgtttctgtatcggtactaaccaggttgatttaaaagcggcgaccaaacgtggtgtgccagtattcaatgcgcctttctccaatacccgttcggtagccgaaatggtattgggtgagttgctgctgatgttccgaggcattccgtctgctaacgcgaaagcgcaccgtggcgagtggaacaagttggcggtaggttccttcgaggcccgaggtaagaagctggggattatcggttacggtcatatcggtactcaactggggattctggctgaaagtatcggtatgaaagtcttcttttacgacatcgaaaataaactgtcgttagggaatgcgcagcaagttcgccaactgtcagatttactgaatatgagtgatgtggtcagcctgcatgtaccggaaaaccacactaccaagaatatgattggcgctgagcaattggcacagatgaagccgggtgcgctgttgattaatgcctctcgcggcaccgtggtcgatattccggccctgtgcgatgcgctgtccagcaatcacttgtcaggtgcggcaattgacgtcttccctgaagagcctgcgaccaataaagacccgttcaattcaccactgtgtgaatttgataatgtgttactgaccccgcatattggcggttctactcaggaagcgcaggagaatatcggtgatgaagtcgcgggtaagctggcgaagtattccgataatggctcaacgctatctgcggtgaatttccccgaagtttctctgccagcacatggtgataatacccgtcgcctgttgcatattcatgaaaaccggccaggcattttgaccagcattaacaccatttttgctgagcagaatgtcaatatcgcggcacagtatctacaaaccagcgctgatattggttatgtcgtgattgatgttgaaaccgatgatgcagataatgcggaaaaagccttgcaggcgatgaaggccattccagggacgatccgcgctcgcttattgtactaa

SEQ ID NO: 64582 - protein, 447 aa, Yersinia pestis KIM
MYCCLRNICYVDRVLTGFIRYRQPHLKSENRVGDMAKVSLEKDRIKFLLVEGVHQSAVDNLRAAGYSNIEYHKGALDAESLKASIRDAHFIGIRSRTHLSEDVFAAAEKLVAVGCFCIGTNQVDLKAATKRGVPVFNAPFSNTRSVAEMVLGELLLMFRGIPSANAKAHRGEWNKLAVGSFEARGKKLGIIGYGHIGTQLGILAESIGMKVFFYDIENKLSLGNAQQVRQLSDLLNMSDVVSLHVPENHTTKNMIGAEQLAQMKPGALLINASRGTVVDIPALCDALSSNHLSGAAIDVFPEEPATNKDPFNSPLCEFDNVLLTPHIGGSTQEAQENIGDEVAGKLAKYSDNGSTLSAVNFPEVSLPAHGDNTRRLLHIHENRPGILTSINTIFAEQNVNIAAQYLQTSADIGYVVIDVETDDADNAEKALQAMKAIPGTIRARLLY

SEQ ID NO: 64583 - DNA, 1584 bp, Thermosynechococcus elongatus BP-1
  CDS (1)..(1584): transl_table=11
atgcccaaagttctggtttccgatcccattgaacaggtggggcttgatttgcttgcccaagtggcacaagtagatgtcaaaatcggcctctcagaggaagaactgatcaaaattattcccgaatacgatgccctgatgattcgatcgggaaccaaggtcacgaaagatgtgattgaggctgccaaccaactgaaaattattggccgtgctggggtgggtgtagataacgtcgatgtgcctgccgccactcgcaaagggatcatagtggtcaattctccggagggcaataccattgctgctgcggagcacaccttagcgatgatgctctcccttgcccgtcatattcccgatgcaaatgctgcggttaaagcgggtcagtgggatcgcaaacgcttcacaggggtagaaatttacaagaaaacccttggcattattggcttgggtaaaattggctcccatgtggccacggttgcccgggccatggggatgaaactccttgcctatgacccctatctttcaacggagcgagctgaacaactgggctgccgtcttgtggagttggatgttctctttgcggagtcagactttattacactgcacttgccgaaaactcccgaaacgcagcatttaattaacgccaaaaccattgccaagatgaagcccacggcccggattattaactgtgcgcggggcggcattattgatgaggtagcccttgtggaagcgctcaaaagcggtaggctggcgggggcggccctcgatgtttttgaaaatgaaccccttgaggccgattctcccctgcggagtctgggaatggaagcgatcttaactccccacctgggagcttccactgaagaagcacaggtgaatgtggctattgatgtcgctgagcaaattcgcgatgtcctcctgggattgccggcgcgatcggcggtgaatattcccggcctgcgcccagatgtcctagaaaaactagcgccctatatgcagttggcagaaacccttggtaacttggtggggcagttggctggtggtcgggtcgagtctctggaagtccgtctgcaaggggagctggccactaatgagagtcaacccattgtgattgctgcgctgaaggggttgctctctccagccttgcgggagcgggtcaactatgtcaatgctgggttagaagccaaggagcggggaattcgcgtggttgagactcgcgatgaatcgcagcgggactatgccggctccctgacgttgattgctaaaagcccatcgatgacgcgatcggtgtctggcgctttgctctcccacaatgaattgcgcatcaccagtattgatgactttcccattagtgtggcgccaacccgctatatgctgctcacactgcaccgtgatatgcccggcattattggcaagattggcacccagttgggaagtttcaatgtcaacattgccagtatgcaggtgggacgcaagatggtgcgtggcaatgcggtgatggtgattagcttggacgatcccctgcccgaaggactcttggaggaaatcctcaaggtccccggtattcgtgatgcctatatcgtgaatttgtag

SEQ ID NO: 64584 - protein, 527 aa, Thermosynechococcus elongatus BP-1
MPKVLVSDPIEQVGLDLLAQVAQVDVKIGLSEEELIKIIPEYDALMIRSGTKVTKDVIEAANQLKIIGRAGVGVDNVDVPAATRKGIIVVNSPEGNTIAAAEHTLAMMLSLARHIPDANAAVKAGQWDRKRFTGVEIYKKTLGIIGLGKIGSHVATVARAMGMKLLAYDPYLSTERAEQLGCRLVELDVLFAESDFITLHLPKTPETQHLINAKTIAKMKPTARIINCARGGIIDEVALVEALKSGRLAGAALDVFENEPLEADSPLRSLGMEAILTPHLGASTEEAQVNVAIDVAEQIRDVLLGLPARSAVNIPGLRPDVLEKLAPYMQLAETLGNLVGQLAGGRVESLEVRLQGELATNESQPIVIAALKGLLSPALRERVNYVNAGLEAKERGIRVVETRDESQRDYAGSLTLIAKSPSMTRSVSGALLSHNELRITSIDDFPISVAPTRYMLLTLHRDMPGIIGKIGTQLGSFNVNIASMQVGRKMVRGNAVMVISLDDPLPEGLLEEILKVPGIRDAYIVNL

SEQ ID NO: 64585 - DNA, 1200 bp, Bifidobacterium longum NCC2705
  CDS (1)..(1200): transl_table=11
atgcccaaagcactgttattggaaaacattcaccccgatgcggccaaatcgctgcgtgatcacggtttcgaagtcgagaccatgaagggagccctgagcgaggacgaactcatcgatgcgctggatggcgtggacttggtgggcgtacgctccaagaccaacgtcacagcccgcgtgctggatgcgcgtcctacgctaagcgccatcggctgcttctgcatcggcaccaatcaggtcgatctggcacatgccggcaagcgtggcatcgccgtgttcaacgctccctactccaacacccgttccgtggtggaattggtgatctgcgacatcatctgcttgatgcgccgcattcccgcacacacgcatcacatcaagcatggcctgtgggacaagtccgcttccggctcgcatgaagtgcgaggcaagaccctcggcatcatcggctacggcaacatcggctcccagctgtcggtactggccgaggccctcggcatgcgcgtggtgttctacgacattgaggagaaactggcactgggcaatgcccaccgttgcgacaccctcaacgaactgctggaacagtccgatgccgtgaccctgcacgtggatggccgcaagtcgaacaccggattcttcggcgaagaccaattcgcccacatgaagcaggacgcgattttcattaacctttcgcgcggtttcgtcgccgatctgggagctctgaagcagcacctcgattccggccatctgtctggcgcggcggtcgacgtgttccccgttgaaccgaagaagagcggagatccgttcgagacctcactggccaatgaagacaatatgattctgactcctcatattggcggctccaccttggaagctcaggaatccatcggccatttcgtctctcagcgtcttgaggattactggttcaagggttctacctccttgtccgtgaacctaccacagatcaacctcggtgagtgcaagggtgtgtgccgtatcgcccatctgcacgacaatcttcctggtgtgctggctcatgtcaatcatgtgctcggcgaggagaacatcaacgtttccttccagtcgctggcaaccgagggcgaacttggctatgtggtcaccgacgtggctcagacgcccagcgccgccacgcttgaagcactgcgcaacatcgaaggcaccattcgcatgcgtgtcatcagctga

SEQ ID NO: 64586 - protein, 399 aa, Bifidobacterium longum NCC2705
MPKALLLENIHPDAAKSLRDHGFEVETMKGALSEDELIDALDGVDLVGVRSKTNVTARVLDARPTLSAIGCFCIGTNQVDLAHAGKRGIAVFNAPYSNTRSVVELVICDIICLMRRIPAHTHHIKHGLWDKSASGSHEVRGKTLGIIGYGNIGSQLSVLAEALGMRVVFYDIEEKLALGNAHRCDTLNELLEQSDAVTLHVDGRKSNTGFFGEDQFAHMKQDAIFINLSRGFVADLGALKQHLDSGHLSGAAVDVFPVEPKKSGDPFETSLANEDNMILTPHIGGSTLEAQESIGHFVSQRLEDYWFKGSTSLSVNLPQINLGECKGVCRIAHLHDNLPGVLAHVNHVLGEENINVSFQSLATEGELGYVVTDVAQTPSAATLEALRNIEGTIRMRVIS

SEQ ID NO: 64587 - DNA, 1236 bp, Leptospira interrogans serovar Lai str. 56601
  CDS (1)..(1236): transl_table=11
ttggtaggtagaatgatttcatttccaaaagataaaattcaagttctccttttagaaaacgtccaccaagacgcatttgatatgttccaaaaagatggatttaatgtacgccttcttcccgctgccttttcggaaaaagaacttttagacgaaatcgaaaacattcatgttttaggaattagaagtaaaaccaacgtcacttccgccgttttagaaaaagccaaaagacttttgacaattggttgtttttgtatcggaaccaatcaagtggatttagttggagcagaaaaaaaaggaatccctgtttttaatgccccctattctaatactcgttccgtagcggaattagtaatttcagaaatcatcatgttggccagaagagttccggatcatattcgaaatactcactctggtatttggaataaaatttccaaaaattgttttgaggttcgaggtaaaacgattggaatcgtgggttatggtcatattggaagtcaggtttcagtacttgcagaagcgatgggaatgaaagtgatctactacgatattcaaacggttcttcctcttggaaatgcaactccagtttctagttacgaagaacttttaaaaaattcggactttatttcttttcacgttcccgaaactccacaaacgatgaatctttatggaaaaaaagaaatcgaagttactaaaaaaggcgcttatatgatcaacctttccagagggaaggttgtggatctggaagctcttgcaaaagcaatccaatcgggtcatattgctggagcgggaatagacgtttttccggaagaacccgaatccaacaacgatccatttctaactcctatgcaaaatctgccgaatgtaattttgactcctcatataggcggtagtaccgaagaagctcaaagaaacatcggttccgaagtagccagtaaacttttgaaattcataaacaacggttccactacattttccgtaaattttcctaatttggaaattactccgttacccgcaggtcaatatagaattttgaacgtccataaaaaccaaccagggtttttaaaagacatcaactctatggtatccgcaatcggcgccaatatcagttcccaacatttaggaaccagtgcagaaatcggttatctttccatggtaatcgataaatctgtaggagacgaattgaaagaaaaaatcgaaaaacatcctttttcgatcaaaactaggattctttactaa

SEQ ID NO: 64588 - protein, 411 aa, Leptospira interrogans serovar Lai str. 56601
MVGRMISFPKDKIQVLLLENVHQDAFDMFQKDGFNVRLLPAAFSEKELLDEIENIHVLGIRSKTNVTSAVLEKAKRLLTIGCFCIGTNQVDLVGAEKKGIPVFNAPYSNTRSVAELVISEIIMLARRVPDHIRNTHSGIWNKISKNCFEVRGKTIGIVGYGHIGSQVSVLAEAMGMKVIYYDIQTVLPLGNATPVSSYEELLKNSDFISFHVPETPQTMNLYGKKEIEVTKKGAYMINLSRGKVVDLEALAKAIQSGHIAGAGIDVFPEEPESNNDPFLTPMQNLPNVILTPHIGGSTEEAQRNIGSEVASKLLKFINNGSTTFSVNFPNLEITPLPAGQYRILNVHKNQPGFLKDINSMVSAIGANISSQHLGTSAEIGYLSMVIDKSVGDELKEKIEKHPFSIKTRILY

SEQ ID NO: 64589 - DNA, 1230 bp, Shewanella oneidensis MR-1
  CDS (1)..(1230): transl_table=11
atggcgaaacattcgcttgacaaggataagatcaaaatcctgttgttggaaggcgtccaccaatctgctgtagatgtgtttgaacgcgcgggatacaccaatattgaatatcacaaagcctcgttaggtgatgaagccctacacgagtccataaaagatgcccattttattggtattcgttcccgtacccaactctccgccgatgtattgaaacgtgccgaaaaattaattgcaattggctgcttctgtatcggcacaaaccaagtggatcttgccaccgccgaatccctcgggatccccgtatttaatgcgccgttttccaatactcgcagcgtagccgaactcgtattaggcgaaatcattatgttgatgcgtggtattcctgagcgcaatgccatcgcccaccgaggtggttggatgaaaaccgccgctggcagttacgaagtccgtggcaaaaccttaggcgtgattggctatggccatatcgggactcaactaggcattttggcagaaaccttaggtatgcgtgtagtgttcttcgatattgaagataaattgccattgggtaacgctcagcaaatccactcaatggagcaattactggctcaagccgatgtggtcagtttgcacgtgcctgaaacgccacaaacgaaagacatgatcagtaccgccgaatttgccgctatgcgtaaaggcagcatctttatcaacgcttcccgcggtactgtggtcgatatcgatgcgctcactgtggcacttaaagaacgtcaccttgcaggcgctgcaattgacgtattccccgttgagccacaatcgaatgatgatgaatttatcagcccattacgtggtttagataatgtgctgctcacgccacatgtgggtggtagcaccgcagaagcacaggaaaatatcggtattgaagtggctggcaaattagccaaatactctgataacggctcaaccgtgtcggccgtgaacttccctgaggtgtctctaccaatgcacaaaggcacctctcgcctactgcatatccaccaaaatcgtcctggcgtgctgatcaaaatcaacaaggccttctctgagaagggtattaacattgccgctcagtacctgcaaaccaccgcagaaatcggttatgtggttatggaagttgacacgcatcaagcagaagaagcgttagtagaactcaaggcaattgatggcacgctgcgcacacgcgtattgttctaa

SEQ ID NO: 64590 - protein, 409 aa, Shewanella oneidensis MR-1
MAKHSLDKDKIKILLLEGVHQSAVDVFERAGYTNIEYHKASLGDEALHESIKDAHFIGIRSRTQLSADVLKRAEKLIAIGCFCIGTNQVDLATAESLGIPVFNAPFSNTRSVAELVLGEIIMLMRGIPERNAIAHRGGWMKTAAGSYEVRGKTLGVIGYGHIGTQLGILAETLGMRVVFFDIEDKLPLGNAQQIHSMEQLLAQADVVSLHVPETPQTKDMISTAEFAAMRKGSIFINASRGTVVDIDALTVALKERHLAGAAIDVFPVEPQSNDDEFISPLRGLDNVLLTPHVGGSTAEAQENIGIEVAGKLAKYSDNGSTVSAVNFPEVSLPMHKGTSRLLHIHQNRPGVLIKINKAFSEKGINIAAQYLQTTAEIGYVVMEVDTHQAEEALVELKAIDGTLRTRVLF

SEQ ID NO: 64591 - DNA, 1230 bp, Pseudomonas putida KT2440
  CDS (1)..(1230): transl_table=11
atgagcaagacttctctcgacaagagcaagatccggttccttcttcttgaaggtgtgcaccagaacgcggtcgataccctcaaggccgccggctacaccaacatcgaatacctcactggttcgttgccggaagccgagctgaaggaaaagatcgccgatgcccacttcatcggcatccgttcgcgtacccagctcaccgaagagatcttcgactgtgccaagaaactggtcgcagttggctgcttctgcatcggcaccaaccaggttgacctggaagctgcccgcgcgcgcggtatcgccgtgttcaacgcgccatactccaacacccgctcggtggccgagctggtactggccgaagccatcctgctgctgcgcggcatcccagagaagaacgcctcctgccaccgtggcggctggatcaagagcgcggccaactcgttcgaaatccgcggcaagaaactgggcatcgtcggctacggctcgattggtacccagctttcggtactggctgagaacatgggcatgcaggtgtacttcttcgacccgctgaccaagctgccactgggcaacgccgtgcaggtcaccagcctgaacgagctgctgggcctggctgacatcgtctcgctgcacgtgcctgagctgccatccacccagtggatgatcggcgagaaggaaatccgctcgatgaagaagggcgcgatcctgatcaacgccgcccgtggcaccgtggtcgagctggaccacctggccgctgccatcaaggacaagcacctgatcggcgccgccatcgacgtgttcccggtcgagccacgctccaacgacgaagagttcgagagcccgctgcgcggcctcgacaacgtgatcctgacgccgcacattggtggttccaccgccgaagcccaggccaacatcggcctggaagtggccgagaaactggtcaagtacagcgacaacggtacctcggtgtcctcggtcaacttcccggaagtggccctgccagcgcacccaggcaaacaccgtctgctgcacattcacgaaaacatcccgggcgtgctcagcgagatcaacaaggtcttcgccgagaacggtatcaacatctccggtcagttcctgcagaccaacgagaaagtcggttacgtggtaatcgatgttgacgccgagtactcggacctggcgcaggaaaaactgcaacaggtcaaaggcaccatccgttcgcgcgtcctgttctaa

SEQ ID NO: 64592 - protein, 409 aa, Pseudomonas putida KT2440
MSKTSLDKSKIRFLLLEGVHQNAVDTLKAAGYTNIEYLTGSLPEAELKEKIADAHFIGIRSRTQLTEEIFDCAKKLVAVGCFCIGTNQVDLEAARARGIAVFNAPYSNTRSVAELVLAEAILLLRGIPEKNASCHRGGWIKSAANSFEIRGKKLGIVGYGSIGTQLSVLAENMGMQVYFFDPLTKLPLGNAVQVTSLNELLGLADIVSLHVPELPSTQWMIGEKEIRSMKKGAILINAARGTVVELDHLAAAIKDKHLIGAAIDVFPVEPRSNDEEFESPLRGLDNVILTPHIGGSTAEAQANIGLEVAEKLVKYSDNGTSVSSVNFPEVALPAHPGKHRLLHIHENIPGVLSEINKVFAENGINISGQFLQTNEKVGYVVIDVDAEYSDLAQEKLQQVKGTIRSRVLF

SEQ ID NO: 64593 - DNA, 1230 bp, Vibrio vulnificus CMCP6
  CDS (1)..(1230): transl_table=11
atggccaaagtttcactggaaaaagagaaaataaaaatcttacttcttgaaggcctccacccttcttcggtagaagtgctgcaagctgcgggttacaccaatatcgaataccacaaaggctcactttctgacgatgctcttcttgaagcggttaaagacgcgcacttcattggcattcgttctcgtaccaacttaactgaagaagtgatcaatgcggcacaaaaactggtagcgatcggttgtttctgcattggtaccaaccaagtggatctaaatgcagcatccaaacgtggtattcctgtgtttaacgcgcctttctcaaacactcgcagtgtagcggagctggttcttggccaaatcctgctgcttctacgtggtattccagaaaagaacgctttggctcatcgcggaatttggaaaaaaagtgccgacaactcttacgaagctcgtgggaaacgtctaggcattattggttacggtcatatcggtactcagcttggtattattgctgaaaacctaggcatgcgtgtttatttctacgatatcgagaacaagctctcgctaggtaatgcgactcaaatcccaaccatgagcgaactgctcaacaagtgtgacgtgatttctctacacgtaccagaaacgccagaaaccaaaaatatgatgggtgcagaagagtttgctcgtatgaagcctggttctatcttcatcaatgcagctcgtggcaccgtggtcgatattgaagcgctatgccattcactcgaatcaggtcatattgctggtgcagcgattgacgttttcccggttgaacctgccaccaatgctgaaccattcgaatctccactgcaaaaatttgacaatgtgattcttactccacacgttggcggctcaactcaagaagcacaagagaacattggtgttgaagtggctggcaaactggcgaaatactcagacaatggctcaacgctatccagtgttaacttcccagaagtgtcactgccagagcatcgtagctgttcacgcttactccacattcaccaaaaccgtccgggcattctgacgcaaatcaacaccatttttgctgaagaaggcatcaacatcgccggtcaatacctgcagacctcagccgatattggttatgtggtgattgacgtagaaaccgagcgctctgaagaagcactggtcaaacttaaagagatcgaaggcacaattcgagctcgaatccttcactaa

SEQ ID NO: 64594 - protein, 409 aa, Vibrio vulnificus CMCP6
MAKVSLEKEKIKILLLEGLHPSSVEVLQAAGYTNIEYHKGSLSDDALLEAVKDAHFIGIRSRTNLTEEVINAAQKLVAIGCFCIGTNQVDLNAASKRGIPVFNAPFSNTRSVAELVLGQILLLLRGIPEKNALAHRGIWKKSADNSYEARGKRLGIIGYGHIGTQLGIIAENLGMRVYFYDIENKLSLGNATQIPTMSELLNKCDVISLHVPETPETKNMMGAEEFARMKPGSIFINAARGTVVDIEALCHSLESGHIAGAAIDVFPVEPATNAEPFESPLQKFDNVILTPHVGGSTQEAQENIGVEVAGKLAKYSDNGSTLSSVNFPEVSLPEHRSCSRLLHIHQNRPGILTQINTIFAEEGINIAGQYLQTSADIGYVVIDVETERSEEALVKLKEIEGTIRARILH

SEQ ID NO: 64595 - DNA, 1299 bp, Bradyrhizobium japonicum USDA 110
  CDS (1)..(1299): transl_table=11
gtgcaccgtccgcggtttatgagctgcggcaaagccgcgattttaggagattctatgccagccccaggccaaagccctgagcggagcgcgaaggcgctgctgctcgaaggcgtcaatgacagtgccgtggacctgttccggagcgcgggctttgccaatgtcgagcggctgaccaaggcgctggacggcgaggcgctgcgccaggcgctcaagggcgtgtcgttgctcggcatccgctcgcgcacccagattaccgacgacgtgctggcggccgccgatcagctccttgcggtcggctgcttcagcgtcggcaccaaccaggtcgatctgctggcggcgcgcaagcgcggtattcccgtcttcaacgccccgttctccaacacgcgcagcgtcgccgaactcgtgatcggcgagatcgtgatgctgctgcggcagattttcccgcgctcggtctcggcccatgacggcggctgggacaagtccgcgaccggcagccgcgaggtccgcggccgcaccctcggcatcatcggctacggcaatatcggctcgcagctctcgaccctggccgaggccatgggcatgcgggtgatctattacgaccgcaccgacaagctccgccacggcaacaccgagccggtcgagaagctcgaggagctgctggcgcagagcgacgtcgtcagcctgcacgtgccggagacgccggagacatcaggcatgatcggcgagaaggagctgcgggcgatgaagccgggctccttcctgatcaacaacagccgcggcaccgtggtcgatctcgatgcgctggcgcgcgccttgcgcgacggtcacatcgccggtgccgccatcgacgtgtttccggtcgagccgtcgtcgaattccgatcgtttcaagagcccggtgcagggcctcggcaacgtcatccttaccccgcatatcggcggctcgaccgaggaggcgcaggagcgcatcggcggcgaggtcgcgcgcaagctggtcgactatttcatcaccggctcgaccatgggtgcggtgaacttcccggaggtgcagttgcatctgcgtccctccggcgcgcgcttcagccatgtccatcgcaacgtgccgggcatgctgcggcggctcaacgaggtcttcctccagcgcgacatcaacatcgcggcgcaatatctggagaccgccggcgacctcggctacgtcgtgctcgatgccgatctcggcggccaggattcgggcgaattgctccagcagatccgcgctctcgacggcacggtcggcgcaaggctggtattcgagcactaa

SEQ ID NO: 64596 - protein, 432 aa, Bradyrhizobium japonicum USDA 110
MHRPRFMSCGKAAILGDSMPAPGQSPERSAKALLLEGVNDSAVDLFRSAGFANVERLTKALDGEALRQALKGVSLLGIRSRTQITDDVLAAADQLLAVGCFSVGTNQVDLLAARKRGIPVFNAPFSNTRSVAELVIGEIVMLLRQIFPRSVSAHDGGWDKSATGSREVRGRTLGIIGYGNIGSQLSTLAEAMGMRVIYYDRTDKLRHGNTEPVEKLEELLAQSDVVSLHVPETPETSGMIGEKELRAMKPGSFLINNSRGTVVDLDALARALRDGHIAGAAIDVFPVEPSSNSDRFKSPVQGLGNVILTPHIGGSTEEAQERIGGEVARKLVDYFITGSTMGAVNFPEVQLHLRPSGARFSHVHRNVPGMLRRLNEVFLQRDINIAAQYLETAGDLGYVVLDADLGGQDSGELLQQIRALDGTVGARLVFEH

SEQ ID NO: 64597 - DNA, 1242 bp, Xylella fastidiosa Temecula1
  CDS (1)..(1242): transl_table=11
atgccaccgacgaaaacttcttttcccaaacaagacatccgaattttgctgctagaaggggtcagtcacagcgggatcgaaacgttccgtgcggcgggttactcgcagatcaagatccatacgacatcgctgccggaagaggctctgcaagcagagattgcggaagcgcacatcatcggtattcgctcgcgcactcaattgaatgcagcggtgctagggcatgccaaacgtctgatggccataggttgtttctgcatcgggacgaatcaggtggacttggatacggcggaattgagcgggatccccgtgttcaacgcgccatattccaatacgcgtagtgtggctgagctgatcattgcggaagcaattttgttgctacgcaggatcccgcagaaaaatgccgaatgccatcgtgggggctggtccaaatctgccatcaatagtcatgaagcacgcggtaaggtgttgggcatcgtgggatacggtcacatcggtacgcaagtcagtgtgctggcggaggcgatggggatgcaggtgattttctacgatattgaatccaagctctctttgggcaatgcgcgtccagcggcaagcttggatgagttgctcggcattgccgacgtagtgacgctgcatgtaccggaaacggcagcgaccaagaatatgcttggtcatgcagaattggcacgaatgaaaccgggggcgcatttgattaatgcatcgcgcggtacggttgtggagattgacgcgctggatgcggctctggtgtcggggcatctgggcggggcggcagtggatgtattcccaagcgaacccaagggcaatagtgatccgttcatctcgccattgagcaggcacgacaatgtgattttgacgccacatattgggggcagcacgctagaagcgcaggacaatattgggattgaggtggcagccaaattgatccgttatagcgataacggcagcacgctatcggcggtgaatttccctgaagtcagtttgccggagcacgtggggagtatgcgtttgctgcatatccaccgtaatgtgcccggggtgctgtcgcatatcaacgagctgttctcgcgtcacaacgtcaatattgatggtcagttcctgcgtaccgatgccacgttgggctatgtggtcattgatatcggtgccagtcagacgcaggctctggcattaaaagaggcattgacgcaggttcccggaacgctgcgtacccgtctgctgtactga

SEQ ID NO: 64598 - protein, 413 aa, Xylella fastidiosa Temecula1
MPPTKTSFPKQDIRILLLEGVSHSGIETFRAAGYSQIKIHTTSLPEEALQAEIAEAHIIGIRSRTQLNAAVLGHAKRLMAIGCFCIGTNQVDLDTAELSGIPVFNAPYSNTRSVAELIIAEAILLLRRIPQKNAECHRGGWSKSAINSHEARGKVLGIVGYGHIGTQVSVLAEAMGMQVIFYDIESKLSLGNARPAASLDELLGIADVVTLHVPETAATKNMLGHAELARMKPGAHLINASRGTVVEIDALDAALVSGHLGGAAVDVFPSEPKGNSDPFISPLSRHDNVILTPHIGGSTLEAQDNIGIEVAAKLIRYSDNGSTLSAVNFPEVSLPEHVGSMRLLHIHRNVPGVLSHINELFSRHNVNIDGQFLRTDATLGYVVIDIGASQTQALALKEALTQVPGTLRTRLLY

SEQ ID NO: 64599 - DNA, 1230 bp, Pseudomonas syringae pv. tomato str. DC3000
  CDS (1)..(1230): transl_table=11
atgagcaagacttccctcgacaagagcaagatcaagttccttcttctcgaaggcgtccatcaatccgctgtcgacgtcctcaaggcagccggctacaccagcatcgagtaccacaccaagtctctgccggaagccgaactgaaggaaaagatcgccgacgctcactttatcggtatccgctcccgcacccaactgaccgaagagctgttcgatagcgccaagaaactggtcgcagtgggctgcttctgcatcggcaccaatcaggttgacctcaacgcagcgcgcgaacgcggtattgcggtgttcaacgcgccttactccaatacccgttcggttgccgaactggtgctggccgaggcgattctgctgttgcgcggcatcccggaaaagaacgcgtcctgccaccgtggcggctggatcaagagcgcggccaactccttcgagatccgtggcaagaagctcggcatcgtcggctacggctcgatcggcacgcaattgtcagtgctggctgaaggcctgggcatgcaggtgtatttctacgacacgctgaccaagttgccactgggcaacgccactcaggtttccagcctgaacgagctgctgggcatgtccgacatcgtcacgctgcacgttccggaaaccaccgaaacccagtggatgatcggcgagaaagaaatccgcgcgatgaaaaagggcagcatcctgatcaacgccgcgcgcggcacagtcgtcgaactggatgccctggctgacgcgatcaaggacaaacacctgatcggagccgccattgacgtgttcccggtcgagccacgctcgaacgacgacatctttgaaagcccgctgcgtggcctggacaacgtgatcctgaccccgcacatcggtggttccactgccgaggcgcaggccaacattggtctggaagtggcagaaaagctggtcaagtacagcgacaacggtacgtcggtgtcctcggtcaacttcccggaagtggcgctgcctgcgcacccaggcaaacaccgcctgctgcacatccacgaaaacatcccgggcgtactcagcgagatcaacaaggtcttcgccgaaaacggcatcaacatctccggtcagttcttgcagaccaacgagaaagtcggctacgtggtgatcgacgttgacgccgagtactcggacctggcacaggccaagctgcaacacatcaaaggcaccatccgcagccgcgtgttgttctga

SEQ ID NO: 64600 - protein, 409 aa, Pseudomonas syringae pv. tomato str. DC3000
MSKTSLDKSKIKFLLLEGVHQSAVDVLKAAGYTSIEYHTKSLPEAELKEKIADAHFIGIRSRTQLTEELFDSAKKLVAVGCFCIGTNQVDLNAARERGIAVFNAPYSNTRSVAELVLAEAILLLRGIPEKNASCHRGGWIKSAANSFEIRGKKLGIVGYGSIGTQLSVLAEGLGMQVYFYDTLTKLPLGNATQVSSLNELLGMSDIVTLHVPETTETQWMIGEKEIRAMKKGSILINAARGTVVELDALADAIKDKHLIGAAIDVFPVEPRSNDDIFESPLRGLDNVILTPHIGGSTAEAQANIGLEVAEKLVKYSDNGTSVSSVNFPEVALPAHPGKHRLLHIHENIPGVLSEINKVFAENGINISGQFLQTNEKVGYVVIDVDAEYSDLAQAKLQHIKGTIRSRVLF

SEQ ID NO: 64601 - DNA, 1233 bp, Vibrio parahaemolyticus RIMD 2210633
  CDS (1)..(1233): transl_table=11
atggccaaagtttcactggaaaaagaaaagattaagatcctcttactcgagggacttcacccttcttcagttgaagttcttcaagcagctggttacaccaacattgaatatcacaaaggttcgctttcagaggaagaactgattgaagcagttaaagatacgcacttcatcggtatccgctcccgaacgaatctatccgaggaagtgatcaatgcggcaaacaaactggttgcgattggctgtttttgtatcggaactaaccaagtcgatcttggtgcggcggcaaaacgtggcattcctgtattcaatgcaccgttttcaaacacgcgaagtgtagcagaactcgtgcttggtcagattcttctgctccttcgtgggattcctgaaaagaacgccttggcacaccgtggtatttggaagaagagcgcagacaactcttacgaagcgcgtggtaaacgccttggtatcattggttacggccatatcggcactcagctgggcattattgctgaaaacttaggtatgcgcgtgtactactacgacatcgaaaacaaactatcacttggcaacgcaacgcaaatccacacgatgagcgagctgctaaacaaatgtgatgttatttcgctgcacgtaccagaaacacctgaaacgaagaatatgatgggcgaagaagaatttgctcgcatgaaacctggcgcaatcttcatcaacgccgctcgcggtaccgttgttgatattcctgcgctttgccacagcctagaagcaggtcacttagctggcgcagcaatcgacgtattcccagttgaaccaaaaacaaacgctgacccgtttgaatctccactacagaaattcgataacgtcattctaacgccacacgtgggcggctctactcaagaagcacaagaaaacatcggcgtggaagtagcgggtaaactggcgaaatattcagataatggttcaacactatcaagcgttaacttccctgaagtatctctgcctgaacacggtcgtgagtgctctcgcttactgcacattcacaaaaaccgcccaggtattctgactcaaattaacaccatcttcgcagaagaaggcatcaacatcgcagcgcagtacctacaaactgaagctgagatcggctacgtagttattgatgtggaaactgagcgttcagaagaagcactaactaagctgaaaagcattgaaggcacgattcgtgctcgtattcttcattaa

SEQ ID NO: 64602 - protein, 410 aa, Vibrio parahaemolyticus RIMD 2210633
MAKVSLEKEKIKILLLEGLHPSSVEVLQAAGYTNIEYHKGSLSEEELIEAVKDTHFIGIRSRTNLSEEVINAANKLVAIGCFCIGTNQVDLGAAAKRGIPVFNAPFSNTRSVAELVLGQILLLLRGIPEKNALAHRGIWKKSADNSYEARGKRLGIIGYGHIGTQLGIIAENLGMRVYYYDIENKLSLGNATQIHTMSELLNKCDVISLHVPETPETKNMMGEEEFARMKPGAIFINAARGTVVDIPALCHSLEAGHLAGAAIDVFPVEPKTNADPFESPLQKFDNVILTPHVGGSTQEAQENIGVEVAGKLAKYSDNGSTLSSVNFPEVSLPEHGRECSRLLHIHKNRPGILTQINTIFAEEGINIAAQYLQTEAEIGYVVIDVETERSEEALTKLKSIEGTIRARILH

SEQ ID NO: 64603 - DNA, 1233 bp, Salmonella enterica subsp. enterica serovar Typhi Ty2
  CDS (1)..(1233): transl_table=11
atggcaaaggtatcgctggagaaagataaaattaaatttctgctggttgaaggggtgcatcaaaaggcgctggaaagccttcgtgcggcaggttacaccaacattgaatatcacaagggcgcgctggacgctgaacagttgaaagcgtccatccgcgatgcccacttcatcggtctgcgatcccgtactcatctgacagaagaagtgattaacgccgcagagaagctggtggcgattggctgtttttgcatcggcaccaaccaggtggatttaaatgcggcggcaaaacgcggtattccggtctttaacgcgccattctcgaatacccgttccgtggcggagctggtgattggcgagctattgctgctgctgcgcggcgtgccggaagcgaacgccaaagcgcaccgcggcgtatggaataaactggcggcgggatcgttcgaagcacgcggtaaaaagcttggcattatcggttacggccatatcggaacgcagttgggcattctggcggaatcgctggggatgcatatctatttctatgatattgaaaataaactgccgctcggtaatgcaactcaggtgcagcacctgtctgaattgctgaatatgagcgatgtggtcagtctgcacgtacctgaaaacgcctccaccaaaaacatgatgggcgcaaaagagatagccctgatgaagccgggttcgctgctgattaacgccgcgcgcggtacggtagtggatatcccggctttgtgcgacgcgctggcgacgaaacatctggcgggggcggctatcgacgtcttcccgacggaaccggccactaatagcgatccgtttacctctccgctgtgcgaattcgataacgtgatcctgacgccgcatatcggcggctcgacgcaggaggcgcaagaaaacatcggtctggaagtcgcaggaaaactgattaagtactcggataacggctcgacgctgtccgccgtgaacttcccggaagtgtcgctgccgctgcacggcggtcgtcgcctgatgcacatccacgaaaaccgcccgggcgtattgaccgcgcttaaccagatctttgccgagcagggcgttaacattgccgcacagtatctgcaaacctccgcccgaatggggtatgtggtaattgatatagaagccgatggcgatgtggcggagaaagcgctgctggcgatgaaggcgattccgggcaccattcgcgcccgtctgctgtactaa

SEQ ID NO: 64604 - protein, 410 aa, Salmonella enterica subsp. enterica serovar Typhi Ty2
MAKVSLEKDKIKFLLVEGVHQKALESLRAAGYTNIEYHKGALDAEQLKASIRDAHFIGLRSRTHLTEEVINAAEKLVAIGCFCIGTNQVDLNAAAKRGIPVFNAPFSNTRSVAELVIGELLLLLRGVPEANAKAHRGVWNKLAAGSFEARGKKLGIIGYGHIGTQLGILAESLGMHIYFYDIENKLPLGNATQVQHLSELLNMSDVVSLHVPENASTKNMMGAKEIALMKPGSLLINAARGTVVDIPALCDALATKHLAGAAIDVFPTEPATNSDPFTSPLCEFDNVILTPHIGGSTQEAQENIGLEVAGKLIKYSDNGSTLSAVNFPEVSLPLHGGRRLMHIHENRPGVLTALNQIFAEQGVNIAAQYLQTSARMGYVVIDIEADGDVAEKALLAMKAIPGTIRARLLY

SEQ ID NO: 64605 - DNA, 1587 bp, Prochlorococcus marinus subsp. marinus str. CCMP1375
  CDS (1)..(1587): transl_table=11
atgacaaaagttctagtttcagacccaatagaccatgcgggcatagacatcctgagtcaagtctctcaggttgatcaacgtttaggtctttcatccaatcagctaaaagaaattataggagactatgaagctttaatgattcgttcaggtactcaagtcaattctgaaattattgaggctggagtcaatttaaagattataggtagggctggtgttggtgtagataatgttgacgttcctgccgctacgaagcgtggagtgatcgttgtaaattctcctggaggcaatactattgctgctgctgagcatgctcttgctttactcttgtctctatcaaggaatattcctcaagcacatttaagtactatctcgggaaagtgggatagaaagaaatttgttggtaacgaactttataagaaaattttaggagtggtgggccttgggaaaatcggctctcatgttgcaaaggttgcaaatgccatgggaatggatgttatggcttttgatccttttgtttctgcagaacgagctttacagatgcaggtaagacttagttctatagatgatctttttaaagaggctgacttcataactcttcatttgcctaggacttcagaaacagaaaatctagttgacgctaaattgctttcctctatgaagcaaaatgcgagattggttaattgtgctagaggcggaataattgatgaaactgcacttgcagaggcattgaattctaatgttattggtggtgctgctttagatgtatattctcaagagcctttgaagaatgactctccattattgaatgttaaaaataatctgatccttacacctcatttaggggcatctactgcagaagcccaacagaatgttgctatagatgttgcagaacaaattagagatgttcttttaggccttcctgcaagaagtgctgtgaatataccaggcctttcagcagaaataatggatagtcttaaacctcatttgcaacttgctgaatcacttggtttattagccagtcaagtttcaggaggtcagattcagaaaattgaagtcaagcttcaaggtgaattttcccaacatccttcccagccattggtaatagcaaccttgaaaggattgctttctagtgcccttggcaacaggattaattacgtcaatgcttctttagaagcccaaggtagaggaataagtgttgaggaagtgaaagatgaagccagccctgatttcccaggaggttcactacagctaagaacctttgcggacaaaggtactaatagtgtgactggaacagttttagctgatggggaattgcgaatttctagcattgatgaatttccaatcaatgtttctcctagcaggtacatgctttttacaagacatcgagatatgccaggcattattgggaaattaggttcattacttgggactcataatgtcaacattgcagctatgcaggttggaagaagaatagttagaggagaggctgtaatggttttgagtattgatgatccaatcccatcagaacttttgacctctattctcgcggtcgagggaattaatcaagcccatgcagttaccttttaa

SEQ ID NO: 64606 - protein, 528 aa, Prochlorococcus marinus subsp. marinus str. CCMP1375
MTKVLVSDPIDHAGIDILSQVSQVDQRLGLSSNQLKEIIGDYEALMIRSGTQVNSEIIEAGVNLKIIGRAGVGVDNVDVPAATKRGVIVVNSPGGNTIAAAEHALALLLSLSRNIPQAHLSTISGKWDRKKFVGNELYKKILGVVGLGKIGSHVAKVANAMGMDVMAFDPFVSAERALQMQVRLSSIDDLFKEADFITLHLPRTSETENLVDAKLLSSMKQNARLVNCARGGIIDETALAEALNSNVIGGAALDVYSQEPLKNDSPLLNVKNNLILTPHLGASTAEAQQNVAIDVAEQIRDVLLGLPARSAVNIPGLSAEIMDSLKPHLQLAESLGLLASQVSGGQIQKIEVKLQGEFSQHPSQPLVIATLKGLLSSALGNRINYVNASLEAQGRGISVEEVKDEASPDFPGGSLQLRTFADKGTNSVTGTVLADGELRISSIDEFPINVSPSRYMLFTRHRDMPGIIGKLGSLLGTHNVNIAAMQVGRRIVRGEAVMVLSIDDPIPSELLTSILAVEGINQAHAVTF

SEQ ID NO: 64607 - DNA, 1242 bp, Photorhabdus luminescens subsp. laumondii TTO1
  CDS (1)..(1242): transl_table=11
atggttaaggtatctctggaaaaagataagattaaatttttgctattagaaggtgtacatcagagcacggtagaaaatctacgagcagccggttatagcaatatcgaatatcataagggagcattagatcccaaagagttaaaagaggcaattcgtgatacccattttgttggtatccgttcccgcacacaactgaccgaagacatttttcaggcggccgaaaaattggttgctgtaggctgtttttgcattggtaccaatcaggttgatctgaaagcggctgcaaaacgtggtatccctgtctttaatgcgccattttctaatacccgttctgttgctgaaatggtccttggtgagctgttgttattgctgcgtcgtatccctttggcgaatgcgaaagctcatcgtggcgtgtgggataagcaggctaaaggctgctatgaagttcgtggtaaaaaactgggcattatcggttacggtcatattggcactcagcttggtattctggctgaaaatattggtatggatgtctacttttacgatattgaaaacaaattgccgttaggtaacgctcatcaggtacgtcacttgtcagaattactgaatatgagtgatgtggttagtttgcatgtaccagaaacgccatcaactaaaaatatgattggtgcaactgaactgaccctgatgaaaccgggttctatcctgattaatgcttcacgcggaacggtggtggatatcccggcattatgtgatgcattggaaagtgaacatctgtcaggggcggctgtggatgtgttccctgttgaaccggcaaccaataatgatccatttgagtcaccgttacgtaaatttgataacgtgttgctgaccccacatattggtggttctacccaagaagcgcaggaaaacattggttatgaagtcgcaggaaagttagcgaaatactctgataatggttctaccttatcagcagtaaacttcccagaagtgtctcttcctgttcatgctgatgataccaaccggtttctacatattcatgaaaatcgcccgggtatattgaacagtattaaccaggtgtttgctgaacaggatatcaatattgccgctcagtatctgcgtaccagtggggacatgggttatgtggtgattgatattgtgactgaaaatccggctcaagctgaaatggtatttcagaaactgaaagcattgccgggtactatccgttctcgtctgctttactga

SEQ ID NO: 64608 - protein, 413 aa, Photorhabdus luminescens subsp. laumondii TTO1
MVKVSLEKDKIKFLLLEGVHQSTVENLRAAGYSNIEYHKGALDPKELKEAIRDTHFVGIRSRTQLTEDIFQAAEKLVAVGCFCIGTNQVDLKAAAKRGIPVFNAPFSNTRSVAEMVLGELLLLLRRIPLANAKAHRGVWDKQAKGCYEVRGKKLGIIGYGHIGTQLGILAENIGMDVYFYDIENKLPLGNAHQVRHLSELLNMSDVVSLHVPETPSTKNMIGATELTLMKPGSILINASRGTVVDIPALCDALESEHLSGAAVDVFPVEPATNNDPFESPLRKFDNVLLTPHIGGSTQEAQENIGYEVAGKLAKYSDNGSTLSAVNFPEVSLPVHADDTNRFLHIHENRPGILNSINQVFAEQDINIAAQYLRTSGDMGYVVIDIVTENPAQAEMVFQKLKALPGTIRSRLLY

SEQ ID NO: 64609 - DNA, 1230 bp, Vibrio vulnificus YJ016
  CDS (1)..(1230): transl_table=11
atggccaaagtttcactggaaaaagagaaaataaaaatcttacttcttgaaggcctccacccttcttcggtagaagtgctacaagcggcaggttacaccaatatcgagtaccacaagggttccttgtcggatgcggatcttctagaagcggttaaagatgcgcacttcatcggtattcgctctcgcaccaacttaaccgaagaagtcattaacgcagcgcaaaaactggttgcgattggttgcttctgtattggtaccaaccaagtggatctaaatgcagcggcaaaacgtgggattcccgtgtttaatgccccattctctaacacgcgtagcgtagcggaattagtcttgggtcaaatcctgctgttacttcgtggtattccagaaaaaaatgccttggcacaccgtggtatttggaaaaagagtgcagacaattcttacgaagctcgtggtaagcgtcttggtattattggttacggccatatcggtactcagctcggtattattgctgaaaacttgggtatgcgtgtttacttctacgatatcgagaataagctctcgctaggtaatgcaactcaaatcccaaccatgagcgaattgctcaacaaatgtgatgtgatttctctacacgtaccagaaacgccagacacgaaaaacatgatgggtgcagaagagtttgctcgtatgaagcctggtgctattttcatcaacgcagctcgtggcactgtggtcgatattgaagcgctatgccattcactcgaatcaggtcatattgctggcgcagcgattgacgttttcccggttgaacctgcaaccaacgcagatcctttcgagtcgccattgcaaaaattcgacaacgtgattcttactccacacgttggcggctcaactcaagaagcacaagagaacattggtgttgaagtcgcaggcaaattagcgaagtattcagacaacggctcaacgctgtctagcgttaacttccctgaagtgtcactgccagaacatcgcagttgttcacgcttgctgcacattcaccaaaaccgcccgggcattctgacgcaaatcaacaccatttttgctgaagaaggcatcaacatcgccggtcaatacctgcagacctcagctgatattggttatgtggtgattgacgtagaaaccgagcgctctgaagaagcactggtcaaacttaaagagatcgaaggcacaattcgagctcgaatccttcactaa

SEQ ID NO: 64610 - protein, 409 aa, Vibrio vulnificus YJ016
MAKVSLEKEKIKILLLEGLHPSSVEVLQAAGYTNIEYHKGSLSDADLLEAVKDAHFIGIRSRTNLTEEVINAAQKLVAIGCFCIGTNQVDLNAAAKRGIPVFNAPFSNTRSVAELVLGQILLLLRGIPEKNALAHRGIWKKSADNSYEARGKRLGIIGYGHIGTQLGIIAENLGMRVYFYDIENKLSLGNATQIPTMSELLNKCDVISLHVPETPDTKNMMGAEEFARMKPGAIFINAARGTVVDIEALCHSLESGHIAGAAIDVFPVEPATNADPFESPLQKFDNVILTPHVGGSTQEAQENIGVEVAGKLAKYSDNGSTLSSVNFPEVSLPEHRSCSRLLHIHQNRPGILTQINTIFAEEGINIAGQYLQTSADIGYVVIDVETERSEEALVKLKEIEGTIRARILH

SEQ ID NO: 64611 - DNA, 1206 bp, Bdellovibrio bacteriovorus HD100
  CDS (1)..(1206): transl_table=11
atgagcgctcaaagaatcttgttggttgaaaacattcacaccgttgcgaaggaaaggctggaggaagaaggctacaaagtcgatcttatcacacatgctccttccgaggacgaactgctgaaaattcttccgaactatgatgtgctggggatccgttctaaaacggaagtcaccaaaaaagttctggattccaacaagcatctggtcaccattggctgcttctgtattggaacaaatcaagtggaccttctgaccgcgcgcgagcggggtattccggtgttcaatgctcctcattctaacactcgttccgtggcggaactggtcattgcggaaatgatttcattgtcccgtcaactgggcgaccgaaacacccaagctcatttgggcgagtgggtgaagtctgccgtgggttcgaaagaagtccgtggcaaaacattggggatcgtgggttatggtcacatcggaagtcaggtcagcattctggctgaatccatgggcttgaaagtgctgttctatgatgtgctgaagaaacttccactggggaatgccatggtacagaactcgctggaagatcttttgcgcagttcagactttgtgacattgcacgtgcctgaaactccggaaaccaaagacatgattggcgcccgtgaactgtcgatgatgaaaaaaggcagcttcctgatcaacgccagccgtggcaccgtggtggtgattgacgatctggtgaagtcccttcaggaaaaacatctggcgggttgtgcgatcgacgtgtttccggaagagccggcatcgaacaaagaaaaattcaaatccccattgcagggaattcccaacgtgattctgactccgcacatcgcgggcagcacggaagaagcccagtatgccatcggccttgaagtggcggaaagcttccgtcgttatctgaaaatcggttcttcgccgggggcggtgaatttcccgaatgtggatctgcccgtgaagcaagggacatcccgtattttgaacgtgcaccgcaatgagccgggtgtcttgggtgaaatcaacggcttgatttccaaagccggtgcgaatatcgaaggtcagtatctgtcgacggatgaaaagatcggttatctggtcatggacttgcattcaagtcaggcgcacacactggcggcggatatcgagaaactttcccgttccatccgcacacgcgtggtttactag

SEQ ID NO: 64612 - protein, 401 aa, Bdellovibrio bacteriovorus HD100
MSAQRILLVENIHTVAKERLEEEGYKVDLITHAPSEDELLKILPNYDVLGIRSKTEVTKKVLDSNKHLVTIGCFCIGTNQVDLLTARERGIPVFNAPHSNTRSVAELVIAEMISLSRQLGDRNTQAHLGEWVKSAVGSKEVRGKTLGIVGYGHIGSQVSILAESMGLKVLFYDVLKKLPLGNAMVQNSLEDLLRSSDFVTLHVPETPETKDMIGARELSMMKKGSFLINASRGTVVVIDDLVKSLQEKHLAGCAIDVFPEEPASNKEKFKSPLQGIPNVILTPHIAGSTEEAQYAIGLEVAESFRRYLKIGSSPGAVNFPNVDLPVKQGTSRILNVHRNEPGVLGEINGLISKAGANIEGQYLSTDEKIGYLVMDLHSSQAHTLAADIEKLSRSIRTRVVY

SEQ ID NO: 64613 - DNA, 1425 bp, Gibberella zeae PH-1
  CDS (1)..(1425)
atgattgagatccatgctattgacggccgagagcggactacggcagcttcaccaaacatgacgaagccgcaaggctgggaccaaaacgctgccacttcaccgctcgcctctttccagtccccccccagcctcagtgctgccctccctaaccgtggcgcgcccaagaacctcaagcccttcaacaccaaggacatcaagattctacttctcgagaatgtcaatgtcactggacaagaaattctgaaggcccagggctaccaggtcgaggctctcaagacctctcttcctgaggaccagctcattgagaagattcgcgacgtccaagtcattggtatccgatccaagacaaagctcaccgagaaggtcctccgtgaggccacaaacctcctcgtcatcggctgcttctgtattggtaccaaccaggtcgacctcgagtttgccgccaagaatggtatcgccgtcttcaactcccccttcgccaactcgcgcagtgtcgctgagcttgtcattgccgagatcatcacccttgcccgtcaactcggcgaccgatccaacgagatgcaccgtggtacctggaacaaggtcagctccaagtgctgggagattcgaggcaagactttgggaattgtcggctacggtcacattggttctcagctgtctgtcctcgctgaggctatgggtatgaacgtcatctactacgatgtcgttaccctgatggctcttggtaccgccagccaggtccctactcttgagaagcttctgggcgaggccgactttgtcaccctccacgtccccgatctccccgagactcgcaacatgatctccactgctgagttcgagcagatgaagactggttcttaccttatcaacgccagccgtggtagcgtcgtcgacattgccgctctcatcaaggccagccgctccggcaaggtcgctggtgctgctcttgatgtgttcccctccgagcccgccgccaacggtgactacttcaccaacgacctcaatgtctggggcgaggacctccgaagcttgaagaaccttattctgactccccacatcggtggtagcaccgaggaggcccagcgtgctatcggtatcgaggtcagcgaggctttggtgcgttacatcaaccagggtatcactctgggcagcgtcaacatccccgaggtccagctgcgttcgctgacttcggacgaacccgacaccgctcgtgtcatcttcattcaccgaaacgtccccggtgtgctccgaaaggtcaacgaaattctgggagatcacaacgtcgacaagcagatttccgacagtagaggtgacaacgcctacctgatggctgatatcagcaacatcaagtatgagcaaatcaaggatatctacgacagccttgaaggtcttagcgctcgcgtcatgacccgtatcttgtactaa

SEQ ID NO: 64614 - protein, 474 aa, Gibberella zeae PH-1
MIEIHAIDGRERTTAASPNMTKPQGWDQNAATSPLASFQSPPSLSAALPNRGAPKNLKPFNTKDIKILLLENVNVTGQEILKAQGYQVEALKTSLPEDQLIEKIRDVQVIGIRSKTKLTEKVLREATNLLVIGCFCIGTNQVDLEFAAKNGIAVFNSPFANSRSVAELVIAEIITLARQLGDRSNEMHRGTWNKVSSKCWEIRGKTLGIVGYGHIGSQLSVLAEAMGMNVIYYDVVTLMALGTASQVPTLEKLLGEADFVTLHVPDLPETRNMISTAEFEQMKTGSYLINASRGSVVDIAALIKASRSGKVAGAALDVFPSEPAANGDYFTNDLNVWGEDLRSLKNLILTPHIGGSTEEAQRAIGIEVSEALVRYINQGITLGSVNIPEVQLRSLTSDEPDTARVIFIHRNVPGVLRKVNEILGDHNVDKQISDSRGDNAYLMADISNIKYEQIKDIYDSLEGLSARVMTRILY

SEQ ID NO: 64615 - DNA, 1401 bp, Candida glabrata CBS 138
  CDS (1)..(1401)
atggatattaaccctcttcaagattctttccaaagagcaatgaacctgtcaagatcaccaggtgctgtttccacttcacctactcaatcattcatgaacactctaccccgtcgtttgagtgtctcaaagcaacagaaagcccttaaaccattctctacaggtgatatgagaatccttctactggaaaatgtcaaccaaactgctgttgacattttcaaggaccaaggttatcaagtcgagttttacaaatcctctctaccggaagaagagttaattgaaaagattaaggatgtacatgctattggtattagatcgaaaacgaagctaactgccaatatcttgaagcacgctaagaacctagtcgttattggttgtttctgcatcggtacaaatcaagttgaccttgattatgctgcaagcatcggtgttgccgtgttcaactctcctttctcaaactctagatccgtcgctgaactagtcattgctgaaatcatctcccttgctagacaattgggtgacagatccatcgaattacacaccggaacatggaataaggtttctcagaaatgttgggaagtcagaggcaagacacttggtgttgttggttatggtcatattggttcccagttatctgttcttgccgaatctatgggtatgcatgtattatactacgatattgtcaccattatggctttaggtaccgctaagcaggtttctacgctagatgagcttttgaacaagtctgatttcgttactttacatgttccagaaactccagaaaccaaaaacttattgtcggccccacaatttgctgctatgaaggatggtgcttacgtcatcaatgcatccagaggtactgttgttgacatcccatctctaatccaagctatgaaggcaggtaagattgctggtgcagctttggatgtttatccaaatgaaccagcaaagaatggtgccgatgcattctccgataaattgaacaactggacctcagaattagtttcactgccaaatgtcatccttaccccacacatcggtggttccactgaagaagcacaaagtgctatcggtatcgaagttgcacatgctttgagtaaatacataaatgaaggtatttccgttggatcagtaaacttcccagaagtctccttgagatcgctagacttggaccaagaaaacactgtgcgtgttctatacatccacaagaatgttccgggtgtgttgaagacggtcaacaacattttatcaaaccacaatatcgaaaagcaattttccgattcctgtggtgagattgcctacctgatggctgacatttcagatgtgaaccaaagtgatatcaaacaaatctacgatgaattggataagacttcatcaaagatttccatcagacttctatattag

SEQ ID NO: 64616 - protein, 466 aa, Candida glabrata CBS 138
MDINPLQDSFQRAMNLSRSPGAVSTSPTQSFMNTLPRRLSVSKQQKALKPFSTGDMRILLLENVNQTAVDIFKDQGYQVEFYKSSLPEEELIEKIKDVHAIGIRSKTKLTANILKHAKNLVVIGCFCIGTNQVDLDYAASIGVAVFNSPFSNSRSVAELVIAEIISLARQLGDRSIELHTGTWNKVSQKCWEVRGKTLGVVGYGHIGSQLSVLAESMGMHVLYYDIVTIMALGTAKQVSTLDELLNKSDFVTLHVPETPETKNLLSAPQFAAMKDGAYVINASRGTVVDIPSLIQAMKAGKIAGAALDVYPNEPAKNGADAFSDKLNNWTSELVSLPNVILTPHIGGSTEEAQSAIGIEVAHALSKYINEGISVGSVNFPEVSLRSLDLDQENTVRVLYIHKNVPGVLKTVNNILSNHNIEKQFSDSCGEIAYLMADISDVNQSDIKQIYDELDKTSSKISIRLLY

SEQ ID NO: 64617 - DNA, 1413 bp, Kluyveromyces lactis NRRL Y-1140
  CDS (1)..(1413)
atggctttcggtcaacagatcaataatttacaggattccttcgaggctgctttgaacttatccagttctccaggtgcagtttccacctctccaactcaatcctttatgaacacattgccacacagaatcaatgctgcaaagcaacagaaggctttgaagccattctctacgggtgacatcaagatccttcttttggagaatgttaaccaaacagctattgagattttcaacaagcaaggttatcaagtcgaattccacaaatcctctttaccagaagccgaattgattgagaagatcaaggatgtccacgccattggtatcagatccaaaactaagttgacaccggaaattttgaaacacgctaagaatttggttgtcattggttgtttctgtattggtactaaccaagttgaccttgacttcgctgccaagcatggtattgctgttttcaactctccattttccaactccagatctgttgccgaactagttattgcagaaatcattaccctagctagacaattaggtgacagatctattgaattacacaccggtacttggaacaaggtttctgctgcctgttgggaagtaagaggtaagactttgggtatcatcggttacggtcatattggttctcaattatctgttttggctgaagctcttggtatgaacgttctctactatgatattgtcactattatgagtttgggtactgctaagcaggtttctactttgaatgaattgttgaacaattctgactttgtgacttgtcatgttccagctactccagaaactaaaaacttattgtctggtcctcaatttgctgctatgaaggatggctcatacgttatcaacgcatctagagggactgtggttgatattcctgctttgattcaagcaatgagagcgggcaagattgccggtgccgctttggatgtgtatccaaatgaacctgctaagaatggtgctggtgccttcagtgataatttgaacacatggacaactgatttggtctccttaccaaatgttatcttgactccacacattggtgggtctactgaagaagcccaaagttctattggtatcgaagtggctactgcactaacgaaatacatcaacgaaggtaacaccgtcggtgccgttaacttcccagaagtttcattaagagcattagatctggatcaagaaaacactgtacgtgtactatatatccatcaaaatgttcctggtgttttgaaaactgtcaacaacatcttgtccaaccacaacatcgaaaagcagttctctgattctaacggggacatcgcatatttgatggctgatatttcaaatgttaaccaaagtgatatcaaacaaatatacgatgagttgaacgaaactgactacaagatttcaatcagattactatattaa

SEQ ID NO: 64618 - protein, 470 aa, Kluyveromyces lactis NRRL Y-1140
MAFGQQINNLQDSFEAALNLSSSPGAVSTSPTQSFMNTLPHRINAAKQQKALKPFSTGDIKILLLENVNQTAIEIFNKQGYQVEFHKSSLPEAELIEKIKDVHAIGIRSKTKLTPEILKHAKNLVVIGCFCIGTNQVDLDFAAKHGIAVFNSPFSNSRSVAELVIAEIITLARQLGDRSIELHTGTWNKVSAACWEVRGKTLGIIGYGHIGSQLSVLAEALGMNVLYYDIVTIMSLGTAKQVSTLNELLNNSDFVTCHVPATPETKNLLSGPQFAAMKDGSYVINASRGTVVDIPALIQAMRAGKIAGAALDVYPNEPAKNGAGAFSDNLNTWTTDLVSLPNVILTPHIGGSTEEAQSSIGIEVATALTKYINEGNTVGAVNFPEVSLRALDLDQENTVRVLYIHQNVPGVLKTVNNILSNHNIEKQFSDSNGDIAYLMADISNVNQSDIKQIYDELNETDYKISIRLLY

SEQ ID NO: 64619 - DNA, 1398 bp, Debaryomyces hansenii CBS767
  CDS (1)..(1398)
atgtctgttccacaacaaatcagtgaaacttttcaaaaagctatgaatctttcgggatctccaaatgctgtttcaacttcccctactcaatcatacatgagtcagtatgtctcggctacccaaaagccaaccaaagctttaaagccattttctactggtgatattaagattttgttattagaaaatgtgaatcaaactgctattagtattttccaaaatcaaggttaccaagttgaattctacaagtcgtctttaggtgaagaagaattgatcgaaaagatcaaggaagtacatgctattggtatcagatccaaaactaaattaaccgaaaagattttgcaacacgccagaaacttagtggttattggttgtttctgtattggtaccaaccaagttgatttagaatacgctgccaagtcaggtatttctgttttcaactctccattttctaactccagatctgttgctgaattggttattgctgaaattatcaccttagccagacaattaggtgatcgttctattgaaatgcacactggtacctggaacaaggtaagtgctaagtgctgggaaattagaggtaagactttagggattattggttacggtcatatcggttctcaattatctgtcttagctgaagctatgggtatgaacgttatttactacgatgttcaaatgatcatggctttaggtaactcaaaacaagttgacaccttagatgacttgttacaaagggccgatttcgtcaccctccatgttccagaaacctccgatactaagaacttattatcgtctccacaatttgctgccatgaaggatggtgcctatgttatcaacgcttcccgtggtaccgtggtcgatattgctgctttagtacaagctatgaaatcaggcaaaatcgcaggtgctgcattagatgtctacccacaagaaccagcaaagaatggtgaaggttatttcagcaatgaattaaatgactgggcttctgaattatgctccttgagaaacgttatcttatctccacacattgggggttctaccgaagaagctcaatctgctatcggtgtggaagttgccacctcgttaacgaaatacattaacgaaggtaactccactgctgctgttaacttcccagaagtccaattgagagctttagatttagatcaacaaaactctgtcagagtattgtatatccatcaaaacgttcctggtgttttaaagactgttaacaacatcttatcaaatcacaatattgaaaagcaattcagtgattctagagatgatgttgcatacttgatggctgatatctctgatgttgacattactgacatcaagtccttatatgaacagttagagcaaactccatataaaattgccactcgtttattatactaa

SEQ ID NO: 64620 - protein, 465 aa, Debaryomyces hansenii CBS767
MSVPQQISETFQKAMNLSGSPNAVSTSPTQSYMSQYVSATQKPTKALKPFSTGDIKILLLENVNQTAISIFQNQGYQVEFYKSSLGEEELIEKIKEVHAIGIRSKTKLTEKILQHARNLVVIGCFCIGTNQVDLEYAAKSGISVFNSPFSNSRSVAELVIAEIITLARQLGDRSIEMHTGTWNKVSAKCWEIRGKTLGIIGYGHIGSQLSVLAEAMGMNVIYYDVQMIMALGNSKQVDTLDDLLQRADFVTLHVPETSDTKNLLSSPQFAAMKDGAYVINASRGTVVDIAALVQAMKSGKIAGAALDVYPQEPAKNGEGYFSNELNDWASELCSLRNVILSPHIGGSTEEAQSAIGVEVATSLTKYINEGNSTAAVNFPEVQLRALDLDQQNSVRVLYIHQNVPGVLKTVNNILSNHNIEKQFSDSRDDVAYLMADISDVDITDIKSLYEQLEQTPYKIATRLLY

SEQ ID NO: 64621 - DNA, 1536 bp, Yarrowia lipolytica CLIB122
  CDS (1)..(1536)
atgaaatggatgcgtcatagttcagacaaaatttcgaacctaaaacggcccacagataaaacggtgcattgtcgcacatacgaacagaccagtcgtcgttacatcgccaacaacccccgccacaccatgtccgccgtcaacattcccgtgaacgaaaacgaggtttcggtctcgtcttcgcccatcacgtcgtacggatcgcccgtctcgggctcgttccagggcaagccccgacagcgacgatactcttacaccgctgcgcgaaccaacaagctgaagccgttttccaccggcgacatcaagatcctgctgctggaaaacgtcaaccagacagccattgacattctcgagggccagggctaccaggtggagacccacaagtcgtcgctggacgaggaggagctgattgagaagatccgagatgtgcaggtggttggtatccgatccaagaccaagctcaactcacgggtgctcaaggaggccaagaacctcattgccattggttgtttctgcatcggtaccaaccaggtcgatctcgagtacgccgccaacaacggtattgccgtgttcaactcgcctttctccaactcgcggtctgtggccgagctggtcatctgcgagatcatcatgctgtcgcgacagctgggcgaccgaaacatcgagatgcacgccggcacctggaacaaggtctccgccaagtgctgggagatccgaggcaagactctcggaattgtgggctacggccacattggctcccagctgtccgttctcgccgagtccatgggcatgaacgtcatttactacgacgtgatcatgatcatgggtctcggtaccgccaagcaggtgcccacccttgccgagctgctggcccaggccgactacgtctctctgcacgtgcccgagctgcccgagaccatgaacctcatgtccaaggcccagttcgacggcatgaagaacggctcgtacctcatcaacaacgcccgaggcaaggtcattgacattcccgagctcatctctgccatgaagtccggaaagcttgctggagccgccgtcgacgtcttccccaaggagcctgccaagaacggctcaaacgagtttggctcccacctcaacgagtggaccaatgagctcctcaccctgcccaacctcatcatgtctccccatattggaggctccaccgaggaggcccagtccgccattggtatcgaggtcggcaccgctctcaccaagtacatcaacgagggttcctctgttggtgccgtcaacttccccgaggtcaacctcaacgtggtcaaccacgccgaggagcacgaccacgtgcgaatcctgtacgtgcataagaacgtgcctggtgtgcttctgtccgtcaacgagattttcgcctcccataacattgagaagcagtactctgagtcgcgtggtgatattgcctacctgatggccgacattgctgacgtcgatcaggccgacatcaagactctgtacgagaagctcgagcagacccccttcaagatctccacccgactgttgtattaa

SEQ ID NO: 64622 - protein, 511 aa, Yarrowia lipolytica CLIB122
MKWMRHSSDKISNLKRPTDKTVHCRTYEQTSRRYIANNPRHTMSAVNIPVNENEVSVSSSPITSYGSPVSGSFQGKPRQRRYSYTAARTNKLKPFSTGDIKILLLENVNQTAIDILEGQGYQVETHKSSLDEEELIEKIRDVQVVGIRSKTKLNSRVLKEAKNLIAIGCFCIGTNQVDLEYAANNGIAVFNSPFSNSRSVAELVICEIIMLSRQLGDRNIEMHAGTWNKVSAKCWEIRGKTLGIVGYGHIGSQLSVLAESMGMNVIYYDVIMIMGLGTAKQVPTLAELLAQADYVSLHVPELPETMNLMSKAQFDGMKNGSYLINNARGKVIDIPELISAMKSGKLAGAAVDVFPKEPAKNGSNEFGSHLNEWTNELLTLPNLIMSPHIGGSTEEAQSAIGIEVGTALTKYINEGSSVGAVNFPEVNLNVVNHAEEHDHVRILYVHKNVPGVLLSVNEIFASHNIEKQYSESRGDIAYLMADIADVDQADIKTLYEKLEQTPFKISTRLLY

SEQ ID NO: 64623 - DNA, 1647 bp, Aspergillus nidulans FGSC A4
  CDS (1)..(1647)
atgtcatattgtcatggacaggttattgtcagacttgagattgattgggacgaacttgacaaaacccgcaacggtgctttgctccggacacatagagagtcgcctttcaattctcatccaaattacaaggacagacaaacgctagaagtttgttacaataaatcacattccgcgcctttgatagtagaaatcatggctgcgtctgcaagggacatcaaaactggcaaagatacgttgagccttaatgtttcgcagagccagagtttctcgacttcaccgaacgcttcttttcagtccgctccgtctagccatagtggctcggctttcgcaacccgcttgggcccaatcatcaatgcgaagcacctgaagccgtttgctacagaggatatcaaagttttgctcctggaaaacgtaaaccagactggccgggatatcctcagcaaacaaggatatcaagtggaattcctcaagtcgtcgcttcccgaggatgaacttatagagaagatccgagacgtccatgtgattggaatccgttcaaagaccaagttgacggagcgcgttctaaaggaggcccgtaatctcatagttatcggttgcttttgtattggaacaaaccaggtcgacctgcaatatgcggcggagcatggtattgcagtattcaattcccctttcagcaattctcgaagtgtggctgagttggtcatttgtgaaatcatcgctcttgctcgccaacttggggatcgttccaatgaaatgcacaatggtacttggaacaagaccccaactcctgctcatgatcagactgactcttttcttaaaggcatcatcgggtatggtcacatcggttctcagctttcggttctagcagaggctatgggaatgtccgtcattttttacgacgtggtaaatctcatggagctaggcacggcgcgccaagtttcgaccctagatgacctcctgtctgaggctgatttcattacgtgccatgtgcccgagcttcctgaaacgaagaacatgctggggccaaggcagttcgagcttatgaaagatggtagttatttaatcaatgccagcagggggactgtcgtcgatatacctgccctgatacacgcgatgcgatccggcaagattgcgggtgctgctcttgatgtttatccaaatgaacccgccggaaatggagattacttcaacaacgagctaaactcttggggaactgatctccgttccctgaagaacctcatcctgactccacacattggtggtagtactgaggaggcacagcgtgcaattggcgttgaggtcgcggaagctttggttagatatgtcaacgaaggttccaccttaggcgctgtcaatcttccagaggtcacccttcgttctctcacaatggatgaaccggatcatgctcgggttatatacatccatcacaacgtccccggtgttttgcggaaagtcaatgagatccttggcgatcataacgttgataagcaaatgacggacagtagaggagatgtcagacacttcattacgctgccattagttgcctacttgatggctgatatcagcaacgtcgataacgcgacgatcaaggacttatacgagagactcgaaagtctttcatgtattgaaaccccttcacctatttag

SEQ ID NO: 64624 - protein, 548 aa, Aspergillus nidulans FGSC A4
MSYCHGQVIVRLEIDWDELDKTRNGALLRTHRESPFNSHPNYKDRQTLEVCYNKSHSAPLIVEIMAASARDIKTGKDTLSLNVSQSQSFSTSPNASFQSAPSSHSGSAFATRLGPIINAKHLKPFATEDIKVLLLENVNQTGRDILSKQGYQVEFLKSSLPEDELIEKIRDVHVIGIRSKTKLTERVLKEARNLIVIGCFCIGTNQVDLQYAAEHGIAVFNSPFSNSRSVAELVICEIIALARQLGDRSNEMHNGTWNKTPTPAHDQTDSFLKGIIGYGHIGSQLSVLAEAMGMSVIFYDVVNLMELGTARQVSTLDDLLSEADFITCHVPELPETKNMLGPRQFELMKDGSYLINASRGTVVDIPALIHAMRSGKIAGAALDVYPNEPAGNGDYFNNELNSWGTDLRSLKNLILTPHIGGSTEEAQRAIGVEVAEALVRYVNEGSTLGAVNLPEVTLRSLTMDEPDHARVIYIHHNVPGVLRKVNEILGDHNVDKQMTDSRGDVRHFITLPLVAYLMADISNVDNATIKDLYERLESLSCIETPSPI

SEQ ID NO: 64625 - DNA, 1392 bp, Candida albicans SC5314
  CDS (1)..(1392): transl_table=12
atgtcatctcctcaacaaattgtcaactcattccaacaagccttgaatttatcaggatctccaaatgctgtttctacatcaccaactcaatcattcttgagtcaatatgttccaagcaagccagctaaagctttgaaacctttcaaaactggtgatatcaaaattttattattggaaaatgttaaccaaactgccataaatattttcaaaaaccaaggttaccaagttgaattttataaatcatcattacccgaagatgaattattagagaaaatcaaagatgttcatgccattggtattagatcaaagactaaattaacagaaaaaatccttaaagctgctaaaaacttggtggttattggttgtttctgtattggtaccaatcaagttgatttggaatttgctgccaaatcaggtatcgctgttttcaactctccattttcaaattctagatcagttgctgaattagtcattgctgaaatcattactttggctagacaattgggtgatcgttcaatcgaattgcacactggtacttggaataaagtcagtgccaaatgttgggaaatcagaggtaaaactttgggtattgtaggttatggtcacattggttcccaattatctgtcttggctgaagctatgggtatgaatgttatctattatgatgtcatgaccattatgtctttaggtaactcgaaacaagttgaaagtttggacgaattgttgaaaaaagccgatttcgttactttgcacgtcccagctactccagaaaccaagaacttgttgagtgctccacaatttgccgctatgaaagatggtgcttacgttataaatgcttctagaggtactgttgttgatatcccagctttggttcaagccatgaaagccggaaaaattgctggtgccgctttagatgtttaccctcatgaaccagcaaagaatggtgaaggtttattcagtgatagtttgaatgaatgggccagtgaattgtgttcattgagaaatgtgattttgactccacacattggtggttctaccgaagaagcccaatctgctattggtattgaagttggtaattcattgaccaaatacatcaacgaaggtgcctctcaaggtgctgttaacttcccagaagtttcattgagaccattagatttggatcaacaaaatgttgtcagagtattatatatccatcaaaacgttcctggtgtgttgaaaactgtcaacaatatcttatccaatcataacattgagaaacaattctccgattctcaaggtgatattgcttacttaatggccgatatttctgatgttgatatcagcgatatacagtcattatatgaacaattagaacaaactccatataaaattgctactcgtttgttgtattaa

SEQ ID NO: 64626 - protein, 463 aa, Candida albicans SC5314
MSSPQQIVNSFQQALNLSGSPNAVSTSPTQSFLSQYVPSKPAKALKPFKTGDIKILLLENVNQTAINIFKNQGYQVEFYKSSLPEDELLEKIKDVHAIGIRSKTKLTEKILKAAKNLVVIGCFCIGTNQVDLEFAAKSGIAVFNSPFSNSRSVAELVIAEIITLARQLGDRSIELHTGTWNKVSAKCWEIRGKTLGIVGYGHIGSQLSVLAEAMGMNVIYYDVMTIMSLGNSKQVESLDELLKKADFVTLHVPATPETKNLLSAPQFAAMKDGAYVINASRGTVVDIPALVQAMKAGKIAGAALDVYPHEPAKNGEGLFSDSLNEWASELCSLRNVILTPHIGGSTEEAQSAIGIEVGNSLTKYINEGASQGAVNFPEVSLRPLDLDQQNVVRVLYIHQNVPGVLKTVNNILSNHNIEKQFSDSQGDIAYLMADISDVDISDIQSLYEQLEQTPYKIATRLLY

SEQ ID NO: 64627 - DNA, 1479 bp, Ustilago maydis 521
  CDS (1)..(1479)
atgtcagagacacacggacaagcttttcaccgagctggcttctcgccgcccgcccacgctggctccttctccgccatgatggcagcgcaggcgggtgctcaacgtctgtctaatggcacctcgattcactcttccacttcgcctcccgcttccttctcgccaactggcgctcgagtccgcgctgcctcacagtcggtaccgctttccgctccgcgtctcttgacgccgttcgacacgggtgacatccgcatcctcttgctcgagaacgtctcgcagggtgcagtcaagatgctaaaggagcagggctaccaggtcgacttccacaccaaggcttggagcgaggaggagctcatccagaacatcgggcagtaccacgccatcggcatccgcagcaaaaccaagctcaccgccaaagtgttccgcgctgcgcacaagctgctcgttgtgggctgcttctgcattggtaccaatcaggtcgacctcgaggcggcggccaaggctggtgttgctgtcttcaactctccctttgctaattcgcgatccgtagccgagctcgtgatcggtgagatgatcagcctttcgcgacagctgggcgatcgtgttaatgagatgcgatctggaacctggaacaaggtgtccaagggctgctacgaggttcgaggcaaaatccttggtattgtcggctacggccacattggatcacagctctctgttctcgccgaggccatgggcatgcacgtcatctactacgacgttgtgccgctcatgcctctcggatctgccaggcaagtatccactctcaacgagctgctcagcaccgccgactttgtctcgttgcacgtacccgagctgcccgagaccaagaacatgatccgcaaagagcagatcgaggcgatgaagaagggtgcctacctcatcaacaacgcaagaggtagcgttgtcgacattcctgctctcgttgagggtctccgatccggccacttggctggtgccgccgtcgatgtgttccctaaggagcccgctgcctcggggcccggtaccttctcaaacgagctcaatagctgggcttcggagctttgccagatgcccaatgtaatgctgactccacacatcggaggcagtaccgaggaggcgcaacgaatgatcggtatcgaggtctcagacgccttgatccgctacatcaactacggtggttcggtgggtgccgtcaacttccccgaggtcgacctccgtgcaatcaccgaagcggattcgcgtgtgattcgtatttgctacgtccatcagaaccagcccggttctctgcgcgcggtcaacgagatccttggatcattcaacgtcgacaagcaacactcggattcctacaaagcaactgcataccttttggccgacatcagtggtgtgtccgaaaacgacatccgcgagatttacgatcgtatctccaagaccgatgccaacattctgacccgtctactgtcgtga

SEQ ID NO: 64628 - protein, 492 aa, Ustilago maydis 521
MSETHGQAFHRAGFSPPAHAGSFSAMMAAQAGAQRLSNGTSIHSSTSPPASFSPTGARVRAASQSVPLSAPRLLTPFDTGDIRILLLENVSQGAVKMLKEQGYQVDFHTKAWSEEELIQNIGQYHAIGIRSKTKLTAKVFRAAHKLLVVGCFCIGTNQVDLEAAAKAGVAVFNSPFANSRSVAELVIGEMISLSRQLGDRVNEMRSGTWNKVSKGCYEVRGKILGIVGYGHIGSQLSVLAEAMGMHVIYYDVVPLMPLGSARQVSTLNELLSTADFVSLHVPELPETKNMIRKEQIEAMKKGAYLINNARGSVVDIPALVEGLRSGHLAGAAVDVFPKEPAASGPGTFSNELNSWASELCQMPNVMLTPHIGGSTEEAQRMIGIEVSDALIRYINYGGSVGAVNFPEVDLRAITEADSRVIRICYVHQNQPGSLRAVNEILGSFNVDKQHSDSYKATAYLLADISGVSENDIREIYDRISKTDANILTRLLS

SEQ ID NO: 64629 - DNA, 1155 bp, Leptospira interrogans serovar Copenhageni str. Fiocruz L1-130
  CDS (1)..(1155): transl_table=11
atgttccaaaaagatggatttaatgtacgccttcttcccgctgccttttcggaaaaagaacttttagacgaaatcgaaaacattcatgttttaggaattagaagtaaaaccaacgtcacttccgccgttttagaaaaagccaaaagacttttgacaattggttgtttttgtatcggaaccaatcaagtggatttagttggagcagaaaaaaaaggaatccctgtttttaatgccccctattctaatactcgttccgtagcggaattagtaatttcagaaatcatcatgttggccagaagagttccggatcatattcgaaatactcactctggtatttggaataaaatttccaaaaattgttttgaggttcgaggtaagacgattggaatcgtgggttatggtcatattggaagtcaggtttcagtacttgcagaagcgatgggaatgaaagtgatctactacgatattcaaacggttcttcctcttggaaatgcaactccagtttctagttacgaagaacttttaaaaaattcggactttatttcttttcacgttcccgaaactccacaaacgatgaatctttatggaaaaaaagaaatcgaagttactaaaaaaggcgcttatatgatcaacctttccagagggaaggttgtggatctggaagctcttgcaaaagcaatccaatcgggtcatattgctggagcgggaatagacgtttttccggaagaacccgaatccaacaacgatccatttctaactcctatgcaaaatctgccgaatgtaattttgactcctcatataggcggtagtaccgaagaagctcaaagaaacatcggttccgaagtagccagtaaacttttgaaattcataaacaacggttccactacattttccgtaaattttcctaatttggaaattactccgttacccgcaggtcaatatagaattttgaacgtccataaaaaccaaccagggtttttaaaagacatcaactctatggtatccgcaatcggcgccaatatcagttcccaacatttaggaaccagtgcagaaatcggttatctttccatggtaatcgataaatctgtaggagacgaattgaaagaaaaaatcgaaaaacatcctttttcgatcaaaactaggattctttactaa

SEQ ID NO: 64630 - protein, 384 aa, Leptospira interrogans serovar Copenhageni str. Fiocruz L1-130
MFQKDGFNVRLLPAAFSEKELLDEIENIHVLGIRSKTNVTSAVLEKAKRLLTIGCFCIGTNQVDLVGAEKKGIPVFNAPYSNTRSVAELVISEIIMLARRVPDHIRNTHSGIWNKISKNCFEVRGKTIGIVGYGHIGSQVSVLAEAMGMKVIYYDIQTVLPLGNATPVSSYEELLKNSDFISFHVPETPQTMNLYGKKEIEVTKKGAYMINLSRGKVVDLEALAKAIQSGHIAGAGIDVFPEEPESNNDPFLTPMQNLPNVILTPHIGGSTEEAQRNIGSEVASKLLKFINNGSTTFSVNFPNLEITPLPAGQYRILNVHKNQPGFLKDINSMVSAIGANISSQHLGTSAEIGYLSMVIDKSVGDELKEKIEKHPFSIKTRILY

SEQ ID NO: 64631 - DNA, 1233 bp, Acinetobacter sp. ADP1
  CDS (1)..(1233): transl_table=11
atgagccaacatctatcactacctaaagacaaaattcgtttcttattgttagaaggcgttcatcaaaacgcagtcgacactctaaatgcagcgggttataccaatatcgattatcgcaagacagcactggatggcgatgcgctgaaagaagccgtcaaggatgctcactttattggtattcgctcccgtactcagttgacagaagatgtctttgcagctgcgaacaagctcatcgcagtaggttgtttctgtatcggaaccaatcaggtagatctaaaagcagcaatggcacgtggtattcctgtatttaacgcgccttattcaaacacccgttcagttgctgaactggtgcttgctgaattgatccttcttctgcgtcgtgtacctgaaaaatctgcagtctgtcaccgtggtggctgggacaaatctgctgtaggttcttatgaaacacgtggcaagacattaggtattgttggttacggctcaattggctcacaactttcagtcttggctgaaagcttaggcatgcacgtcatttattacgacacagtcactaagcttccaatgggtaatgctcgccaagtgggttctttggatgaattacttgcaactgctgatgttgtgacgttgcatgtaccagatgttccatctacacgtaatttcttcaagaaagaacaatttgccaaaatgaaagaaggtgcgatcttcttgaacgcggcacgcggtacgtgtgtgatcatcgaagacttagcagatgcgttgaaatcaggtcaccttgcaggtgctgcggtagacgtattcccgaaagaaccaaaagccaatggtgaagaatttatttctccattacgtggtctggacaatgtgatcctgacacctcacgtgggcggttcaaccatggaggctcaagccaatatcggacttgaagtttcagaaaaatttgtggcttattctgataaaggtatgaccctatctgcggtcaatttcccagaaattgcactaccattgactgaaggcaagcaccgtttattgcatattcataaaaatattccaggtgtattgtctaaaatcaataatctatttgcagaacaaaatatcaatatctctggtcaaagtttgatgactaaaggtgatatcggttacctgatcatggatgtagatgcatctgcttctcaagaagcacttgatatgctcaaccaggttgaaggtactattcgcgttcgcgttctgttctaa

SEQ ID NO: 64632 - protein, 410 aa, Acinetobacter sp. ADP1
MSQHLSLPKDKIRFLLLEGVHQNAVDTLNAAGYTNIDYRKTALDGDALKEAVKDAHFIGIRSRTQLTEDVFAAANKLIAVGCFCIGTNQVDLKAAMARGIPVFNAPYSNTRSVAELVLAELILLLRRVPEKSAVCHRGGWDKSAVGSYETRGKTLGIVGYGSIGSQLSVLAESLGMHVIYYDTVTKLPMGNARQVGSLDELLATADVVTLHVPDVPSTRNFFKKEQFAKMKEGAIFLNAARGTCVIIEDLADALKSGHLAGAAVDVFPKEPKANGEEFISPLRGLDNVILTPHVGGSTMEAQANIGLEVSEKFVAYSDKGMTLSAVNFPEIALPLTEGKHRLLHIHKNIPGVLSKINNLFAEQNINISGQSLMTKGDIGYLIMDVDASASQEALDMLNQVEGTIRVRVLF

SEQ ID NO: 64633 - DNA, 1233 bp, Erwinia carotovora subsp. atroseptica SCRI1043
  CDS (1)..(1233): transl_table=11
atggcaaaggtatcactggaaaaagacaagattaagtttctgttagtggaaggcgtgcaccagagcgcgctggataacctgcgtgcagcgggttacaccaacatcgagttccacaaaggggcgctggatcctgaagcattgaaagcttctatccgcgacgcgcattttgtggggatccgctcgcgtacccatctgacagaagagatttttgctgctgcggaaaaactgatcgcggtagggtgtttctgtatcgggactaatcaggttgaactgtcggccgcgaccaaacgcggtatcccagtgtttaatgcccctttttccaatacccgctccgtggcagaaatggtgatcggcgaaatgctgctgatgctgcgcggtatcccggcagcgaacgcgaaagcgcaccgtggtatctggcacaaactggctgtgggatcgtttgaagctcgcggcaaaaagctcggaatcatcggctacggccatatcggtatgcagttgggtattttggctgaaagcctgggtatgcacgtttatttctatgatattgaaagcaaattgccgctgggcaatgctcagcaggtgcgccacctgtccgatttgctgaatatgagcgacgtggtgagcctgcatgtgccggaaaatgaaagtacgcataatatgatgggcgcggaagaactggcactgatgaaaccaggtgcaatcctgattaacgccgctcgcggtacggtggttgatattcccgctctgtgtgaagtgctaagcagcaagcatttgtccggtgcagcgattgacgtattcccacaggagccggcaacgaacagcgagccattcctgtcgccgctgtgcgagtttgataacgtgctgttgacgccgcatatcggtggatccacgcaggaagcacaggaaaatatcggtgatgaagttgcagggaaactggcgaaatattcagacaacggctctacgctgtctgcggtgaatttcccagaagtgtcgctgcccgttcatggcgcacgcgctagccgcctgctgcacattcatgaaaaccgtcctggcatgattaccaaaattaaccagatctttgctgagcagggcattaacattgctgcgcagtatctgcaaacgacacctgaaattggttatgtggtgattgatgtagaaaccgacggtgcgcaaacggcactgcaactgatgaaggcgattcccggcactattcgtgcccgtctgctgttctga

SEQ ID NO: 64634 - protein, 410 aa, Erwinia carotovora subsp. atroseptica SCRI1043
MAKVSLEKDKIKFLLVEGVHQSALDNLRAAGYTNIEFHKGALDPEALKASIRDAHFVGIRSRTHLTEEIFAAAEKLIAVGCFCIGTNQVELSAATKRGIPVFNAPFSNTRSVAEMVIGEMLLMLRGIPAANAKAHRGIWHKLAVGSFEARGKKLGIIGYGHIGMQLGILAESLGMHVYFYDIESKLPLGNAQQVRHLSDLLNMSDVVSLHVPENESTHNMMGAEELALMKPGAILINAARGTVVDIPALCEVLSSKHLSGAAIDVFPQEPATNSEPFLSPLCEFDNVLLTPHIGGSTQEAQENIGDEVAGKLAKYSDNGSTLSAVNFPEVSLPVHGARASRLLHIHENRPGMITKINQIFAEQGINIAAQYLQTTPEIGYVVIDVETDGAQTALQLMKAIPGTIRARLLF

SEQ ID NO: 64635 - DNA, 1254 bp, Propionibacterium acnes KPA171202
  CDS (1)..(1254): transl_table=11
atgattccacccattgagacgcccgcaacgggtcgcgcttgccccctccataaactggcggttatgaaggcgctgctactcgaaaacatccatgacgaagcggtccgaacactgaaaaaggccggatacgaggtcgagcgggtaagtgaggcccttgacgaggatgacctcatcagcgcccttgacggagttgacctgttgggcatcagatcacgtacccgcgttactcgtcgggtcgttgaggcctgcggcgacaagctccatgcggttggcgctttttgtattggcactaatcagatggatcttgatgcgttagccgaggctggcgttcccgcttttaatgctccttattccaatacccgttcagtcgttgagcttgtcatggcagagatcatcgctctagctcgtcgtttaggcgatcgcaatactcaaatgcacaacggtgtgtggcgtaagtccgcaattgggtcgcacgagattcgtggacgtcgactaggcattatcggctacggcaatattggccagcagctgtcggtcgtggcagaggccatgggcatgcaggtgtttttctatgacatcgctgatgttttacctatgggcaacgctcacaagtgtgattccatggaagagctgcttggtagcgtcgagacggtgtctcttcatatcgatggacgccccagcaacaccgatcttatcggggatcgcgaattcgccatgatgcgaccgaggtccctctttctaaacttgtcgcgaggcaaggtcgtcgacatcaatgctctggtggacaacctacgtactggacacatcgctggcgcaggagtggacgtgtatcccgaagagccggcctccggaaaagagccctttatctctccgttgcgcgagatggacaatgttattctgaccccgcatatcggcgggtccacccaagaggctcaagttgatatcggtcgttacgtcgccgggaaacttatcgactatgtagataacggcgcgaccggaatgagtgttaacattcctgagatcaccccatcgcctcgcacgggtgctcgcatcggccatctacatcgcaatgtcccaggtgtcatggcgaccctgaaccgactcgttgctgatcaggggggaaacgtcacttaccaggctctggcgacgaagggcgagctcggttactgcattctcgacattgcggagactgacagtgggctgctcgccaatgtcaccgttcttgaggggacaattcgggctcgtatcctctaa

SEQ ID NO: 64636 - protein, 417 aa, Propionibacterium acnes KPA171202
MIPPIETPATGRACPLHKLAVMKALLLENIHDEAVRTLKKAGYEVERVSEALDEDDLISALDGVDLLGIRSRTRVTRRVVEACGDKLHAVGAFCIGTNQMDLDALAEAGVPAFNAPYSNTRSVVELVMAEIIALARRLGDRNTQMHNGVWRKSAIGSHEIRGRRLGIIGYGNIGQQLSVVAEAMGMQVFFYDIADVLPMGNAHKCDSMEELLGSVETVSLHIDGRPSNTDLIGDREFAMMRPRSLFLNLSRGKVVDINALVDNLRTGHIAGAGVDVYPEEPASGKEPFISPLREMDNVILTPHIGGSTQEAQVDIGRYVAGKLIDYVDNGATGMSVNIPEITPSPRTGARIGHLHRNVPGVMATLNRLVADQGGNVTYQALATKGELGYCILDIAETDSGLLANVTVLEGTIRARIL

SEQ ID NO: 64637 - DNA, 1275 bp, Burkholderia pseudomallei K96243
  CDS (1)..(1275): transl_table=11
atggccgcgtacgcgtaccgcgccggaatttccggcctccgttacgattcgaccaccacgctgggtaacatgacttccgttcttctcctcgaaaacattcacgacagcgcgtcgcggcatttcgccgacacgaacgtcgacatcgagcggcgcaagggcgcgctcgccggcgccgaattgcggcgcgcgctgcagcagcatcaactaatcggcattcgctcggcgacgcatctgctgcgcgacgagatcgacgccgcgcgccatctgctcgcgatcgggtgcttctgcatcggcacgtcgcaggtggatttgccggccgccgcgcatcacggcattccggtgttcaacgcgccgttctcgaatacgcggtcggtcgcggagctcgtgatcgccgaggccatcctgttgctgcggcgcgtgccggagaagagcgtcctcgcgcatgcgggcgaatgggcgaagggcgcgggcggatcgttcgaggcgcgcggcaagacgatcgcgatcgtcggctacggcaacatcggcgcgcaggtcggcgtgctcgccgaggcgctcggcatgagggtcgtctattacgatgtgcaggcgaagctgtcgctcggctccgcgcagccggcgcgctcgctcggtgaggcgatcgcgctcgcggacgtcgtcacgctgcacgtgcccgcacacgcgtcgacgcacaacatgatcgacgcgagcgtcctcgcgcaattcaaatcgaatgcaatcctgatcaatgcgtcgcgcggcaccgtcgtcgatatcgacgcgctgcgcgacgcgctcgtgcagaagcgcctgagcggcgcggcgatcgacgtgtttccgcgcgagccgaagaccaatgcggaccgtttcgaatcggtgctgcaaggattgccgaacgtgatcctcacgccgcatatcggcggcagcacgcaggaagcgcaggagaacatcggcgaagaggtgtcgtcgaagctcgtcgcattcctcacgcgcggcgataccgcgggcgccgtcaattttccgcaggtgagcccgggcgaatgcacgtcggccgcgcggctcctgaacgtgcacggcaatacgccgggcgtgctcgcggtgctcaacacgctgcttgctcaggatggcgcgaacatcgtcgcgcagcatctgcagacgcgcggcgatatcggctatgtcgtgaccgacctggaccgcgtgccgtccgatgcgtttctcgacacgctgagcggcaatcgcgcattcacgcgcagccgcttgctgcgcagcgcatga

SEQ ID NO: 64638 - protein, 424 aa, Burkholderia pseudomallei K96243
MAAYAYRAGISGLRYDSTTTLGNMTSVLLLENIHDSASRHFADTNVDIERRKGALAGAELRRALQQHQLIGIRSATHLLRDEIDAARHLLAIGCFCIGTSQVDLPAAAHHGIPVFNAPFSNTRSVAELVIAEAILLLRRVPEKSVLAHAGEWAKGAGGSFEARGKTIAIVGYGNIGAQVGVLAEALGMRVVYYDVQAKLSLGSAQPARSLGEAIALADVVTLHVPAHASTHNMIDASVLAQFKSNAILINASRGTVVDIDALRDALVQKRLSGAAIDVFPREPKTNADRFESVLQGLPNVILTPHIGGSTQEAQENIGEEVSSKLVAFLTRGDTAGAVNFPQVSPGECTSAARLLNVHGNTPGVLAVLNTLLAQDGANIVAQHLQTRGDIGYVVTDLDRVPSDAFLDTLSGNRAFTRSRLLRSA

SEQ ID NO: 64639 - DNA, 1230 bp, Azoarcus sp. EbN1
  CDS (1)..(1230): transl_table=11
atgcaaaattcaccactgcaccacttcgatttcaggttcgtgctgctcgaaggcattcatgccactgcggtcgagacgctcggcacgagcggctattcgcgcgttgatgcgcgtcccggtgcactgaccggcgacgacctcatccacgcggtcgccgacgcggatttcgtcggcatccgctcgcgcacccggctcaccgaggaagtgctgacgcacgcgccgaaattgctcggcatcggctgcttctgcatcggcacgaaccaggtcgacctcgaggccgcggcgctgctcggcatcccggtattcaacgcgccgttctcgaatacccgcagcgtcgccgagctggtgctcgccgagatcgtcatgctgatgcgcggcattccggagaaaaacgcgctgctgcatcgtggcggatggatgaaaagcgcgagcaattcgtgggagatccgcggcaagacgctcggcatcgtcggctatggccatatcggcacgcaggtcggcgtgctcgccgagcacttcggcatgaaagtcgtgtaccacgacatcgaggccaagctgtcgctcggcaacgcgcatcagctggggtccctcgaagacctgctggcagcgtcggacgtcgtcagcctgcacgtccccgaaaccccggcgacgcggaacatgatggacgcggcccgcctcgccgcgatgaagccgggcagtttcctcatcaacgcgtcgcgcggcacggtcgtcgatatcgacgccctcgccgatgcgctcggctccggccatgtgctcggtgcggcaatcgacgtgttcccggccgaaccgaagtccaacgacgagcctttcgtctcgccgctgctgcgcttcgacaacgtcatcctgacgccgcacatcggcggctcgacggccgaagcgcaggcgaacatcggccgcgaggtcgccgccaagctcgcccgctatgcgaacaacggatcgacagtttctgcagtgaatttccccgaagtgtcgctgcccgcgcacgaaggccagtgccgcgtgatgcacatccaccacaacgtgccgggcatgctcgcgcgcatcaacgagcggatttcgaaagccgggctcaacatcgtcgcgcagtacctgcagacgacccagcacgtcggctacgtcgtcatcgacgtcgacgccgaagcgcgtcaggtggcgttcgacgaactcaacgcgatcgacgggacgatacgctgccgactgatctgctga

SEQ ID NO: 64640 - protein, 409 aa, Azoarcus sp. EbN1
MQNSPLHHFDFRFVLLEGIHATAVETLGTSGYSRVDARPGALTGDDLIHAVADADFVGIRSRTRLTEEVLTHAPKLLGIGCFCIGTNQVDLEAAALLGIPVFNAPFSNTRSVAELVLAEIVMLMRGIPEKNALLHRGGWMKSASNSWEIRGKTLGIVGYGHIGTQVGVLAEHFGMKVVYHDIEAKLSLGNAHQLGSLEDLLAASDVVSLHVPETPATRNMMDAARLAAMKPGSFLINASRGTVVDIDALADALGSGHVLGAAIDVFPAEPKSNDEPFVSPLLRFDNVILTPHIGGSTAEAQANIGREVAAKLARYANNGSTVSAVNFPEVSLPAHEGQCRVMHIHHNVPGMLARINERISKAGLNIVAQYLQTTQHVGYVVIDVDAEARQVAFDELNAIDGTIRCRLIC

SEQ ID NO: 64641 - DNA, 1230 bp, Pseudomonas syringae pv. syringae B728a
  CDS (1)..(1230): transl_table=11
atgagcaagacttccctcgacaagagcaagatcaagttccttcttctcgaaggcgtccaccaatccgctgtcgacgtcctcaaggcagccggttacaccagcatcgagtaccacaccaagtctctgccggaagccgaactgaaagaaaagatcgccgacgcccatttcatcggtatccgctctcgtactcagttgaccgaagagctgttcgattgcgccaagaaactggttgcggtcggctgcttctgcatcggcaccaaccaggttgacctcaacgcggcgcgcgagcgcggtatcgcagtgttcaatgcgccctactccaatacccgttcggtcgccgaactggtattggccgaagccatcctgctgctgcgcggtatccccgagaagaacgcttcctgccaccgtggcggctggatcaagagtgcggccaactccttcgagatccgtggcaagaagctgggcatcatcggttatggttcgatcggtacgcagctgtcggtgctggccgaaggtctgggcatgcaggtgtacttctacgacacgctgaccaaactgccgctgggcaacgccactcaggtgtcgagcctgaacgagctgctgggcatgtccgatatcgtcactctgcacgttccggaaacctcggaaacccagtggatgatcggcgagaaagaaatccgcgcgatgaggaagggcagcatcctgatcaacgccgcgcgtggcacggtggtcgaactggacgcactggctgacgccatcaaggacaagcacctgatcggcgccgccatcgacgtgttcccggtcgagccgcgctcgaacgacgacatcttcgaaagcccgctgcgcggtctggacaacgtgatcctgacgccgcacatcggtggctccacagccgaagcgcaggccaacatcggtctggaagtggcggaaaaactggtcaagtacagcgacaacggtacgtcggtgtcctcggtcaacttcccggaagtggcgctgcctgcgcaccctggcaagcaccgcctgctgcacatccacgaaaacatcccgggcgtgctcagcgagatcaacaaggtcttcgccgaaaacggtatcaacatctccggtcagttcctgcagaccaacgagaaagtcggctacgtggtcatcgacgtcgacgccgaatactccgacctcgcccaggccaagctgcaacagatcaaaggcaccatccgcagccgcgtgctgttctga

SEQ ID NO: 64642 - protein, 409 aa, Pseudomonas syringae pv. syringae B728a
MSKTSLDKSKIKFLLLEGVHQSAVDVLKAAGYTSIEYHTKSLPEAELKEKIADAHFIGIRSRTQLTEELFDCAKKLVAVGCFCIGTNQVDLNAARERGIAVFNAPYSNTRSVAELVLAEAILLLRGIPEKNASCHRGGWIKSAANSFEIRGKKLGIIGYGSIGTQLSVLAEGLGMQVYFYDTLTKLPLGNATQVSSLNELLGMSDIVTLHVPETSETQWMIGEKEIRAMRKGSILINAARGTVVELDALADAIKDKHLIGAAIDVFPVEPRSNDDIFESPLRGLDNVILTPHIGGSTAEAQANIGLEVAEKLVKYSDNGTSVSSVNFPEVALPAHPGKHRLLHIHENIPGVLSEINKVFAENGINISGQFLQTNEKVGYVVIDVDAEYSDLAQAKLQQIKGTIRSRVLF

SEQ ID NO: 64643 - DNA, 1233 bp, Haemophilus influenzae 86-028NP
  CDS (1)..(1233): transl_table=11
atgacaaacaaagtttcactcgacaaatcaaaaattaaatttgtattgtttgaaggtgtgcatcaaagcgcacttgatacgctccacgcggcaggctatagcaatattgattactataaaaaagcactggatggtgatgaattaaaagaagccattaaagatgcacattttatcggattacgttctcgcacccatttaaccgcagaaatgattgaagccgcacccaaattaatcgcagtaggctgtttctgtattggcaccaaccaagtggatttaaatgcagcaaaagcacgtggtattcctgtatttaatgcgccattctcaaacactcgttccgtcgcagaacttgtattaggcgagattttattacttatgcgtaatgtgccacaggctaatgccgaagtacatcgtggtgtttggaataaatccgcgactggctcttatgaagtgcggggtaaaaaattaggcattattggttacggccacattggttcacaattaagtattattgccgaatcattaggcatggatgtgtatttctatgatattgaaaataaacttccgctcggtaatgcaaaacaggttcgtagccttgaagaattactcagttcttgcgatgtggtttcattacatgtgccagaactgccctccaccaaaaacttaatgaacgcaacgcgtatcgcacaattaaaacaaggggcaattttgatcaatgctgcgcgtggcactgtggtagatattgatgctctcgctcaagccttaaaagacgggaaacttcagggtgccgcaattgatgtattccccgttgaacctgcttcaattaatgaagaatttgtctcgccattacgcgaatttgataatgtgattttaacgccacatattggcggctcaacagcggaagcacaagaaaatatcggttttgaagtggcaggcaaatttgttaaatattcagataatggctcaaccctttcttcggtaaacttcccagaagtctctttaccagagcacgagggaacaaaacgcttattgcatattcatgaaaatcgccctggtatattgaacaaactgaaccaaattttcgtcgaagccaacctcaatattgccgcacaatatttacaaactgacccgaaaattggttacgttgtcgttgatgtagaaacgaatgatgcatcaccattactgacaaaattgaaggaaattgatggcacaattcgtgctagagtactttactaa

SEQ ID NO: 64644 - protein, 410 aa, Haemophilus influenzae 86-028NP
MTNKVSLDKSKIKFVLFEGVHQSALDTLHAAGYSNIDYYKKALDGDELKEAIKDAHFIGLRSRTHLTAEMIEAAPKLIAVGCFCIGTNQVDLNAAKARGIPVFNAPFSNTRSVAELVLGEILLLMRNVPQANAEVHRGVWNKSATGSYEVRGKKLGIIGYGHIGSQLSIIAESLGMDVYFYDIENKLPLGNAKQVRSLEELLSSCDVVSLHVPELPSTKNLMNATRIAQLKQGAILINAARGTVVDIDALAQALKDGKLQGAAIDVFPVEPASINEEFVSPLREFDNVILTPHIGGSTAEAQENIGFEVAGKFVKYSDNGSTLSSVNFPEVSLPEHEGTKRLLHIHENRPGILNKLNQIFVEANLNIAAQYLQTDPKIGYVVVDVETNDASPLLTKLKEIDGTIRARVLY

SEQ ID NO: 64645 - DNA, 1227 bp, Psychrobacter arcticus 273-4
  CDS (1)..(1227): transl_table=11
atggcgttatcactccaaaaagacaaaatccggtttttattgcttgaaggtctgcacgacaatgctttaaaggtattgaaagatgctggttatcaaaatattgaaaatatcagccatgcattggatcaagacgagctgattgaaaagattaaagatgctcattttattggtattcgctcgcgcacgcagctgacgcgcgaagtgcttgagcatgcacaaaagcttattggcatcggttgtttttgtattggtaccaaccaagtagacttagatgctgctcgtgagttcggtattccggtcttcaacgcgccattctcaaacacccgttcggtagcagagttggtacttgctgaagccatcatgctctatcgcggtatccctgaaaaaaatgccactgtacatcgcggcggttggggtaagtctgcgaccaattcacatgaagtgcgcggcaaaaccatcggtatcgtcggttatggctctatcggctcgcaactgtctgtattggctgaaagctttggtatgaaagtcatttaccatgatgtcttaaccaaactgccactaggtaacgcagtacaagtagctagcttagaagagctgttatctactgccgatatcgtgaccttgcatgtacctgaactgccaagcacgcgctatatgatgaaagctgagcagtttgcgcatatgaaagagggtagctactttatcaatgcggcacgtggtacttgtgttgagattgatgaccttactgccgtgcttgagtctggtaaaatcttgggcgcagcgattgatgtgttcccaaaagagccaaaatctgcagacgaagagtttgagtcaccactacgtaagttcgataatgtcatcttgacgccgcatattggcggctcaacgcaagaagcacaggcaaacattggattggaagttgcagataagtttgtgcgatattctgaccaaggcaacacggcaacggctgtaaacttcccagaagtatctattccgtttaaagaaggcacgcatcgtctgctacatatccacaaaaacgtaccaggcgtcctgtcacagattaaccgtctgtttgctgaagcaaatatcaatatcttagcgcagagcttgatgactgaaggcgatgtcggctatcttgttatggatgtcgattataacgactcaaccgcggctttagatcagctaaaagatgttcaagaaacgattcgtgtacgtattttattctaa

SEQ ID NO: 64646 - protein, 408 aa, Psychrobacter arcticus 273-4
MALSLQKDKIRFLLLEGLHDNALKVLKDAGYQNIENISHALDQDELIEKIKDAHFIGIRSRTQLTREVLEHAQKLIGIGCFCIGTNQVDLDAAREFGIPVFNAPFSNTRSVAELVLAEAIMLYRGIPEKNATVHRGGWGKSATNSHEVRGKTIGIVGYGSIGSQLSVLAESFGMKVIYHDVLTKLPLGNAVQVASLEELLSTADIVTLHVPELPSTRYMMKAEQFAHMKEGSYFINAARGTCVEIDDLTAVLESGKILGAAIDVFPKEPKSADEEFESPLRKFDNVILTPHIGGSTQEAQANIGLEVADKFVRYSDQGNTATAVNFPEVSIPFKEGTHRLLHIHKNVPGVLSQINRLFAEANINILAQSLMTEGDVGYLVMDVDYNDSTAALDQLKDVQETIRVRILF

SEQ ID NO: 64647 - DNA, 1254 bp, Colwellia psychrerythraea 34H
  CDS (1)..(1254): transl_table=11
atgatcattgccaaccaaaactcattagcaaaaagtaagattaaaattttattacttgaaggcttgcacccaagctctctagaagaattgaagctaaaaggttattcaaatattgaatcacttaaaacctcgctctcagaaagtgagttaattgaaaaaattgcaaatgttcactttattggcattcgctcacgtactcagttaactgaaaaagtgctaagtcatgcgaataagttggttgctatcggttgtttttgtattggcaccaatcaagttgatttaaaagcagctcaaactcgcggtatccctgtttttaatgctccattttcaaatactcgttcagttgctgagcttgttcttggtgaaacgttattattactacgtggtattcctgagaaaagtgcaaaagctcatcgtggtgaatggttgaaatcagcggttggctcagtagaagcccgtggcaaagtactaggtattattggttacggtcatattggcatgcaattaggtattttagctgaaacattaggtatgagagtacgcttttacgacgtagaaactaaattacctttaggtaatgcaagtcaagcgccgtcattagatgcattacttggtgagtctgacgtagtgagcttacatgtacctgaaacagcgcaaactcaaaatatgattgcacaagctcaattcgaagcaatgaaacaaggcgctatctttattaatgcttctcgaggaactgtggttgatatccctgctttagcacaagctttggatagtaaaaaaattgcaggggctgcaattgatgttttccctgttgagccaaagagtaataatgacgagtttatctcagcgttacgcggatttgataatgttattctaacgccacacattggtggtagtacaaaagaagcacaagccaatatcggtttagaagtagcaacaaagctagctaagtattctgataatggttcaagtctatctgcggttaacttccctgaagtatctttacctgatcactcttttccaggtcagaagaataccagccgtttattacatattcaccataaccaaccaggtgttttgactcaaattaaccaagcatttgctgaacacaatattaatattgcagcacaatacttacaaaccgatgacaaaattggctatgtggttattgatcttgattcagaagatagtagtttagcgttagaacagttaaaacatgttgatggcaccatacgcgctagaatattgcattaa

SEQ ID NO: 64648 - protein, 417 aa, Colwellia psychrerythraea 34H
MIIANQNSLAKSKIKILLLEGLHPSSLEELKLKGYSNIESLKTSLSESELIEKIANVHFIGIRSRTQLTEKVLSHANKLVAIGCFCIGTNQVDLKAAQTRGIPVFNAPFSNTRSVAELVLGETLLLLRGIPEKSAKAHRGEWLKSAVGSVEARGKVLGIIGYGHIGMQLGILAETLGMRVRFYDVETKLPLGNASQAPSLDALLGESDVVSLHVPETAQTQNMIAQAQFEAMKQGAIFINASRGTVVDIPALAQALDSKKIAGAAIDVFPVEPKSNNDEFISALRGFDNVILTPHIGGSTKEAQANIGLEVATKLAKYSDNGSSLSAVNFPEVSLPDHSFPGQKNTSRLLHIHHNQPGVLTQINQAFAEHNINIAAQYLQTDDKIGYVVIDLDSEDSSLALEQLKHVDGTIRARILH

SEQ ID NO: 64649 - DNA, 1290 bp, Pseudomonas syringae pv. phaseolicola 1448A
  CDS (1)..(1290): transl_table=11
gtgcccagagccgaaccgggcaccccctgccaattttcttcgggacacaggtttacgcagatgagcaagacttccctcgacaagagcaagatcaagttccttcttctcgaaggcgtccatcagtccgctgtcgacgtcctcaaggcagccggctacaccagcatcgagtaccacaccaagtctctgccggaagccgaactgaaagaaaagatcgccgacgcacacttcatcggtatccgctcccgcactcagttgaccgaagagctgttcgattgcgccaagaaactggttgccgtcggctgcttctgcatcggcaccaaccaggttgacctcaatgcagcgcgtgagcgcggtattgcagtgttcaatgcgccctactccaacacccgctcggtagctgaactggtgctggccgaggcgatcctgctgctgcgcggtatccctgagaaaaacgcttcatgccaccgtggcggctggatcaaaagcgcggccaactctttcgaaatccgtggcaagaagctcggcatcattggctatggctcgattggtacgcagttgtcggtgctggccgaaggcctgggcatgcaggtgtacttctacgacacgctgaccaagctgccactgggcaacgcgactcaggtgtccagcctgaacgagctgctgggcatgtccgatatcgtcaccctgcacgtgccggaaacctcggaaacccagtggatgatcggcgaaaaagaaattcgcgcgatgaaaaagggcagcatcctgatcaacgcggctcgcggcacagtcgttgagctggacgccctggccgacgcgatcaaggacaagcacctgatcggcgctgcaatcgacgtgttcccggtcgagccacgctcgaacgacgacatcttcgaaagcccgctgcgtggcctggacaacgtgatcctgaccccgcacatcggtggttccactgccgaagcgcaggccaacatcggtctggaagtcgcagaaaagctggtcaagtacagcgacaacggtacatcggtgtcgtcggtcaacttcccggaagtggccttgcctgctcaccctggcaagcatcgcctgctgcacatccacgagaacatcccgggcgtgctcagcgagatcaacaaggtcttcgccgagaacggcatcaacatctccggtcagttcctgcagaccaacgagaaagtcggttacgtggtcatcgacgtcgacgccgagtactcggatttggcacaagccaagctgcaacagatcaaaggcaccatccgcagccgcgttctgttctga

SEQ ID NO: 64650 - protein, 429 aa, Pseudomonas syringae pv. phaseolicola 1448A
MPRAEPGTPCQFSSGHRFTQMSKTSLDKSKIKFLLLEGVHQSAVDVLKAAGYTSIEYHTKSLPEAELKEKIADAHFIGIRSRTQLTEELFDCAKKLVAVGCFCIGTNQVDLNAARERGIAVFNAPYSNTRSVAELVLAEAILLLRGIPEKNASCHRGGWIKSAANSFEIRGKKLGIIGYGSIGTQLSVLAEGLGMQVYFYDTLTKLPLGNATQVSSLNELLGMSDIVTLHVPETSETQWMIGEKEIRAMKKGSILINAARGTVVELDALADAIKDKHLIGAAIDVFPVEPRSNDDIFESPLRGLDNVILTPHIGGSTAEAQANIGLEVAEKLVKYSDNGTSVSSVNFPEVALPAHPGKHRLLHIHENIPGVLSEINKVFAENGINISGQFLQTNEKVGYVVIDVDAEYSDLAQAKLQQIKGTIRSRVLF

SEQ ID NO: 64651 - DNA, 1581 bp, Anabaena variabilis ATCC 29413
  CDS (1)..(1581): transl_table=11
atgtctaaggttctcgtctccgatcctattgaccaggctggcattgacattctctcgcaagtcgctactgttgatgtcaatacaggtctcaaaccagcagaattaatagaaattattggtcagtatgacgcgttaatgattcgttcgggtacgcgcgtcacgcaagaaattattgaagcaggtacacagctgaaaatcatcggtcgtgccggtgtgggtgtggataatgtagatgttccggctgctactcgtcgaggaattgttgttgtcaattctcctgaggggaacaccatcgccgccgccgaacacgccttggcaatgatgctgtcattatctcgccacatccccgatgctaacgcttccgtgaaacgcggtgagtgggatcgcaaaactttcgtgggtgcggaagtttacaaaaaaactttaggggttgtgggtttaggcaaaattggttcccatgtggctactgttgcgaaagcaatgggaatgaaattgttagcttacgatcccttcatttcgactgaacgggctgaacaacttggttgtcagttagtagatttagatttgctgatgcagcaatctgactatatcaccctgcacattcccaaaaccccagaaaccacccacatcatcaacgccaccactctggcgaaaatgaagcccaccgcccggattatcaactgcgcccgtgggggaatcatcgatgaagcagctttagccgcagccgttaaagaggggaaaattgctggggcggcgctggatgtgttcgagtcagaaccactgggtgaatcagacttaagggcgatcggtaaggatattatccttactccccacttgggtgcatccaccacagaagcccaggtgaatgtagctattgacgtagcggaacaaatccgcgatgtgttgttgggtttacccgcacgttccgccgtcaacatccccggactcggccccgatgtgttggaagaactcaaaccctatatgcagctagcggaaactttgggtaagttggtaggacagttagccggtgggcgagtagaactactcaccgtccgcttacaaggtgaactcgctactaataagagtcagcctttagtaattgcttccctgaaaggattactacaccaagccctacgggaacgagtaaactacgtcaacgccaacatagaagccaaggaacggggaatccgagttattgaaacccgcgacgcttccgcccgtgactatgctggttccctacgcttggaagcaacaggaaccttaggcactcattctgtcactggtgcattgctaggcgataaggaaattcacctcaccgacgttgatggcttcccgattaacgtcccaccaagcaaatatatgttgtttaccttgcaccgtgatatgccaggaatcattggcaaactcggttccttactgggcagctttaatgtcaatattgccagtatgcaggtagggcgcaaaatcgtccgtggtgatgccgttatggctctcagcattgatgatcccttaccagatggcattttggcggaaatcaccaaagtacccggcatccgggacgcgtacacagtaacactatag

SEQ ID NO: 64652 - protein, 526 aa, Anabaena variabilis ATCC 29413
MSKVLVSDPIDQAGIDILSQVATVDVNTGLKPAELIEIIGQYDALMIRSGTRVTQEIIEAGTQLKIIGRAGVGVDNVDVPAATRRGIVVVNSPEGNTIAAAEHALAMMLSLSRHIPDANASVKRGEWDRKTFVGAEVYKKTLGVVGLGKIGSHVATVAKAMGMKLLAYDPFISTERAEQLGCQLVDLDLLMQQSDYITLHIPKTPETTHIINATTLAKMKPTARIINCARGGIIDEAALAAAVKEGKIAGAALDVFESEPLGESDLRAIGKDIILTPHLGASTTEAQVNVAIDVAEQIRDVLLGLPARSAVNIPGLGPDVLEELKPYMQLAETLGKLVGQLAGGRVELLTVRLQGELATNKSQPLVIASLKGLLHQALRERVNYVNANIEAKERGIRVIETRDASARDYAGSLRLEATGTLGTHSVTGALLGDKEIHLTDVDGFPINVPPSKYMLFTLHRDMPGIIGKLGSLLGSFNVNIASMQVGRKIVRGDAVMALSIDDPLPDGILAEITKVPGIRDAYTVTL

SEQ ID NO: 64653 - DNA, 1605 bp, Rhodobacter sphaeroides 2.4.1
  CDS (1)..(1605): transl_table=11
atgcccgacatggccccccgcgttctcgtttccgacgaactctccgaaaccgccgtccagatcttccgcgaccgtggcgtcgaggtcgactacatgccgaaactcggcaaggacaaggaaaagctggccgagatcatcggccagtacgacggcctcgcgatccgttcggccaccaaggtgaccgagaagctgctcgagcaggccaccaacctcaaggtcatcggccgcgccggcatcggggtcgacaacgtcgatatcccggccgcctcgcgcaagggcgtgatcgtgatgaacacgcccttcggcaactcgatcaccaccgccgaacatgccatcgcgatgatgttcgcctgcgcccggcagctgcccgaggccaatgcctcgacccatgccggcaagtgggagaagtcgcgcttcatgggggtcgagctcttcaacaagacgctcggcgtgatcggcgcgggcaacatcggcggcatcgtctgcgaccgggcgctggggctctcgatgaaggtcgtggcctacgatcccttcctgtcggaagagcgcgccaaggcgctcggcgtgaccaaggtcgagctcgacgacctgctggcgcgcgccgatttcatcacgctccatgtgccgctgaccgacaagacccgcaacatcctgtcggccgaagctatcgccaagaccaagaagggcgtgcggatcatcaactgcgcccgcggcggtctggtggacgagaaggcgctggccgaggcgatcaagtcgggccatgtggccggcgctgccttcgacgtgttcgaggtcgagcccgcctccgaaagcccgctcttcaacctgccgaacgtggtcgtgacgccgcacctcggcgcctccacgacggaagcgcaggagaatgtggcgcttcaggtggccgagcagatgtccgactatctgctgacgggcgcggtgcagaacgcgctcaacatgccgtcggtcacggcggaagaggccgcggtcatgggcccgtgggtcaagctcgccggccatctcggcgccttcgtgggccagatgacggacgagccgatcaaggcgatcaacgtgctctatgacggggccgtgggcgaaatgaacctcgccgcactgaactgcgccaccatcgcgggcatcatgaaggccaccaacccggacgtgaacctcgtctcggctccggtcgtggccaaggagcgcgggatccagatctcgaccaccacgcaggccaagtcgggcgccttcgatgcctacatcaagctgacggtcgtgaccgacaagcgcgagcggtcggtggcgggcacctgcttctcggacggcaagccgcgcttcatccagatcaagggcatcaacatcgacgccgaagtcggccgccacatgctctacaccacgaacgaggacgtgccgggcatcatcggcctcctcggcatgaccatgggcaagaacggcgtcaacatcgcgaacttcaccctcggccggacctcggtcgggcaggaggccatcgcgatcctctacctcgatcaggcaatcgatccgaaggtggtggagacgctcgaatcgaccggcctcttccagcaggtgaagccgctcgaattcgacgtggcctga

SEQ ID NO: 64654 - protein, 534 aa, Rhodobacter sphaeroides 2.4.1
MPDMAPRVLVSDELSETAVQIFRDRGVEVDYMPKLGKDKEKLAEIIGQYDGLAIRSATKVTEKLLEQATNLKVIGRAGIGVDNVDIPAASRKGVIVMNTPFGNSITTAEHAIAMMFACARQLPEANASTHAGKWEKSRFMGVELFNKTLGVIGAGNIGGIVCDRALGLSMKVVAYDPFLSEERAKALGVTKVELDDLLARADFITLHVPLTDKTRNILSAEAIAKTKKGVRIINCARGGLVDEKALAEAIKSGHVAGAAFDVFEVEPASESPLFNLPNVVVTPHLGASTTEAQENVALQVAEQMSDYLLTGAVQNALNMPSVTAEEAAVMGPWVKLAGHLGAFVGQMTDEPIKAINVLYDGAVGEMNLAALNCATIAGIMKATNPDVNLVSAPVVAKERGIQISTTTQAKSGAFDAYIKLTVVTDKRERSVAGTCFSDGKPRFIQIKGINIDAEVGRHMLYTTNEDVPGIIGLLGMTMGKNGVNIANFTLGRTSVGQEAIAILYLDQAIDPKVVETLESTGLFQQVKPLEFDVA

SEQ ID NO: 64655 - DNA, 1578 bp, Carboxydothermus hydrogenoformans Z-2901
  CDS (1)..(1578): transl_table=11
gtgcgaattctggcttccgacccgatagcggaaaagggcttaaatattttacgggaagaaggatttatagttgacgaaaaaacaaagctttcggaagaagaattaattaaaattattccccagtacgatgcgttaattgttcggagcgaaacaaaggttaccgcaagaattattgaagccgcagaaaacttaaagataataggacgggccggggtaggggtagataacattgacctggctgctgcatccaaaaaaggaattattgtggttaattccccggaaggtaatacaattgcggcggcggagcatacctttgccctgatgatggccttactaagaaatattccccaggcccacgctgccttaaaagaaggaaaatggctgagaaaagagtttaccggctatgagctccggggcaagacggtggggattatcggccttggccggataggaacggcggtagccaaaagagttaaagcctttgaaacccgggtaatcggttatgacccctttatttccgaagaacgggctcaaatgcttggtattacgttaatgtcattagaagaacttttacaaaattccgatattgttaccatgcaccttcctttaaataacgaaacccggaatttaatcaaccgggagcggttaaagctcatgaaaaagtcagcgtttatcatcaattgcgcccggggaggaattattgacgaagaagcgctgtacgaagcgttaaaagccggagaaattgccggagcggcactggatgtttttagcaaggagcctcttaccgagtctcctttatttgagctcccaaacgtgattgtaactccccacctgggagcttctactaaagaagcacagattaacgtcgctatcgatgtggcccgggaaattgccagcgtattaaagggcgggcttgcccagaatgccgttaacttcccggcgatggacaaagaaagctatcaacggctaaagccttacattaatcttgcagaaaaactcggaaacttcctggcccagattttatcgggagggcttctggccgcggaaatagtttacaatggttcggcttttaaagaagaaacccgtcctttaaccttagctgccttaaaaggattattagatccgcttttgatggaaagggtaaattatgttaatgcgccggtagttgccaaagaaagaggaattaaagtcagggaaacggtaatggaaaacggtgcggattacaccaacctcattaccttaaaagtaactaccgaaaagggtgaacgaattattgccggaactttgttcagaaataatgagccgcgaattgtccaaatagaccagtaccgggttgatgtggtacccgaagggtataaactttttgttccgcataaagaccagcctttaatgattggaaaagttggcataatcttgggggaaaagggaataaatattgccggaatgcagcttggccgaataactcccggcggagatgcggtcatggttttatcgctggatcatccggcggatggtgacagcattaaagcaattgcagcaattccggggatttatgaagtaaaggcggtgagtttataa

SEQ ID NO: 64656 - protein, 525 aa, Carboxydothermus hydrogenoformans Z-2901
MRILASDPIAEKGLNILREEGFIVDEKTKLSEEELIKIIPQYDALIVRSETKVTARIIEAAENLKIIGRAGVGVDNIDLAAASKKGIIVVNSPEGNTIAAAEHTFALMMALLRNIPQAHAALKEGKWLRKEFTGYELRGKTVGIIGLGRIGTAVAKRVKAFETRVIGYDPFISEERAQMLGITLMSLEELLQNSDIVTMHLPLNNETRNLINRERLKLMKKSAFIINCARGGIIDEEALYEALKAGEIAGAALDVFSKEPLTESPLFELPNVIVTPHLGASTKEAQINVAIDVAREIASVLKGGLAQNAVNFPAMDKESYQRLKPYINLAEKLGNFLAQILSGGLLAAEIVYNGSAFKEETRPLTLAALKGLLDPLLMERVNYVNAPVVAKERGIKVRETVMENGADYTNLITLKVTTEKGERIIAGTLFRNNEPRIVQIDQYRVDVVPEGYKLFVPHKDQPLMIGKVGIILGEKGINIAGMQLGRITPGGDAVMVLSLDHPADGDSIKAIAAIPGIYEVKAVSL

SEQ ID NO: 64657 - DNA, 1587 bp, Synechococcus sp. CC9605
  CDS (1)..(1587): transl_table=11
atgacgaaagttcttgtctccgatccgatcgaccaggccggggtcgacatccttgaccaagtggcgcaggtggatcagcgcaccggcctctctgaggaggagctgatcgggatcatcggtgagtacgacggattgatgatccgatccggcacccaggtgaccgcagcggtgatcgcggcggcgagccggctcaagatcatcggccgcgccggcgtcggcgtcgacaacgttgatgtgcctgcggccacccagcggggtgtgctggtggtgaactcgccggagggcaacaccatcgctgcagcggagcacgctctggcgatgatgctgaccctctcgcggcacattcctcaggcccatggcggcatgcgggccggcaagtgggatcgcaagaaattcgtcggcaacgagctctacaaaaagaccctgggggtggtcggtcttggcaagatcggatcccacgtcgccagggttgcccaggccatgggcatggaggtgatcgcctacgaccccttcattgccgctgaccgggctcaacggatgcaggtgaagctgctggagctggatgagttgttccgcaccgccgactacgtcactctgcacatcccgcgcaccaaggacaccgagaacctggtgaatgcagaactgctgcgcacgatgaagcccacggcgcggatcgtgaactgcgcccgtggcggtgtggtggatgaggcggcgatcgctgaagcgatcaacaacggtgtgatcgccggcgctggccttgatgtgtacgccagtgagcctctggcggaagactcccccctgcgggcggtggagcgtggtctggtgctgacgcctcacctcggtgcgtcgacggaagaggcccaggagaatgtggcgattgatgtggcagagcagatccgcgatgtgctgctgggtctgccggcccgtagtgcggtcaacattcccggcctcagcgcagagatcatggagcggctcaagccccatctccagctcgctgagacggttggtctgctcgttagtcagctggctggtggtcatgtgcaggagatggaactgcggttgcagggtgaattcgccagccatccctctcagcctctggtgattgctgctctgaagggtctgctcagtgctggccttggcgacagcatcaacttcgtgaatgcctcgcttgaggccaaggcccgcggcattcaggtgctggaggtgaaggatgagagcagccgcgacttcgccggtggttcactgcaaatcactacccgtggtgaccagggcagccgcagtgtcaccggtgccgtctttgccgatggcgatctgcgcatcaccagcatcgatgccttcccggtgaatgtgacccccagcagccacatgctgttcacccgacaccgggacatgcccggaatcattggtcacctgggctctctgctgggcgaacacaacgtcaacatcgcctccatgcaggtgggccgcaaaatcgtgcgcggcgatgcggtgatggtgctcagcatcgatgatccgatcccagcagatctgctgcagacgatcacggccatcgatggcatccaggaagcgcatccggtcacgctctga

SEQ ID NO: 64658 - protein, 528 aa, Synechococcus sp. CC9605
MTKVLVSDPIDQAGVDILDQVAQVDQRTGLSEEELIGIIGEYDGLMIRSGTQVTAAVIAAASRLKIIGRAGVGVDNVDVPAATQRGVLVVNSPEGNTIAAAEHALAMMLTLSRHIPQAHGGMRAGKWDRKKFVGNELYKKTLGVVGLGKIGSHVARVAQAMGMEVIAYDPFIAADRAQRMQVKLLELDELFRTADYVTLHIPRTKDTENLVNAELLRTMKPTARIVNCARGGVVDEAAIAEAINNGVIAGAGLDVYASEPLAEDSPLRAVERGLVLTPHLGASTEEAQENVAIDVAEQIRDVLLGLPARSAVNIPGLSAEIMERLKPHLQLAETVGLLVSQLAGGHVQEMELRLQGEFASHPSQPLVIAALKGLLSAGLGDSINFVNASLEAKARGIQVLEVKDESSRDFAGGSLQITTRGDQGSRSVTGAVFADGDLRITSIDAFPVNVTPSSHMLFTRHRDMPGIIGHLGSLLGEHNVNIASMQVGRKIVRGDAVMVLSIDDPIPADLLQTITAIDGIQEAHPVTL

SEQ ID NO: 64659 - DNA, 1236 bp, Rhodospirillum rubrum ATCC 11170
  CDS (1)..(1236): transl_table=11
gtgagcaatctttcactgcccaaggacaagatccgggtcgtgctgttcgagaacatccatgacagcgccgtcgagtattttcacagtcgcggttaccacaacatcgagcggctgaccggggctctggacggtgaggcgctgaaggacaagatccgtgacgcccatatggtcgggatccgatcgcgaacccgcttgactcgcgacgtcttggaatcagccgaaaagctgatggcggtcggctgcttttgcatcggcaccaatcaggtcgatcttgacgccgccgagcttctggggatccccgttttcaacgccccctattccaatacccgctcggtcgccgaactggtggtcgccgaggcggtgatgatgatgcgcgatatcccacggcgcaattgggatacccacgagggcgggtggaacaaggcggcgaccggctgtcacgaggtgcgcggcaagaccctgggcatcgtcggctatggccatatcggcacccaggtgtccgttctcgccgaaagcatgggcatgtcggtgcgctatttcgacatcgtcgaaaagctggcgatcggcaacgcccagccctgcgccaccctgaacgagctgatggcggtggccgatgtcgtcaccttgcatgtgcccgataccgccgatacccgcgatatgatccgcgcgccgcagatcgcggcgatgaaggacggggcctatctgatcaacgcctcgcgcggcaaggtggttgatatcgacgccctggccgaagccctgacggcgggcaagctgcgcggcgccgccgtcgacgtgttccccaaggagccggccagcctgggcgatccgttcgaaagcccgttgcgcggcatgcgcaatgttctgctgaccccccatatcggcggctcgaccgaagaggcgcagatggggatcggccgcgaagtggccgaaaagctggtgaaatattccgatgacggctcgactctgggcgccgtcaacttccccgaggtggccttgccccagcaggccagcgtgacccgcttcttgcacattcaccgcaatgtgcccggggtgatgagcgcgctcaacgaggtgttttccagccaccacatcaatatccgcggccagtatctgatgaccaatccccgggtcggctatgtggtggtcgatgtggaaaaggacctgaaggccggcgagggcttccgtcaggctttggcggcgatcaacggcacgctgcgcttccgcttcctgaattaa

SEQ ID NO: 64660 - protein, 411 aa, Rhodospirillum rubrum ATCC 11170
MSNLSLPKDKIRVVLFENIHDSAVEYFHSRGYHNIERLTGALDGEALKDKIRDAHMVGIRSRTRLTRDVLESAEKLMAVGCFCIGTNQVDLDAAELLGIPVFNAPYSNTRSVAELVVAEAVMMMRDIPRRNWDTHEGGWNKAATGCHEVRGKTLGIVGYGHIGTQVSVLAESMGMSVRYFDIVEKLAIGNAQPCATLNELMAVADVVTLHVPDTADTRDMIRAPQIAAMKDGAYLINASRGKVVDIDALAEALTAGKLRGAAVDVFPKEPASLGDPFESPLRGMRNVLLTPHIGGSTEEAQMGIGREVAEKLVKYSDDGSTLGAVNFPEVALPQQASVTRFLHIHRNVPGVMSALNEVFSSHHINIRGQYLMTNPRVGYVVVDVEKDLKAGEGFRQALAAINGTLRFRFLN

SEQ ID NO: 64661 - DNA, 1578 bp, Moorella thermoacetica ATCC 39073
  CDS (1)..(1578): transl_table=11
atgcgtgttttagctctggacggcgttgacgcgcggggcctggccgctctccgggaggccgggctggaagtaacgacctccggtaagatggaggaggaagaattgaaagaggctattcgcgactgcgaagccctgatcgtccgcagcggcacgagggtgacagcagcagccattaatgccgctaaaaagttaaagattatcgcccgtgccggggtcggtaccgacaacatcgatgtagcggcggccactgaaaggggtattgtagtggtcaatgcccctgagggcaataccattgctgccgctgaacacaccatagccatgatgctggccctggcccgtaatatcccccaggccagcgccgccctgaaacagggccgctgggaaaagaaaaaatttgtaggcgtggaactgcggggaaaaaccctggggataatcggcctgggcaagattggccgggaggtggcccgtcgcgcccggggcctggaaatgaaggtggtggcctttgatccctatgtagattcggaacaggcggcccgtctggaagtcgagttggtgcccctggaaacccttctggccggggctgattttgtaaccgtgcatctgcccctcaccaaagacacccgccacctcctggaccgggagaagctggggctcatgaagcagggagcgcgggttttaaatgtcgccagggggggtattattgacgaaggagccctctatgaagccctgaaggcgggccacctggcgggggcggccctggatgtctttgaggaagaacccctggggcagagccccctgctggaactggaaaatgtcattgtgaccccgcacctgggggcttccacccgggaggcccaggtggcagtggcggtggaggtggccggtgacgttatccgttgcctccagggtgaaccggtgctcaatgccgtcaatataccggtggttcgggggcatctggcggaggtcctccacccctacctgcagctggcggagaagctgggcagtttcctctcccagctgatggagagccccatcctcacggcagaaatatgttttaacggcgagctggccggctacgacctggccccccttaccagttcctttttaaaggggctcttacggcccctcctggctgaagccgtcaattacgtgaacgcccccctggtggccaaaaaacggggtatccgtatccgagagaaaaagagcccggagatggagtactttgccaacctgatcggcgttcaggtccagggtcggcgggagtcccaccgcctggccgggaccgttaaccaggctggggaaccccggttggtaaacctggacggttacagcgtggacactatcccggccggccatcttctggtgatacctcacctggaccggccccggattatcggcccggtggccctggctatcggtgaccacggcgtcaatatcgcggcgatgcaggtgggccggcgcgagcggggcggccaggccgttatgctaatcagcgtcgattccgaagtcccccgggccgccctggacgccattcgccaggtggacggcgtcctggacgtgcgttatatctccctttag

SEQ ID NO: 64662 - protein, 525 aa, Moorella thermoacetica ATCC 39073
MRVLALDGVDARGLAALREAGLEVTTSGKMEEEELKEAIRDCEALIVRSGTRVTAAAINAAKKLKIIARAGVGTDNIDVAAATERGIVVVNAPEGNTIAAAEHTIAMMLALARNIPQASAALKQGRWEKKKFVGVELRGKTLGIIGLGKIGREVARRARGLEMKVVAFDPYVDSEQAARLEVELVPLETLLAGADFVTVHLPLTKDTRHLLDREKLGLMKQGARVLNVARGGIIDEGALYEALKAGHLAGAALDVFEEEPLGQSPLLELENVIVTPHLGASTREAQVAVAVEVAGDVIRCLQGEPVLNAVNIPVVRGHLAEVLHPYLQLAEKLGSFLSQLMESPILTAEICFNGELAGYDLAPLTSSFLKGLLRPLLAEAVNYVNAPLVAKKRGIRIREKKSPEMEYFANLIGVQVQGRRESHRLAGTVNQAGEPRLVNLDGYSVDTIPAGHLLVIPHLDRPRIIGPVALAIGDHGVNIAAMQVGRRERGGQAVMLISVDSEVPRAALDAIRQVDGVLDVRYISL

SEQ ID NO: 64663 - DNA, 1275 bp, Burkholderia thailandensis E264
  CDS (1)..(1275): transl_table=11
atggcgacgtgcgcgcaccgcgccgggatttccggcttccgctacgattcgaccaccacgctaggtaacatgacttccgttctcctcctcgaaaacattcacgacagcgcgtcccggcatttcgccgacgcgaatgtcgacatcgagcggcgcaagggcgcgctcgccggcgacgagcttcagcgcgcgctgctgcagcatcaattgatcggcattcgctccgcgacgcatctgacgcgcaacgagatcgacgccgcgcgtcatctgctcgcgatcgggtgtttctgcatcggcacgtcgcaggtcgatttgtcggctgccgcgcatcacggcattccggtgttcaacgcgccgttctcgaatacgcggtcggtcgcggagctcgtgatcgccgaggcgatcctgttgctgaggcgcgtgccggagaagagtgtcctcgcgcatgcgggggaatgggcgaaaggtgcgggcggatcgttcgaggcgcgcggcaagacgatcgcgatcgtcggctacggcaacatcggcgcgcaagtcggcgtgcttgccgaggcgctcggcatgaaggtcgtctattacgacgtgcaggcgaagctgtcgctcggttccgcgcggccggcgcgttcgctgggcgaagcgatcgcgctcgcggacgtcgtcacgctgcacgtgcccgcaaccgcgacgacgcacaacatgatcgacgcgagtgtcctcgcgcagttcaaatcgaatgcgatcctgatcaatgcgtcgcgcggcaccgtcgtcgatatcgatgcgctgcgcgatgcgctcgtgcggaagcacctgagcggtgcggcgatcgacgtgtttccgcgcgagccgaagagcaacgcggaccgcttcgaatccgtgctgcaggggttgccgaacgtgatcctgacgccgcatatcggcggcagcacgcaggaagcgcaggagaacatcggcgcggaggtgtcgtcgaagcttgtcgcgttcctgacgcgcggcgataccgcgggcgccgtcaatttcccgcaggtgagcccgggcgattgcacgtcggccgcgcggctcttgaacgtgcacggcaacgcgccgggcgtgctcgcggtgctcaacacgctgctcgcgcaagagggcgcgaatgtcgtagcgcagcatctgcaaacgcgcggcgatatcggctatgtggtgaccgatctcgaccgcgtgccgtccgacgcgtttcttgaaaagctgagcggcaaccgcgcatttactcgcagccggctgcttcgcagcgcatga

SEQ ID NO: 64664 - protein, 424 aa, Burkholderia thailandensis E264
MATCAHRAGISGFRYDSTTTLGNMTSVLLLENIHDSASRHFADANVDIERRKGALAGDELQRALLQHQLIGIRSATHLTRNEIDAARHLLAIGCFCIGTSQVDLSAAAHHGIPVFNAPFSNTRSVAELVIAEAILLLRRVPEKSVLAHAGEWAKGAGGSFEARGKTIAIVGYGNIGAQVGVLAEALGMKVVYYDVQAKLSLGSARPARSLGEAIALADVVTLHVPATATTHNMIDASVLAQFKSNAILINASRGTVVDIDALRDALVRKHLSGAAIDVFPREPKSNADRFESVLQGLPNVILTPHIGGSTQEAQENIGAEVSSKLVAFLTRGDTAGAVNFPQVSPGDCTSAARLLNVHGNAPGVLAVLNTLLAQEGANVVAQHLQTRGDIGYVVTDLDRVPSDAFLEKLSGNRAFTRSRLLRSA

SEQ ID NO: 64665 - DNA, 1623 bp, Novosphingobium aromaticivorans DSM 12444
  CDS (1)..(1623): transl_table=11
atgacggtgtctcattctgatggattggatcgaaacatgaccaagcctaaagtcctgatttccgacaagatggaccccaacgccgcccgcatcttcaccgagatgggctgcgacgtcgatgtgatcaccggcgagacgccggaacagctcatcgcccgcatcggcgagtacgatggccttgccatccgttcctcgaccaaggtgaccaaggcgatcctcgatgccgccaccaacctcaaggtcatcggccgcgccggcatcggcgtcgacaacgtcgatatcccggcagcatcggcgcagggcgtggtggtcatgaacaccccgttcggcaactcgatcaccactgccgaacacgccatcgcgatgatgttcgcgctcgcgcggcagatccccgaagccaacgcccagacccaggcgggcctgtggccgaagaacggcttcatgggcgttgaagtcaccggcaagacgctcggcctgatcggcgcgggcaacatcggctcgatcgtcgcctcgcgtgcgctgggcctgaagatgaaggtcgttgccttcgacccgttcctgacgcccgaacgcgccgtggaaatgggtgtcgagaaggccgatctcgaaacgctgctggccaaggcggacttcatcacgctgcacacgcctctgaccgaccagacccgcaacatcctcagccgcgagaacatcgccaagtgcaagaagggcgtgcgcatcatcaactgcgcgcgtggcggtctcgtcgatgaagccgccctcaaggacgcgctcgattccggccacgtcgccggcgccgcgctcgacgtgttcgagaccgagcccgccaaggaatcgccgctgttcggcaccccgaacttcatctgcaccccgcacctgggcgcgagcacgaccgaagcgcaggtcaacgtggcgctccaggtggccgagcagatggcggacttcctcgtcaccggcggcgtcaccaacgcgctcaacatgccttcgctctcggccgaggaagcgccgaagctgcgcccctacatggcgctggccgaaaagctgggcagcctcgtcggccagcttgcgcacgacaacctcaccaagatcgccatcgaggtcgagggcgctgccgcgcagctcaaccagaagccgatcaccgcggctgtcctggccggcctgatgaagcagtattcgcagaccgtgaacatggtcaacgcgccgttcctcgccaaggaacgcgggctggacgttcgcgaagtgcgccatgaccgcgagggcgaataccgcacgctggtgcgcgtcaccgtcagcacttcgcagggcgaacgttcggtggccggcacgctgttcggcaacggccagccgcgcctcgtcgagatcttcggcatcggcatcgaggccgacctcgacggcgacatgctctacatcgtcaactccgacgcgcccggcttcatcggccgcatcggcacgctgctgggtcagaacacgatcaacatcggcaccttccacctcggccgccgcgaagctggtggcgaggccgtgctgctgctgtcgctcgacaacccggtcagcgaggacgttctcaaggaagctcgcgaaatccagggcgttcgggtcgtcaaggcgctcaagttcgcctga

SEQ ID NO: 64666 - protein, 540 aa, Novosphingobium aromaticivorans DSM 12444
MTVSHSDGLDRNMTKPKVLISDKMDPNAARIFTEMGCDVDVITGETPEQLIARIGEYDGLAIRSSTKVTKAILDAATNLKVIGRAGIGVDNVDIPAASAQGVVVMNTPFGNSITTAEHAIAMMFALARQIPEANAQTQAGLWPKNGFMGVEVTGKTLGLIGAGNIGSIVASRALGLKMKVVAFDPFLTPERAVEMGVEKADLETLLAKADFITLHTPLTDQTRNILSRENIAKCKKGVRIINCARGGLVDEAALKDALDSGHVAGAALDVFETEPAKESPLFGTPNFICTPHLGASTTEAQVNVALQVAEQMADFLVTGGVTNALNMPSLSAEEAPKLRPYMALAEKLGSLVGQLAHDNLTKIAIEVEGAAAQLNQKPITAAVLAGLMKQYSQTVNMVNAPFLAKERGLDVREVRHDREGEYRTLVRVTVSTSQGERSVAGTLFGNGQPRLVEIFGIGIEADLDGDMLYIVNSDAPGFIGRIGTLLGQNTINIGTFHLGRREAGGEAVLLLSLDNPVSEDVLKEAREIQGVRVVKALKFA

SEQ ID NO: 64667 - DNA, 1236 bp, Francisella tularensis subsp. holarctica
  CDS (1)..(1236): transl_table=11
atgagccagctatctcttaataaaaagaaaatcccaattcttctcttagaaggtatacactcaaatgcagttgaatcattcaaagctgcaggagacgaaaatatcgaattactaaacactgcgcttgaaggacaagaactaatagataaacttaaagattttaaaattgtcggcttacgctctcgtactcaacttacaaaagaagtcctagagcaatctgatcaccttatagctattggttgcttttgtattgatactaatcaagtagatcttagaactgcacaaagcttaggtatacctgtttttaatgccccattttcaaatactcgtagtgttgctgagcttgtcttagaagaagctattttactgatacgtaatgtaattgacaaaaatgctaaagcccacagaggtgaatggcttaagtcagctgataatgctaatgaagtaagaggtaaaaccttaggaattgttggttacggtcatatcggtatgcagcttggagttctagcagaaaatatcggtttaaatgtgatattttatgatatcgaagagaaactacctttaggtaatgcttgtcaagttgatagtttagcaacgctactacaacaatctgatgtagtttctctacatgtaccacaactgccaactactgcaaatatgatatcaaccaaagaattcgctcttatgaagcaaaatgcagtgcttatcaatgcttcaagaggtaatgtaatagatattgatgctttggttgatgcactaacaagctccaagcttaaaggtgcggcaattgatgttttccctaaagatccatcatcaaaaggtgaaatttttgaaagtcctttaagaggccttgataatgtttttctaacactacacataggtggcagtactatagaggcacaagaaaatattgctacagaagtaagtgcaaaattaatcaaatattcagacaatggttcaacattaaatgcagtaaacttttctgaattatccttacctagtcatagagaaactcatcgaatcttacatattcatcagaatatcccaggtattattaatgagctaaatagaattttggcgtctaaaaatatcaatgttgaaggtcaatatttaagaacattagaaaatattggttatgttgttatggatattaaatcaagctcagatgaggctaaagaacttattgatgaattcaaaaaagttaaagctaccataaaagcccgttatttagtataa

SEQ ID NO: 64668 - protein, 411 aa, Francisella tularensis subsp. holarctica
MSQLSLNKKKIPILLLEGIHSNAVESFKAAGDENIELLNTALEGQELIDKLKDFKIVGLRSRTQLTKEVLEQSDHLIAIGCFCIDTNQVDLRTAQSLGIPVFNAPFSNTRSVAELVLEEAILLIRNVIDKNAKAHRGEWLKSADNANEVRGKTLGIVGYGHIGMQLGVLAENIGLNVIFYDIEEKLPLGNACQVDSLATLLQQSDVVSLHVPQLPTTANMISTKEFALMKQNAVLINASRGNVIDIDALVDALTSSKLKGAAIDVFPKDPSSKGEIFESPLRGLDNVFLTLHIGGSTIEAQENIATEVSAKLIKYSDNGSTLNAVNFSELSLPSHRETHRILHIHQNIPGIINELNRILASKNINVEGQYLRTLENIGYVVMDIKSSSDEAKELIDEFKKVKATIKARYLV

SEQ ID NO: 64669 - DNA, 1236 bp, Saccharophagus degradans 2-40
  CDS (1)..(1236): transl_table=11
atgaccgatagcaaaacctcgctaaacaaagacaaaattaaatttctactgctggaaggcgtacaccagtccgctgtagacagtttgaaaaacgccggctacaccaatattgagtaccacaaagcggcattgaacgaagacgagctaatagaagcaataaaagatgcacactttgttggcttgcgttcacgcacccagttaacccgcaaggtatttgaaaacgcgccgaaattagttgctgcaggttgtttctgtattggtaccaaccaagtagacctacaagccgccaccgagcacggcgtagccgtatttaacgccccctactccaacacccgcagcgtggcagaactggttattgctgaagcaattttattattgcgcggtattccggctaaaaatgctggctgtcaccgcggtgaatggcaaaaaagtgccgagggctctttcgagattcgcggcaaaaccttgggcattattggttacggctctattggtagccaaatgagcgtactggccgaatctttgggtatgcgcgtatttttctacgatgttatcaaccgtttgccattgggcaacgccgtacagtgcaaatcgttaaacgaactgttggccaaatcagatgttgttagcttgcatgtacccgaaaccggcgccactaaaaacatgattggcgagcgcgaaattaacgccatgaagaaaggcgctattttacttaacgcctcacgcggtaccgttgtagatatcgatgccttagctgcagccatggagagcggccacatcgcaggttgcgccattgacgtattccccgttgaaccaaaaggtaacaacgaagaattccaaagcccattgcgcgcgttcgacaacgctattcttacgccgcacattggtggctccaccatggaagcacaagagaacattggctttgaagtagcagaaaaactggtaaaatactccgacaatggcaccaccatcacctctgtaaacttcccagaagtagccttgccttcgcacgacaaggtgcaccgcttgctgcacgtacacaaaaacgtaccgggtgtacttaccgcgattaacaaaatcttctcggaaagcgacatcaacatttgcggccagtacctgcaaaccaacgacaagctgggctatgtgattttagatgtagatcgcgcctacagcgagatggcacttgagcaattgcgtaaagtgactggcacaattcgctgccgagtattattttaa

SEQ ID NO: 64670 - protein, 411 aa, Saccharophagus degradans 2-40
MTDSKTSLNKDKIKFLLLEGVHQSAVDSLKNAGYTNIEYHKAALNEDELIEAIKDAHFVGLRSRTQLTRKVFENAPKLVAAGCFCIGTNQVDLQAATEHGVAVFNAPYSNTRSVAELVIAEAILLLRGIPAKNAGCHRGEWQKSAEGSFEIRGKTLGIIGYGSIGSQMSVLAESLGMRVFFYDVINRLPLGNAVQCKSLNELLAKSDVVSLHVPETGATKNMIGEREINAMKKGAILLNASRGTVVDIDALAAAMESGHIAGCAIDVFPVEPKGNNEEFQSPLRAFDNAILTPHIGGSTMEAQENIGFEVAEKLVKYSDNGTTITSVNFPEVALPSHDKVHRLLHVHKNVPGVLTAINKIFSESDINICGQYLQTNDKLGYVILDVDRAYSEMALEQLRKVTGTIRCRVLF

SEQ ID NO: 64671 - DNA, 1233 bp, Methylobacillus flagellatus KT
  CDS (1)..(1233): transl_table=11
atgacccaacaactttccctgccaaaggacaagatccgttttttactgctggaaggcgtgcaccaaaacgccgtggaggtgctcaatgccgccggttaccgtaatatcgactatcgcaagactgcactggacgaagatgcgctgatcgaggcaatcaaggatgtacatttccttggcattcgctcccgcacccaggtaacggccaaggtgctggacgctgccaataaactcactgccatcggctgcttctgcatcggcaccaaccaggtggacctggatggcgcgctggagcggggcatcccagtattcaatgccccttactcgaacactcgctccgtcgccgaactggtactggcgcagactattctgctgctgcgcggtattccggagaagaacgcgttggtgcacaggggcggctggaccaagtccgctgaaggatccttcgaggcgcgaggcaagaccttgggtatcgtcggttatggttccattggttcgcagctgtccgtgttggccgaaagcctgggcatgaaagtgatctactttgatgtcattgccaagctgcctttgggcaatgcacgccaggttggcacgatggaggaattgttgtcgcaggcggatgtggtgtctctgcacgtgccggaattgccctccaccaagaacatgatgcgcgccgagcagttcgcgcaaatgaagaaggggagcatcttcatcaatgcggcccgcggcacctgcgtggatatcgacgcattggcacgggcgatcgagtccaagcacctggccggtgcggcgatcgatgtattccccgttgagcccaagagcaatgatgaggagttccagtcacctttgcgcgcttttgacaatgtcatcctcactccgcatatcggcggctcaacccaagaagcgcaagccaatatcggcatcgaggtcggcgagaagttcgtgcgctattccgacgcgggatcgacaatcactgccgtgaatttccctgaagtctctattccgaagcagccaggcacgcatcgcttgttgcatatccatcggaatgtgccgggtgtattgtccgctgtcaatagcctgttcgcgcgcaacaacatcaacattgcggcccagagcatgatgaccaagggcgatatcggttacatgatcatggatgtggaagcctcggcatctagcgccgcgatcgaagcgttgcagacggttgagggaacattgcgcactcgagtgctttattaa

SEQ ID NO: 64672 - protein, 410 aa, Methylobacillus flagellatus KT
MTQQLSLPKDKIRFLLLEGVHQNAVEVLNAAGYRNIDYRKTALDEDALIEAIKDVHFLGIRSRTQVTAKVLDAANKLTAIGCFCIGTNQVDLDGALERGIPVFNAPYSNTRSVAELVLAQTILLLRGIPEKNALVHRGGWTKSAEGSFEARGKTLGIVGYGSIGSQLSVLAESLGMKVIYFDVIAKLPLGNARQVGTMEELLSQADVVSLHVPELPSTKNMMRAEQFAQMKKGSIFINAARGTCVDIDALARAIESKHLAGAAIDVFPVEPKSNDEEFQSPLRAFDNVILTPHIGGSTQEAQANIGIEVGEKFVRYSDAGSTITAVNFPEVSIPKQPGTHRLLHIHRNVPGVLSAVNSLFARNNINIAAQSMMTKGDIGYMIMDVEASASSAAIEALQTVEGTLRTRVLY

SEQ ID NO: 64673 - DNA, 1572 bp, Methanococcoides burtonii DSM 6242
  CDS (1)..(1572): transl_table=11
atgaaagtattggtaagcgattcattatcagaggaaggagtttcaaagttaagtgagcattttgacgttgatgtttcaacgggtctttctgaggacgagcttgtagagaagatcggtattttcgatgctcttgtaattcgcagtggtacacatgtcacaaaaagggtaatcgaggccgctgacaaccttaaaattataggcagggctggtgttggtgtcgataatgttgatgttgatgcagctactgaaaaaggtatcattgttgtaaatgctcctgaagggaacatgctttctgcggcagaacacactatcgctatgatgatgtcgatggcaaggaacattcctcaggcaaatgcttctttaaaggccaagaaatgggaacgcaagaacttcatgggggttgaggttaacggcaaaacacttggtgtaataggtctgggacgtattggtgctgaggtggcaaaacgtgcacagggtcttgaaatgtcaattctggcctatgatcctttcgttactgaggaccgtgctaaggatatgggcgttgaacttacgactgttgatgatattgctcagagggcagatttcattacggttcatactccgctcataaaagagacgcgtaatatactcgataaagcacagtttgatatgatgaagagttccacaagggtcatcaattgtgcacgtggaggaattatcaatgaggaagctcttgctgatgcggcaaggaatgggaagatcgcaggtgctgccattgatgtgttcaccagtgagcctccatttgactgtcctttcattggtcttgataatgtgatcgtaacacctcatttgggtgcatcgacagaagaagcccaggtcaatgttgcagtgtctgttgctgaagagatcatctctgttctgaatggtggttctgcacgtaatactatcaatattcctgctgtgaagccggaagtaatggcaatacttgctccttatatcggacttgctgagacgttggggagtgtggcagcacagcttcttgatgcaaattataataagatcgagatatcttacaatggtgagatcgctgataaggatacaagggctgtaacggttgcagctttaaagggtattcttgaggatgcagttggttcggctgtaaactatgtgaatgctccttcgttggctaagtccagaaatgttgaggtagttgagagtaaatccgaaacttccggggatcacgcttcaaccattcgcataactcttttccagggtacgaacacaaagtccgtttcaggtgcagttgtcggtcgcgagcctaagatcgttatgatcgatggccagtatgttgaccttgttccgaatggatttatgatcgtgtcgaatcatgtcaatagaccgaatgtcattggaccatgctgtatcgtgcttggtgagaataatattaatatttccggtatgcaggtgggccgtgtggaagttggtggcaataccataatggcgctaaatgttgataatgaggtctctgagggaattcttgatgagatccgtgctattaatggcatattggatgcgaaattagttacactttga

SEQ ID NO: 64674 - protein, 523 aa, Methanococcoides burtonii DSM 6242
MKVLVSDSLSEEGVSKLSEHFDVDVSTGLSEDELVEKIGIFDALVIRSGTHVTKRVIEAADNLKIIGRAGVGVDNVDVDAATEKGIIVVNAPEGNMLSAAEHTIAMMMSMARNIPQANASLKAKKWERKNFMGVEVNGKTLGVIGLGRIGAEVAKRAQGLEMSILAYDPFVTEDRAKDMGVELTTVDDIAQRADFITVHTPLIKETRNILDKAQFDMMKSSTRVINCARGGIINEEALADAARNGKIAGAAIDVFTSEPPFDCPFIGLDNVIVTPHLGASTEEAQVNVAVSVAEEIISVLNGGSARNTINIPAVKPEVMAILAPYIGLAETLGSVAAQLLDANYNKIEISYNGEIADKDTRAVTVAALKGILEDAVGSAVNYVNAPSLAKSRNVEVVESKSETSGDHASTIRITLFQGTNTKSVSGAVVGREPKIVMIDGQYVDLVPNGFMIVSNHVNRPNVIGPCCIVLGENNINISGMQVGRVEVGGNTIMALNVDNEVSEGILDEIRAINGILDAKLVTL

SEQ ID NO: 64675 - DNA, 1299 bp, Ralstonia metallidurans CH34
  CDS (1)..(1299): transl_table=11
gtggtaaggtgtgcccatgcgcgtcccgcatatcgcatattgcatagggacgccccgtgcctttccaactctcctgcattcagcccgaccatcatggccagcgccctgcttctcgagaacatccacgccagcgcccagcagttgctgggccgccaccagatcgacctcgccacccagggcaaggccctggccggcgacgcgctgcttgccgccgtgcgcgatcacgaactgctgggcattcgctcggctaccaccctgacagccgaagcgttcgccaaggcgcagcggctgctcacggtcggctgcttctgcatcggcacgtcccaagtggacctgggcgcggctgcccatgccggcatcccggttttcaatgcgccgttttcgaacacacgttccgtggccgagctggtcatcggccaggccatcatgctgatgcggcgcatcccggaaaagagccgcgccgcccacagcggccaatggcagaaaaccgccaagggcgccttcgagatccggggcaagaccatggcggtgatcggctatgggaacatcggcgcgcaggtcggcatcctggccgaggcgatggggatgcgcgtggtgttctacgacatccgcccccgcctgtcgatcggaggcgccatgccggtgcactcgctcgaagatgccctgtcgcaggccgacgtggtgacgctgcacgtccccgccacgccgcagacacgcaacctgatggatgccaaggcactggctgccatgcgacatggcagcatcctgatcaatgcctcgcgcggcaccgtggtggatatcccggcgctggcgcaattgctggacaacgggcaactggccggcgcggccatcgacgtgttcccggaagagccgcgcagtaacgccgatccgttcgtctcgccgctgcagggcaagccgaatgtcatcctgacgccccatgtcggcggcagcaccgaggaagcgcaggagaacatcggcgtggaagtagcgaccaagctggtcaactttctcgaaaccggcgcgaccctgggcgcggtgaacctgccccagattcagccagcgccgcaacaggctccagcccgcgtgctcaacatccactacaaccggccgggcacgctgtcgcacttcaaccaggcgctggccgagatcggcgcgaatatcgtcgcccagcaactgcagaccgagggcgatattggctacgcgattaccgacatcagcctggtgccgcctgccggctgggcggaggcgctgatgaaggatgacgccttcattcgcacccgggtgatcgtggcgccctga

SEQ ID NO: 64676 - protein, 432 aa, Ralstonia metallidurans CH34
MVRCAHARPAYRILHRDAPCLSNSPAFSPTIMASALLLENIHASAQQLLGRHQIDLATQGKALAGDALLAAVRDHELLGIRSATTLTAEAFAKAQRLLTVGCFCIGTSQVDLGAAAHAGIPVFNAPFSNTRSVAELVIGQAIMLMRRIPEKSRAAHSGQWQKTAKGAFEIRGKTMAVIGYGNIGAQVGILAEAMGMRVVFYDIRPRLSIGGAMPVHSLEDALSQADVVTLHVPATPQTRNLMDAKALAAMRHGSILINASRGTVVDIPALAQLLDNGQLAGAAIDVFPEEPRSNADPFVSPLQGKPNVILTPHVGGSTEEAQENIGVEVATKLVNFLETGATLGAVNLPQIQPAPQQAPARVLNIHYNRPGTLSHFNQALAEIGANIVAQQLQTEGDIGYAITDISLVPPAGWAEALMKDDAFIRTRVIVAP

SEQ ID NO: 64677 - DNA, 1596 bp, Silicibacter sp. TM1040
  CDS (1)..(1596): transl_table=11
atggcccccaaagtactcatctccgacaaactctcggacgccgccgttcagatcttccgtgaccgcggcattgacgtggatttcctacccgatgtgggcaaggacaaggaaaagctggctgagatcattggccaatatgatggcctcgcgatccgctccgccaccaaagtgacgccgaccattctggaaaacgccaccaacctaaaggtgattggccgcgccgggatcggcaccgacaacatcgacaaggaagccgcgtcgaaaaagggtgtgatcgtcatgaacactcccttcggcaacatgatcaccaccgccgaacatgcgattgcgatgatgttcgccgttgcgcgacaggtccccgaggcctctgcctcgacccatgccgggaaatgggaaaagtccaaattcatgggcgttgagctgaccggcaagaccctcggtgttattggtgcgggcaacattggcggcatcgtctgcgatcgcgcccgtgggctgaagatgaaggttgtggcctatgatccgttcctatccgaggaaaaggccaagaagatgcaggtcgaaaaggtcgagctggacgaactgctcgcgcgcgctgatttcatcacgcttcatgttccgctgaccgagcagaccaagaatatcctgagccgcgaaaacatctccaagaccaagaaaggcgtgcgcatcatcaactgtgcccgtggcggtctggtggatgaagaagccctggccgaagccctgacctccggccatgtggctggcgcggcatttgatgtattctctgtggagcctgcgaaggaaaacccgctcttcaacctgcccaacgtggtctgcaccccgcacctcggcgccgcgacgaccgaggcgcaggaaaacgtggcgctgcaagtcgcagatcagatggcgaactacctcttgaccggtgccgttgaaaacgcgctcaacatgccatcggtgacggccgaggaagccaagatcatggggccgtggatcaaactggccgatcatctcggggcctttgcgggtcagatgaccgacgagccgattactgcgatcaatgtgctctacgatggtgtggcagcggatatgaacctcgacgcgctgaactgctcggtggttgcaggcatcatgaaaaaggtgaacccggatgtgaacatggtctcggcacccgttgtggccaaagaacgcggcatccagatctctaccaccaatcaggacaagtccggctcttttgatggctatatcaaggtgactgtcgtcacggcaaaacgcgagcgctctgtcgcaggcaccgtgttctcggatggcaaaccgcgcttcatccagatcaagggcatcaatatcgatgccgaagtgggcgcgcatatgctctacaccaccaaccaggacgtgccgggtatcatcggcaccttgggtcagactttgggcgatatggacgtcaacatcgcgaactttacgcttggccgaaacgaggtcggcggcgaagcgatcgcgctcctttatgtggatgcggaggtccccgcagacgcgcgtgccaagctggcagagaccggttacttcacccagatcaagccgctggcctttgacgtcgcctga

SEQ ID NO: 64678 - protein, 531 aa, Silicibacter sp. TM1040
MAPKVLISDKLSDAAVQIFRDRGIDVDFLPDVGKDKEKLAEIIGQYDGLAIRSATKVTPTILENATNLKVIGRAGIGTDNIDKEAASKKGVIVMNTPFGNMITTAEHAIAMMFAVARQVPEASASTHAGKWEKSKFMGVELTGKTLGVIGAGNIGGIVCDRARGLKMKVVAYDPFLSEEKAKKMQVEKVELDELLARADFITLHVPLTEQTKNILSRENISKTKKGVRIINCARGGLVDEEALAEALTSGHVAGAAFDVFSVEPAKENPLFNLPNVVCTPHLGAATTEAQENVALQVADQMANYLLTGAVENALNMPSVTAEEAKIMGPWIKLADHLGAFAGQMTDEPITAINVLYDGVAADMNLDALNCSVVAGIMKKVNPDVNMVSAPVVAKERGIQISTTNQDKSGSFDGYIKVTVVTAKRERSVAGTVFSDGKPRFIQIKGINIDAEVGAHMLYTTNQDVPGIIGTLGQTLGDMDVNIANFTLGRNEVGGEAIALLYVDAEVPADARAKLAETGYFTQIKPLAFDVA

SEQ ID NO: 64679 - DNA, 1254 bp, Myxococcus xanthus DK 1622
  CDS (1)..(1254): transl_table=11
atgagccctccccagttcccgccctctccgacgcgcgccatcagcagtgacggccccttccgagccctgctgctggagaacatccacccgtccgcgggggagatgctggccgccgagggcttccaggtggagcgcgtctcgtccgccctcaagccggacgaactggcggagcggctgaagggggtgcacctgctgggcatccgcagcaagacgacggtgccgctcgcggcgctggagcacgcggagaacctgctggccattggggccttctgcatcggcaccaaccaggtggacctgacgtccgccaacacgcacggcatccccgtcttcaacgcgcccttcagcaacacgcgcagcgtggcggagatggtgattgcggaagtcatcgtcctgacgcggcagctcttcgagcgcagccaggaggtccacgcgggccagtggcgcaaggtggccaccggcagccatgaggtgcgcggcaagacgctgggcatcatcggctatggccacatcggctcgcagctgggcgtcatcgccgaggcgctgggcatgcgcgtcctctacttcgacgtgatgaccaagctgccgctgggcaacgcgcagccagccgtcaccctggaggagctgctcggcgcttccgacttcgtcaccctccacgtgcccgcgctgcccaccacgcacatgatgatgggcgccgagcagattgcccagatgaagaagggcgcctgcctcatcaacgccagccgaggcacggtggtggacatcgacgcgctggcgcgggcgctccagtcccagcacctgggcggcgccgcggtggacgtctacccggaggagccggagagcaactcggacggcttcgtcaccgcgctccagggcctgcccaacgtggtcctcacgccgcacatcggcgggtccacggaagaggcgcaggcctccatcggcaaggaggtggccaccagcctgctgaagtacttcaaggcgggcgccagcacgggcgcggtcaacttcccgaacatcgaggcgccgctcatcccgggcacgcaccgcatcctcaacgtgcaccgcaacatcccgggcgtgctgcgcgacatcaaccgcatcgtctccgacctcaacgccaacatccacgcccaggtgctcagcacggacgccaacatcggctacctgctgatggacctggaccaggacgtgtccaccccggtgtgcgaggccatcgccgggctggagacggacatcaagacgcgcatcctgtcctga

SEQ ID NO: 64680 - protein, 417 aa, Myxococcus xanthus DK 1622
MSPPQFPPSPTRAISSDGPFRALLLENIHPSAGEMLAAEGFQVERVSSALKPDELAERLKGVHLLGIRSKTTVPLAALEHAENLLAIGAFCIGTNQVDLTSANTHGIPVFNAPFSNTRSVAEMVIAEVIVLTRQLFERSQEVHAGQWRKVATGSHEVRGKTLGIIGYGHIGSQLGVIAEALGMRVLYFDVMTKLPLGNAQPAVTLEELLGASDFVTLHVPALPTTHMMMGAEQIAQMKKGACLINASRGTVVDIDALARALQSQHLGGAAVDVYPEEPESNSDGFVTALQGLPNVVLTPHIGGSTEEAQASIGKEVATSLLKYFKAGASTGAVNFPNIEAPLIPGTHRILNVHRNIPGVLRDINRIVSDLNANIHAQVLSTDANIGYLLMDLDQDVSTPVCEAIAGLETDIKTRILS

SEQ ID NO: 64681 - DNA, 1599 bp, Mesorhizobium sp. BNC1
  CDS (1)..(1599): transl_table=11
atggcacctcgcgttctcgtttccgacaagctttccccgaccgcggtcgacatcttccgtcagcacggcgtggaggtggattaccagccggacctcggcaaggataaggacaagcttctttccgtcatcgaccagtatgacggcctcgccattcgttccgccacgaaggtgacggaaaagctgatcgccgccgccacaaatctgaaggtgatcgggcgtgcgggtatcggcgtcgataatgtcgatatccccgccgcgtcgcggcgaggcatcatcgtgatgaacacgcctttcggcaattccatcaccacggctgagcacgctgtcgccatgatctttgccgtggcgcggcagatccccgaagccaatgcttccacccatgcgggcaagtgggagaaaaaccgcttcatgggggtggagatcaccggcaaaacgctgggcgtaatcggctgcggcaatatcggctcggtggtcgcaatgcgcgccatcggcctcaagatgcatgtgattgcctacgatccgttcctttcggaagacagagcggaggaactgggcgtggagaaggtggagctcaacgagctcttcgcccgcgccgatttcattaccctgcatactccgctgaccgaaaagacgcgcggcatcatcaatgcggctgcgatcgccaagatgaaagacggtgtgcgcatcgtcaattgcgcgcgcggcggcctcattgtcgaagccgacctggtcgaggggctgaaatccggcaaggtggcgggcgccggcatcgacgttttcgagaacgagccggcgaccgagaacccgctcttcaacctgcccaacgtggtctgcacgccgcatttgggcgcctctaccaccgaggcgcaggaaaatgtggcgctgcagattgccgagcagatgtcggagtacctcatcaaaggcgctgtgaccaacgcgatcaacatgccttccatcaccgccgaggaagcgccgcgtcttaagcctttcatcaagctggccgaagtgctgggcgcgttcgtgggccaagtgaccgacgagccgatcgcgggcgtggagatacttttcgacggctcaaccgccgccatgaatacccgagccctcatcagtgccgcacttgccggcctgatccgcccgcaggtgaatgacgtcaatatggtctccgcccccatcatggtaaaggagcgcggcatcatcgtctcggaggtgaagcgcgacaagtcgggcgtgttcgacggctatatcaagctgacggtaaagacaccggagcggacgcgctccatcgccggtacggtgttttccgacgggaagcccaggttcatccagatcaagggcatcaatcttgacgcggaagtaggcgagcacatgctctacaccacgaacaatgacacgcctggcattatcggccagctcggcacaatctgcggcaagcacggggtgaacatcgccaatttccagctcggccggaatcggcccggcggcgatgccatcgcgctgctttatctcgatgccccgtttccgcagcccgtactggaagagctcaagtccaccggctctattatttcggccaagccgctgcggttcgacgtcggcaactga

SEQ ID NO: 64682 - protein, 532 aa, Mesorhizobium sp. BNC1
MAPRVLVSDKLSPTAVDIFRQHGVEVDYQPDLGKDKDKLLSVIDQYDGLAIRSATKVTEKLIAAATNLKVIGRAGIGVDNVDIPAASRRGIIVMNTPFGNSITTAEHAVAMIFAVARQIPEANASTHAGKWEKNRFMGVEITGKTLGVIGCGNIGSVVAMRAIGLKMHVIAYDPFLSEDRAEELGVEKVELNELFARADFITLHTPLTEKTRGIINAAAIAKMKDGVRIVNCARGGLIVEADLVEGLKSGKVAGAGIDVFENEPATENPLFNLPNVVCTPHLGASTTEAQENVALQIAEQMSEYLIKGAVTNAINMPSITAEEAPRLKPFIKLAEVLGAFVGQVTDEPIAGVEILFDGSTAAMNTRALISAALAGLIRPQVNDVNMVSAPIMVKERGIIVSEVKRDKSGVFDGYIKLTVKTPERTRSIAGTVFSDGKPRFIQIKGINLDAEVGEHMLYTTNNDTPGIIGQLGTICGKHGVNIANFQLGRNRPGGDAIALLYLDAPFPQPVLEELKSTGSIISAKPLRFDVGN

SEQ ID NO: 64683 - DNA, 1902 bp, Cytophaga hutchinsonii ATCC 33406
  CDS (1)..(1902): transl_table=11
atggaaacaatcgagaaggttccgtatttcgtcattgactttgacagtacatttactcaagttgaagcgttagatgaattggctacaatttcattagcaggtaatccaaatcaacagcagattattcagcaaataatcgaccttacaaatcttggtatggaaggcaaagggtccttcagtgaaaatcttgttaagagattacaactggttaaagccaacagatcgcaccttgctccgttgattgatttattacgttctaaagtttctaaatctgtaaaacgtaacaagcatttcttccgcgattacgctgaccagatctatattgtttcttccggttttaaagaattcattctgccgatcgtaacagaattcggtattaaggaagagcatgtaatggcaaatacgttcacgttcgacaatgatggcaacatcattggttgtgacgcgaacaacccgctcagccaggataaaggcaagatcaaattaatggagaagcttggcttaaccggtgatgtacacgtgatcggcgatggttatacggactacgaaatcagaggtgcgggtcttgcttctaaattctatgcattcaccgaaaacgtaagccgcgctgctgttactgcaaaagcagacagcattgcgcctagcttcgacgaaatattatttcaggaaaaacttccgatgacgatctcttatccgaagaaccgcatcaaagttttgttgctggaaaacattcacacagatgctttcaaattattcagcgaagaaggatataccgttgaagtaattgcaagtgcattagaggaagatgaattgatcgaaaaaatcaaagacgtttccatcattggtatccgttctaaaacaacgatcacagcaaaagttttggagcacgctccaaaacttatcgcaatcggtgcgttctgtatcggcacaaaccagattgatttaaaagcagcacaaatgaaaggtgttgcagtattcaacgcaccattcagcaacacacgcagcgtggttgaattggctattggcgagatcatcatgctttaccgacgtacacttgagaaaagtatgcagatgcacgctggtaagtgggacaaatccgctaagaactcttttgagatcagaggtaaaaaattaggtcttgttggttatggcaatattggttcccagctttctgtcatcgcggaatcacttggtatggttgtgtattattatgatatcgttgaaagactctctcttggtaatgcaaagaaatgcagctctctgaaagaattattaaataccgtagatgttgtttcattacacgttgacggtagagcaagcaataaaggcatgtttggcgcgaaagaatttaatgaaatgagacagggttctattttcttaaacttggcgcgcggacctgtaacggatcttaaagccttatcagaaaatcttaagagtggcaaaatcttaggtgcaggtctggatgtatacgaatacgaaccgaaaaataacgatgaagaattcatcaatgacgtacgaggcttaccaaacgtaatccttacaccgcacattggtggttctacggaagaagcgcaatcaaacatcgggaatttcgtaccaaacagaattacggattacatcaacaacggtactacattacacagtgtaaacttcccgaacattcagttacctgaattacaggaaggccatcgtttcatgcacctgcacgaaaaccaaccaggtattttggcaaagatcaataacctgtttgcaaaacacaacatcaatattttagcacagtatttaaaaaccaacgaacaggttggatatgtaattacagatatcgctaagatctacgacaaagaagtactggacgaattaaaagaaattccaggaacaatccgtttcagaacgctttattaa

SEQ ID NO: 64684 - protein, 633 aa, Cytophaga hutchinsonii ATCC 33406
METIEKVPYFVIDFDSTFTQVEALDELATISLAGNPNQQQIIQQIIDLTNLGMEGKGSFSENLVKRLQLVKANRSHLAPLIDLLRSKVSKSVKRNKHFFRDYADQIYIVSSGFKEFILPIVTEFGIKEEHVMANTFTFDNDGNIIGCDANNPLSQDKGKIKLMEKLGLTGDVHVIGDGYTDYEIRGAGLASKFYAFTENVSRAAVTAKADSIAPSFDEILFQEKLPMTISYPKNRIKVLLLENIHTDAFKLFSEEGYTVEVIASALEEDELIEKIKDVSIIGIRSKTTITAKVLEHAPKLIAIGAFCIGTNQIDLKAAQMKGVAVFNAPFSNTRSVVELAIGEIIMLYRRTLEKSMQMHAGKWDKSAKNSFEIRGKKLGLVGYGNIGSQLSVIAESLGMVVYYYDIVERLSLGNAKKCSSLKELLNTVDVVSLHVDGRASNKGMFGAKEFNEMRQGSIFLNLARGPVTDLKALSENLKSGKILGAGLDVYEYEPKNNDEEFINDVRGLPNVILTPHIGGSTEEAQSNIGNFVPNRITDYINNGTTLHSVNFPNIQLPELQEGHRFMHLHENQPGILAKINNLFAKHNINILAQYLKTNEQVGYVITDIAKIYDKEVLDELKEIPGTIRFRTLY

SEQ ID NO: 64685 - DNA, 1584 bp, Trichodesmium erythraeum IMS101
  CDS (1)..(1584): transl_table=11
atgccaaaagttcttgtatctgattcaatcgatcaaaatggaataaatattctctcccaagtagctcaggtagatataaaaataggtctaccagtagaagaactagtaaaaattataccagaatatgatggtttaatgattcgctctggtaccaaagttaccaaagaaataatagaagctgccgataaactaaaaattattggtcgtgctggagtgggtgtagataatgtagacgtacaagcagcaacccgtaaaggtattgtggtagtcaactcaccagaaggaaatacaattgctgcagcagaacacgctttggcaatgatgttatctatgtcgcgccacgttccagaagctaaccaatcaattatcaatgctcaatgggaccgcaaaaagtttgtcggggtcgaggtctacaaaaaaactctcggtgttgttggtttaggtaaaattggctcccatgtagctaaggtagcaaaagctatgggaatgaaaattttggcttatgatccatttatttctgaagaaagagcagaacaattgggttgtagtttggtagatctggatcttttagtccaagagtctgattatattactctccatatacccaaaactgacgaaacttatcactcaattaatgctgaaacttttgccaaaatgaaacccacagctcggattattaattgttctagaggtggcattattgatgaagttgctttatccaaagctctaaaagaaggaaaaattgctggagctgctttagatgtatatgaaaatgagcctctagaagttgagtccccactacgagatttgggacaaaaaattgtgatgactcctcatttgggtgcttctactgctgaagctcaagtgaatgtagcaatagatgttgctgaacaaattcgagatgtattgttagggctgcctgccagatcggcagtgaatatccctggtatgtatcctgatactttaaaaaaactgaagccctatttacgattggccgaaactcttggtaatttggtaagtcagttagccggtgggcgtattgattttctcaatgttcgtcttgaaggagatttggccggtggagatagtaaacctgtagtagtaggagctttaaagggattactttctcaagctttgcgagagcgcgtcaattatgtaaatgcttttattgaagctaaagaacgaggtattcgagtagtggaaactagagatgattcagtacgagattatactggttcattacatctagaagcaaaagggtctctgggtgaacataatgttcgaggttctttgctgggaaaagatgagattcggattactaatattgatgggtttccaattaatgtccctcctagcccatatatgttattgactctccaccgagatatgccgggaattattggtaaaattggttcacttctggggagttttaatgtcaatattgctagtatgcaggtgggacgtaaaattgttagaggtgatgctgtaatggtattaagtgttgatgacccattaccagaagaaatattaactgaaattcttaaagaaccaggaattaggaatgcttatacagttgctctttga

SEQ ID NO: 64686 - protein, 527 aa, Trichodesmium erythraeum IMS101
MPKVLVSDSIDQNGINILSQVAQVDIKIGLPVEELVKIIPEYDGLMIRSGTKVTKEIIEAADKLKIIGRAGVGVDNVDVQAATRKGIVVVNSPEGNTIAAAEHALAMMLSMSRHVPEANQSIINAQWDRKKFVGVEVYKKTLGVVGLGKIGSHVAKVAKAMGMKILAYDPFISEERAEQLGCSLVDLDLLVQESDYITLHIPKTDETYHSINAETFAKMKPTARIINCSRGGIIDEVALSKALKEGKIAGAALDVYENEPLEVESPLRDLGQKIVMTPHLGASTAEAQVNVAIDVAEQIRDVLLGLPARSAVNIPGMYPDTLKKLKPYLRLAETLGNLVSQLAGGRIDFLNVRLEGDLAGGDSKPVVVGALKGLLSQALRERVNYVNAFIEAKERGIRVVETRDDSVRDYTGSLHLEAKGSLGEHNVRGSLLGKDEIRITNIDGFPINVPPSPYMLLTLHRDMPGIIGKIGSLLGSFNVNIASMQVGRKIVRGDAVMVLSVDDPLPEEILTEILKEPGIRNAYTVAL

SEQ ID NO: 64687 - DNA, 1230 bp, Shewanella sp. MR-4
  CDS (1)..(1230): transl_table=11
atggcgaaacattcgctggacaaggataagatcaagatcctgttgttggaaggcgtccaccaatctgcggtcgatgtatttgaacgtgctggatacaccaatatcgagtatcacaaagcctccttaggtgatgaagccctgctcgagtccatcaaagatgctcactttgttggtattcgttcccgtacccaattgaccgctgacgtgttaaaacgtgccgaaaaactgattgcgattggttgtttctgtatcggcactaaccaggtggatctggcgaccgccgaattgctcggtatcccggtatttaacgcaccgttttctaatacccgcagcgtagctgaactggtattaggcgaaatcatcatgttgatgcgcggcattcctgagcgtaatgcgattgcccaccgtggtggctggatgaagacagccgcaggcagttacgaagtccgtggcaaaaccttaggtgtgataggttatggccatattggtactcagctagggatcttggctgaaaccttaggtatgcgcgtggtgtttttcgatatcgaagacaaactgccattaggtaacgctcagcaaatccattcgatggaacaattactggcacagtccgatgtggtgagcttacacgtccctgagacagcgcaaactaaagatatgatcagcgcagcagaatttgcagccatgcgtaaaggcagcatcttcatcaacgcctcacgcggcactgtggttgatatcgatgccctgacggttgcccttaaagagcgtcaccttgcgggcgcggcaatcgacgtattccctgtcgagccacaatcgaatgatgatgaatttatcagcccattacgtggcttagacaatgtgctattgaccccgcacgtgggcggcagtactgctgaagcccaagaaaatatcggtatcgaagtggctggtaagttagccaaatactcagataacggttcgaccgtttctgcggttaacttccctgaagtgtcgctgccaatgcacaaaggcatttcgcgcttgctgcacattcaccaaaaccgtcctggcgtgctgatcaaaatcaacaaagctttctctgaaaaaggcatcaacattgccgctcagtatctgcaaaccactgctgaaatcggttatgtggtgatggaagtcgatactcaccaagccgaggaagcactggtcgaacttaaggccattgaaggcactctgcgcacccgcgtattgttctaa

SEQ ID NO: 64688 - protein, 409 aa, Shewanella sp. MR-4
MAKHSLDKDKIKILLLEGVHQSAVDVFERAGYTNIEYHKASLGDEALLESIKDAHFVGIRSRTQLTADVLKRAEKLIAIGCFCIGTNQVDLATAELLGIPVFNAPFSNTRSVAELVLGEIIMLMRGIPERNAIAHRGGWMKTAAGSYEVRGKTLGVIGYGHIGTQLGILAETLGMRVVFFDIEDKLPLGNAQQIHSMEQLLAQSDVVSLHVPETAQTKDMISAAEFAAMRKGSIFINASRGTVVDIDALTVALKERHLAGAAIDVFPVEPQSNDDEFISPLRGLDNVLLTPHVGGSTAEAQENIGIEVAGKLAKYSDNGSTVSAVNFPEVSLPMHKGISRLLHIHQNRPGVLIKINKAFSEKGINIAAQYLQTTAEIGYVVMEVDTHQAEEALVELKAIEGTLRTRVLF

SEQ ID NO: 64689 - DNA, 1596 bp, Rhizobium leguminosarum bv. viciae 3841
  CDS (1)..(1596): transl_table=11
atggcacctcgcgttctcgtatccgacgaattgtcggaaaccgccgtccagatttttcgcgatcgcggcgtcgaagtcgatttcgaaccgcagctcggcaaggacaaagaccgtctgctcgaagtcatcggcaagtatgatggcctcgccatccgctccgccaccaaggtgacggaaaagatcatcgagggggcgacgaacctcaaggtcgtcggccgtgccggcatcggcgtcgacaatgtcgatatcccggccgcctcgcgccgcggcatcatcgtcatgaacacgcccttcggcaactcgatcacgacagccgaacatgcgatcgcgctgatgttcgccgtcgcccgccagcttccggcagccgatacttcgacgcaggccggcaagtgggagaagtcgaagttcatgggcgtcgagatcaccggcaagacgctcggcgtcatcggcgccggtaatatcggttcgatcgtctgcgcccgggccatcggcctgaagatgcacgtcgtcgcctacgatccgttcctttccaaggagcgcgccgaagagatgggcgtcaccaaggtcgaactggaagagcttttcgcccgcgccgacttcatcacgctgcatgtgccgatgaccgacaagacgcggggtatcctcaacaaggaagcgctggcgaagaccaagcccggcgtgcgcatcatcaactgcgcccgtggcggcctggtcgatgaagcagcccttgccgaagcgatcaagtcgggccatgtcgcgggcgctgccttcgatgtgttcgaggtcgagccggccaaggaaagcccgctcttcggcctgccgaacgtcgtctgcacgccgcatctcggcgcctcgacgaccgaggctcaggagaacgtcgctttgcaggtcgccgaacagatggcggattaccttgtcaatggtgcggtctccaacgccatcaacatgccgtcgatcacggctgaggaagcgccgatcctgaagcccttcatccggcttgccgacgttcttggcgcctttgtcggccaggtcaccgaagagccgatcaaggaaatcgagatcctctatgacggcctcaccgccaacatgaatacgcgggcactgacgagtgcagtgctcgccggcctcatccgcccgcaggtctccgacgtcaacatggtttcggcgccgatcatgatcaaggaaaaaggtgtcgtgctctccgaggtcaagcgcgacaagacaggcgtcttcgacggctatatcaagctgacggtcaccaccgacagcatgacgcgctctgtcgccggcacggtgttttcggatggcaagccgcgtttcatccagatcaagggcatcaatctcgatgccgatgtcggctcgcacatgatctatattaccaataccgacgtccctggcatgatcggcttcatcggcacgacgcttggtgctgccggcgtcaacatcgccaacttccagctcggtcgtgacaagcagggcggcgacgccatcgcgctgctctatgtcgacggcaaagttgatgacgccgtgcttgctgagttgaccgcccaccaggcggttcgccaggcaaagccgctgaccttcaatatcgactga

SEQ ID NO: 64690 - protein, 531 aa, Rhizobium leguminosarum bv. viciae 3841
MAPRVLVSDELSETAVQIFRDRGVEVDFEPQLGKDKDRLLEVIGKYDGLAIRSATKVTEKIIEGATNLKVVGRAGIGVDNVDIPAASRRGIIVMNTPFGNSITTAEHAIALMFAVARQLPAADTSTQAGKWEKSKFMGVEITGKTLGVIGAGNIGSIVCARAIGLKMHVVAYDPFLSKERAEEMGVTKVELEELFARADFITLHVPMTDKTRGILNKEALAKTKPGVRIINCARGGLVDEAALAEAIKSGHVAGAAFDVFEVEPAKESPLFGLPNVVCTPHLGASTTEAQENVALQVAEQMADYLVNGAVSNAINMPSITAEEAPILKPFIRLADVLGAFVGQVTEEPIKEIEILYDGLTANMNTRALTSAVLAGLIRPQVSDVNMVSAPIMIKEKGVVLSEVKRDKTGVFDGYIKLTVTTDSMTRSVAGTVFSDGKPRFIQIKGINLDADVGSHMIYITNTDVPGMIGFIGTTLGAAGVNIANFQLGRDKQGGDAIALLYVDGKVDDAVLAELTAHQAVRQAKPLTFNID

SEQ ID NO: 64691 - DNA, 1230 bp, Pseudomonas aeruginosa UCBPP-PA14
  CDS (1)..(1230): transl_table=11
atgagcaagacctctctcgacaagagcaagatcaagttccttcttctcgaaggtgtccaccagaacgccgtggacacgctgaaggccgccggctacaccaacatcgagtacctcaagaccgcgctttccggcgacgagctgaaggaaaggatcgccgatgcgcacttcatcggcattcgctcccgcacccagctgaccgaagaggtcttcgactgcgcgaagaaactgatcgcggtcggctgcttctgcatcggcaccaaccaggtcgacctcaacgccgctcgcgaacgcggtatcgccgtgttcaacgcgccctactcgaacacccgctctgtggctgagctggtactggccgaggcgatcctgctgctgcgcggcatcccggaaaagaacgcttcctgccatcgcggcggctggatcaagagcgcggcgaactccttcgagatccgtggcaagaagctcggcatcgtcggctacggttcgatcggcacccagctctcggtactcgccgaggccctgggcatgcaggtgttcttctacgacaccgtgaccaagctgccgctgggcaacgcggtgcagatcggcagcctgcacgagctgctgggcatgtccgacatcgtctcgctgcacgttcccgaactgccctccacccagtggatgatcggcgagaaggaaatccgcgcgatgaagaagggcggcatcctgatcaacgccgcgcgcggcaccgtggtcgagctggaccacctggccgccgcgatcaaggatgagcacctgatcggcgccgccatcgacgtgttcccggtcgagccgaaatccaacgacgaggaattcgccagcccgctgcgtggcctggaccgggtgatcctgaccccgcacatcggcggctccaccgccgaggcacaggccaacatcggcctggaagtggcggagaagctggtcaagtacagcgacaacggcacctcggtgtcctcggtcaacttccccgaagtggccctgccgtcgcacccgggcaagcaccgcctgctgcacatccacgccaacatccccggcgtgatgagcgagatcaacaaggtcttcgccgacaacggcatcaacgtttccggccagtacctgcaaaccaacgataaggtcggctacgtggtgatcgacgtcgacgccgagtactccgacctggccctggagaaactccagcaggtcaacggcaccatccgtagccgcgtgctgttctaa

SEQ ID NO: 64692 - protein, 409 aa, Pseudomonas aeruginosa UCBPP-PA14
MSKTSLDKSKIKFLLLEGVHQNAVDTLKAAGYTNIEYLKTALSGDELKERIADAHFIGIRSRTQLTEEVFDCAKKLIAVGCFCIGTNQVDLNAARERGIAVFNAPYSNTRSVAELVLAEAILLLRGIPEKNASCHRGGWIKSAANSFEIRGKKLGIVGYGSIGTQLSVLAEALGMQVFFYDTVTKLPLGNAVQIGSLHELLGMSDIVSLHVPELPSTQWMIGEKEIRAMKKGGILINAARGTVVELDHLAAAIKDEHLIGAAIDVFPVEPKSNDEEFASPLRGLDRVILTPHIGGSTAEAQANIGLEVAEKLVKYSDNGTSVSSVNFPEVALPSHPGKHRLLHIHANIPGVMSEINKVFADNGINVSGQYLQTNDKVGYVVIDVDAEYSDLALEKLQQVNGTIRSRVLF

SEQ ID NO: 64693 - DNA, 1578 bp, Solibacter usitatus Ellin6076
  CDS (1)..(1578): transl_table=11
atgaacatcctcatcgcggagcctctcgcagctgccgggatcgagttattccaatcccagccgggctggaacgtcatcgtttccagtcccaaggagtacgcccagcacctggcgacggccgatgccctcttggtgaggagcgtagttcaagtcaaccagtccgtgctcgagaaagggccgaaactgcgcgtcatcgggcgcgccggggttggggtggacaacgtcgatctggaggctgccaccgcggccggcgtgctggtaatgaatacgccgggcggcaacgcgatctccgtcgccgagcataccctggcgctcatgctggcaatggcacgccacattccgcaggccaccgcgagcacctgcggcggtaagtgggaaaagaagaagttcatgggtaacgagctgcgcggcaagactctgggcgtggtcgggttaggcagcatcggccgcgaggtggtgaagcgcgcgcgggcctttgagatgcggatagtggcgcacgatccgtacgtgacgtcggccatcgcgcacgatctgggcgttgagctcgtggatcttgcgcaactcttccggcagagcgattacctcacgctgcatgtggcggcgacgccggagacgcagggtatgctatcgcgcgaagccttcgcgcaaatgaaggatggcgtgcgcatcgtcaattgcgcgcgcggggagctggtggacgaagcagcgctggcggaggcgctggccagcggcaaagtcgccgacgcgtcgctcgacgtcttcagtgtggaaccgccgccggccggttttccgctattcgcgctgaatggagtgctggcaaccccgcacatcggcgggtccacggaagaggcgcaggaaatcgtgggcgtgcgtattgccgagcaggtggtggaatatctcacgcacggaatggcgacgaacgcggtgaatatgccgccgatgtcgccggagcaattcaaggcgctgagcccttacgcgacgctggccgaccgtttgggaaatttcgcggcgcatatggcaacgggccatccgcacacggtacggctgcactacttcggcaagatcgccgacaatgcgacgagtttgctgcgcaacgccggcctcgcgggggtgctgagccgctcgacttcgcgcaaggcgaatttgatcaatgcgctacagatcgccgagcagcgcgggtgggacgtggtggagcgccacgataagcgcagcgtacatacggattcgatccgcatcgacgtggagaccgacttgggtgtgaccacagtagaaggcgcggtagtgctggataagccgcggttgttacaggtggacggcatttactgcgaggcggcgctctgcggtttcctgatcgtgatgaagaaccaggatgtcccgggcgtgatcgggcacgtgggcacggtgctcgggaagaactgcatcaacattgcgaatttctcgctggggcggcgtgagggcacgccggaggcggtcgcgctggtgtcgacagacgggctagtgccggagagcgtgctgctgcaattgaaagagcacgccgcggtcaagttcgcgcgcagcgtggaattccacggctgctga

SEQ ID NO: 64694 - protein, 525 aa, Solibacter usitatus Ellin6076
MNILIAEPLAAAGIELFQSQPGWNVIVSSPKEYAQHLATADALLVRSVVQVNQSVLEKGPKLRVIGRAGVGVDNVDLEAATAAGVLVMNTPGGNAISVAEHTLALMLAMARHIPQATASTCGGKWEKKKFMGNELRGKTLGVVGLGSIGREVVKRARAFEMRIVAHDPYVTSAIAHDLGVELVDLAQLFRQSDYLTLHVAATPETQGMLSREAFAQMKDGVRIVNCARGELVDEAALAEALASGKVADASLDVFSVEPPPAGFPLFALNGVLATPHIGGSTEEAQEIVGVRIAEQVVEYLTHGMATNAVNMPPMSPEQFKALSPYATLADRLGNFAAHMATGHPHTVRLHYFGKIADNATSLLRNAGLAGVLSRSTSRKANLINALQIAEQRGWDVVERHDKRSVHTDSIRIDVETDLGVTTVEGAVVLDKPRLLQVDGIYCEAALCGFLIVMKNQDVPGVIGHVGTVLGKNCINIANFSLGRREGTPEAVALVSTDGLVPESVLLQLKEHAAVKFARSVEFHGC

SEQ ID NO: 64695 - DNA, 1239 bp, Solibacter usitatus Ellin6076
  CDS (1)..(1239): transl_table=11
atgaccaagacctccttggataaatccaagatcaaaatcctcctgctcgaaggcattcatcccagtgccgtggaaaaattccggcaggatggctatgacaacatcgaatgccaccagaagtccctcaccggctccgcgctggaagaggccgccgccgacgcttactttgtcggcattcgctccgccacgcagctggagcgcgccttcttcgagaatgcttcccggctgacaggcgttggctgcttctgcatcggcaccaatcaggtgaatctttcagccgccgaagagcgcggcgtcccggtcttcaacgcgcccttttccaacacgcgcagcgtcgccgaactggtgctggcggagatcatcattctcatgcgcggcatcccgcagcgcaacgccgcggcccatcgcggcggctggctgaagaccgccaccggtagccacgaagtgcgcggcaagacgctcggcatcgtcggctacggccacattgggacccaggtcggcgtactggccgaatcgctcggcatgcaggtggtgacctacgacgtggagagcaagctcgcgctcggcaatgcccgcgcactcggctcgctcgacgcgctgcttgaaatcagcgacgtggtcacgctccatgttcccgagaccccggctacctttcagatgatcggcgccgagcagctggcccgcatgaagccgggcgcgcgcctgatcaacgcctcccgcggcaccgtggtggagattcaggcgctggccgccgccctcgcttcccaacacctggccggggccgcgatcgacgtcttcccggccgagcccaagagcaccgccgacctgttctactcgcctttacgcggcatggataacgtcctgctgaccccgcacgtcggcggcagcacggaggaggcgcaggagaatatcggtgtcgaagtggcgcagaagctgatcaagtacagcgataacggctccacgctcggcgctgtcaatttcccggaggtctcgctccccgaacatcccggcaagcatcgcgtgctccacatccaccacaatcagccgggcgtgctttccgcgatcaacgcggtcttctccgaagacgcgatcaacatcgccgccgagtatctgcaaaccgatgcgaaggtcggctacgtggtaatcgacgtggaaaccgacgagcgcgacgagaccgccaacatccgccgcaaactcgaactggtccccggcaccatccgcacccgcatcctctattaa

SEQ ID NO: 64696 - protein, 412 aa, Solibacter usitatus Ellin6076
MTKTSLDKSKIKILLLEGIHPSAVEKFRQDGYDNIECHQKSLTGSALEEAAADAYFVGIRSATQLERAFFENASRLTGVGCFCIGTNQVNLSAAEERGVPVFNAPFSNTRSVAELVLAEIIILMRGIPQRNAAAHRGGWLKTATGSHEVRGKTLGIVGYGHIGTQVGVLAESLGMQVVTYDVESKLALGNARALGSLDALLEISDVVTLHVPETPATFQMIGAEQLARMKPGARLINASRGTVVEIQALAAALASQHLAGAAIDVFPAEPKSTADLFYSPLRGMDNVLLTPHVGGSTEEAQENIGVEVAQKLIKYSDNGSTLGAVNFPEVSLPEHPGKHRVLHIHHNQPGVLSAINAVFSEDAINIAAEYLQTDAKVGYVVIDVETDERDETANIRRKLELVPGTIRTRILY

SEQ ID NO: 64697 - DNA, 1194 bp, Nocardioides sp. JS614
  CDS (1)..(1194): transl_table=11
gtgaaggtactgctgctcgagaacatccacccggccgccgtcgagatcctcgagggccatggcttcgaggtcgagctgcggtcccgatccctctccgaggccgagctcatcgaagagctgcccggggtgtcggtgctgggcatccggtcgaacacccacctcaccgcgcccgtgctggaggcggcgaccgacctgatggcggtcggctgcttctgcatcggcaccaaccaggtcgacctgtccgcggccagccgccgcggcgtggccgtgttcaacgcgccgtactccaacacccgcagcgtcgtggagctggtgatcggcgagatcatcgcgctcgggcgccggctcaccgagaagacccagcgcatgcacgagggcgtgtgggacaagtccgccaagggcagccacgaggtgcgcggccggaccctgggcatcgtcgggtacgggaacatcggcacccagctctcgaacgtcgccgaggcgctgggcctgcgggtgatcttcttcgacaccgccgaccggctcgcccacgggaacgcgcagcggatgcgcagcctcgacgagctgctcgccgaggcggacgtcgtcagcatccacgtcgacgggcgccccgggaacgccgggctgttcggcgccgaggagttcgcgaagatgaagccgcgcagcctgttcatcaacgcctcgcgcgggatggtcgtcgacgacgtcgcgctgcgcgagcacgtcctgtcggggcacatcgccggcgcggccatcgacgtcttcccgatcgagccgaaggcccagggcgacccgttcgagtcggtgctgcgcggcctcgacaacgtgatcctcaccccgcacgtcggcggctccacccaggaggcgcaggaggagatcggccacttcgtctccggcaagctggccgcgttcacccggcagggccgcaccgagctgtcggtgaacctgccgacggtccaggcccccgagctcgaggtcggccaccggatcggcttcctccacgacaacgtccccggcgtgctcgcgagcgtcaacgacctgctggccgacgccaacgcgaacgtcaccgggcagtacctctcgacccggggccagcaggggtacgtcgtcaccgacaccctcgacccgctgccccaggacgccctggccaagctcgccgaggccgaccacaccatctggctgcgcacctggtga

SEQ ID NO: 64698 - protein, 397 aa, Nocardioides sp. JS614
MKVLLLENIHPAAVEILEGHGFEVELRSRSLSEAELIEELPGVSVLGIRSNTHLTAPVLEAATDLMAVGCFCIGTNQVDLSAASRRGVAVFNAPYSNTRSVVELVIGEIIALGRRLTEKTQRMHEGVWDKSAKGSHEVRGRTLGIVGYGNIGTQLSNVAEALGLRVIFFDTADRLAHGNAQRMRSLDELLAEADVVSIHVDGRPGNAGLFGAEEFAKMKPRSLFINASRGMVVDDVALREHVLSGHIAGAAIDVFPIEPKAQGDPFESVLRGLDNVILTPHVGGSTQEAQEEIGHFVSGKLAAFTRQGRTELSVNLPTVQAPELEVGHRIGFLHDNVPGVLASVNDLLADANANVTGQYLSTRGQQGYVVTDTLDPLPQDALAKLAEADHTIWLRTW

SEQ ID NO: 64699 - DNA, 1233 bp, Azoarcus sp. BH72
  CDS (1)..(1233): transl_table=11
atgaatcagcgcctttcggtgcagaaggacaagctcaacgtggtgctgttcgaaggcatccacgcctccgcggtggaagccttccgcgccgatggctacggcagcgtcaccgccgtcgccaaggcgctggcgggtgaggagctggcgcaggcgctggcccacgcccacttcgtcggcatccgctcgcgcacccgcctcaccgccgaggtgctggcgcaggcgcccaagctggtcgccgtcggctgcttctgcatcggcaccaaccaggtggacctgggcgccgccgcggcgcgcggcgtgccggtgttcaacgcgcctttctccaacacccgcagcgtggccgagctggtgatcgccgaaaccatcatgctgatgcgcggcatcccggcgcgcaacgcgctgcagcaccgcggcggctggatgaagagcgccgccaacgcctgggaggtgcgcggcaagacgctgggtatcgtcggctacggccacatcggcacccaggtgggcgtgctcgccgaacagctcggcatgagcgtggtgttccacgacatcgagacccggctgccgctcggcaacgcccgccagctcggctcgctcgacgcgctgctggcggtggccgacgtggtgagcctgcacgtgccggaaaccccggcgacgatgaacatgatcgccgcgccgcagctggccgcgatgaaggccggcagcttcctcatcaacgcctcgcgcggcaccgtggtggacatcgacgcgctcgcccaggcgctggaggccggccacctgctcggcgccgcgatcgacgtcttcccggtggagccggaaggcaacgacgaccccttcgtgtcgccgctcacccgcttcgacaacgtcatcctgacgccccacatcggcggctccaccgccgaagcgcaggccaacatcggccgcgaggtcgccgccaagctgatccgctacagcaacaacggctccaccgtcaccgcggtgaatttccccgaggtgtcgctgcccgagcacgccggcaagtgccgcgtgctgcacatccaccgcaacgtgcccggcatgctcgcgcgcatcaacgagcgcttctcgcgggccggcatcaacatcgccggccagtacctgcagaccacgcccgacctcggctacgtggtgatcgacgtggatgccgctgccagccaggtggccttcgacgagctgtgctcgatcgaaggcaccatccgctgccgggtgctgtactag

SEQ ID NO: 64700 - protein, 410 aa, Azoarcus sp. BH72
MNQRLSVQKDKLNVVLFEGIHASAVEAFRADGYGSVTAVAKALAGEELAQALAHAHFVGIRSRTRLTAEVLAQAPKLVAVGCFCIGTNQVDLGAAAARGVPVFNAPFSNTRSVAELVIAETIMLMRGIPARNALQHRGGWMKSAANAWEVRGKTLGIVGYGHIGTQVGVLAEQLGMSVVFHDIETRLPLGNARQLGSLDALLAVADVVSLHVPETPATMNMIAAPQLAAMKAGSFLINASRGTVVDIDALAQALEAGHLLGAAIDVFPVEPEGNDDPFVSPLTRFDNVILTPHIGGSTAEAQANIGREVAAKLIRYSNNGSTVTAVNFPEVSLPEHAGKCRVLHIHRNVPGMLARINERFSRAGINIAGQYLQTTPDLGYVVIDVDAAASQVAFDELCSIEGTIRCRVLY

SEQ ID NO: 64701 - DNA, 1200 bp, Bifidobacterium longum DJO10A
  CDS (1)..(1200): transl_table=11
atgcccaaagcactgttattggaaaacattcaccccgatgcggccaaatcgctgcgtgatcgcggtttcgaagtcgagaccatgaagggagccctgagcgaggacgaactcatcgatgcgctggatggcgtggacttggtgggcgtacgctccaagaccaacgtcacagcccgcgtgctggatgcgcgtcctacgctaagcgccatcggctgcttctgcatcggcaccaatcaggtcgatctggcacatgccggcaagcgtggcatcgccgtgttcaacgctccctactccaacacccgttccgtggtggaattggtgatctgcgacatcatctgcttgatgcgccgcattcccgcacacacgcatcacatcaagcatggcctgtgggacaagtccgcttccggctcgcatgaagtgcgcggcaagaccctcggcatcatcggctacggcaacatcggctcccagctgtcagtactggccgaggccctcggcatgcgcgtggtgttctacgacattgaggagaaactggcactgggcaacgcccaccgttgcgacaccctcaacgaactgctggaacagtccgatgccgtgaccctgcacgtggatggccgcaagtcgaacaccggcttcttcggcgaagaccaattcgcccacatgaagcaggacgcgattttcattaacctttcgcgcggtttcgtcgccgatctgggagctctgaagcagcacctcgattccggccatctgtctggcgcggcggtcgacgtgttccccgttgagccgaagaagagcggagatccgttcgagacttcactggccaatgaagacaatatgattctgactcctcatattggcggctccaccttggaagctcaggaatccatcggccatttcgtctctcagcgtcttgaggattactggttcaagggttctacctccttgtccgtgaacctaccgcagatcaacctcggtgagtgcaagggtgtgtgccgtatcgcccatctgcacgacaatcttcctggtgtgctggctcatgtcaatcatgtgctcggcgaggagaacatcaacgtttccttccagtcgctggcaaccgaaggcgaacttggctatgtggtcaccgacgtggctcaaaagcccagcgccgccacgcttgaagcactgcgcaacatcgaaggcaccattcgcatgcgtgtcatcagctga

SEQ ID NO: 64702 - protein, 399 aa, Bifidobacterium longum DJO10A
MPKALLLENIHPDAAKSLRDRGFEVETMKGALSEDELIDALDGVDLVGVRSKTNVTARVLDARPTLSAIGCFCIGTNQVDLAHAGKRGIAVFNAPYSNTRSVVELVICDIICLMRRIPAHTHHIKHGLWDKSASGSHEVRGKTLGIIGYGNIGSQLSVLAEALGMRVVFYDIEEKLALGNAHRCDTLNELLEQSDAVTLHVDGRKSNTGFFGEDQFAHMKQDAIFINLSRGFVADLGALKQHLDSGHLSGAAVDVFPVEPKKSGDPFETSLANEDNMILTPHIGGSTLEAQESIGHFVSQRLEDYWFKGSTSLSVNLPQINLGECKGVCRIAHLHDNLPGVLAHVNHVLGEENINVSFQSLATEGELGYVVTDVAQKPSAATLEALRNIEGTIRMRVIS

SEQ ID NO: 64703 - DNA, 1233 bp, Haemophilus somnus 2336
  CDS (1)..(1233): transl_table=11
atgacaacaaaagtatcactagataaatcaaaaattaagtttttgcttttggagggaatacaccaaaatgcactggaggtgttaaaagcagcaggatataccaatatcgaatatcatcggaaggccttagaacctgatgaattaaaaattgctatcaaagatgcacattttatcggtattcgttctcgaacgtctttaacggaggatatattagcagaagcaacaaaattaattgcaattggttgtttttgtatcggcacaaatcaagtggatttagaagcggcaaaagcacgaggtattcctgttttcaatgcaccgtttgccaataccagatctgtggctgaattagtgcttggtgagatcttattattaatgcgtaatataccgcaagccaatgccgatgtgcatcgaggtttatggaataaatccatggtgggatcttatgaggttcgtggaaaacgcttgggtattattggttatggtcatattggatctcaactaagtattattgcagaagcgttaggcatgaatgtgtatttctatgatatagaaacaaaattacctttaggtaatgcacaacaaatgaatagcttagaagaacttttgagtacctgtgatgtggtttcattacatttgccggaaaattcctcaacaaaaaatttaatgaatgcggaacgcattgcacaattaaaggcgaactgtatttttatcaacgctgcccgtggcacagtggttgatattgacgctttaactcaggcgttagaaagcaaaaaaattcgtggtgccgcaattgatgtattcccgaaagaacctgcctcgattgaagaggaatttatctcgccattgcgtgctttcgataatgttatcctaacaccacacattggtggctcaactgttgaagcacaagaaaatattggagttgaagtcgcaaataaatttgtcaaatattccgataatggttcaacactgtcggcagtaaatttcccagaagtatctctaccggaacatagtaatgcaaaacgcttattacatattcaccataaccgtccggggattttaaataaaatcaatcaaatatttgtggagcaaaatatcaatattgcggctgaatatttacaaaccgaggcaaaaattggttatgtggtaatcgatgttgaaacagaagataccgctcaattattggctaaacttaagcaaattgaaggcactattcgtgcgagagtattattttaa

SEQ ID NO: 64704 - protein, 410 aa, Haemophilus somnus 2336
MTTKVSLDKSKIKFLLLEGIHQNALEVLKAAGYTNIEYHRKALEPDELKIAIKDAHFIGIRSRTSLTEDILAEATKLIAIGCFCIGTNQVDLEAAKARGIPVFNAPFANTRSVAELVLGEILLLMRNIPQANADVHRGLWNKSMVGSYEVRGKRLGIIGYGHIGSQLSIIAEALGMNVYFYDIETKLPLGNAQQMNSLEELLSTCDVVSLHLPENSSTKNLMNAERIAQLKANCIFINAARGTVVDIDALTQALESKKIRGAAIDVFPKEPASIEEEFISPLRAFDNVILTPHIGGSTVEAQENIGVEVANKFVKYSDNGSTLSAVNFPEVSLPEHSNAKRLLHIHHNRPGILNKINQIFVEQNINIAAEYLQTEAKIGYVVIDVETEDTAQLLAKLKQIEGTIRARVLF

SEQ ID NO: 64705 - DNA, 1233 bp, Haemophilus influenzae R2866
  CDS (1)..(1233): transl_table=11
atgacaaacaaagtctctctagacaaatcaaaaatcaaatttgtattgtttgaaggtgtgcatcaaagcgcacttgatacgctccatgcggcaggctatagcaatattgattactataaaaaagcactagatggcgatgaattaaaagaagccattaaagatgcacattttatcggcttgcgttctcgcacccatttaacggcagaaatgattgaggccgcacccaaattaatcgctgtgggatgtttctgtattggtaccaaccaagtggatttaaatgcagcaaaagtgcgtggaattcctgtatttaatgccccattctcaaacactcgttccgtcgcagaactagtattaggcgagattttattacttatgcgcaatgtgccacaggctaatgccgaagtacatcgtggtatctggaataaatcagcgacgggatcttatgaagtgcgggggaaaaaattaggcattattggttacggtcacattggttcacaattaagtattattgctgaatcattagggatggatgtgtatttctacgatattgaaaacaaacttccactcggtaatgccaaacagcttcgtagccttgaagaattactcagttcttgcgatgtggtttcattacatgtgccagaactgccatctaccaaaaacttaatgaacgcagcacgtatcgcacaattaaaacaaggggcaattttgatcaatgctgctcgtggcacagtggtagatattgacgctctcgctcaagccttaaaagatgggaaacttcagggtgccgcaattgatgtattccccgttgagcccgcttcaattaatgaagaatttgtctcaccgttacgtgaatttgataatgtgattttaacgccacatatcggcggctcaacagcggaagcacaagaaaatatcggttttgaagtggcaggcaaatttgtcaaatattcagacaacggatcaaccctttcttcggtaaacttcccagaggtctctttaccagaacacgagggaacaaaacgcttattgcatattcacgaaaatcgtcctggtatattgaacaaactgaaccaaattttcgtcgaagctaacctcaatattgcagcgcaatatttacaaactgacccgaaaattggttatgttgtcgtagatgtagaaacgaatgatgcatcgccattactgacgaaattgaaggaaatagatggcacaattcgtgcgcgtgtactgtactaa

SEQ ID NO: 64706 - protein, 410 aa, Haemophilus influenzae R2866
MTNKVSLDKSKIKFVLFEGVHQSALDTLHAAGYSNIDYYKKALDGDELKEAIKDAHFIGLRSRTHLTAEMIEAAPKLIAVGCFCIGTNQVDLNAAKVRGIPVFNAPFSNTRSVAELVLGEILLLMRNVPQANAEVHRGIWNKSATGSYEVRGKKLGIIGYGHIGSQLSIIAESLGMDVYFYDIENKLPLGNAKQLRSLEELLSSCDVVSLHVPELPSTKNLMNAARIAQLKQGAILINAARGTVVDIDALAQALKDGKLQGAAIDVFPVEPASINEEFVSPLREFDNVILTPHIGGSTAEAQENIGFEVAGKFVKYSDNGSTLSSVNFPEVSLPEHEGTKRLLHIHENRPGILNKLNQIFVEANLNIAAQYLQTDPKIGYVVVDVETNDASPLLTKLKEIDGTIRARVLY

SEQ ID NO: 64707 - DNA, 1230 bp, Actinobacillus pleuropneumoniae serovar 1 str. 4074
  CDS (1)..(1230): transl_table=11
atgacagttcaaattgataaatcaaaaattaaatttctcttacttgaaggtgtacaccaaaatgcgttagatgtgttacaagcggcaggttataccaatatcgaatatcataaaaaagcgttggacggcgaagaattaattaatgcgattaaagatgcgcattttgtcggcttacgttctcgtacttacctaaccaaagaagttctctcacacgccaaaaatctcgtgtcgatcggttgtttctgtatcggtaccaaccaagtcgatttaaaagaagcgaaacgtctcggtattccggtatttaatgcaccgttttcaaatacacgttcggtagcggaattagtgttagcggaaattattcttttgatgcgtcaagtgccgaaagcgaatgccgaagtacatcgcggtgtgtggaacaaatcggctgccggctcaaacgaagtacgtggtaaaaaattagggattgtcggttacggtcatatcggctcgcaattaagcgtaatggcggaatctatcggtatgcaggtttatttttacgatattgagaacaaactgccgttaggtaacgcacaacaaattgcaagcttaaacgagctacttgccggctgcgatgcgatttcgctacacgtaccggaaaacgcctcaaccaaaaatttaatgaatgcggatcgtattgcgcaattaaaagaagattcggtattaattaatgccgctcgcggtacggtggtggatattgacgcgttagcggcacgcttagcgcaaggtacgttacgtggtgcggcgattgacgtattcccggaagagccggcttcaatcaatgatccgtttgaatcaccgctacgccaattcgataatgtgattttgacaccccatatcggcggttcaaccgcagaagcgcaagcgaatatcggtacggaagtggcaaacaaattcgtgaaatatgcggataacggttcaaccctttcagcggttaatttcccggaagtatcgttaccgattctgcatagcgatgcgaaacgcttgttacatattcacgaaaaccgtccgggtattttaaataagatcaaccaagtattcgtcgatggcaacgtgaatatcgccggtcagtatctacaaaccgatccgaatatcggttatgtggttattgatgtggaattggacgatgcaagcgaagcgttagaacgcttacaacaaattgacggcacaatcaaagcccgtgtgatttcataa

SEQ ID NO: 64708 - protein, 409 aa, Actinobacillus pleuropneumoniae serovar 1 str. 4074
MTVQIDKSKIKFLLLEGVHQNALDVLQAAGYTNIEYHKKALDGEELINAIKDAHFVGLRSRTYLTKEVLSHAKNLVSIGCFCIGTNQVDLKEAKRLGIPVFNAPFSNTRSVAELVLAEIILLMRQVPKANAEVHRGVWNKSAAGSNEVRGKKLGIVGYGHIGSQLSVMAESIGMQVYFYDIENKLPLGNAQQIASLNELLAGCDAISLHVPENASTKNLMNADRIAQLKEDSVLINAARGTVVDIDALAARLAQGTLRGAAIDVFPEEPASINDPFESPLRQFDNVILTPHIGGSTAEAQANIGTEVANKFVKYADNGSTLSAVNFPEVSLPILHSDAKRLLHIHENRPGILNKINQVFVDGNVNIAGQYLQTDPNIGYVVIDVELDDASEALERLQQIDGTIKARVIS

SEQ ID NO: 64709 - DNA, 1578 bp, Crocosphaera watsonii WH 8501
  CDS (1)..(1578): transl_table=11
atggcaaaagttcttgtatcagatcccattgaccaagttggtgttgaaatcctctcacaagtggcacaggtggatgttaaaacgggattacccccagaagagttagtaaaaattatccccgaatacgatgccatgatgctgcgatcgggaacccgtgttactaaagagattattgaggccgcaacccaactgaaaattattggacgggccggggttggcgtggataatatcgatgtacaggccgccactcgtcaagggatcgtggtggtaaactctccagaaggcaacaccatcgccgcagcagaacacgccctagccatgatgttatccctatcccgtcatattcccgaagctaatcaatccgtcaaaaatgacaaatgggaacgtaaacgcttcattggggcagaagtctataagaaaaccttgggggttgttggtttaggaaaaattggctcccatgtggctaatgtggctaaatcaatgggcatgaaattattagcttatgatccctttatttccaaagaaagagccgatcaattaggttgtaccttagtggatctcgatctcctcttcgctgaatccgattatattaccctgcacatccccaaaaccaaagaaaccacccacatcatcaataaagaatccctcagtaagatgaaacctaacgcccgcattatcaactgtgcgcggggtggtactatcgatgaatctgccctagctgaagcgatcgccgaagggaaaattgccggcgctgctttagatgtatttgaagaagaacccctcaaagaatccaaactcagagaacacgaaaacatcattttaaccccccatttaggggcttctactgccgaagcacaggttaatgtggccgttgatgtggccgaacaaattcgtgatgttttgttaggacttccagcccgatctgcggttaatattccaggactcaccccagatgtcatggaaaaaatgcgcccttatctacaattagcagaaactttgggcaatttagtcggtcaattagctggagggcgtattgaacggttaacggttcgtttacaaggagaattggctagtaccaagggtcaacctatcgtcgtggcctcgattaaagggttactctctcaagcattgcgagaacgggttaattacgtaaatgcagccatcgaagccaaagaaagaggtatccgcattattgaaacccacgacgcttctattcgtgactattccgactctttgcatttagcagcacaaggatcattaggagaacattctgtgactggggcgttattaagcgatggagaaattcgcattacagatgtggatggtttccccattaacgtacccccaagtaactatatgttatttaccgttcaccgagatatgccaggaattatcggtaaaattggctctcttttgggaagttttaacgttaacattgctagtatgcaagtgggacggaaaattgttcgaggagatgccgttatggccctaagtttggatgatcccctaccagaaggactcttgaacgaaattactaaagtagatggcatccgagacgcttataccgttaagctttaa

SEQ ID NO: 64710 - protein, 525 aa, Crocosphaera watsonii WH 8501
MAKVLVSDPIDQVGVEILSQVAQVDVKTGLPPEELVKIIPEYDAMMLRSGTRVTKEIIEAATQLKIIGRAGVGVDNIDVQAATRQGIVVVNSPEGNTIAAAEHALAMMLSLSRHIPEANQSVKNDKWERKRFIGAEVYKKTLGVVGLGKIGSHVANVAKSMGMKLLAYDPFISKERADQLGCTLVDLDLLFAESDYITLHIPKTKETTHIINKESLSKMKPNARIINCARGGTIDESALAEAIAEGKIAGAALDVFEEEPLKESKLREHENIILTPHLGASTAEAQVNVAVDVAEQIRDVLLGLPARSAVNIPGLTPDVMEKMRPYLQLAETLGNLVGQLAGGRIERLTVRLQGELASTKGQPIVVASIKGLLSQALRERVNYVNAAIEAKERGIRIIETHDASIRDYSDSLHLAAQGSLGEHSVTGALLSDGEIRITDVDGFPINVPPSNYMLFTVHRDMPGIIGKIGSLLGSFNVNIASMQVGRKIVRGDAVMALSLDDPLPEGLLNEITKVDGIRDAYTVKL

SEQ ID NO: 64711 - DNA, 1242 bp, Xylella fastidiosa Dixon
  CDS (1)..(1242): transl_table=11
atgccaccgacgaaaacttcttttcccaaacaagacatccgaattttgctgctggaaggggtcagtcacagcgggatcgaaacgttccgcgcggcgggttactcgcagatcaagatccatacgacatcgctgccggaagaggcactgcaagcagagattgcggaagcgcacatcatcggtattcgctctcgcactcaattgaatgcagcggtgctagggcatgccaaacgtctgatggccataggttgtttctgcatcgggacgaatcaggtggacttggatacggcggaactgagcgggatcccggtgttcaacgcgccatattccaatacgcgtagtgtggctgagctgatcattgcagaagcaattttgttgctacgcaagatcccgcagaaaaatgccgaatgccatcgtgggggctggtccaaatctgccatcaacagtcatgaagcacgcggtaaggtgttgggcatcgtgggatacggtcacatcggtacgcaagtcagtgtgctggcggaggcgatggggatgcaggtgattttctacgatattgaatccaagctctctttgggcaatgcgcgtccagcagcaagcttggatgagttgctcggcattgccgacgtggtgacgctgcatgtaccggaaacggcagcgaccaagaatatgcttggtcatgcagaattggcgcgaatgaaaccgggggcgcatttgattaatgcatcgcgcggtacggttgtggagattgacgcgctggatgcggctctggtgtcggggcatctgggcggggcggcagtggatgtattcccaagcgaacccaagggcaatagtgatccgttcatctcaccattgagcagacacgacaatgtgattttgacgccacatattgggggcagcacgctagaagcgcaggacaatattgggattgaagtggcagccaaattgatccgttatagcgataacggcagcacgctatcggccgtgaatttccctgaagtcagtttgccggagcacgtggggagtatgcgtttgctgcatatccaccgtaatgtgcccggggtgctgtcgcatatcaacgagctgttctcgcgtcacaacgtcaatattgatggtcagttcctgcgtaccgatgccacgttgggctatgtggtcatcgatatcggtgccagtcagacgcaggctctggcattaaaagaggcattgacgcaggttcccgggacgctgcgtacccgtctgctgtactga

SEQ ID NO: 64712 - protein, 413 aa, Xylella fastidiosa Dixon
MPPTKTSFPKQDIRILLLEGVSHSGIETFRAAGYSQIKIHTTSLPEEALQAEIAEAHIIGIRSRTQLNAAVLGHAKRLMAIGCFCIGTNQVDLDTAELSGIPVFNAPYSNTRSVAELIIAEAILLLRKIPQKNAECHRGGWSKSAINSHEARGKVLGIVGYGHIGTQVSVLAEAMGMQVIFYDIESKLSLGNARPAASLDELLGIADVVTLHVPETAATKNMLGHAELARMKPGAHLINASRGTVVEIDALDAALVSGHLGGAAVDVFPSEPKGNSDPFISPLSRHDNVILTPHIGGSTLEAQDNIGIEVAAKLIRYSDNGSTLSAVNFPEVSLPEHVGSMRLLHIHRNVPGVLSHINELFSRHNVNIDGQFLRTDATLGYVVIDIGASQTQALALKEALTQVPGTLRTRLLY

SEQ ID NO: 64713 - DNA, 1242 bp, Xylella fastidiosa Ann-1
  CDS (1)..(1242): transl_table=11
atgccaccgacgaaaacttcttttcccaaacaagacatccgaattttgctgctagaaggggtcagtcacagcgggatcgaaacgttccgtgcggcaggttactcgcagatcaagatccatacgacatcgctgccggaagaggctctgcaagcagagattgcggaagcgcacatcatcggtattcgctcgcgcactcaattgaatgcagcggtgctagggcatgccaaacgtctgatggccataggttgtttctgcatcgggacgaatcaggtggacttggatacggcggaattgagcgggatccccgtgttcaacgcgccatattccaatacgcgtagtgtggctgagctgatcattgcggaagcaattttgttgctacgcaggatcccgcagaaaaatgccgaatgccatcgtgggggctggtccaaatctgccatcaacagtcatgaagcacgcggtaaggtgttgggcatcgtgggatacggtcacatcggtacgcaagtcagtgtgctggcggaggcgatggggatgcaggtgattttctacgatattgaatccaagctctctttgggcaatgcgcgtccagcggcaagcttggatgagttgctcggcattgccgacgtggtgacgctgcatgtaccggaaacggcagcgaccaagaatatgcttggtcatgcagaattggcacgaatgaaaccgggggcgcatttgattaatgcatcgcgcggtacggttgtggagattgacgcgctggatgcggctctggtgtcggggcatctgggcggggcggcagtggatgtattcccaagcgaacccaagggcaatagtgatccgttcatctcgccattgagcagacacgacaatgtgattttgacgccacatattgggggcagcacgctagaagcgcaggacaatattgggattgaggtagcagccaaattgatccgttatagcgataacggcagcacgctatcggcggtgaatttccctgaagtcagtttgccggagcacgtggggagtatgcgtttgctgcatatccaccgtaatgtgcccggggtgctgtcgcatatcaacgagctgttctcgcatcacaacgtcaatattgatggtcagttcctgcgtaccgatgccacgttgggctatgtggtcatcgatatcagtgccagtcagacgcaggctctggcattaaaagaggcattgacgcaggttcccgggacgctgcgtacccgtctgctgtactga

SEQ ID NO: 64714 - protein, 413 aa, Xylella fastidiosa Ann-1
MPPTKTSFPKQDIRILLLEGVSHSGIETFRAAGYSQIKIHTTSLPEEALQAEIAEAHIIGIRSRTQLNAAVLGHAKRLMAIGCFCIGTNQVDLDTAELSGIPVFNAPYSNTRSVAELIIAEAILLLRRIPQKNAECHRGGWSKSAINSHEARGKVLGIVGYGHIGTQVSVLAEAMGMQVIFYDIESKLSLGNARPAASLDELLGIADVVTLHVPETAATKNMLGHAELARMKPGAHLINASRGTVVEIDALDAALVSGHLGGAAVDVFPSEPKGNSDPFISPLSRHDNVILTPHIGGSTLEAQDNIGIEVAAKLIRYSDNGSTLSAVNFPEVSLPEHVGSMRLLHIHRNVPGVLSHINELFSHHNVNIDGQFLRTDATLGYVVIDISASQTQALALKEALTQVPGTLRTRLLY

SEQ ID NO: 64715 - DNA, 1596 bp, Roseovarius nubinhibens ISM
  CDS (1)..(1596): transl_table=11
atggctcccaaagttctcgtttccgacaagctctctgaaaccgccgtccagattttccgcgaccgcggcatcgacgtggatttcctgcccgacgtgggcaaggacaaggacaagctcgctgaaatcattggccaatacgatggtctcgccatccgctcggccaccaaggtcaccgagaaaattctcgacgccgccaccaatctcaaggtgatcggccgcgccgggatcggcaccgacaatatcgacaaggacgccgcctcgaaaaagggcgtgatcgtcatgaacacgcctttcggcaacatgatcaccaccgccgaacatgccatcgcaatgatgttcgccgtggcacgtcagctgcccgaagcctctgcctcgacccatgccggcaaatgggaaaagtcgaaattcatgggggtcgagctcaccggcaagacgctcggcgtcattggcgcgggcaatatcggcggcatcgtctgcgaccgcgcccgtggcctcaagatgaaggtcgtggcctatgaccccttcctgagccaggaaaaggccgacaagatgggcgtcgaaaaggtcgatctcgacacgctcgtcgcgcgcgccgatttcatcacgctgcatgtgccgctgaccgatcagacccgcaacatcctctccgctgaacggctcgcccagaccaagaagggcgtgcgcatcatcaactgtgcccggggcggtctggtcgatgaggcggcgctggcggagctgctgaaatccggccatgtggcgggcgcgggctttgacgtcttctcgcaggaaccggcgaccgaaaacccgctcttcgatctgcccaacgtggtctgcaccccgcatctgggcgccgccaccaccgaggcacaggaaaacgtggcgctgcaggtggcggaacagatttccgactatctgctgaccggggccgtgtcgaacgcgctcaacatgccgtcggtcaccgccgaagaggccaaggtgatgggcccctggatcaagctcgcgggccatctgggcaatttcatcggccagatgacggacgagccgatcaaggcgatcaacatcctctatgacggggtggtgtcgcagatgaacctcgaggcgctgacctgttcggcggtcgcgggcatcatgaaatcggtcaaccccgaggtgaacatggtctcggccccggtcatcgccaaggaacgcggcgtcaagatctcgaccacccatcaggacaaatcgggggtcttcgagggctatatcaagctcaccgttgtgacggccgagcgggaacgttcgatcggtggcacggtgttctcggatggcaagccgcgctttatccagatcaaaggcatcaatatcgacgccgagatcggggcgcacatgctctacaccaccaatgaggacgagccgggcatcatcggcatgctgggtcagaccatggggcagaacggcgtcaacatcgccaactttaccctgggccgctcgcaggccggcggcgaggccatcgcgcttctctatgtcgatgccgaagtccccgccccggtgatcaagcagctcgaagacaccggcatgttcaaacaggtccgtccgctgcaattcgacgtggcctga

SEQ ID NO: 64716 - protein, 531 aa, Roseovarius nubinhibens ISM
MAPKVLVSDKLSETAVQIFRDRGIDVDFLPDVGKDKDKLAEIIGQYDGLAIRSATKVTEKILDAATNLKVIGRAGIGTDNIDKDAASKKGVIVMNTPFGNMITTAEHAIAMMFAVARQLPEASASTHAGKWEKSKFMGVELTGKTLGVIGAGNIGGIVCDRARGLKMKVVAYDPFLSQEKADKMGVEKVDLDTLVARADFITLHVPLTDQTRNILSAERLAQTKKGVRIINCARGGLVDEAALAELLKSGHVAGAGFDVFSQEPATENPLFDLPNVVCTPHLGAATTEAQENVALQVAEQISDYLLTGAVSNALNMPSVTAEEAKVMGPWIKLAGHLGNFIGQMTDEPIKAINILYDGVVSQMNLEALTCSAVAGIMKSVNPEVNMVSAPVIAKERGVKISTTHQDKSGVFEGYIKLTVVTAERERSIGGTVFSDGKPRFIQIKGINIDAEIGAHMLYTTNEDEPGIIGMLGQTMGQNGVNIANFTLGRSQAGGEAIALLYVDAEVPAPVIKQLEDTGMFKQVRPLQFDVA

SEQ ID NO: 64717 - DNA, 1596 bp, Oceanicola batsensis HTCC2597
  CDS (1)..(1596): transl_table=11
atggcccccagagtactcgtatccgacaagctttccgaaaccgccgtccagatcttccgcgaccgcggcatcgacgtggacttcatgccggacctcggcaaggacaaggagaagctggccgaggtgatcggccagtatgacggcctcgccatccggtccgccaccaaggtcaccgccgccctgctggaaaaggccgaccacctcaaggtcgtgggccgcgccggcatcggcaccgacaacgtggacaaggacgccgcctcgaagaagggcgtgatcgtcatgaacacgcccttcggcaacatgatcaccaccgccgagcacgccatcgcgatgatgttcgccgtggcgcgtcagatccccgaggccagcgcctcgacccatgccggcaagtgggagaaatcccgcttcatgggcgtggaactgaccggcaagacgcttggcgtcatcggcgcgggcaacatcggcggcatcgtctgcgaccgggcgcgcgggctgaagatgaaggtcgtggcctacgatccctatctcggcgcggaaaaggccgagaagatgggggtggagaaggtcgagctcgaggaactgctcacgcggtccgacttcatcacgctgcacgttccgctgaccgaccagacccgcaacatcctgtcgaaggagaacctggccaagaccaagaagggcgtgcggatcgtcaactgcgcccgcggcggcctcgtggacgaagcggcgctggccgagctgctgaagtccggtcacgtggccggcgcgggcttcgacgtcttcgccgaggaaccggcgaccgacaacgtgctcttcaacctgcccaacgtggtctgcaccccgcatctcggcgcctcgacctcggaagcgcaggagaacgtggcgctgcaggtggccgagcagatgtcgaactatctgatcgacggcgcggtcgagaacgcgctgaacatgccctcgatgaccgccgaggaggccaaggtcatgggcccctgggtcaagctggccggtcacctcggcgccttcgtcggccagatgacggacgagccgatcaaggcgatcaacatcctctatgacggcgtggtgtccgacatgaacctggccgcgctgaactgctcggtcatcgcggggatcatgaagcgggccaatccggacgtgaacctcgtctcggctccggtcgtggccaaggaacgcggcatccagatctcgaccaccaatcaggacaagtccggcgccttcgacggctacatcaaggtgacggtggtgacggacaagcgtgagaggtcggtcgcgggcacggtgttcagcgacggcaagccgcgcttcatccagatcaagggtatcaacatcgacgccgaggtcggggcgcacatgctctacaccacgaacgaggacgtgcccgggatcatcggcacgctcggccagaccatggggcagaacggcgtgaacatcgccaacttcaccctcggccgcgcctcggcggccggcgaggcgatcgccctgctctacctcgacgaggcaccgcggaaggacgcgctgtcggctctcgagcagaccgggctcttccgccagatcaagccgctgcagttcgacatcgcctga

SEQ ID NO: 64718 - protein, 531 aa, Oceanicola batsensis HTCC2597
MAPRVLVSDKLSETAVQIFRDRGIDVDFMPDLGKDKEKLAEVIGQYDGLAIRSATKVTAALLEKADHLKVVGRAGIGTDNVDKDAASKKGVIVMNTPFGNMITTAEHAIAMMFAVARQIPEASASTHAGKWEKSRFMGVELTGKTLGVIGAGNIGGIVCDRARGLKMKVVAYDPYLGAEKAEKMGVEKVELEELLTRSDFITLHVPLTDQTRNILSKENLAKTKKGVRIVNCARGGLVDEAALAELLKSGHVAGAGFDVFAEEPATDNVLFNLPNVVCTPHLGASTSEAQENVALQVAEQMSNYLIDGAVENALNMPSMTAEEAKVMGPWVKLAGHLGAFVGQMTDEPIKAINILYDGVVSDMNLAALNCSVIAGIMKRANPDVNLVSAPVVAKERGIQISTTNQDKSGAFDGYIKVTVVTDKRERSVAGTVFSDGKPRFIQIKGINIDAEVGAHMLYTTNEDVPGIIGTLGQTMGQNGVNIANFTLGRASAAGEAIALLYLDEAPRKDALSALEQTGLFRQIKPLQFDIA

SEQ ID NO: 64719 - DNA, 1233 bp, Pseudoalteromonas tunicata D2
  CDS (1)..(1233): transl_table=11
atgagtaataaggtttcgttagcaaaagataaaattaaaattttattgttagaaggtttacaccaaagcgctgtagaaacgctcaagcgccacggttacagcaatattgaatatgtaaaaacctctttagctgaagaagaactgattgagcgaattagtgatgtacactttattggtattcgctcgcgtactcatttaactgaaaaagtgcttaatgccgcagaaaagctaatagcagtcggttgcttttgtatcggtactaaccaagttgaactcgatgccgccaaagcgcgcggcattgcagtgtttaacgcgccgttttcaaatacacgttcggtagcagaattggtattaggtgagatcttattactccttcgtcgtattccacaaaaaaatgcccaagcacatcgtggcatatgggataaatcagcccatggttcatttgaagctcgcggtaaaactttagggatcataggttatggccacattggtacccagcttggcatcatggctgaaaatattggcatgaatgtgcaatattatgatatcgaagataaactaagcctaggcaatgccacacaagtgcatcacctcactcagctattacaaacttctgatgtgattagcttgcatgtgcctgaaacgccacaaactaaaaacctgattggtgctgccgagcttgaaatcatcaaacatggtgcgattttaattaatgcatcacgcggtactgtggttgatatcgatgcccttgccagcagcttacgtgaaaataaactctcaggtgcggcgattgatgtattcccgaccgagccaacctcaaatgatgaagagtttatctcgccactgcgtgagtttgacaacgttattttaaccccgcacattggtggttcaacccaagaagcccaagaaaacattggcattgaagtagcgggtaaattagccaaatattcagataacggttcaaccttatctgcggttaacttccctgaggtatcactgccagagcttgctggccgtagccgtttattacacgtgcaccacaatcgtccggggattttaacgcaaatcaaccaagcatttgcacagcacggcatcaatatcgcggcgcaatacttacaaaccaatgaaaccatcggttatgtcgtaatcgatgtcgataccgatgactctgaaatcgctttaaaagaacttcgtgcagttgaaggcaccattaaagcgcgtattttgcactag

SEQ ID NO: 64720 - protein, 410 aa, Pseudoalteromonas tunicata D2
MSNKVSLAKDKIKILLLEGLHQSAVETLKRHGYSNIEYVKTSLAEEELIERISDVHFIGIRSRTHLTEKVLNAAEKLIAVGCFCIGTNQVELDAAKARGIAVFNAPFSNTRSVAELVLGEILLLLRRIPQKNAQAHRGIWDKSAHGSFEARGKTLGIIGYGHIGTQLGIMAENIGMNVQYYDIEDKLSLGNATQVHHLTQLLQTSDVISLHVPETPQTKNLIGAAELEIIKHGAILINASRGTVVDIDALASSLRENKLSGAAIDVFPTEPTSNDEEFISPLREFDNVILTPHIGGSTQEAQENIGIEVAGKLAKYSDNGSTLSAVNFPEVSLPELAGRSRLLHVHHNRPGILTQINQAFAQHGINIAAQYLQTNETIGYVVIDVDTDDSEIALKELRAVEGTIKARILH

SEQ ID NO: 64721 - DNA, 1230 bp, Photobacterium sp. SKA34
  CDS (1)..(1230): transl_table=11
atggccaaagtttcactcaataaagataaaattaaaattctattattagaaggactacacccttcatctctagaagtgctacaacaagctggttacaccaacattgaataccacaaaggatcgctcgctggtgaagagttactagaagccgtaaaagatgcccacttcattggtattcgctctcgtacacaattaacgcctgaagtttttgctgcagcgagaaaacttaccgctgttggatgtttctgtattggtactaaccaagttgatttagatgaagctatgcgccgcggtatccccgtttttaacgcaccattttcaaatacccgtagtgttgcagaacttgtcttaggtgagctgcttcttctgttacgtggcatcccagaaaagaatgctaaagcgcatcgtggtgaatggataaaatctgcagataactcatttgaagcgcgtggtaaaaccttaggtattatcggctacggtcatattggtactcaacttggtatattggctgaaaacctcggaatgcgcgtttgtttttacgatattgaaagtaaattaaccttaggtaatgcaacacaagtcgcatcgttaagtgagctgttaaataaatcggatgtgatttcactgcacgttccagaaacgccagagacacaaaacattatgggtgctgaagaatttgcacgcatgaagccaggttctatttttattaacgcagcacgtggaactgtcgttgatattgatgccctttgtagcgcattagaaagcaaacatattgcaggcgctgctatcgatgtattccctgtagaacctaaaaccaataacgacccatttgaatcccccctgctgcaatttgataacgttattttgacgcctcacattggaggatcaacgcaagaagcacaggaaaatattggcattgaagtggcgggtaaactagtgaaatactcagataatggttcaacgctatctgctgttggcttccctgaggtatcactacctgagcaccgtggttgctctcgtctacttcatattcatgaaaaccgccctggagtcttaaatcaaatcactacaatttttgcttcagaaggtatcaatatcgccgctcagttcttacaaacaggcgctgaaattggttatgtggttattgatgttgaaactgaacgttcaaaagaagcactagcaaaactgaaaacaatcgaaggtactattcgcgcccgtattttgcactaa

SEQ ID NO: 64722 - protein, 409 aa, Photobacterium sp. SKA34
MAKVSLNKDKIKILLLEGLHPSSLEVLQQAGYTNIEYHKGSLAGEELLEAVKDAHFIGIRSRTQLTPEVFAAARKLTAVGCFCIGTNQVDLDEAMRRGIPVFNAPFSNTRSVAELVLGELLLLLRGIPEKNAKAHRGEWIKSADNSFEARGKTLGIIGYGHIGTQLGILAENLGMRVCFYDIESKLTLGNATQVASLSELLNKSDVISLHVPETPETQNIMGAEEFARMKPGSIFINAARGTVVDIDALCSALESKHIAGAAIDVFPVEPKTNNDPFESPLLQFDNVILTPHIGGSTQEAQENIGIEVAGKLVKYSDNGSTLSAVGFPEVSLPEHRGCSRLLHIHENRPGVLNQITTIFASEGINIAAQFLQTGAEIGYVVIDVETERSKEALAKLKTIEGTIRARILH

SEQ ID NO: 64723 - DNA, 1233 bp, Oceanospirillum sp. MED92
  CDS (1)..(1233): transl_table=11
atgagtcaaacaacctctcttgataaaagcaaaatcaagatattgctgttggaaggtgtccaccagtctgctgtggatacatttaaccaaaacggttacaccaacattgagtttctgacgggttcactgccagaagaagaactgattgcacgtattaaggatgttcacttcatcggtatccgctcgcgtactcagctgactgagaaagtctttgctgctgccgagaaactggttgctgttggttgtttctgtatcggaacaaaccaggtgaatctggaagccgcgacgatgcgcggtgttgcagtctttaatgcgccattctctaacactcgctctgtagctgaactggtgatcgctgaagcaatcctattgctgcgcggcgtcgctgagaagaatgctaaagctcaccgcggtgagtggcagaaatcagctaagaactcctacgagatccgtggtaagaagctgggtattgttggttacggcagcatcggttctcagttgagtgttattgctgaatccctaggtatgaaagtctacttctatgacgttgtgactaaactgccactgggtaatgcaacacaggttggctctcttaaggaactgcttaacatcagtgatattgtttccctgcatgtacctgagacaccgtctacacaagatatgatgggtgaagctcagtttgcagagatgaaacagggctctatcttcctgaacgctgcacgcggtacggttgtagtgatcgacgagctatgtaaagcactggattcaggtcgtctgctgggcgcagctgtcgatgtattcccagttgaaccacgtacaaacaacgatgagttcatctcacctcttcgcgagtatgacaatgtgatcctgacacctcacgtaggtggttctactatggaagctcaggagaacatcggttacgaagtagcagagaaactgatcaagtacagtgataacggttcctctatcacttcagttaacttccctgaagttgcgctgccagaacatccaaatgttcaccgtctgctgcatgttcataacaacgtgcctggcattatgacagcgatcaacagtgtattctcggagaacagcatcaacatcagcggccagtacctgcagacaaatgagaaagtaggttacgttgtcgtagacgttgatgccgattactctcaggttgccctacaaaacctgagacagatcgaaggcactattcgctgccgccgtctgttctaa

SEQ ID NO: 64724 - protein, 410 aa, Oceanospirillum sp. MED92
MSQTTSLDKSKIKILLLEGVHQSAVDTFNQNGYTNIEFLTGSLPEEELIARIKDVHFIGIRSRTQLTEKVFAAAEKLVAVGCFCIGTNQVNLEAATMRGVAVFNAPFSNTRSVAELVIAEAILLLRGVAEKNAKAHRGEWQKSAKNSYEIRGKKLGIVGYGSIGSQLSVIAESLGMKVYFYDVVTKLPLGNATQVGSLKELLNISDIVSLHVPETPSTQDMMGEAQFAEMKQGSIFLNAARGTVVVIDELCKALDSGRLLGAAVDVFPVEPRTNNDEFISPLREYDNVILTPHVGGSTMEAQENIGYEVAEKLIKYSDNGSSITSVNFPEVALPEHPNVHRLLHVHNNVPGIMTAINSVFSENSINISGQYLQTNEKVGYVVVDVDADYSQVALQNLRQIEGTIRCRRLF

SEQ ID NO: 64725 - DNA, 1290 bp, Xanthobacter autotrophicus Py2
  CDS (1)..(1290): transl_table=11
ttgctgaaggacgccgcgatcgtgcacgacagccattcccccacgccgcacctctccctgtccaaggacaagatcaaggtgctgctcctcgaaggcgtgaacgacagcgccgtggagctgctgaccaatgccggctacaccaacctcacccgcctgcccaaggcgctggacggcgacgcgctgaaggaggccatcaagggcgtccatatcctcggcatccgctcgcgcacccagatcacgcccgacgtgctggaggccgcggaccggctgatcgccatcggctgcttcagcgtcggcaccaaccaggtggacctcgacgcctcccgcatcagcggcgtgccggtgttcaacgcacccttctccaacacccgcagcgtcgccgagctggtgatcggcgagatcgtgatgctgctgcgccgcatccccacccgctcccacgcggcgcatgagggccgctgggacaagtccgccaccaacagcgtggaagtgcgcggcaagacgctcggcatcgtcggctacggcaatatcggctcgcagctctcgatcctggccgaggccatgggcctcaaggtgatcttctacgatcacaccgacaagctgcgccacggccaggccgagccggtgtcgaccctcaacgccctgctggcccagagcgacatcgtcagcctgcacgtgccggagacggcggcgacccacggcatgatcggccgcgccgagatcgccaccatgaagccgggggcctaccttatcaacaacagccgcggcacggtggtggacctcgacgccctcgccgaggcgctgaaggcgggccacctgcgcggcgcggcggtggacgtgttcccggtggagcccggctccaacgccgagcgcttcgtctctccgctccagggcctcgacaacgtgattctgacgccgcacatcggcggctccaccgaggaggcgcaggagcgcatcggcgccgaggtcgcccgcaagctggtggattattcagacaccggctccaccatgggcgcagtgaactttcccgaggtgcagctgccggcccgcccgacggggacccgcttcatccagattcaccgcaacctgccgggcatgctggggcggctcaacgaggtgctggcccgccactccgtcaacatcgccgcgcaatatctggagacctacgcggacgtgggctacgtggttctggacgccgatgcctccaccgcggacagccagagcgtgctcgccgacatccgggagatcgagggcaccatccgcgcccggctgctctacgaacgcaagatctga

SEQ ID NO: 64726 - protein, 429 aa, Xanthobacter autotrophicus Py2
MLKDAAIVHDSHSPTPHLSLSKDKIKVLLLEGVNDSAVELLTNAGYTNLTRLPKALDGDALKEAIKGVHILGIRSRTQITPDVLEAADRLIAIGCFSVGTNQVDLDASRISGVPVFNAPFSNTRSVAELVIGEIVMLLRRIPTRSHAAHEGRWDKSATNSVEVRGKTLGIVGYGNIGSQLSILAEAMGLKVIFYDHTDKLRHGQAEPVSTLNALLAQSDIVSLHVPETAATHGMIGRAEIATMKPGAYLINNSRGTVVDLDALAEALKAGHLRGAAVDVFPVEPGSNAERFVSPLQGLDNVILTPHIGGSTEEAQERIGAEVARKLVDYSDTGSTMGAVNFPEVQLPARPTGTRFIQIHRNLPGMLGRLNEVLARHSVNIAAQYLETYADVGYVVLDADASTADSQSVLADIREIEGTIRARLLYERKI

SEQ ID NO: 64727 - DNA, 1230 bp, Oceanobacter sp. RED65
  CDS (1)..(1230): transl_table=11
atgagcacaacttctctggataaaagcaaaattcgtatccttttattggaaggggttcaccaaagcgccctagatacactaaatgctgctggctatacgaatatcgagtatgtaaaaacggcattggctggggacgaactgaaagaaaaaattaaagacgcccactttgttggtatccgctcgcgcacccagttaactgaagacgtgtttgaagtggccaataaactgattggtgttggttgcttctgtatcggtaccaaccaggttgatcttaacgcagcagccaaacgcggtatcccagtatttaatgctccatattcaaacactcgctcagttgcagagttagtccttgctgaagctatcctaatgctacgcggtattccggaaaagaatgctgtgtgtcaccgtggtggctggttaaagtctgctgttggcagcttcgaatgtcgtggtaaaaacctaggtatcgtgggttatggcagtattggtactcagctatctgttttagctgaaggccttggtatgaaagtctacttctacgatgtggtaactaagcttccgatcggtaacgctacacaagtagagagcatggacgagctgctgtctatttctgacattgttactcttcatgtccctgaaactggcgacacgaaagacatgatgggtgctgaacagtttgccaaaatgaaaaaaggtagccttttcattaatgctgctcgtggtaccgttgtcgatatcccagcattggcagaagcgcttgaaactggccatatcgcaggtgccgcagtggatgttttcccagttgaacctaaaggcaatgatgatgagttcttatcgcctctacgcaagttcgacaatgtgattttaacgccgcatatcggtggatctacgcaagaggcacaagaaaacattggtaaagaggtaggtgaaaagctagcaggctattctgatacgggtacgactttatctgccgttaacttcccagaagtagcgctgcctcagcatggaaacttccaccgcattcttcacatccacaaaaaccagcctggtgtattgaatgctatcaacaccatctttgctgaaaacaatatcaacgtcttaggtcagttcttacagactagtgccgacattggttacgttgtgatcgatgtagaagaaagcgccggcgaactggcactagaaaaagtgcaagaagtagaagcgaccattcgtgctcgcattctgtactaa

SEQ ID NO: 64728 - protein, 409 aa, Oceanobacter sp. RED65
MSTTSLDKSKIRILLLEGVHQSALDTLNAAGYTNIEYVKTALAGDELKEKIKDAHFVGIRSRTQLTEDVFEVANKLIGVGCFCIGTNQVDLNAAAKRGIPVFNAPYSNTRSVAELVLAEAILMLRGIPEKNAVCHRGGWLKSAVGSFECRGKNLGIVGYGSIGTQLSVLAEGLGMKVYFYDVVTKLPIGNATQVESMDELLSISDIVTLHVPETGDTKDMMGAEQFAKMKKGSLFINAARGTVVDIPALAEALETGHIAGAAVDVFPVEPKGNDDEFLSPLRKFDNVILTPHIGGSTQEAQENIGKEVGEKLAGYSDTGTTLSAVNFPEVALPQHGNFHRILHIHKNQPGVLNAINTIFAENNINVLGQFLQTSADIGYVVIDVEESAGELALEKVQEVEATIRARILY

SEQ ID NO: 64729 - DNA, 1233 bp, Vibrio sp. Ex25
  CDS (1)..(1233): transl_table=11
atggccaaagtttcactggaaaaagaaaagattaagatcctcttgttagagggactccacccttcttcagttgaagttcttcaagcagctggttataccaacattgagtaccataaaggttcccttccggaagaagaattgattgaagcggttaaagacgtgcacttcatcggtattcgctcccgtacgaacctatccgaagaggtaatcaatgcggcgaataaactggttgcaattggctgtttttgtatcggtactaaccaagtaaacctagacgcagcagcaaaacgcggcattcctgtgtttaatgcaccgttctctaacacacgcagtgtggctgagctagtgcttggtcaaatcctactacttctgcgtggcattcctgaaaagaatgcgcttgcacatcgcggtatttggaagaaaagtgctgacaactcttacgaagcacgtggcaaacgtcttggcattatcggatacggccacattggtacgcagctaggtattattgccgaaaacttaggtatgcgcgtttactactacgacatcgagaacaaattgtcccttggtaatgcgacgcaagtacataccatgagtgaactactaaacaagtgtgacgtaatttctctgcacgttcctgaaacgccagaaacaaaaaatatgatgggtgaagctgagtttgctcgcatgaagccaggctcaatctttattaatgcagcacgcggcactgtcgtgcatattccagcactttgccatagtttagaagcgggtcacattgcgggcgctgcgattgatgtattcccaacagaaccaaaaacgaatgccgacccgttcgaatctcctttgcagaagttcgataatgtcatcctcactccacacgttggtggttcaacgcaagaagcacaagagaacatcggtgttgaggtcgcaggaaaactggcgaagtactctgacaacggctctacgctttcaagcgtaaacttcccagaggtgtcactgccagagcacggtggtgaatgctctcgcttgcttcacatccataaaaaccgtcctggtattcttactcagatcaacaccatcttcgcggaagacggcattaacattgccgcacagtacctacaaacagccgctgaaatcggctacgtagtgatcgatgttgaaaccgagcgctcagaagaagcactagcgaaactgaaaagtattgaaggcactatccgtgctcgtatccttcactaa

SEQ ID NO: 64730 - protein, 410 aa, Vibrio sp. Ex25
MAKVSLEKEKIKILLLEGLHPSSVEVLQAAGYTNIEYHKGSLPEEELIEAVKDVHFIGIRSRTNLSEEVINAANKLVAIGCFCIGTNQVNLDAAAKRGIPVFNAPFSNTRSVAELVLGQILLLLRGIPEKNALAHRGIWKKSADNSYEARGKRLGIIGYGHIGTQLGIIAENLGMRVYYYDIENKLSLGNATQVHTMSELLNKCDVISLHVPETPETKNMMGEAEFARMKPGSIFINAARGTVVHIPALCHSLEAGHIAGAAIDVFPTEPKTNADPFESPLQKFDNVILTPHVGGSTQEAQENIGVEVAGKLAKYSDNGSTLSSVNFPEVSLPEHGGECSRLLHIHKNRPGILTQINTIFAEDGINIAAQYLQTAAEIGYVVIDVETERSEEALAKLKSIEGTIRARILH

SEQ ID NO: 64731 - DNA, 1230 bp, Alteromonadales bacterium TW-7
  CDS (1)..(1230): transl_table=11
atgagtaaggtatcgttagcaaaagacaaaataaaaattctcttgcttgaaggtgtgcaccaaagcgcagttgaaacgctaaaacgaaatggttacagcaatatagactacgttaaaacatcgctacctgaagacgagcttaaagaacgtattaaagacgctcactttgtaggtctgcgttctcgtactcatattaacgaagctgttttagatgctgcagagaagctgattgccattggttgtttttgtattggcacaaaccaagttgacttaagtaacgctcgccagcgtggtattgctgtatttaatgcgccattttcaaatacacgctctgttgcagagctagtacttggtgaaatactgcttttacttcgcggtatacctgagcgaaatgctgcagctcaccgtggtgagtggctaaaaacagcaacgggttcatttgaagcacgtggtaaaacgttgggtattattggctatggccacattggtactcagctaggtattatggctgaaaacataggtatgaacgtcgagttttacgacattgaagataagctaacactgggtaatgcaaagcaagtgcataacttgactcagctacttcagcgatctgatgtaattagtttgcatgtgccagaaacaccacaaaccaaaaacttaatcggttcggcagagcttgcggtaatgaaacaaggcgctattttaattaacgcctctcgcggcaccgttgttgatattgatgcccttgcagaatcacttagcgagaaaaagctaagtggtgcagcaattgatgtgttccctgttgaacctaaatctaacgatgaagagtttgtatcgccactacgcgatttcgataacgttattttaacgccgcatattggtggttcaactcaagaagctcaagaaaatattggtattgaagtggcaggtaaattggctaaatactcagataacggctctacaattaccgccgttaacttccctgaggtatcactgccagagcttgctaaccgtagtcgcttattgcatgttcaccacaaccgcccaggtgtgttaacgcaaattaaccaagcgtttgcgcagcacggtatcaatatagcggctcagtacttacaaactgatgaagcaattggttatgtggttattgacgttgataccgaccactctgaagtagcgcttaaagagctaagtgcagttgaaggaacaattagagcgcgtattcttcactaa

SEQ ID NO: 64732 - protein, 409 aa, Alteromonadales bacterium TW-7
MSKVSLAKDKIKILLLEGVHQSAVETLKRNGYSNIDYVKTSLPEDELKERIKDAHFVGLRSRTHINEAVLDAAEKLIAIGCFCIGTNQVDLSNARQRGIAVFNAPFSNTRSVAELVLGEILLLLRGIPERNAAAHRGEWLKTATGSFEARGKTLGIIGYGHIGTQLGIMAENIGMNVEFYDIEDKLTLGNAKQVHNLTQLLQRSDVISLHVPETPQTKNLIGSAELAVMKQGAILINASRGTVVDIDALAESLSEKKLSGAAIDVFPVEPKSNDEEFVSPLRDFDNVILTPHIGGSTQEAQENIGIEVAGKLAKYSDNGSTITAVNFPEVSLPELANRSRLLHVHHNRPGVLTQINQAFAQHGINIAAQYLQTDEAIGYVVIDVDTDHSEVALKELSAVEGTIRARILH

SEQ ID NO: 64733 - DNA, 1230 bp, marine gamma proteobacterium HTCC2143
  CDS (1)..(1230): transl_table=11
atgagccaaacatcactcgacaagagcaagatcaaattcctgttgttagaaggggttcatcagtcggctgtcgatacgctaaaagcggcgggctattcaaatatcgtctgccatccaaaggcattgtcagagcagcagctaaaagaagaacttgccgatgctcactttgtcggaattcgctcccgcacccaactaactgacgacatattcagcaccgcaaagaaactaattgcggtcggctgtttttgcatcggcaccaaccaggtagacctaaaagcggcaaccgaaaaaggcgtggtgatattcaatgcgcccttctccaacacccgcagtgtcgccgaattagttattgccgaggcaattttactgctcagaggtgtcgctgagaaaaatgcattagcgcatcgtggaatctggcaaaaatctgccagcggatcctttgaaatccgaggcaaacaattaggcattattggctatggcagtatcggtatgcagctgggcgttattgcagaatcactgggcatgcaagtggtattttatgatgttgtcagcaaactccctttgggcaatgctatgcaagttcccagtttaaatggcctattggcgaaatcagatatcgtgagcttacatgtgcctgaaacgggctccactagaaatatgattggagaacaagaactcacgcaaataaaaccaggtgccattttaatcaacgcatcacggggcactgttattgacatcgacgcacttgctgcagcactagaatcaggccggctttctggcgcggcaatagacgtctttcctgtagaacctcgctccaatgacgacgaatttttgtcccccctgcggaaatttgacaatgtattcctgacacctcacattggtggcagcaccatggaggctcaagaaaatatcggattggaagtagccgagaaaatggccaggtacagtgacaatggaacgtcgacatcgtccgtcaactttccagaggtggcactacctgcccacaccgatatgcaccgtttactgcatacacaccgcaatactcccggagtaatgtcagcaatcaacaaagtcttcgctgagaacaatatcaatattcgtgcacaatatctccaaacaactcaagatattggctacgtcgttattgatatagatgctgaatacagtgagctggcactgaaaaaactcagcgcaatagaaggcacaatccgctgccgggttttattctag

SEQ ID NO: 64734 - protein, 409 aa, marine gamma proteobacterium HTCC2143
MSQTSLDKSKIKFLLLEGVHQSAVDTLKAAGYSNIVCHPKALSEQQLKEELADAHFVGIRSRTQLTDDIFSTAKKLIAVGCFCIGTNQVDLKAATEKGVVIFNAPFSNTRSVAELVIAEAILLLRGVAEKNALAHRGIWQKSASGSFEIRGKQLGIIGYGSIGMQLGVIAESLGMQVVFYDVVSKLPLGNAMQVPSLNGLLAKSDIVSLHVPETGSTRNMIGEQELTQIKPGAILINASRGTVIDIDALAAALESGRLSGAAIDVFPVEPRSNDDEFLSPLRKFDNVFLTPHIGGSTMEAQENIGLEVAEKMARYSDNGTSTSSVNFPEVALPAHTDMHRLLHTHRNTPGVMSAINKVFAENNINIRAQYLQTTQDIGYVVIDIDAEYSELALKKLSAIEGTIRCRVLF

SEQ ID NO: 64735 - DNA, 1230 bp, Pseudomonas putida GB-1
  CDS (1)..(1230): transl_table=11
atgagcaagacttctctcgacaagagcaagatccggttccttcttcttgaaggtgtgcaccagaacgcagtcgataccctcaaggctgccggctacaccaacatcgaatacctcactggttcgttgccggaagccgagctgaaggaaaagatcgccgatgcccactttatcggcatccgttcacgcacccagcttaccgaagagatcttcgactgcgccaagaaactggtcgctgttggctgcttctgcatcggcaccaaccaggttgacctggaagctgcccgccagcgcggtatcgccgtgttcaacgcgccatactccaacacccgttcggtcgccgagctggtactggccgaggccatcctgctgctgcgcggcatcccagagaaaaacgcttcctgccaccgtggtggctggatcaagagtgcggccaactcgttcgaaatccgtggcaagaaactgggcatcgtcggctacggctcgatcggtacccagctgtcggtcctggccgaaaacctgggcatgcaggtgtacttctacgacccgctgaccaaactgccactgggcaacgccgtgcaggttaccagcctgaacgagctgctgggcctggccgacatcgtctcgctgcacgtgcctgagctgccgtccacccagtggatgatcggcgagaaggagatccgcgcgatgaaaaaaggcgcgatcctgatcaacgccgcccgtggcaccgtggtcgaactggaccacctggccgctgccatcaaggacaagcacctgatcggcgccgccatcgacgtgttcccgatcgagccgcgctccaacgacgaagagttcgaaagcccgctgcgcggcctggacaacgtgatcctgaccccgcacatcggtggttccaccgccgaagcccaggccaacatcggcctggaagtggccgagaagctggtcaagtacagcgacaacggtacttcggtatcttcggtcaacttcccggaagtggccctgccggcgcacccaggcaagcaccgcctgctgcacattcacgaaaacattcccggcgtactcagcgagatcaacaaggtcttcgccgagaacggcatcaacatctccggtcagttcctgcagaccaacgagaaagtcggttacgtggtaatcgacgttgacgccgagtactcggaccttgcgcaagaaaaactgcaacaggtcaagggcaccatccgttcccgcgtgctgttctaa

SEQ ID NO: 64736 - protein, 409 aa, Pseudomonas putida GB-1
MSKTSLDKSKIRFLLLEGVHQNAVDTLKAAGYTNIEYLTGSLPEAELKEKIADAHFIGIRSRTQLTEEIFDCAKKLVAVGCFCIGTNQVDLEAARQRGIAVFNAPYSNTRSVAELVLAEAILLLRGIPEKNASCHRGGWIKSAANSFEIRGKKLGIVGYGSIGTQLSVLAENLGMQVYFYDPLTKLPLGNAVQVTSLNELLGLADIVSLHVPELPSTQWMIGEKEIRAMKKGAILINAARGTVVELDHLAAAIKDKHLIGAAIDVFPIEPRSNDEEFESPLRGLDNVILTPHIGGSTAEAQANIGLEVAEKLVKYSDNGTSVSSVNFPEVALPAHPGKHRLLHIHENIPGVLSEINKVFAENGINISGQFLQTNEKVGYVVIDVDAEYSDLAQEKLQQVKGTIRSRVLF

SEQ ID NO: 64737 - DNA, 1410 bp, Saccharomyces cerevisiae
  CDS (1)..(1410)
atgtcttattcagctgccgataatttacaagattcattccaacgtgccatgaacttttctggctctcctggtgcagtctcaacctcaccaactcagtcatttatgaacacactacctcgtcgtgtaagcattacaaagcaaccaaaggctttaaaacctttttctactggtgacatgaaaattctactgttggaaaatgtcaatgcaactgcaatcaaaatcttcaaggatcagggttaccaagtagagttccacaagtcttctctacctgaggatgaattgattgaaaaaatcaaagacgtacacgctatcggtataagatccaaaactagattgactgaaaaaatactacagcatgccaggaatctagtttgtattggttgtttttgcataggtaccaatcaagtagacctaaaatatgccgctagtaaaggtattgctgttttcaattcgccattctccaattcaagatccgtagcagaattggtaattggtgagatcattagtttagcaagacaattaggtgatagatccattgaactgcatacaggtacatggaataaagtcgctgctaggtgttgggaagtaagaggaaaaactctcggtattattgggtatggtcacattggttcgcaattatcagttcttgcagaagctatgggcctgcatgtgctatactatgatatcgtgacaattatggccttaggtactgccagacaagtttctacattagatgaattgttgaataaatctgattttgtaacactacatgtaccagctactccagaaactgaaaaaatgttatctgctccacaattcgctgctatgaaggacggggcttatgttattaatgcctcaagaggtactgtcgtggacattccatctctgatccaagccgtcaaggccaacaaaattgcaggtgctgctttagatgtttatccacatgaaccagctaagaacggtgaaggttcatttaacgatgaacttaacagctggacttctgagttggtttcattaccaaatataatcctgacaccacatattggtggctctacagaagaagctcaaagttcaatcggtattgaggtggctactgcattgtccaaatacatcaatgaaggtaactctgtcggttctgtgaacttcccggaagtcagtttgaagtctttggactacgatcaagagaacacagtacgtgtcttgtatattcatcgtaacgttcctggtgttttgaagaccgttaatgatatcttatccgatcataatatcgagaaacagttttctgattctcacggcgagatcgcttatctaatggcagacatctcttctgttaatcaaagtgaaatcaaggatatatatgaaaagttgaaccaaacttctgccaaagtttccatcaggttattatactaa

SEQ ID NO: 64738 - protein, 469 aa, Saccharomyces cerevisiae
MSYSAADNLQDSFQRAMNFSGSPGAVSTSPTQSFMNTLPRRVSITKQPKALKPFSTGDMKILLLENVNATAIKIFKDQGYQVEFHKSSLPEDELIEKIKDVHAIGIRSKTRLTEKILQHARNLVCIGCFCIGTNQVDLKYAASKGIAVFNSPFSNSRSVAELVIGEIISLARQLGDRSIELHTGTWNKVAARCWEVRGKTLGIIGYGHIGSQLSVLAEAMGLHVLYYDIVTIMALGTARQVSTLDELLNKSDFVTLHVPATPETEKMLSAPQFAAMKDGAYVINASRGTVVDIPSLIQAVKANKIAGAALDVYPHEPAKNGEGSFNDELNSWTSELVSLPNIILTPHIGGSTEEAQSSIGIEVATALSKYINEGNSVGSVNFPEVSLKSLDYDQENTVRVLYIHRNVPGVLKTVNDILSDHNIEKQFSDSHGEIAYLMADISSVNQSEIKDIYEKLNQTSAKVSIRLLY

SEQ ID NO: 64739 - DNA, 1443 bp, Aspergillus niger
  CDS (1)..(1443)
atggctacgtctgcaagggacataaatgcccgagagggatcaaatctcaacccttcacaaagcttgaatttctctacctctcctaccgcttctttccagtctgctccatccagccatggtggctcggcttttggaagccgtacgatacctctagcaaatgcaaagcatttgaaaccgttcgccacggaggatattaaggtcttgcttctggaaaacgtcaaccaaacgggtagggacatccttaccaaacagggctatcaggtggaatttcttaaatcttcccttccggaagatcagctcattgagaaaattcgagatgtacatgtgattgggattcgatcgaagaccaagctgagtgctcgtgttttaaaggaagctcggaatctcattgttattggttgtttctgcattggaacgaaccaggttgatctacaatttgcagctgaacatggaattgcggtcttcaactcaccgtttagcaactcccgtagtgttgcagaattggttatagctgaaatcattgctcttgcccgtcaactgggtgaccgttccaatgagatgcataacggcacatggaacaaagtgagcaacaagtgctgggaaattcgcggaaagacccttggtataatcggatatggccatattggcgctcaactgtctgttctagcagaggctatgggcatgtcagttattttctacgacgtagtgaacctgatggcattgggtactgctcgccaagtaccaacccttgagatcctcttgtctgagtcagactttatcacgtgccatgttcctgagctcccagaaacacggaacatgataggacaacgccagtttgagcaaatgaagtctggtagttatttgataaatgccagtcggggaagtgttgtggacattcctgctctaatccatgcaatgcggtccgggaaagtggcgggtgctgctctcgatgtctatcccaatgagccagctggaaatggtgattatttcaatcaaagcctcaatgactgggcaacggatctcaggggacttaagaacttgatcctcacgccacatattggaggtagcacagaggaggcgcagcgtgcgattggcgttgaggtcgcagaagccttggtgagatatgttaatgaaggcacaacactgggggccgtaaacctgccggaagttgctctgcggtccctgacgatggacgaacccgaccatgcccgagtcatcttcattcatcagaacgttccgggtgttttgcgaaaagttaatgagatccttggcgatcacaatgttgacaagcaaatgaccgatagcagaggcgatgtggcctacttgatggccgatattagcagtgtcgacaacacgacaatcaaggacttgtacgaaaggcttgaaagcctcggatgtacgaaatctctttcttcgatatcacattatgactttcctgactga

SEQ ID NO: 64740 - protein, 480 aa, Aspergillus niger
MATSARDINAREGSNLNPSQSLNFSTSPTASFQSAPSSHGGSAFGSRTIPLANAKHLKPFATEDIKVLLLENVNQTGRDILTKQGYQVEFLKSSLPEDQLIEKIRDVHVIGIRSKTKLSARVLKEARNLIVIGCFCIGTNQVDLQFAAEHGIAVFNSPFSNSRSVAELVIAEIIALARQLGDRSNEMHNGTWNKVSNKCWEIRGKTLGIIGYGHIGAQLSVLAEAMGMSVIFYDVVNLMALGTARQVPTLEILLSESDFITCHVPELPETRNMIGQRQFEQMKSGSYLINASRGSVVDIPALIHAMRSGKVAGAALDVYPNEPAGNGDYFNQSLNDWATDLRGLKNLILTPHIGGSTEEAQRAIGVEVAEALVRYVNEGTTLGAVNLPEVALRSLTMDEPDHARVIFIHQNVPGVLRKVNEILGDHNVDKQMTDSRGDVAYLMADISSVDNTTIKDLYERLESLGCTKSLSSISHYDFPD

SEQ ID NO: 64741 - DNA, 1200 bp, Bordetella pertussis
  CDS (1)..(1200): transl_table=11
atggcccagattgttctgttcgagaatatccaccccagcgcccgcgccgtcttcagcgcggccggctataccgacatcgtcgcccacgcggcggcgctgccttcgggcgagctgcgcgaggccctgcgcggcgccgaggtggtgggtatccgctcgcggacccatctggacgccgacctgctggcggccaaccccgacctgcgcgtggtggggtgcttttgcatcggcaccaaccaggtcgacctggacgccgccatgatgcgcggggtgccggtcttcaacgcgccgttctccaacacccgctcggtggccgagctggtgctgggcgaaaccatcctgctgctgcgccggatccccgagaagaacgcccgcgtccacctggggcattgggacaagagcgccgccggcgcctacgaagcccgcggcaagacgctggggatcgtcggctacggcaacatcggttcgcagatcagcaccctggccgaggccatcggcatgcgcgtggtgttcttcgacgtcgaggccaagctgccgctgggcaacgcgcgcgccgccggctcgctggccgagctgctggagcaggccgatgtcgtcaccttgcacgtgcccggcggcaagtccacccagaacatcgtcaacgccgacaccctggcgcgcatgaagcgcggcgcgattctcatcaacgcctcgcgcggcacggtggtggacatccaggcgctgcacgacgccctggccagcggccacctggccggcgcggcgctggacgtgtttccgaccgagcccaagagcgccgacgaaccgctggccagcccgctgatcggcatgcccaacgtcgtgctcacgccgcacatcggcggcagcacccaggaatcccaggaaaacatcggccgcgaagtggccgagaaactggtgcgcttcctgcaagcaggcaccaccaagagcgccgtcaatttccccgagctgtcgtaccaggcgcccgtgggcggctcgcgcatcatccacgtgcaccgcaacgcccccggcgcgctgggcgcgctggacaacctgatggcccagcatggcctgaacatcgtcagccagagcctgcagaccaagggccagatcggctacgccgtcaccgacgtcgacggcgaagtcagcgacaccgtcctggccgacctgcgcagccacccggtcaccgtgaggtgcgaaaagctgtaa

SEQ ID NO: 64742 - protein, 399 aa, Bordetella pertussis
MAQIVLFENIHPSARAVFSAAGYTDIVAHAAALPSGELREALRGAEVVGIRSRTHLDADLLAANPDLRVVGCFCIGTNQVDLDAAMMRGVPVFNAPFSNTRSVAELVLGETILLLRRIPEKNARVHLGHWDKSAAGAYEARGKTLGIVGYGNIGSQISTLAEAIGMRVVFFDVEAKLPLGNARAAGSLAELLEQADVVTLHVPGGKSTQNIVNADTLARMKRGAILINASRGTVVDIQALHDALASGHLAGAALDVFPTEPKSADEPLASPLIGMPNVVLTPHIGGSTQESQENIGREVAEKLVRFLQAGTTKSAVNFPELSYQAPVGGSRIIHVHRNAPGALGALDNLMAQHGLNIVSQSLQTKGQIGYAVTDVDGEVSDTVLADLRSHPVTVRCEKL

SEQ ID NO: 64743 - DNA, 1533 bp, Cryptococcus neoformans
  CDS (1)..(1533)
atgtccatccctatcccagacagaaacagaagacagtccgtctccgcctccgacccccccaacaacatccctatccctgccaacacccgtggcattcccgtctcttctttcgctccccattctccgcccactggcacttctcctcgcaattcctccttctctttctctacctccccttcaactagctacctcagaaatgcctctggtgctttccacggtattgcccgacaattgaccgccttccttcctcctgactaccccacacaagagaatcatgagaagaggcagggcaagactaagattctgcttttggaaaacattaacttggacgccgccgactacttgaagagccaaggctacgaggttgaccacgtcaccaaggcctacactgaagaagagctcattgccaagctccccaattaccatgccatcggtatccgatcaaaaactaagatcactgccaaggtcattgacgccaacccccaactcttggccatcggctgtttctgtatcggtaccaatcaggtcgatcttgagcacgccgccaagcgaggtatcgccgttttcaactctcccttctccaactcccgttctgttgccgagctcgtcatctccgagatcattgccctttctagacaaatcatcgaccgaacccacgagatgcgagccggtatctggaacaagctctccaagaactgttgggaaattcgtggcaagacccttggtattgtcggttacggtcacattggttctcagctttccgtccttgccgaggcatttggtatgtccgtcatctactttgacgtagtccctatcatgcctctcggttcagcccgccaggttgacacccttgaggatctcctctccagggctgatttcatcaccttgcatgtccctgaaatccctgacaccattggtatgatgggtgccgagcaattttctcagatgaagaagggtgccttcttcatcaacaacgcccgaggcaaggttgtcgacctctctgctctctgtgacgccctcgaatccgaccaccttgccggtgctgccatcgacgtcttccccaaggagcccggatccaatggtcccggctttaacgagactctcggtgacttcatccctcgactccgaaagattcccaacctcatcctcactcctcacatcggtggttctaccgaggaagctcagcgagccatcggtaccgaagtttccaacgctcttactcgatacctgaactacggtactaccctcggtgctgtcaacttccccgaagtcgacttgcgtgccatcaccgccgccgacgagagacatatcagggtctgccacgttcacaagaacgagcctggtgttttgaggggtatcaacaacatccttgcggaccacaacatcgagaagcaattctccgactccaagggtgacattgcgtacttgatggccgacatcagcggtgtcgggcaagaagaagttgagggattgtattcggcgatcaagaacaccaggtcaaacattttgacaaggttgctttttgtagaatga

SEQ ID NO: 64744 - protein, 510 aa, Cryptococcus neoformans
MSIPIPDRNRRQSVSASDPPNNIPIPANTRGIPVSSFAPHSPPTGTSPRNSSFSFSTSPSTSYLRNASGAFHGIARQLTAFLPPDYPTQENHEKRQGKTKILLLENINLDAADYLKSQGYEVDHVTKAYTEEELIAKLPNYHAIGIRSKTKITAKVIDANPQLLAIGCFCIGTNQVDLEHAAKRGIAVFNSPFSNSRSVAELVISEIIALSRQIIDRTHEMRAGIWNKLSKNCWEIRGKTLGIVGYGHIGSQLSVLAEAFGMSVIYFDVVPIMPLGSARQVDTLEDLLSRADFITLHVPEIPDTIGMMGAEQFSQMKKGAFFINNARGKVVDLSALCDALESDHLAGAAIDVFPKEPGSNGPGFNETLGDFIPRLRKIPNLILTPHIGGSTEEAQRAIGTEVSNALTRYLNYGTTLGAVNFPEVDLRAITAADERHIRVCHVHKNEPGVLRGINNILADHNIEKQFSDSKGDIAYLMADISGVGQEEVEGLYSAIKNTRSNILTRLLFVE

SEQ ID NO: 64745 - DNA, 1812 bp, Arabidopsis thaliana
  CDS (1)..(1812)
  misc_feature (378)..(378): r is g or a
  misc_feature (918)..(918): y is t or c
atgtcagccaccgccgccgcctcctcctcgatcgccgttgccaccaactctctcaggaacgtgactctgtcttccagatcgccccttccatcagccatctccgtggctttcccttcccgtggacgcaatactcttcagcgacgcctcgttctcgtttcctgcagtactggagacggatctaagcctacgattctcgtggcggagaagctcggtgacgctggtattaagcttttggaggatgtcgcgaatgtcgactgttcgtataacatgactcctgaggagctcaacattaagatctcgctctgtgacgccttgatcgtgaggagtgggactaaggttggccgtgaagtgttcgaatcgtctcacggacggctcaargttgttggtcgcgctggtgttgggatcgacaacgtggatctgagtgcagcgacggagtttgggtgtttggttgtcaacgctccgacggcgaacacgatcgctgccgctgagcacggaatcgctcttatggccgccatggctaggaacgtagctcaagctgatgcgtctgttaaggctggagagtggaagaggaacaagtatgtaggtgtttcacttgtgggaaagacccttgcagtgttgggattcgggaaagttgggacggaagttgctcgtcgtgctaagggtcttggtatgcgtgtcattgctcatgatccctatgccccagcagaccgtgcacacgccattggtgttgacttagtgagctttgatgaagcccttgccaccgcggatttcatttctcttcatatgcctcttacgccaacaacatcgaagatactaaacgacgaaacctttgccaatatgaagaagggagttcgaattgttaatgttgctcgtggaggtgtcatagacgaagatgcgttagtgagagctctggatgcyggtattgttgcgcaggctgcacttgatgttttcaccaaagagcctccggctaaagatagcaagctcgtgcagcacgagagggtcactgtgacacctcatcttggagctagtaccatggaggctcaggaaggagttgccatcaaaattgctgaagctgttgttggagctctgaatggagagcttgctgctactgcagtcaatgcacctatggtttctgctgaggttctgaccgagctgaaaccatatgtggtgctagccgagaaactaggaagactggcagtgcaactggtggccggaggaagcggtgtgaaaaacgcgaaaatcacatacgcctcagcaagagccactgatgatcttgacaccagacttctccgagccatgatcaccaagggaatcatcgagccaatctctgacgtatatgtcaatttggtcaacgctgatttcacagccaagcagagaggtctcagactctcagaggaacgtgtgcttttggatggttcaccagagagcccattggagacaataactgttcagctaagcaatgtggagtccaaattcgccagttccctgtctgaatcaggagaggttaaagtggaaggaaaggttaaagacggagtcccgcatttgacaaaggttggatcttttgaggtcgatgtaactcttgaaggtagtatcatactgtgcaggcaggtggatcaacctggtatgatcgggactgtcggaagcatccttggagagtctaatgtcaatgttaacttcatgagcgttgggagaattgcaccgaggaagcaagcgattatggcgattggagtagatgacataccaagcaaagagacactgaagaagattggggaaattccagcggttgaggagttcgttttcctcaagctctag

SEQ ID NO: 64746 - protein, 603 aa, Arabidopsis thaliana
MSATAAASSSIAVATNSLRNVTLSSRSPLPSAISVAFPSRGRNTLQRRLVLVSCSTGDGSKPTILVAEKLGDAGIKLLEDVANVDCSYNMTPEELNIKISLCDALIVRSGTKVGREVFESSHGRLKVVGRAGVGIDNVDLSAATEFGCLVVNAPTANTIAAAEHGIALMAAMARNVAQADASVKAGEWKRNKYVGVSLVGKTLAVLGFGKVGTEVARRAKGLGMRVIAHDPYAPADRAHAIGVDLVSFDEALATADFISLHMPLTPTTSKILNDETFANMKKGVRIVNVARGGVIDEDALVRALDAGIVAQAALDVFTKEPPAKDSKLVQHERVTVTPHLGASTMEAQEGVAIKIAEAVVGALNGELAATAVNAPMVSAEVLTELKPYVVLAEKLGRLAVQLVAGGSGVKNAKITYASARATDDLDTRLLRAMITKGIIEPISDVYVNLVNADFTAKQRGLRLSEERVLLDGSPESPLETITVQLSNVESKFASSLSESGEVKVEGKVKDGVPHLTKVGSFEVDVTLEGSIILCRQVDQPGMIGTVGSILGESNVNVNFMSVGRIAPRKQAIMAIGVDDIPSKETLKKIGEIPAVEEFVFLKL

SEQ ID NO: 64747 - DNA, 1875 bp, Arabidopsis thaliana
  CDS (1)..(1875)
atggcattttcatcttcgtgttcgtccgtcaaagccgtcaactcacggtggacgtctccgtctccgtcaccgtcttctagattcgccgtcctccctgctttccttcaccgccgttacgcaacaagcgtcaaactaacggccataagcgccgccttaaaaaccgtcgagcaaacgacgttaacagaggataacagattctcaaccgtcggatctgactctgatgaatacaatccaactcttccaaagccgaggatcctcgtcaccgagaaactgggagaagccggcgtgaatctcctcagggaattcggcgacgttgactgctcttacgatctttcgccggaagatctgaagaagaaagtggcggagagtgacgctctgatcgtgagaagcggaactaaagtgacgagggaagtgtttgaggcggcgaaggggaggttgaaagtggtcggaagagccggagttgggattgacaatgttgatctgcaggcggcgacggagcacgggtgtttggtggttaatgctccaacggctaatacggtggctgctgccgaacatggaattgctttgcttgcttctatggcacgtaacgttgctcaggccgacgcttctattaaagccggaaaatgggagaggagcaagtacgtcggtgtatctctcgtcggaaaaaccttggccgtgatgggtttcgggaaagttgggacggaggtggcgagaagagccaaaggtctaggcatgaccgttatctcccacgacccttacgcgccagctgacagagccagagctctcggtgtcgatcttgtttcattcgatcaagctatctccaccgccgatttcgtctccctgcacatgcctttaactccggccaccaaaaaggtcttcaacgacgaaactttctctaagatgaagaaaggtgtgcgtctcattaatgtcgctagaggtggcgtcatcgacgaggatgcactcgttagagctctcgatgccggaatcgttgctcaggcagcattagatgtgttctgtgaggaaccaccatcgaaagatagcagactaattcagcatgaaaatgttactgtgacacctcatcttggagctagcacaaaagaagctcaggaaggtgtagccattgagatagcagaggctgtagcaggggcattgaaaggagagttatcagctactgccgtcaatgctccaatggtggctcctgaggtcttgtctgagttgactccttatattgtcttagctgagaagcttgggaggttagctgtgcagttagcatctggaggtaaaggagtacagtccattagggtggtctatcggtcagctcgtgaccgagatgatttggatactagactacttcgtgcaatgatcacaaagggaatcattgaaccgatctcagattcatatgtcaacttggtgaatgctgatttcatagctaaacaaaagggtcttcgtattagtgaggaacgaatggttgttgattcatcaccagagtaccctgttgattccatccaagttcagattttgaatgtggagtcaaatttcgctggtgctgtctctgatgctggtgatataagtattgaagggaaggtgaagtacggagttccgcatttaacttgtgtcggatcatttggtgtggatgtgagccttgaagggaatctgatactgtgcaggcaagtggatcaaccagggatgattggacaggttggtaacatacttggagaacaaaacgtgaatgtgaatttcatgagtgttggaagaacagtgttgaggaaacaagcgataatggcgattggagttgatgaagaaccagacaacaaaacacttgagaggattgggggtgtttctgcgattgaagagtttgtgtttcttaaactataa

SEQ ID NO: 64748 - protein, 624 aa, Arabidopsis thaliana
MAFSSSCSSVKAVNSRWTSPSPSPSSRFAVLPAFLHRRYATSVKLTAISAALKTVEQTTLTEDNRFSTVGSDSDEYNPTLPKPRILVTEKLGEAGVNLLREFGDVDCSYDLSPEDLKKKVAESDALIVRSGTKVTREVFEAAKGRLKVVGRAGVGIDNVDLQAATEHGCLVVNAPTANTVAAAEHGIALLASMARNVAQADASIKAGKWERSKYVGVSLVGKTLAVMGFGKVGTEVARRAKGLGMTVISHDPYAPADRARALGVDLVSFDQAISTADFVSLHMPLTPATKKVFNDETFSKMKKGVRLINVARGGVIDEDALVRALDAGIVAQAALDVFCEEPPSKDSRLIQHENVTVTPHLGASTKEAQEGVAIEIAEAVAGALKGELSATAVNAPMVAPEVLSELTPYIVLAEKLGRLAVQLASGGKGVQSIRVVYRSARDRDDLDTRLLRAMITKGIIEPISDSYVNLVNADFIAKQKGLRISEERMVVDSSPEYPVDSIQVQILNVESNFAGAVSDAGDISIEGKVKYGVPHLTCVGSFGVDVSLEGNLILCRQVDQPGMIGQVGNILGEQNVNVNFMSVGRTVLRKQAIMAIGVDEEPDNKTLERIGGVSAIEEFVFLKL

SEQ ID NO: 64749 - DNA, 1584 bp, Archaeoglobus fulgidus
  CDS (1)..(1584): transl_table=11
atgaaagtgcttgttgcagagccaatcagtgaagaggccatcgactatatgcgcaaaaacggattagaggttgaagtaaaaacaggaatgtcgagagaggagcttattcgggaagtgcccaagtatgaggccatcgtcgttagaagccagaccaaggtggatgctgaagtcattcaggcagctaagaacctcaagattatcggaagagcaggagttggagtggacaacatagacatcaacgccgcaacgcagaggggaatagttgttgttaacgctccgggaggaaacacgatctcaaccgctgaacatgcaatcgccctaatgctcgccgctgccaggaaaatcccgcaggctgacagaagcgtcaaggaggggaagtgggagaggaagaaattcatgggaattgagcttagggggaagactgctggagtcatcgggcttggcagagttggttttgaagtagcaaagcgctgcaaggccctagagatgaacgttttagcctacgaccccttcgtgtccaaggagagggccgagcagattggggttaagcttgttgactttgacactctcttggcatcatcggatgtcataactgtccacgttccgagaacgaaggaaaccatcggtctgattggaaaggggcagtttgaaaagatgaaggacggtgtgatagtcgtcaacgctgccagaggtggaattgtcgatgaagcagcgctttacgaggcgataaaggcgggaaaagttgcggctgctgccctcgacgtttacgaaaaggagccgccatctccagacaacccgcttctcaagctggataatgtggtcacaactcctcacatcgccgcatcaacaagagaggctcagctcaacgtggggatgataattgcggaggacatcgtgaacatggcgaagggtctgcctgttagaaatgcagtcaacctgccctccattgagccctccgatttcgaatttatgatgcctttcctgacgctggccgagaaaatggggaagattgcgagcgtgaggcttgggggagcaataagaaaagtcaaggtgacctgcagcggaaagcttgcaaccaagaataccgaattcgttacgagagcgctcctcaaaggtcttttcgagcctattctcagcaatgagataaatctggtttcagcgaagccggtagcagttgagagggggataaccattgaggaaagcaaggttgagagtgtggagcactacgagagcttgctggaggtttgggttgagagcaacggaaaggagatgtatctcgcaggcacatgcttcggcaacgagtacagaatcctgaaaattgacgtttacaatgtcaacttcgtcccgaagggccactacatcatctccctgcacgaagacaagcccggtgtcatcggcagagtggggacgctgttcggcaggaacaacatcaacatagcggggatgattgttgggaggagcggagacaagccgggaggaattcagcttatgctcctgctcgtagatgatccgccaacgccagaggtgcttgaggagatgacgaagcttgatggaataatcgacgcaacctacgtcgagctttag

SEQ ID NO: 64750 - protein, 527 aa, Archaeoglobus fulgidus
MKVLVAEPISEEAIDYMRKNGLEVEVKTGMSREELIREVPKYEAIVVRSQTKVDAEVIQAAKNLKIIGRAGVGVDNIDINAATQRGIVVVNAPGGNTISTAEHAIALMLAAARKIPQADRSVKEGKWERKKFMGIELRGKTAGVIGLGRVGFEVAKRCKALEMNVLAYDPFVSKERAEQIGVKLVDFDTLLASSDVITVHVPRTKETIGLIGKGQFEKMKDGVIVVNAARGGIVDEAALYEAIKAGKVAAAALDVYEKEPPSPDNPLLKLDNVVTTPHIAASTREAQLNVGMIIAEDIVNMAKGLPVRNAVNLPSIEPSDFEFMMPFLTLAEKMGKIASVRLGGAIRKVKVTCSGKLATKNTEFVTRALLKGLFEPILSNEINLVSAKPVAVERGITIEESKVESVEHYESLLEVWVESNGKEMYLAGTCFGNEYRILKIDVYNVNFVPKGHYIISLHEDKPGVIGRVGTLFGRNNINIAGMIVGRSGDKPGGIQLMLLLVDDPPTPEVLEEMTKLDGIIDATYVEL

SEQ ID NO: 64751 - DNA, 1578 bp, Methanobacterium thermoautotrophicum
  CDS (1)..(1578): transl_table=11
atgtccaggatgaaagtgcttattgctgattccatcaatgaaaagggaatatcagaactcgaagaggtggctgaggttgtggtcaacaccaccataacccctgaggagctccttgatgccataaaggactttgatgccatcgttgtaaggagcaggacaaaggttacgcgtgaggtcatagaggcggcgccccgcctcaagataatagcaagggccggtgtgggtgttgacaacgttgatgttaaggctgccaccgaccggggtataatggtgataaacgcccctgagtccacatccataacggttgcagaacactcaatcggtctcatgctcgcacttgcaaggaagattgcaatcgcagacaggtccgtgaaggagggtaaatgggagaagaaccggttcatgggtatcgagctcaacggcaagaccctgggtataatcggtatgggtcgcataggctcacaggtcgttgtgaggacaaaggccttcggcatggacataatggtctacgacccctacataagcaaggaggctgccgaggagatgggtgtgaccgtcacagaccttgaaaccctcctgagggaatcagatatagtgaccatacacgtccccctcacacccgagacaaggcacctcatctcagaggatgaattcaaattgatgaaggacacggccttcatagtgaactgtgcccgtggcggtataatcgatgaggacgccctctacagggcccttaaggatggtgaaatagccggcgcagcccttgacgtctttgaggaggagcctcctgagggcagcccgctccttgaacttgaaaatgtggtcctgacaccacacataggagcctccacctctgaggcccagagggacgccgccatcatagttgcaaatgagataaaaacggttttccagggcggtgcaccgaggaacgtcctcaacatgccggtgatggactcagagacctacaagtccctcaaaccatacattgaactggcagagaagatgggggccatcatcgcacaggcactcccgggtaacatagagaaacttgatgtcacatactgcggtgaactggcagagatgcagttcgacatcctcacaaggaccatgctccaggccatactcaaccccatcctcacagaaccagttaacctcataaatgcgccctcaattgcaaagaagaggggtataatggttacagaggcccgccggtctgagtcagatggttacaggtcaatcataatcgccactgcagaatcagacaggggcgggttcagtgtggaggcaacacacatcaaggagcctaccataatcgggatcaacggttacagggtcgatgtgaaacctgagggtaccatgataatagcacgctacagggacctcccgggtaccatcggcgccataggaacaaagctcggccagcacggtataaacattgcaaccatgcaggtcggcaggaaggagatcggcggtgaggctgtgatggtcctcaaggtcgatcagagtgtcccggcagaggtcatcgaggaggttaagaagctggacaacgtggatgatgcggttgcaatagagatctaa

SEQ ID NO: 64752 - protein, 525 aa, Methanobacterium thermoautotrophicum
MSRMKVLIADSINEKGISELEEVAEVVVNTTITPEELLDAIKDFDAIVVRSRTKVTREVIEAAPRLKIIARAGVGVDNVDVKAATDRGIMVINAPESTSITVAEHSIGLMLALARKIAIADRSVKEGKWEKNRFMGIELNGKTLGIIGMGRIGSQVVVRTKAFGMDIMVYDPYISKEAAEEMGVTVTDLETLLRESDIVTIHVPLTPETRHLISEDEFKLMKDTAFIVNCARGGIIDEDALYRALKDGEIAGAALDVFEEEPPEGSPLLELENVVLTPHIGASTSEAQRDAAIIVANEIKTVFQGGAPRNVLNMPVMDSETYKSLKPYIELAEKMGAIIAQALPGNIEKLDVTYCGELAEMQFDILTRTMLQAILNPILTEPVNLINAPSIAKKRGIMVTEARRSESDGYRSIIIATAESDRGGFSVEATHIKEPTIIGINGYRVDVKPEGTMIIARYRDLPGTIGAIGTKLGQHGINIATMQVGRKEIGGEAVMVLKVDQSVPAEVIEEVKKLDNVDDAVAIEI

SEQ ID NO: 64753 - DNA, 1401 bp, Schizosaccharomyces pombe
  CDS (1)..(1401)
atggatattaaaggcggtcgtcgtggtaatgtcgaggatagtttgaacaaattatctttgtctccccctgataataattcatccttcctctcgaatcacttccaggtacgcaagtcttactcccaagctcctgctcgtactttgaagccattcgcttccgaagacatcaagattttgctgttggaaaacgttaatcaatcagctttgagcaacttgaaggatgagggctaccaggttgagttcttgaaaacttctatgagcgaggacgatttggttgagaagatcaagggcgttcatgctattggcattcgttctaagacccgcttgactcgtcgtgtcttggaggctgccgacagtttaattgtcatcggttgcttctgtatcggtactaaccaagtcgatttggactttgctgccgaacgtggtatcgccgtcttcaactctccatacgccaactctcgttccgttgctgaattggtcatcggctatatcattagcttggctcgtcaagtgggcgatcgctccttggaattgcaccgtggtgagtggaacaaggtgtccagtggatgctgggagatccgtggtaagaccttgggcatcattggttatggtcatattggatcccaactttctgttctcgctgaagccatgggtttacacgtcgtttattacgatattctccctatcatgcctttgggttccgccaagcagctctcttctctccctgaactccttcaccgtgctgactttgtttctttacacgttcctgcttctccagaaacaaagaatatgatttcctccaaggaatttgccgccatgaaggagggtagctacttgatcaatgcctcccgtggtactgtcgttgacattcccgctctcgttgatgctagcaagtctggtaaaattgctggtgccgccattgatgtttacccatccgagcctgctggtaacggtaaggacaagttcgttgactcactcaactcttggacttctgaattgacccattgcaagaacattattttgactcctcacattggtggtagtaccgaggaggctcaatataacattggtattgaggtcagtgaggctcttactcgttacattaatgaaggaaacagtatcggtgctgttaacttccctgaggtctctttgcgcagccttaccgaggctgatagaaatgctgctcgtgtcttgtttgtccacagaaatgtgcctggtgttcttcgccaagttaacgagctttttatcgaccacaacatcaagtctcaattctccgattctcgtggtgacattgcttacttggttgctgatattagcgactgtactcctggttctttggaggccttgcaccaaaagttggaatctttaccttgcaagattaacactcgtttactttattaa

SEQ ID NO: 64754 - protein, 466 aa, Schizosaccharomyces pombe
MDIKGGRRGNVEDSLNKLSLSPPDNNSSFLSNHFQVRKSYSQAPARTLKPFASEDIKILLLENVNQSALSNLKDEGYQVEFLKTSMSEDDLVEKIKGVHAIGIRSKTRLTRRVLEAADSLIVIGCFCIGTNQVDLDFAAERGIAVFNSPYANSRSVAELVIGYIISLARQVGDRSLELHRGEWNKVSSGCWEIRGKTLGIIGYGHIGSQLSVLAEAMGLHVVYYDILPIMPLGSAKQLSSLPELLHRADFVSLHVPASPETKNMISSKEFAAMKEGSYLINASRGTVVDIPALVDASKSGKIAGAAIDVYPSEPAGNGKDKFVDSLNSWTSELTHCKNIILTPHIGGSTEEAQYNIGIEVSEALTRYINEGNSIGAVNFPEVSLRSLTEADRNAARVLFVHRNVPGVLRQVNELFIDHNIKSQFSDSRGDIAYLVADISDCTPGSLEALHQKLESLPCKINTRLLY

SEQ ID NO: 64755 - DNA, 1665 bp, Synechocystis sp
  CDS (1)..(1665): transl_table=11
gtgaatctagcctggctccagggactgtctcttggccttttgtccccgccggccccagcgctattaatttttcgatcattcaccatggctaaagttttagtttctgactccattgaccaagtcggcattgatattctcaaacaagtggcccaagttgacgtcaaaactgggctatcggaagcagaaattatagacattgttcctgagtacgatgccattatgttgcgctctgccaccaaggtgacggagaaaattatccaagcgggtagccagttaaaaatcattggtcgggctggggttggggtggataacattgatgtgccggcggccacccgtcagggcattgtggtggtcaattcccccgagggtaacaccattgcggcggcggaacatgctctagcgatgatgatggccctggcccgccacatccccgatgccaacaaatccgttaaggaaagtaagtgggaacggaaacaatttattggtacggaagtttataagaaaactttaggtgtagtggggctggggaaaattggttcccacgtggccggtgtggccaaagccatggggatgaaattgttagcttacgatccgtttatttcccaggaacgggccgaccaaattggttgcactttggtggacttagatctgctcttcagtgaagccgactttatcactctacacattcccaaaacaccggaaaccgccaacctaatcaatgctgaaaccctggctaaaatgaagcccactgcccggattatcaactgttcccggggaggcattattgatgaagaagctttggtaacagccattgaaacggcccagattggtggggctgccctggatgtgtttgcccaggaacccctaggggaatctcggctgcgggaatttagcaatgtgattttaaccccccatttgggtgcttccactgaagaagcccaggtaaatgtggcggtggatgtggcggaacaaattcgggatgtgttgcttggtttgccggcccgttcagcggtgaatattcccggtttaacccccgatgtaatggaaaaattgcgtccctacctgaagctggcggaaaccctcggtactttagtgggtcaattggccggcggccgcatcgatcgcctaacggtttgcttacagggagatttggcggaatataccaatagtcaacccctggtggtggcggccattaaaggtttgctctcccaagctctgcgggaacgggttaattacgtcaatgcggcgatcgaagccaaggaacggggcatccgggtcattgaaactaaagatgcttccgtgcgggactattctggctctttgcacctcaaagccaccggcaccatgggagaacattccgccaccggggccctgttgagtaatggtgaaattcgcattaccgacgtggatgagtttcccattaacgttccccccaacaactatatgttgttcaccttgcaccgggatatgccgggtatcattggtaaaattggttccctgctgggtagctttaacgtcaacatcgccagcatgcaggtggggcgcaaaattgtccggggcgatgcaattatggccctgagcttggatgatcctctgcccgatggtctgctgtcggaaatcaccaaggtggccggtatccgggatgcctacaccgttaagctctaa

SEQ ID NO: 64756 - protein, 554 aa, Synechocystis sp
MNLAWLQGLSLGLLSPPAPALLIFRSFTMAKVLVSDSIDQVGIDILKQVAQVDVKTGLSEAEIIDIVPEYDAIMLRSATKVTEKIIQAGSQLKIIGRAGVGVDNIDVPAATRQGIVVVNSPEGNTIAAAEHALAMMMALARHIPDANKSVKESKWERKQFIGTEVYKKTLGVVGLGKIGSHVAGVAKAMGMKLLAYDPFISQERADQIGCTLVDLDLLFSEADFITLHIPKTPETANLINAETLAKMKPTARIINCSRGGIIDEEALVTAIETAQIGGAALDVFAQEPLGESRLREFSNVILTPHLGASTEEAQVNVAVDVAEQIRDVLLGLPARSAVNIPGLTPDVMEKLRPYLKLAETLGTLVGQLAGGRIDRLTVCLQGDLAEYTNSQPLVVAAIKGLLSQALRERVNYVNAAIEAKERGIRVIETKDASVRDYSGSLHLKATGTMGEHSATGALLSNGEIRITDVDEFPINVPPNNYMLFTLHRDMPGIIGKIGSLLGSFNVNIASMQVGRKIVRGDAIMALSLDDPLPDGLLSEITKVAGIRDAYTVKL

SEQ ID NO: 64757 - DNA, 1410 bp, Saccharomyces cerevisiae
  CDS (1)..(1410)
atgacaagcattgacattaacaacttacaaaatacctttcaacaagctatgaatatgagcggctccccaggcgctgtttgtacttcacctacgcaatctttcatgaataccgttccacagcgcttgaatgctgtaaagcacccaaaaattttgaagcctttctcaacgggtgatatgaagattttactattagaaaacgttaatcaaactgctattacaatcttcgaagagcaaggttaccaagtcgaattctataaatcttcattgcccgaggaagagttgatcgaaaagatcaaggacgttcatgctattggtatcagatcaaagactagattaacttcaaatgtcttacaacatgcgaagaatctggtttgtattggttgtttctgtatcggtaccaaccaagttgacttagactacgctaccagcagaggtattgctgttttcaactcgcctttctccaactcaagatcagtagcagaattggtcatcgctgaaatcattagtttagcaagacaactaggtgatagatctatcgaattacataccggtacatggaataaggttgctgctagatgttgggaggtaagaggaaaaactcttggtattattgggtacggtcacattggttcccaattatcagttcttgcagaagctatgggtttgcatgtgttgtactacgatattgtaactatcatggccttgggtactgccagacaagtttctacattagatgaattgttgaataaatctgattttgtgacactacatgtaccagctactcctgaaactgaaaaaatgttatctgccccacaatttgctgctatgaaggatggcgcttatgttattaatgcttcaagaggtactgtcgtggacattccatctttgatccaagccgtgaaagccaacaaaattgcaggtgctgctttggatgtttatccacatgaaccagctaagaacggtgaaggttcatttaacgatgagctaaatagctggacttctgaattagtttcattaccaaatatcatcttgacaccacacattggtggctctaccgaagaagcccaaagctcaatcggtattgaagtggctaccgcattgtccaaatacatcaatgaaggtaactctgtcggttcagtcaacttcccagaagtggcattgaaatcattgtcttacgaccaagagaacactgtgcgtgtgttatacattcaccaaaatgtaccaggtgttttgaagaccgtcaatgatattttatcgaaccataacatcgaaaagcaattttccgattcaaatggtgaaattgcttatttaatggctgatatctcttctgttgaccaaagcgatattaaagatatttatgaacaactaaatcaaacctctgctaagatctcaattagattgctatattaa

SEQ ID NO: 64758 - protein, 469 aa, Saccharomyces cerevisiae
MTSIDINNLQNTFQQAMNMSGSPGAVCTSPTQSFMNTVPQRLNAVKHPKILKPFSTGDMKILLLENVNQTAITIFEEQGYQVEFYKSSLPEEELIEKIKDVHAIGIRSKTRLTSNVLQHAKNLVCIGCFCIGTNQVDLDYATSRGIAVFNSPFSNSRSVAELVIAEIISLARQLGDRSIELHTGTWNKVAARCWEVRGKTLGIIGYGHIGSQLSVLAEAMGLHVLYYDIVTIMALGTARQVSTLDELLNKSDFVTLHVPATPETEKMLSAPQFAAMKDGAYVINASRGTVVDIPSLIQAVKANKIAGAALDVYPHEPAKNGEGSFNDELNSWTSELVSLPNIILTPHIGGSTEEAQSSIGIEVATALSKYINEGNSVGSVNFPEVALKSLSYDQENTVRVLYIHQNVPGVLKTVNDILSNHNIEKQFSDSNGEIAYLMADISSVDQSDIKDIYEQLNQTSAKISIRLLY

SEQ ID NO: 64759 - DNA, 1803 bp, Brassica napus
  CDS (1)..(1803)
atgtcagccgccgccgcatcctccgcgatctccgtcgccaccaaccccctcaagaccttttccctctcctccagatcccctctcccatccgccatctccctcccatctcgcagccttaacacccctcgccgccgcctcgtcctcgtatcctgcaccgccggagacggatccaaacccacgatcctcgtcgcggagaagctcggcgaggccggcgtgaagctcctggagggtttcgcgaatgtcgactgctcttacaacatgacccccgaggagctcaacaccaagatctccctctgcgacgccttgatcgttcgcagtggaactaaagttggtcgggaggttttcgagtcctctcgcggacgtctcaaggttgttggacgcgctggtgttgggattgacaacgtggatctgagcgccgcgactgagtttgggtgtcttgtcgttaacgcccccacggctaacacgatcgccgccgctgagcatgggatcgcgcttttagcctccatggctagaaacgtcgctcagtctgatgcgtctgttaaagctggagagtggaagaggaacaagtatgtgggtgtttcacttgtcggcaagaccctcgcagtgatgggattcgggaaagttggtaccgaagttgctcgtcgtgccaaaggtctcggcatgcgtgtgattgctcatgatccttacgcacctgcagaccgtgcacacgccattggtgttgagctagtgagcttcgacgaagccttggccactgcggatttcatttcgctccacatgcctcttacacctgcaacgaacaagatactcaacgacgagacgttcgccaagatgaagaagggagttcgtatcgttaacgttgctcgtggaggtgtgatagacgaagacgcgttggtgagggctcttgatgctgggattgtttctcaggctgcgcttgatgttttcactaaagagccgccggctaaagacagccctctggtgcagcacgagaatgtcactgtgacacctcatcttggagccagcacgatggaggctcaggaaggagttgctattgagatcgctgaagctgttgttggagctttgaacggagagctcgctgctactgctgtcaatgcacctatggtctctgctgaggttctgactgagctgaaaccatatgtgatactagccgagaagctagggagactagcggtgcagctcgtggctggaggaagcggcgtgaagaacgtgaaagtctcctacacgtcagcacgagccactgacgatctcgacacaagacttctccgagccatgatcaccaagggaatcatcgagccaatctctgacgtgtatgtcaacttggtcaacgcagatttcacagccaagcagagaggtctcagaatctcagaggaacgtgtgctcttggacgggtcaccagagaacccgttggaaacaataacagtccagctaggcaacgtggagtccaagttcgcgagttccttgtctgaatcaggagaggtgaaagtggaaggaagggtgaaagacgggatcccgcatttgacgaaggttggatcttttgaggtggatgtgactcttgaaggtagtatcatactgtgcaggcaggttgatcagccgggtatgattgggacggtggggagcatccttggagagtctaacgtcaatgtgaacttcatgagcgttggaagaatcgcaccgaggaagcaagccatcatggcgattggagtagatgatcagccaagcaaggagactcttaagaagattggagagatcccagcgattgaggagtttgttttcctcaaactctag

SEQ ID NO: 64760 - protein, 600 aa, Brassica napus
MSAAAASSAISVATNPLKTFSLSSRSPLPSAISLPSRSLNTPRRRLVLVSCTAGDGSKPTILVAEKLGEAGVKLLEGFANVDCSYNMTPEELNTKISLCDALIVRSGTKVGREVFESSRGRLKVVGRAGVGIDNVDLSAATEFGCLVVNAPTANTIAAAEHGIALLASMARNVAQSDASVKAGEWKRNKYVGVSLVGKTLAVMGFGKVGTEVARRAKGLGMRVIAHDPYAPADRAHAIGVELVSFDEALATADFISLHMPLTPATNKILNDETFAKMKKGVRIVNVARGGVIDEDALVRALDAGIVSQAALDVFTKEPPAKDSPLVQHENVTVTPHLGASTMEAQEGVAIEIAEAVVGALNGELAATAVNAPMVSAEVLTELKPYVILAEKLGRLAVQLVAGGSGVKNVKVSYTSARATDDLDTRLLRAMITKGIIEPISDVYVNLVNADFTAKQRGLRISEERVLLDGSPENPLETITVQLGNVESKFASSLSESGEVKVEGRVKDGIPHLTKVGSFEVDVTLEGSIILCRQVDQPGMIGTVGSILGESNVNVNFMSVGRIAPRKQAIMAIGVDDQPSKETLKKIGEIPAIEEFVFLKL

SEQ ID NO: 64761 - DNA, 1818 bp, Triticum aestivum
  CDS (1)..(1818)
atggcggcgccgtccccgaccaccgccgccgccacccaccaccgcgccctcctcccggccccggcccgccgcgcggccctctccctcgcccgcgccagccgcggccgcatctgcgtctccgcgcccgccgcccccgccgcgtcgaccgcgtccccgcccgcgacggccgcggtggccgtcgagggcaagcccacggtgctcgtggccgagaagctcggcgccgcggggctggcgctgctccgggagttcgccaacgtcgactgctcctacggcctctcccccgaggagctccgcgccaagatctcgctctgcgacgcgctcatcgtgcgctcggggaccaaggtcggccgcgacgtcttcgaggcctcggggggccggctccgcgtcgtcggccgcgcgggggtcgggatcgacaacgtcgatctcgccgccgccaccgagcacggctgcctcgtcgtcaacgcgcccaccgccaacaccgtcgccgccgccgagcacggcatcgcgctgctctgcgccatggcccggaacgtcgcccaggccgacgcctccctcaaggctggtaaatgggcgcgcaccaagtatgttggtgtgtctcttgttggcaaaactcttgctatccttggatttggaaaggttgggtcagaggtcgcacgccgtgccaaaggtctaggaatgcacgtgattgcacacgatccatatgcttctgctgatcgtgctcgcgcaattggagttgacctagtaagcatggaagaggctatgacaactgccgactttatctcattgcatatgccccttaccccttcaacaaacaagatgctcaacgatgaagcctttgcgaagatgaagaagggtgttcggattataaatgttgcccgtggtggtgtgattgatgaagatgctctagtcagggcccttgatgcaggaattgttgcacaggctgctcttgatgtgttcactaaggagcctccagcagcagacagcaagttagtgctgcatgagaatgttaccgtgacaccacatcttggtgccagcacagtagaagcacaggaaggagtggctattgaaatagctgaagctgtcactggagctctgaaaggggagcttgcagcttctgccgtcaatgcaccaatggttcccgctgaggtgctgtcagagcttgcaccttatgtcatgctcgctgaaaagcttgggcgcctagctgtccagctagttgctggtggtggcggtatcaagtctgtgaaggtgacctatgcatctgcaagggctcccgatgatcttgacacgagacttctccgtgcaatgatcaccaagggtgtgatcgaaccaatctccgacgttttcgtcaatctggtcaacgccgactttaccgcgaagcagaggggcatccgtgtcagcgaggagaaaatcgtgatggatggctcacccgagacacctctcgagtacattcaggttcagatagccaatgtggagtccaaattccccagtgcgatatgcgactccggactggtcacggtggaggggcgggtgaaggacggcatccctcaccttaccaaggtcggagcgttcgaggtggacgtgagcatggagggcagcctgatcctgtgcaggcaggtcgaccagcccggcatgatcgggtcggtcggaagcgtcctgggcgaggagaacgtcaacgtcagcttcatgagcgtcgggaggatcgctccccgcaagacggctatcatggcgataggcgtcgatgaggagcccagcaaggccacgctgaccaagatcggggagatccctgcgatcgaagagtttgtcttcctcaagctctag

SEQ ID NO: 64762 - protein, 605 aa, Triticum aestivum
MAAPSPTTAAATHHRALLPAPARRAALSLARASRGRICVSAPAAPAASTASPPATAAVAVEGKPTVLVAEKLGAAGLALLREFANVDCSYGLSPEELRAKISLCDALIVRSGTKVGRDVFEASGGRLRVVGRAGVGIDNVDLAAATEHGCLVVNAPTANTVAAAEHGIALLCAMARNVAQADASLKAGKWARTKYVGVSLVGKTLAILGFGKVGSEVARRAKGLGMHVIAHDPYASADRARAIGVDLVSMEEAMTTADFISLHMPLTPSTNKMLNDEAFAKMKKGVRIINVARGGVIDEDALVRALDAGIVAQAALDVFTKEPPAADSKLVLHENVTVTPHLGASTVEAQEGVAIEIAEAVTGALKGELAASAVNAPMVPAEVLSELAPYVMLAEKLGRLAVQLVAGGGGIKSVKVTYASARAPDDLDTRLLRAMITKGVIEPISDVFVNLVNADFTAKQRGIRVSEEKIVMDGSPETPLEYIQVQIANVESKFPSAICDSGLVTVEGRVKDGIPHLTKVGAFEVDVSMEGSLILCRQVDQPGMIGSVGSVLGEENVNVSFMSVGRIAPRKTAIMAIGVDEEPSKATLTKIGEIPAIEEFVFLKL

SEQ ID NO: 64763 - DNA, 1875 bp, Zea mays
  CDS (1)..(1875)
atggcggcctcacgcgcgctcctccccagcccgcaggtgagccctgcgagcgcgcgggtccgcctggccgaggccgtgccgtcgtcgctcacgctcgcggcgcgcggcggggccggggccggcgcgcgtctccgcgtgcagtgcgcgatcctgtcgtcgcccgcgcccgtggcgcccaccgagtcgaggccggcgcgccggatctcgccgtccgcgccggacggcgcgctgcggcccaagccggcggtgctggtcgccgagaagctgaacgaggccgggctggccgtgctgcagcagttcgcggacgtggagtgcgcctacggcatgtcccccgcggagctcctcgccaaggcggcgcagttcgacgcgctcatcgtgcgcagcggcaccaaggtgacgcgggaggtgctggaggccgggcagggccggctgcgggtggtgggccgcgcgggcgtcgggatcgacaacgtcgacctccaggccgccaccgaggtcgggtgcctcgtcgtcaacgcgcccaccgccaacactatcgccgcggccgagcacggcatcgcgctgctcgcctccatggcgcgcaacgtctcgcaggcggacgcggcgctcaaggccggtaaatggcaaaggaacaagtacgtgggggtttctctggtgggaaagaccctggccgtcatgggcttcgggaaggttgggtcagaggtagcgaggcgagcgaaagggcttgggatgcacgtgatagctcatgatccctacgcccctgccgaccgggcccgggccctcggggtagagctggtttctttcgacgaggccatcgcaagagccgacttcatctccctccacatgccgctgataccgacgacgtccaagatcttcaacgacgagtccttcgcaaagatgaagaatggtgtccggatcatcaacgtggccaggggtggagtgatcgacgaagacgctctggtcagggcgcttgactccggcaaagttgctcaggcggctcttgatgtcttcaccgtggagcccccgcccaaggacagcaagctggtgttgcatgagaatgtcactgtaacaccccaccttggagctagtactgtcgaggctcaggaaggcgtcgctatcgagattgcggaagccgtggttggtgcgctgagaggggagctcgcagcaaccgctgtgaatgcgcccatggtcccagctgagatcctgtcagagctggctccatacgtttctctggccgagaagctcgggaggctggcggtgcagctcgtggccggcgagagcggcatcaagggcgtgaaggtggtgtacaccacagcgcgtggccccgacgacctggacactcggctcctccgcgcgatggtgaccaagggcctggtggagccggtgtccagcacgttcgtgaacctggtgaacgcggactacacggccaagcagcgcggcctccgcctcacggaggagcgcgtggcgcacgacagccccgcggcggaggcgccgctggagtccgtccaggttcgcctctcgcacgtgcagtccaagttcgcgggtgccatcagcgacggcggggacgacatcgtcctggagggccgggtcaagtacggcgtgcctcacctcaccctcgtggggccctacgaggtggacgtcagcctggagggcaacctgatcctgtgccgccagatcgaccagcccgggatgatcggcaaggtcggcaacatactcggcgacacgaacgtgaacatcaacttcatgagcgtcggacggacgttcaggggcaagcaggcgatcatggccattggcgttgacgaggagcccgacaaggacacgctggagaagatcggggccatcccggcgatcgaggagttcgttttcctcgaactatga

SEQ ID NO: 64764 - protein, 624 aa, Zea mays
MAASRALLPSPQVSPASARVRLAEAVPSSLTLAARGGAGAGARLRVQCAILSSPAPVAPTESRPARRISPSAPDGALRPKPAVLVAEKLNEAGLAVLQQFADVECAYGMSPAELLAKAAQFDALIVRSGTKVTREVLEAGQGRLRVVGRAGVGIDNVDLQAATEVGCLVVNAPTANTIAAAEHGIALLASMARNVSQADAALKAGKWQRNKYVGVSLVGKTLAVMGFGKVGSEVARRAKGLGMHVIAHDPYAPADRARALGVELVSFDEAIARADFISLHMPLIPTTSKIFNDESFAKMKNGVRIINVARGGVIDEDALVRALDSGKVAQAALDVFTVEPPPKDSKLVLHENVTVTPHLGASTVEAQEGVAIEIAEAVVGALRGELAATAVNAPMVPAEILSELAPYVSLAEKLGRLAVQLVAGESGIKGVKVVYTTARGPDDLDTRLLRAMVTKGLVEPVSSTFVNLVNADYTAKQRGLRLTEERVAHDSPAAEAPLESVQVRLSHVQSKFAGAISDGGDDIVLEGRVKYGVPHLTLVGPYEVDVSLEGNLILCRQIDQPGMIGKVGNILGDTNVNINFMSVGRTFRGKQAIMAIGVDEEPDKDTLEKIGAIPAIEEFVFLEL

SEQ ID NO: 64765 - DNA, 1875 bp, Zea mays
  CDS (1)..(1875)
atggcggcctcacgcgcgctcctccccagcccgcaggtgagccctgcgagcgcgcgggtccgcctggccgcggccgtgccgtcgtcgctcacgctcgcggcgcgcggcggggccggggccggcgcgcgtctccgcgtgcggtgcgcgatcttgtcgtcgcccgcgcccgtggcgcccaccgagtcgaggccggcgcgccggatctcgccgtccgcgccggacggcgcgctgcggcccaagccggcggtgctggtcgccgagaagctgagcgaggccgggctggccgtgctgcggcagttcgcggacgtggagtgcgcctacggcatgtcccccgcggagctcctcgccaaggcggcgcagttcgacgcgctcatcgtgcgcagcggcaccaaggtgacgcgggaggtgctggaggccgggcagggccggctgcgggtggtgggccgcgcgggcgtcgggatcgacaacgtcgacctccaggccgccaccgaggtcgggtgcctcgtcgtcaacacgcccaccgccaacactatcgccgcggccgagcacggcatcgcgctgctcgcctccatggcgcgcaacgtctcgcaggcggacgcggcgctcaaggccggtaaatggcaaaggaacaagtacgtgggggtttctctggtgggaaagaccctggccgtcatgggcttcgggaaggttgggtcagaggtagcgaggcgagcgaaagggcttgggatgcacgtgatagctcatgatccctacgcccctgccgaccgggcccgggccctcggggtagagctggtttctttcgacgaggccatcgcaagagccgacttcatctccctccacatgccgctgataccgacgacgtccaagatcttcaacgacgagtcctttgcaaagatgaagactggtgtccggatcatcaacgtggctaggggtggagtgatcgacgaagacgctctggtcagggcgcttgactccggcaaagttgctcaggcggctcttgatgtcttcaccgtggagcccccgcccaaggacagcaagctggtgttgcatgagaatgtcactgtaacaccccaccttggagctagtactgtcgaggctcaggaaggcgtcgctatcgagattgcggaagccgtggttggtgcgctgagaggggagctcgcagcaaccgctgtgaatgcgcccatggtcccagctgagatcctgtcagagctggctccatacgtttctctggccgagaagctcgggaggctggcggtgcagctcgtggccggcgagagcggcatcaagggcgtgaaggtggtgtacaccacagcgcgtggccccgacgacctggacactcggctcctccgcgcgatggtgaccaagggcctggtggagccggtgtccagcacgttcgtgaacctggtgaacgcggactacacggccaagcagcgcggcctccgcctcacggaggagcgcgtggcgcacgacagccccgcggcggaggcgccgctggagtccgtccaggttcgcctctcgcacgtgcagtccaagttcgcgggtgccatcagcgacggcggggacgacatcgtcctggagggccgggtcaagtacggcgtgcctcacctcaccctcgtggggccctacgaggtggacgtcagcctggagggcaacctgatcctgtgccgccagatcgaccagcccgggatgatcggcaaggtcggcaacatactcggcgacacgaacgtgaacatcaacttcatgagcgtcggacggacgttcaggggcaagcaggcgatcatggccattggcgttgacgaggagcccgacaaggacacgctggagaagatcggggccatcccggcgatcgaggagttcgttttcctcgaactatga

SEQ ID NO: 64766 - protein, 624 aa, Zea mays
MAASRALLPSPQVSPASARVRLAAAVPSSLTLAARGGAGAGARLRVRCAILSSPAPVAPTESRPARRISPSAPDGALRPKPAVLVAEKLSEAGLAVLRQFADVECAYGMSPAELLAKAAQFDALIVRSGTKVTREVLEAGQGRLRVVGRAGVGIDNVDLQAATEVGCLVVNTPTANTIAAAEHGIALLASMARNVSQADAALKAGKWQRNKYVGVSLVGKTLAVMGFGKVGSEVARRAKGLGMHVIAHDPYAPADRARALGVELVSFDEAIARADFISLHMPLIPTTSKIFNDESFAKMKTGVRIINVARGGVIDEDALVRALDSGKVAQAALDVFTVEPPPKDSKLVLHENVTVTPHLGASTVEAQEGVAIEIAEAVVGALRGELAATAVNAPMVPAEILSELAPYVSLAEKLGRLAVQLVAGESGIKGVKVVYTTARGPDDLDTRLLRAMVTKGLVEPVSSTFVNLVNADYTAKQRGLRLTEERVAHDSPAAEAPLESVQVRLSHVQSKFAGAISDGGDDIVLEGRVKYGVPHLTLVGPYEVDVSLEGNLILCRQIDQPGMIGKVGNILGDTNVNINFMSVGRTFRGKQAIMAIGVDEEPDKDTLEKIGAIPAIEEFVFLEL

SEQ ID NO: 64767 - DNA, 26 bp, Artificial sequence
  primer
atgtcttattcagctgccgataattt

SEQ ID NO: 64768 - DNA, 28 bp, Artificial sequence
  primer
ttagtataataacctgatggaaactttg

SEQ ID NO: 64769 - protein, 511 aa, Artificial sequence
  consensus sequence
  Variant (2)..(3): Xaa in position 2 to 3 is any amino acid
  Variant (5)..(24): Xaa in position 5 to 24 is any amino acid
  Variant (25)..(33): Xaa in position 25 to 33 is any or no amino acid
  Variant (35)..(46): Xaa in position 35 to 46 is any amino acid
  Variant (49)..(49): Xaa in position 49 is any amino acid
  Variant (51)..(59): Xaa in position 51 to 59 is any amino acid
  Variant (61)..(62): Xaa in position 61 to 62 is any amino acid
  Variant (63)..(63): Xaa in position 63 is any or no amino acid
  Variant (65)..(67): Xaa in position 65 to 67 is any amino acid
  Variant (69)..(72): Xaa in position 69 to 72 is any amino acid
  Variant (74)..(76): Xaa in position 74 to 76 is any amino acid
  Variant (80)..(81): Xaa in position 80 to 81 is any amino acid
  Variant (83)..(85): Xaa in position 83 to 85 is any amino acid
  Variant (87)..(88): Xaa in position 87 to 88 is any amino acid
  Variant (90)..(90): Xaa in position 90 is any amino acid
  Variant (92)..(92): Xaa in position 92 is any amino acid
  Variant (94)..(95): Xaa in position 94 to 95 is any amino acid
  Variant (97)..(100): Xaa in position 97 to 100 is any amino acid
  Variant (103)..(112): Xaa in position 103 to 112 is any amino acid
  Variant (114)..(124): Xaa in position 114 to 124 is any amino acid
  Variant (126)..(126): Xaa in position 126 is any amino acid
  Variant (128)..(128): Xaa in position 128 is any amino acid
  Variant (130)..(135): Xaa in position 130 to 135 is any amino acid
  Variant (137)..(138): Xaa in position 137 to 138 is any amino acid
  Variant (141)..(141): Xaa in position 141 is any amino acid
  Variant (144)..(145): Xaa in position 144 to 145 is any amino acid
  Variant (146)..(146): Xaa in position 146 is any or no amino acid
  Variant (148)..(148): Xaa in position 148 is any amino acid
  Variant (150)..(150): Xaa in position 150 is any amino acid
  Variant (153)..(158): Xaa in position 153 to 158 is any amino acid
  Variant (160)..(162): Xaa in position 160 to 162 is any amino acid
  Variant (165)..(165): Xaa in position 165 is any amino acid
  Variant (167)..(169): Xaa in position 167 to 169 is any amino acid
  Variant (171)..(188): Xaa in position 171 to 188 is any amino acid
  Variant (189)..(190): Xaa in position 189 to 190 is any or no amino acid
  Variant (193)..(195): Xaa in position 193 to 195 is any amino acid
  Variant (197)..(199): Xaa in position 197 to 199 is any amino acid
  Variant (202)..(202): Xaa in position 202 is any amino acid
  Variant (204)..(207): Xaa in position 204 to 207 is any amino acid
  Variant (209)..(219): Xaa in position 209 to 219 is any amino acid
  Variant (222)..(222): Xaa in position 222 is any amino acid
  Variant (224)..(226): Xaa in position 224 to 226 is any amino acid
  Variant (229)..(230): Xaa in position 229 to 230 is any amino acid
  Variant (233)..(235): Xaa in position 233 to 235 is any amino acid
  Variant (237)..(238): Xaa in position 237 to 238 is any amino acid
  Variant (241)..(250): Xaa in position 241 to 250 is any amino acid
  Variant (254)..(254): Xaa in position 254 is any amino acid
  Variant (258)..(259): Xaa in position 258 to 259 is any amino acid
  Variant (262)..(271): Xaa in position 262 to 271 is any amino acid
  Variant (272)..(284): Xaa in position 272 to 284 is any or no amino acid
  Variant (287)..(288): Xaa in position 287 to 288 is any amino acid
  Variant (292)..(292): Xaa in position 292 is any amino acid
  Variant (294)..(294): Xaa in position 294 is any amino acid
  Variant (297)..(297): Xaa in position 297 is any amino acid
  Variant (301)..(306): Xaa in position 301 to 306 is any amino acid
  Variant (309)..(317): Xaa in position 309 to 317 is any amino acid
  Variant (319)..(323): Xaa in position 319 to 323 is any amino acid
  Variant (326)..(326): Xaa in position 326 is any amino acid
  Variant (328)..(342): Xaa in position 328 to 342 is any amino acid
  Variant (343)..(489): Xaa in position 343 to 489 is any or no amino acid
  Variant (491)..(493): Xaa in position 491 to 493 is any amino acid
  Variant (496)..(507): Xaa in position 496 to 507 is any amino acid
  Variant (508)..(509): Xaa in position 508 to 509 is any or no amino acid
LXXEXXXXXXXXXXXXXXXXXXXXXXXXXXXXXLXXXXXXXXXXXXRSXTXXXXXXXXXAXXXLXXXGXXXXGXXXVDLXXAXXXGXXVXNXPXXNXXXXAEXXXXXXXXXXRXXXXXXXXXXXGXWXKXXXXXXEXXGKXLGXXXGXGXIGXXXXXXAXXXGMXVXXXDXXXXXXXXXXXXXXXXXXXXLLXXXDXXXLHXPXXXXTXXXXXXXXXXXMKXGXXXINXXRGXXXDXXALXXXXXXXXXXGAAXDVFXXEPXXXXXXXXXXXXXXXXXXXXXXXNVXXTPHXGXSTXEAQXXXXXXVAXXXXXXXXXGXXXXXVNXPXXXXXXXXXXXXXXXXXXXXXXXXXXXXXXXXXXXXXXXXXXXXXXXXXXXXXXXXXXXXXXXXXXXXXXXXXXXXXXXXXXXXXXXXXXXXXXXXXXXXXXXXXXXXXXXXXXXXXXXXXXXXXXXXXXXXXXXXXXXXXXXXXXXXXXXXXXXXXXXXXXHXXXPGXXXXXXXXXXXXXXNI

SEQ ID NO: 64770 - protein, 40 aa, Artificial sequence
  protein pattern
  Variant (2)..(6): Xaa in position 2 to 6 is any or no amino acid
  Variant (8)..(8): Xaa in position 8 is Thr or Val
  Variant (9)..(9): Xaa in position 9 is Asp, Asn or Ser
  Variant (10)..(10): Xaa in position 10 is Asn or Gln
  Variant (12)..(12): Xaa in position 12 is Asp, Glu or Asn
  Variant (13)..(15): Xaa in position 13 to 15 is any amino acid
  Variant (17)..(19): Xaa in position 17 to 19 is any amino acid
  Variant (21)..(21): Xaa in position 21 is Ile or Val
  Variant (22)..(22): Xaa in position 22 is any amino acid
  Variant (23)..(23): Xaa in position 23 is Ile or Val
  Variant (24)..(24): Xaa in position 24 is any amino acid
  Variant (26)..(26): Xaa in position 26 is Ala, Ser or Thr
  Variant (28)..(28): Xaa in position 28 is any amino acid
  Variant (29)..(29): Xaa in position 29 is Ala, Gly or Ser
  Variant (30)..(30): Xaa in position 30 is Asn or Thr
  Variant (31)..(32): Xaa in position 31 to 32 is any amino acid
  Variant (33)..(33): Xaa in position 33 is Ala, Ser or Thr
  Variant (34)..(34): Xaa in position 34 is Ala, Thr or Val
  Variant (35)..(35): Xaa in position 35 is Ala or Val
  Variant (37)..(38): Xaa in position 37 to 38 is any amino acid
  Variant (39)..(39): Xaa in position 39 is Ile, Leu or Val
  Variant (40)..(40): Xaa in position 40 is Ala, Cys, Gly or Ser
IXXXXXGXXXVXXXXAXXXGXXXXNXPXXXXXXXXEXXXX

SEQ ID NO: 64771 - protein, 28 aa, Artificial sequence
  protein pattern
  Variant (3)..(4): Xaa in position 3 to 4 is Ile or Val
  Variant (6)..(6): Xaa in position 6 is any amino acid
  Variant (8)..(8): Xaa in position 8 is any amino acid
  Variant (9)..(9): Xaa in position 9 is any or no amino acid
  Variant (11)..(12): Xaa in position 11 to 12 is any amino acid
  Variant (13)..(13): Xaa in position 13 is Leu or Val
  Variant (14)..(14): Xaa in position 14 is Ala, Cys, Gly, Ser or Val
  Variant (15)..(16): Xaa in position 15 to 16 is any amino acid
  Variant (17)..(17): Xaa in position 17 is Ala or Thr
  Variant (18)..(19): Xaa in position 18 to 19 is any amino acid
  Variant (20)..(20): Xaa in position 20 is Phe, Ile, Leu or Met
  Variant (21)..(21): Xaa in position 21 is any amino acid
  Variant (22)..(22): Xaa in position 22 is Leu or Met
  Variant (23)..(23): Xaa in position 23 is any amino acid
  Variant (24)..(24): Xaa in position 24 is Ile, Leu or Val
  Variant (25)..(26): Xaa in position 25 to 26 is any amino acid
  Variant (27)..(27): Xaa in position 27 is Phe, His or Tyr
LGXXGXGXXGXXXXXXXXXXXXXXXXXD

SEQ ID NO: 64772 - protein, 32 aa, Artificial sequence
  protein pattern
  Variant (2)..(2): Xaa in position 2 is any amino acid
  Variant (3)..(5): Xaa in position 3 to 5 is any or no amino acid
  Variant (7)..(7): Xaa in position 7 is Ile, Leu, Met or Val
  Variant (8)..(9): Xaa in position 8 to 9 is any amino acid
  Variant (13)..(13): Xaa in position 13 is Ile, Leu or Val
  Variant (15)..(15): Xaa in position 15 is Ala or Gly
  Variant (18)..(18): Xaa in position 18 is any amino acid
  Variant (22)..(23): Xaa in position 22 to 23 is any amino acid
  Variant (24)..(24): Xaa in position 24 is Ile or Val
  Variant (25)..(25): Xaa in position 25 is Ala or Gly
  Variant (26)..(27): Xaa in position 26 to 27 is any amino acid
  Variant (28)..(28): Xaa in position 28 is Ile or Val
  Variant (29)..(29): Xaa in position 29 is Ala, Gly, Pro, Ser or Thr
  Variant (30)..(31): Xaa in position 30 to 31 is any amino acid
  Variant (32)..(32): Xaa in position 32 is Phe, Ile, Leu, Met or Val
LXXXXNXXXTPHXGXSTXEAQXXXXXXXXXXX

SEQ ID NO: 64773 - DNA, 1383 bp, Saccharomyces cerevisiae
  CDS (1)..(1383)
atgcctatcaatgccatcacttccgaccatgtcattatcaatggtgcaaataaacctgcgactattgtgtattcgaccgaatcaggcacgattctggatgttttagaaggctccgtggttatggagaaaactgagataaccaaatatgaaatacatacgctggagaacgtatctccatgtacaattctgcctggacttgtggactctcatgttcacttgaacgagcccggtaggactagctgggaaggattcgaaactggaactcaagctgctattagtggcggggtcacaacggtggttgatatgccgctaaatgctattcctcccacaacaaatgtggagaatttccgaattaaattggaagctgctgagggccaaatgtggtgcgatgttgggttttggggtggactggtaccacacaacttgccagacttaattccgcttgtcaaagctggcgttcgcgggttcaaaggattcttgcttgattctggtgtggaagaattccctccaattggcaaagaatatatagaagaagccttgaaggtcttagccgaggaggataccatgatgatgtttcatgctgagttgcccaaggcacatgaggaccaacagcaacccgagcaaagccatcgtgaatattcttcgtttttgtcctcgaggccggattctttcgaaatagacgccatcaatttgattctcgaatgcttgagagccagaaatggaccagttcctcctgtacatatagttcatctggcatcaatgaaagcaattcccttgatcagaaaggcacgtgcgtcagggctaccagtcacaacagagacttgtttccactatttgtgtattgctgcagagcagatcccagacggagccacctactttaaatgttgtccacccatccgctctgagtctaatcgccaaggcctatgggacgctttgcgtgaaggtgttataggctcagtagtgagcgaccattcgccatgcacccctgagttgaagaacttgcaaaaaggtgactttttcgattcttggggaggaatcgcttccgtcggactaggtttgccattgatgtttacccaaggctgctctttggtcgatatcgttacatggtgctgtaaaaatacatcccatcaggtaggactatctcaccaaaaaggcactatagctcccgggtacgatgctgatttggtggtatttgatactgcaagtaaacataaaataagtaattcaagtgtctacttcaaaaacaaattgactgcctacaacgggatgacggtcaagggcacagttttgaaaaccatattaagaggccaggtggtatatacgaatgccaacggagtctcgaaaacaccattgggtcaaactttgcttgattctagacgttaa

SEQ ID NO: 64774 - protein, 460 aa, Saccharomyces cerevisiae
MPINAITSDHVIINGANKPATIVYSTESGTILDVLEGSVVMEKTEITKYEIHTLENVSPCTILPGLVDSHVHLNEPGRTSWEGFETGTQAAISGGVTTVVDMPLNAIPPTTNVENFRIKLEAAEGQMWCDVGFWGGLVPHNLPDLIPLVKAGVRGFKGFLLDSGVEEFPPIGKEYIEEALKVLAEEDTMMMFHAELPKAHEDQQQPEQSHREYSSFLSSRPDSFEIDAINLILECLRARNGPVPPVHIVHLASMKAIPLIRKARASGLPVTTETCFHYLCIAAEQIPDGATYFKCCPPIRSESNRQGLWDALREGVIGSVVSDHSPCTPELKNLQKGDFFDSWGGIASVGLGLPLMFTQGCSLVDIVTWCCKNTSHQVGLSHQKGTIAPGYDADLVVFDTASKHKISNSSVYFKNKLTAYNGMTVKGTVLKTILRGQVVYTNANGVSKTPLGQTLLDSRR

SEQ ID NO: 64775 - DNA, 1317 bp, Bacillus halodurans C-125
  CDS (1)..(1317): transl_table=11
atgaagcgatttgatttaatcattcgatcgtctacggttgtcacggaaacaacgacttatcgagctgatgttgcgattcgcaacgggattgtgtcagccattaccgagcctggatccatttcaagcgatgatggcccggcaatcgacgggaccggtctacacctttttcctggcatggttgatgtccacgttcactttaatgagcctgggagaacggagtgggaagggtttgcatctggtagtaaaagcttggcggctggaggggtcaccacgtatttcgatatgccgttaaacagcaatccgccaacaattacgagagaggagttagacaaaaagcgtcaattagctaatgaaaagtctcttgtagactatcggttttggggcggactcgtgccgggaaatatcgatcatcttcaggacttacacgacggtggtgtcataggctttaaagcttttatgtccgagtgtggcacggatgattttcagttctcgcatgatgaaaccttactgaaaggcatgaagaagattgcagcgctcggctccattttggctgttcatgccgaatcaaacgaaatggtgaacgcgttgacgaccattgcaatagaggaacagcggttgacagtgaaagattacagtgaagctcgtccgatcgtctcagagcttgaggcagtcgagcggatcttgcggttcgctcagctcacttgctgtccgatccatatttgtcatgtaagtagtcgaaaggttctaaaaagaattaaacaagcgaagggagaaggggtaaacgtttcggtggaaacgtgcccacactacttgttgttttcgcttgatgaatttgctgaaattggctatctagccaaatgtgctcctccgttacgagagcgacaagaagtagaagatttatgggatggactaatggcaggagaaatcgatctaattagttcagaccattccccatcgctacctcaaatgaaaacaggcaaaacgatttttgaggtgtggggcggtattgccggatgtcagaatacattggctgtcatgctgactgaaggctaccataaacgaaaaatgccattgacacaaattgtgcaactactatcgacagagccagcaaagcgattcggactctatccgcaaaaaggaacgattcaagtaggagccgaggccagctttacgcttatagatttaaatgaatcatatacgctaaacgcaagtgatttgtattatcgccatccgatcagtccgtatgttggtcaacgctttagagggaaggtaaagcatacaatctgccaaggtaagcatgtttaccaagatcattga

SEQ ID NO: 64776 - protein, 438 aa, Bacillus halodurans C-125
MKRFDLIIRSSTVVTETTTYRADVAIRNGIVSAITEPGSISSDDGPAIDGTGLHLFPGMVDVHVHFNEPGRTEWEGFASGSKSLAAGGVTTYFDMPLNSNPPTITREELDKKRQLANEKSLVDYRFWGGLVPGNIDHLQDLHDGGVIGFKAFMSECGTDDFQFSHDETLLKGMKKIAALGSILAVHAESNEMVNALTTIAIEEQRLTVKDYSEARPIVSELEAVERILRFAQLTCCPIHICHVSSRKVLKRIKQAKGEGVNVSVETCPHYLLFSLDEFAEIGYLAKCAPPLRERQEVEDLWDGLMAGEIDLISSDHSPSLPQMKTGKTIFEVWGGIAGCQNTLAVMLTEGYHKRKMPLTQIVQLLSTEPAKRFGLYPQKGTIQVGAEASFTLIDLNESYTLNASDLYYRHPISPYVGQRFRGKVKHTICQGKHVYQDH

SEQ ID NO: 64777 - DNA, 1395 bp, Sulfolobus tokodaii str. 7
  CDS (1)..(1395): transl_table=11
atggtctatgatttaattctgaaaaatgtaaaagcatttaccgtatcaggacctttcgaaggagatattgcaataaaagatggtaaaatagccaaaataggaggagatatacaagaacaagcaaataaagtaatagacttaactggaaagtatgttgtaccaggtttaatagatggtcatactcacatggaatttccctttatgaaagaagttaccgcagatgacttctattatggtactagagctgcagttgcaggaggcgtaactactattgtagatttcataactccagctaaaggtcaagatttattaagtgcatatgagcaatggaggagtaatgctgatcctaaagtcatttcagattatggtcttcatatgattatacgagagagtaatactaaaattcttgaacaaatcccagaaataataaataagggggtagtgagttttaagttatttatggcttataaaaacgagtttatgctatcagatggggaattatataaattaataaaaaggattaatgattttggtggtgtaataggtatacacgcagaaaacggagaaattattaatgaattgatacaacaattcgtttcagagggcaagatagagcctatatatcattattattctaggcccgacataatggaaatagaggctacaaacagaatagcgtctatcgcaagtatgctaggtaaagacgttaaaatgtatatagtgcatacgtctactggtgaagcggtagatattatgtcatcctatagaaagcaaggtttcaagttttataatgaaactgttcctcactatttaactttaaacactgatttcttaaagaggcctgatggttacagatatgttatgagtcctcctttaagaagtgatgagcagagaactaaattatggatgaggttagcctctggtgacatttttactgtaggtagtgatcattgtgtatattctgatgctcaaaagaagaggtatagagaggaagtgcctcctttccatgagattcctaacggagtaccaggtactgaaactattctacctatcctattctattatggtgtaaagaagggaataataggtatggaaagatttattgaagttacatcttataatcctgcaaggctatttggtttatatccaagaaagggaactataatgcctggctctgatgctgactttgcagtaatagatcctaatagaaaagttaggatatctgcagatgttcttcatagtaatattaactacacgatatatgaaggaatggaagtagagggatggaatattatgactataaggagaggagaaatagtttatgaagaaggtcaagtaataggcaaaaaaggaagcggtaaatacataccaggcaaaacacccgttttagtgtga

SEQ ID NO: 64778 - protein, 464 aa, Sulfolobus tokodaii str. 7
MVYDLILKNVKAFTVSGPFEGDIAIKDGKIAKIGGDIQEQANKVIDLTGKYVVPGLIDGHTHMEFPFMKEVTADDFYYGTRAAVAGGVTTIVDFITPAKGQDLLSAYEQWRSNADPKVISDYGLHMIIRESNTKILEQIPEIINKGVVSFKLFMAYKNEFMLSDGELYKLIKRINDFGGVIGIHAENGEIINELIQQFVSEGKIEPIYHYYSRPDIMEIEATNRIASIASMLGKDVKMYIVHTSTGEAVDIMSSYRKQGFKFYNETVPHYLTLNTDFLKRPDGYRYVMSPPLRSDEQRTKLWMRLASGDIFTVGSDHCVYSDAQKKRYREEVPPFHEIPNGVPGTETILPILFYYGVKKGIIGMERFIEVTSYNPARLFGLYPRKGTIMPGSDADFAVIDPNRKVRISADVLHSNINYTIYEGMEVEGWNIMTIRRGEIVYEEGQVIGKKGSGKYIPGKTPVLV

SEQ ID NO: 64779 - DNA, 1458 bp, Agrobacterium tumefaciens str. C58
  CDS (1)..(1458): transl_table=11
atgatcgccaccatcatcaaaaacggcaccatcgtcaccgccgacctcacctacaaggcagacatcaggatcgaaggcggcaggatcactgagatcggccctgatctgaccggcggcacgatcctcgatgccacggaatgttacatcatgccgggcggcatcgatccgcatgtgcatctggaaatgcccttcatgggcacctattccgccgacgatttcgagagcggcacgcgcgccgcccttgccggcggcaccaccatggtggtggatttctgcctgcccgatcccggccagtcgcttctcgatgccctgcagagatgggacaacaaggcgacgcgcgccaattgcgattattccttccacatggcggttacctggtggggcgagcgggtcttcaacgagatgaagacggtggttcaggaaaaaggcatcaactcgttcaagcacttcatggcctataagggcgcgctgatggtaaatgacgacgagatgttcgcctccttctcgcgctgtgcggaactcggcgccattcccttcgtgcatgcggaaaacggcgatatcgtcgcgcagatgcaggaaaaactgatggccgagggcaatgtcggcccggaggcgcatgcctattcccggcctccctccgtggaaggcgaagcgaccaaccgcgccatcatcattgccgacatggccggcgccccgctttatgtcgtccacacatcctgcgagcaggcgcatgaagccatccgccgcgcgcgccagaatggcatgcgcgtttatggcgaaccgctgatccagcacctgatcctcgatgaaagtgaatatgccaatgccgattgggatcatgccgcccggcgggtcatgtcgccacccttccgcaaccggcaacaccaggacagcctctgggcgggtcttgcctccggctcgctgcaatgcgtggcgaccgaccattgcgccttcaccaccgagcagaaacgcttcggccttggtgatttccgcaagataccgaacggcaccggcgggctggaagatcgcatgccgctgctctggacccatggcgtcgcgaccggccggctgacgatgaatgaatttgtcgccgtcacctccaccaatattgcgaagatcctcaacatctatccgagaaagggcgcgatcctcgtcggcagcgatgccgatatcgtcgtctgggacccggcgctggaaaagaccatcagcgccgcaagccagcaatcggccatcgattacaacgtgttcgaagggcagaaggtgaagggcctgcctcgctacaccctgtcgcgcggcctcgtcagtgtcgaggaaggcaccatcgaaacacaggaaggccatggccaattcgtggcccgcgatccctatcccgccgtcagccgggcgctttccacctggaaggaactcgtttcgccgcgcaaggtggaacgcacaggcattccggcatcgggcgtgtga

SEQ ID NO: 64780 - protein, 485 aa, Agrobacterium tumefaciens str. C58
MIATIIKNGTIVTADLTYKADIRIEGGRITEIGPDLTGGTILDATECYIMPGGIDPHVHLEMPFMGTYSADDFESGTRAALAGGTTMVVDFCLPDPGQSLLDALQRWDNKATRANCDYSFHMAVTWWGERVFNEMKTVVQEKGINSFKHFMAYKGALMVNDDEMFASFSRCAELGAIPFVHAENGDIVAQMQEKLMAEGNVGPEAHAYSRPPSVEGEATNRAIIIADMAGAPLYVVHTSCEQAHEAIRRARQNGMRVYGEPLIQHLILDESEYANADWDHAARRVMSPPFRNRQHQDSLWAGLASGSLQCVATDHCAFTTEQKRFGLGDFRKIPNGTGGLEDRMPLLWTHGVATGRLTMNEFVAVTSTNIAKILNIYPRKGAILVGSDADIVVWDPALEKTISAASQQSAIDYNVFEGQKVKGLPRYTLSRGLVSVEEGTIETQEGHGQFVARDPYPAVSRALSTWKELVSPRKVERTGIPASGV

SEQ ID NO: 64781 - DNA, 1521 bp, Arabidopsis thaliana
  CDS (1)..(1521)
atggagagaactttgcttcaatggagactattgcctcttctcgcactcatcgttgctcttttctccttcttcttcgcttctcctcgctctttacaggggaataataagtgtagtcttcttcctcatgatcattactggatctcaagtaaacgcatcgtcacacctaatggtctcatctctggttctgtggaggtgaagggaggaattattgtgtcggtggtgaaggaagttgattggcataagagtcaaaggagtcgagtgaaagtgattgattatggagaagctgtcctcatgcctggtctcattgatgtgcatgttcatcttgatgatcctggaagaagtgaatgggaaggttttccttctggaactaaggctgctgctgctgggggaataactacattggttgacatgcccttaaacagtttcccttcaactgtatctcctgaaactttgaaactcaagattgaagctgcgaaaaacagaatacatgttgatgttgggttctggggaggtctggtacctgacaatgcactcaactcaagtgctcttgagtctctcttagatgctggagttcttggtctcaagtcctttatgtgcccttcaggaatcaacgattttccaatgacaaacatcactcatataaaggaaggactatctgtattagctaaatacaaacgaccattgcttgtacacgcagagatcgagagagacttagagattgaagatggtagtgaaaatgatcctcgttcttatctgacttatttaaaaaccaggcctacttcatgggaggagggagcaatcagaaacctattatcggttactgaaaacacaagaattggtggttctgcagaaggagctcatcttcatattgtacatttatctgatgccagttcttccttggatttgataaaggaagcaaaaggcaaaggagacagtgttactgttgaaacatgtccacattacctagctttctcagccgaagagattccagaaggtgatactcgtttcaaatgctcccctcctatacgtgatgcggcaaatagagaaaaattgtgggaagctttgatggaaggagacattgatatgctgagctctgatcattcacctacaaagcctgaactcaaacttatgagtgatggcaacttcttgaaagcttggggtgggatatcttctttacagtttgttcttcctatcacatggtcttatggaaaaaagtatggagtaacgctcgagcaggtaacttcttggtggagtgataggccttccaaactcgctggactacactctaagggagcggttacggttggaaaacacgcagatcttgttgtgtgggaacctgaagccgaatttgatgtagatgaagatcatccaattcacttcaaacaccctagtatctcagcttatttgggaagaagattatcaggcaaagtggtttcgacatttgtgagagggaacttggtttttggagaaggcaagcatgcttctgatgcttgcgggtctctgcaacttgcaactacttaa

SEQ ID NO: 64782 - protein, 506 aa, Arabidopsis thaliana
MERTLLQWRLLPLLALIVALFSFFFASPRSLQGNNKCSLLPHDHYWISSKRIVTPNGLISGSVEVKGGIIVSVVKEVDWHKSQRSRVKVIDYGEAVLMPGLIDVHVHLDDPGRSEWEGFPSGTKAAAAGGITTLVDMPLNSFPSTVSPETLKLKIEAAKNRIHVDVGFWGGLVPDNALNSSALESLLDAGVLGLKSFMCPSGINDFPMTNITHIKEGLSVLAKYKRPLLVHAEIERDLEIEDGSENDPRSYLTYLKTRPTSWEEGAIRNLLSVTENTRIGGSAEGAHLHIVHLSDASSSLDLIKEAKGKGDSVTVETCPHYLAFSAEEIPEGDTRFKCSPPIRDAANREKLWEALMEGDIDMLSSDHSPTKPELKLMSDGNFLKAWGGISSLQFVLPITWSYGKKYGVTLEQVTSWWSDRPSKLAGLHSKGAVTVGKHADLVVWEPEAEFDVDEDHPIHFKHPSISAYLGRRLSGKVVSTFVRGNLVFGEGKHASDACGSLQLATT

SEQ ID NO: 64783 - DNA, 1596 bp, Arabidopsis thaliana
  CDS (1)..(1596)
atggctctggatgcattcttcttcatcgtctctctatttcttctgtttccgtcaccatccgcgtcagaatccactactcagttttgtagtgcagggagagagaatggtgtgggatcttgtggggtttcatcgacgaggattttgattaaaggaggtactgttgtcaatgcacaccatcaagaacttgctgatgtttatgtggaaaatggtattattgtcgctgtgcagccaaacattaaggttggggatgaagtcactgtcctcgatgctactggaaagtttgtcatgccaggaggaattgacccccacacgcacctcgccatggaatttatgggtaccgagactattgatgatttcttcagtggtcaggcagcggcattagctggtggaacaactatgcatatagactttgttatacctgtcaatgggaatctggtggctggttttgaagcctatgaaaacaaatctagagaatcttgtatggattacggttttcatatggcaatcacaaagtgggatgaaggtgtttccagggacatggagatgttggtcaaggaaaagggtatcaactctttcaagtttttcctagcgtataaaggatctcttatggtaactgatgacctactcctagaaggacttaaaagatgcaaatccctcggtgccttggccatggttcatgctgaaaatggagatgcagtattcgaaggacagaaaagaatgattgaactgggcattacaggtccagagggtcatgctctttcaaggcctcctgtgctcgagggagaggccactgctagagcaattcgtttggctcgttttattaacacgcctctctatgttgttcatgtgatgagtgttgatgcaatggacgagattgctaaagctcgaaaatcaggacagaaggttattggagagcctgttgtgtctggattaatccttgatgatcattggctttgggatcctgacttcacaattgcgtccaagtatgtcatgagtccacctatcagaccagtaggacatgggaaagccctacaagatgccctttccacaggaatccttcagcttgtaggaactgatcactgcactttcaattctacacaaaaagctctaggacttgatgatttccgcagaatacctaatggtgttaatggccttgaggaacggatgcacttgatatgggacacgatggtggagtctggccaactctcagctactgattatgttcgaataaccagcactgagtgtgctagaattttcaacatatatccacggaaaggagctatccttgctggctcggatgcagatattatcatattgaatccaaactcaagctacgagattagctcaaagtctcatcattcaagatcagacacaaacgtctacgagggcagaagaggaaagggaaaagttgaagtgacaatagcaggaggacgaattgtgtgggaaaacgaggaacttaaagttgttccaagaagtggcaagtatatagagatgcctcctttcagttaccttttcgatggtattgagaaatcagatgctaattatctatcttctcttcgagctccagttaagcgtgtcagaactgaagctacgtaa

SEQ ID NO: 64784 - protein, 531 aa, Arabidopsis thaliana
MALDAFFFIVSLFLLFPSPSASESTTQFCSAGRENGVGSCGVSSTRILIKGGTVVNAHHQELADVYVENGIIVAVQPNIKVGDEVTVLDATGKFVMPGGIDPHTHLAMEFMGTETIDDFFSGQAAALAGGTTMHIDFVIPVNGNLVAGFEAYENKSRESCMDYGFHMAITKWDEGVSRDMEMLVKEKGINSFKFFLAYKGSLMVTDDLLLEGLKRCKSLGALAMVHAENGDAVFEGQKRMIELGITGPEGHALSRPPVLEGEATARAIRLARFINTPLYVVHVMSVDAMDEIAKARKSGQKVIGEPVVSGLILDDHWLWDPDFTIASKYVMSPPIRPVGHGKALQDALSTGILQLVGTDHCTFNSTQKALGLDDFRRIPNGVNGLEERMHLIWDTMVESGQLSATDYVRITSTECARIFNIYPRKGAILAGSDADIIILNPNSSYEISSKSHHSRSDTNVYEGRRGKGKVEVTIAGGRIVWENEELKVVPRSGKYIEMPPFSYLFDGIEKSDANYLSSLRAPVKRVRTEAT

SEQ ID NO: 64785 - DNA, 1461 bp, Drosophila melanogaster
  CDS (1)..(1461)
atggatctgttgtttctcagccggcgaattttcctgggcgatggcagccaaaacgccctgatccatggcggcatcatcgtggatacagagggcattatacgcagggtgctacgttcaccgcaggaggttaatacctatttgtacaacacagaatccgaatcggtttacgatttcggggacctggtactgatgcccggtctgattgatcccaatgtccatatcaacgagccgggtcgcaaggactgggagggttttgcaactgccaccaaggcggcggccgccggtggcttcaccacaatcatcgatcgacccaccaacgcgcaaccacccaccgttagtgtggcccatctcaaggccaaaacgtcgacggcccgtggaaagatctatgtggacgtgggtttttggggcggactagtgcccggaaacggggatcagctggctgcacttttgggtgccggtgtcatgggtctgcagtgcacattgtgcgatcccgcggcgcccgtctctcaggaatttcccgccgtaaacgaatctcagctggaggaggctctttcccagttggacaaggatcaggctgaaggggaagcaatcgtagcggtgcatgctgagctgccgctgaccaccgaaatccatccggacgaggaggcgccccgggagtatggcactttcctggtgactcgtccaccccaaatggagatttccgcgacgcagttgctctgccggctggcgaatcgccacccgcggcgctgcatacacatcctcaactgcagcagcggcgaaagtctgccgctggtggaggagtgtcgacggcagggcgggaatctaacggtggacacctgtccgcattacctggccctggcggccgaggatgtgcccgattgcggcacggagttcaagacctggccaccgattcgggagcgtcgcaatcaggagcaattgtggcaggctctgagaccgggcggagccatccgcatgattggcagtgatcactcgccggcgacgccgggtgcacgtgctctcacctgcggaagggggcgtggcaacttcctgaaggcgtggccgggcatcaactcgttgcaactcagcctgtcggtcgtttggacagcggccgccaatcggcgaggatccgccaacctgaccatcgcggacatccatcgtctgatgtgccaggagccggcgaacctgtgcggcttgtccgcctcgaagggccgcattgccgagggctacgatgccgacttctgtgtgtggagtcccgaggaggagttcaccgtgggcccggagctgctctacacggccacgaaggccaccccgtacgcgggtcaaaagttgcggggcgtggtgcatgccacggtggtgcggggcctgcatgtctaccaacagttcgagggcttcggccagcccctgggcaaggtgctgcttcggaggagcagtcgaaaactggtcaagttcgtgagcatgtga

SEQ ID NO: 64786 - protein, 486 aa, Drosophila melanogaster
MDLLFLSRRIFLGDGSQNALIHGGIIVDTEGIIRRVLRSPQEVNTYLYNTESESVYDFGDLVLMPGLIDPNVHINEPGRKDWEGFATATKAAAAGGFTTIIDRPTNAQPPTVSVAHLKAKTSTARGKIYVDVGFWGGLVPGNGDQLAALLGAGVMGLQCTLCDPAAPVSQEFPAVNESQLEEALSQLDKDQAEGEAIVAVHAELPLTTEIHPDEEAPREYGTFLVTRPPQMEISATQLLCRLANRHPRRCIHILNCSSGESLPLVEECRRQGGNLTVDTCPHYLALAAEDVPDCGTEFKTWPPIRERRNQEQLWQALRPGGAIRMIGSDHSPATPGARALTCGRGRGNFLKAWPGINSLQLSLSVVWTAAANRRGSANLTIADIHRLMCQEPANLCGLSASKGRIAEGYDADFCVWSPEEEFTVGPELLYTATKATPYAGQKLRGVVHATVVRGLHVYQQFEGFGQPLGKVLLRRSSRKLVKFVSM

SEQ ID NO: 64787 - DNA, 1386 bp, Clostridium tetani E88
  CDS (1)..(1386): transl_table=11
atgcaaaattttgatactataattaaaaatggaaccatagtaacggcttcagacacctataagggggatataggtataaaagatggtaaggtagttcagataggtctagatttggaagactcagggaaaaagataatagatgcaggggataaatatatattcccaggaggaatagatccacatactcatatggatatgccttttggaggaactttttccagtgatgactttttaacggggactaaagccgctgcctgtggaggaaccactaccatagtagattttgcagtacaacctaagggtaaaaccttaaaagaaaccacaaaaatatggagagaaaaagcggataataaagcttgtatagattatggtattcatatagcaattacagatatgaatgatgaaatcttagaagaaatggaagaagtaataaaagaaggatattctagctttaagctatttatgacttatgaaggtatgagagtagaagatgataccctaatgagagctcttatgaaagctagagataaaggtggagttatttgtgtacatgctgaaaatcattatgtaatagattatttcataaaaaagctactgaaggaaggaaaaacaaaacctaaatatcatgctatttctcgtccagaattatgtgaaggagaagcagcgggaagggctataaaattagcagaaatttgtggagctcctttatatatagtacacaatagttgtgaagcctctgtatcagaagttgaaagggctaggaaattaggatatccaataatgggagagacttgcccccaatatttattattatcctatgaaaactatgaagaagaagggtttaatggagcaaaatatgtaatgtcacctcccctaagagataaaaagaattgggaacatatatggaaggcattatcaaaagatactctacaagtagtagcgacagatcattgtcctttctttatggagcaaaagagaatgggaatagattcctttaataaaattccaaatggagcgccaggagtagaacttagaatgtcacttatgtatacttatggtgttttagaagatagaatttctcttcaaagatttgtagaggtaacttccacaaatgctgctaaaatatttggaatgtatcctcaaaagggtactatagcagtaggtagtgatgcagatttaataatatttgatccaaacaaagaaatagaaataaaagaagaaaatttaaatgaaaatgtggactatacaccttatgaaggctttaaattaaagggatatccagtaatgactttattaagaggagaggttattgcaaagaatggaaaatttgtaggacaaaagggagtaggcaagtttgtaaagagaggtaagggagatataatatag

SEQ ID NO: 64788 - protein, 461 aa, Clostridium tetani E88
MQNFDTIIKNGTIVTASDTYKGDIGIKDGKVVQIGLDLEDSGKKIIDAGDKYIFPGGIDPHTHMDMPFGGTFSSDDFLTGTKAAACGGTTTIVDFAVQPKGKTLKETTKIWREKADNKACIDYGIHIAITDMNDEILEEMEEVIKEGYSSFKLFMTYEGMRVEDDTLMRALMKARDKGGVICVHAENHYVIDYFIKKLLKEGKTKPKYHAISRPELCEGEAAGRAIKLAEICGAPLYIVHNSCEASVSEVERARKLGYPIMGETCPQYLLLSYENYEEEGFNGAKYVMSPPLRDKKNWEHIWKALSKDTLQVVATDHCPFFMEQKRMGIDSFNKIPNGAPGVELRMSLMYTYGVLEDRISLQRFVEVTSTNAAKIFGMYPQKGTIAVGSDADLIIFDPNKEIEIKEENLNENVDYTPYEGFKLKGYPVMTLLRGEVIAKNGKFVGQKGVGKFVKRGKGDII

SEQ ID NO: 64789 - DNA, 1365 bp, Enterococcus faecalis V583
  CDS (1)..(1365): transl_table=11
atgcaagcagagttagtgattaaaaacgggttagttattttagaaactggagaagtcattacggatgtcgccgttcaaggaggaaaaatcgtagcgattgggcaagacttgtcaggagaacgtgtgattgatgcgacgggtttagtcgttagtcctgggatggtggatgctcatgttcatattaccgatcctggtggtggttaccgcgatgaatgggaagggtatgtcacaggaacggccgcttgtgccaaagggggcgtgacgacctttatggaaatgcctttaaatcagattccagcaactgtggataagacctctcttgagatcaaatacaaggcaggagaaaataaactaaaagtagatgtagggtcatttgggggcgtggtcccgaccaacttggctgatgggattcaggaacttgatgaaggaggcgtttctggctataaatgctttttgggaacgtgcggcgatcgttcaattgaaggagattttcaaaatgtcgacgattattcattatatgaaggaatgaaacaagtcgccaaaactggcaaagtgctagcaatccatgcagaaaatgcgccaattacggataaattaggcgcggtagcttatcaaaatggcgaaacgactttagcggcatatgtagctacacgtcctgtgtttaccgaagttgaagcgattcaaaaagccattttatttgccaaagaaacaggttgtcggattcatatttgccatgtggcttgtcaagaaggcgtggaagaagttttgaaagcccaagcagaaggggtagatgtgacttgtgaaacatgtacgcattatttatattttaccacggatgaacttgatgccattggtccagttgtcaaatgttcaccgccgattcgtgacgcggaccaacaagccgccttatggaaccacgtgcaaacaggcggcatcgcgtttgtaacctctgaccattctccttgtacgccagacttaaaagatacaaccaatgcttttgaagcttggggcggcatttctggtgttcaaaataacgtcgatgtgttattcgatgaagccgtccaaaaacgtggtttatccttgaaacaattcgcggatatgattgcagcaaacccagctgaccgttatcacttagcacaaaagggccgcatcagcattggtaaggatgccgattttgtactaattaaacctaatgcgccgtatatcttaaaagcagaagatttagaataccgaaataaaattagtccttacattggtcgtgaaattggggcccaagtgattcaaacaattttaagaggcgaaacaatttacgcacaagaaactggggtaaccgaggcgtttaacggcgtatttatcaaaaattaa

SEQ ID NO: 64790 - protein, 454 aa, Enterococcus faecalis V583
MQAELVIKNGLVILETGEVITDVAVQGGKIVAIGQDLSGERVIDATGLVVSPGMVDAHVHITDPGGGYRDEWEGYVTGTAACAKGGVTTFMEMPLNQIPATVDKTSLEIKYKAGENKLKVDVGSFGGVVPTNLADGIQELDEGGVSGYKCFLGTCGDRSIEGDFQNVDDYSLYEGMKQVAKTGKVLAIHAENAPITDKLGAVAYQNGETTLAAYVATRPVFTEVEAIQKAILFAKETGCRIHICHVACQEGVEEVLKAQAEGVDVTCETCTHYLYFTTDELDAIGPVVKCSPPIRDADQQAALWNHVQTGGIAFVTSDHSPCTPDLKDTTNAFEAWGGISGVQNNVDVLFDEAVQKRGLSLKQFADMIAANPADRYHLAQKGRISIGKDADFVLIKPNAPYILKAEDLEYRNKISPYIGREIGAQVIQTILRGETIYAQETGVTEAFNGVFIKN

SEQ ID NO: 64791 - DNA, 1338 bp, Streptomyces avermitilis MA-4680
  CDS (1)..(1338): transl_table=11
gtgtccgacgtcgaactggtgctgcgctcgacgcgcgtcatcactcccgaggggacgcgccccgccgcggtcgcggtcgccgcggggaagatcacggcggtgctgccgcacgacgccgaggtgccggccggcgcccgcctggaggacctcggcgacgacgtgctgctgcccggcctggtcgacacccacgtgcacgtcaacgaccccgggcgcacccactgggagggcttctggacggcgacgcgcgccgcggccgccgggggcatcaccaccctggtcgacatgccgctcaactccctcccgccgaccacgacggtcggcaatctgcgcaccaagagggacgtggccgccgacaaggcgcacatcgacgtcggtttctggggcggcgcactgcccgacaacgtcaaggacctgcggccgctgcacgacgcgggcgtcttcggcttcaaggcgttcctgtcgccctcgggcgtcgacgagttccccgagctggaccaggagcggctggcccggtcgatggccgagatcgccggcttcggcggactgctcatcgtccacgccgaggacccgcaccacctcgccgccgccccccagcggggcggccccaggtacaccgacttcctcgcctcgcgcccgcgcgacgccgaggacaccgctatcgcgaacctcctcgcgcaggcgaagcgcctcaacgcgcgcgtgcacgtgctgcacctgtcgtcgagcgacgcgctgccgctgatcgccggcgccaaggccgagggcgtacgcgtcacggtggagacctgcccccactacctcacgctcacggccgaggaagttccggacggggccagcgagttcaagtgctgcccgcccatccgtgaggccgccaaccaggacctgctgtggcaggcgctggccgacggcacgatcgactgcgtggtcaccgaccactcgccctccaccgccgacctgaagaccgatgacttcgcgacggcgtggggcgggatctccggactccagctcagcctgcccgcgatctggaccgaggcccggcggcgcggccacagcctcgaggacgtcgtccgctggatgtccgcacggacggcccggctcgtcggcctggcccagaagggcgccatcgaggcgggccgcgacgccgacttcgcggtgctggcgcccgacgagaccttcaccgtggacccggcggcacttcagcaccgcaaccgggtcaccgcctacgccggcaagaccctcagcggcgtcgtcaagtccacctggctgcgcggcgaacgcatcatggctgacggcgagttcacggagccgaagggccggctcctcagcagggaaccgtag

SEQ ID NO: 64792 - protein, 445 aa, Streptomyces avermitilis MA-4680
MSDVELVLRSTRVITPEGTRPAAVAVAAGKITAVLPHDAEVPAGARLEDLGDDVLLPGLVDTHVHVNDPGRTHWEGFWTATRAAAAGGITTLVDMPLNSLPPTTTVGNLRTKRDVAADKAHIDVGFWGGALPDNVKDLRPLHDAGVFGFKAFLSPSGVDEFPELDQERLARSMAEIAGFGGLLIVHAEDPHHLAAAPQRGGPRYTDFLASRPRDAEDTAIANLLAQAKRLNARVHVLHLSSSDALPLIAGAKAEGVRVTVETCPHYLTLTAEEVPDGASEFKCCPPIREAANQDLLWQALADGTIDCVVTDHSPSTADLKTDDFATAWGGISGLQLSLPAIWTEARRRGHSLEDVVRWMSARTARLVGLAQKGAIEAGRDADFAVLAPDETFTVDPAALQHRNRVTAYAGKTLSGVVKSTWLRGERIMADGEFTEPKGRLLSREP

SEQ ID NO: 64793 - DNA, 1389 bp, Nasonia vitripennis
  CDS (1)..(1389)
atgaatgcatctggtgcaaaattattcgtatcaaggcagactgttctaccggacggtgtcaaagccgctgttctactggtgaaaaatggaaaaatcgaggcgatccatccttgcgccaatgacaacgaaatcaacgataaacttggacaacattcgaacgtcgaatacgaagattttggaaatttgctcttgatgcctggaatagtcgactctcacgtgcacgtgaatgaacccggccgcagcgagtgggaaggcttttggacggctacgaaagccgctgctgccggcggcgttactaccattgttgacatgccactgaattccataccacctacaactaccgtagagaatttgaaaactaaagctcaggtggctcgaacaaaagctttcgtggacatcggattctggggtggcgtcataccaggaaaccaaaaagacttgaagccactcgtggaagccggagtcgtcgggttcaagtgcttcctgtgtcccagttgcattgaagagtttccccacgtcaatgaggaggatgtggaaaaagccttgatggagttgcggaatttaaacaccgtcttagcctttcacgcggaatgcgagttaaaagatgctatcgataaatcaaaagacccgtcggtttaccatacctacttgcagactcgtcctgagatcatggaagttaacgcaataacgattatcactaagctgtgcaaagcttacaacgttcgttgtcacatagtacacttatctgcagccgaggctttgggcttggttagggaggcgaaaaagaataaattgcggctgactgcggaaacctgttatcattatctctacctgaccgccgaaaaaatcccacggaatgccacgcagtttaagtgctgtccgccaattagagatgaaagcaacagagaaaagctgtggacggccttgaaagacggtacgctggacatggtcgtgtctgaccattcgccctgtaccgctgatctcaagcaagtcggagatttcctctcggcttggggcggaatatcttcggtgcagttcggactgtcggtcttttggaccgaagcgaggaaacgaggattcagctaccaggacgttgtaaagcttcttagttcggctccggctgagctttgcggtttggggaagaaaaagggagcactgagggtcggtatggacgcggactttgttgtctgggatcccgagacgaggattcagattgaagagtctgggatccttcataaaaacaagctgacaccgtacttgggcgaaaaactctacggaaaggtctttgctaccgttgtccgaggtaacttcgtctacaaggatggagtgttcagtagcgaaccacttggtaaacttttactacgggatgacttcttatatgcgatttaa

SEQ ID NO: 64794 - protein, 462 aa, Nasonia vitripennis
MNASGAKLFVSRQTVLPDGVKAAVLLVKNGKIEAIHPCANDNEINDKLGQHSNVEYEDFGNLLLMPGIVDSHVHVNEPGRSEWEGFWTATKAAAAGGVTTIVDMPLNSIPPTTTVENLKTKAQVARTKAFVDIGFWGGVIPGNQKDLKPLVEAGVVGFKCFLCPSCIEEFPHVNEEDVEKALMELRNLNTVLAFHAECELKDAIDKSKDPSVYHTYLQTRPEIMEVNAITIITKLCKAYNVRCHIVHLSAAEALGLVREAKKNKLRLTAETCYHYLYLTAEKIPRNATQFKCCPPIRDESNREKLWTALKDGTLDMVVSDHSPCTADLKQVGDFLSAWGGISSVQFGLSVFWTEARKRGFSYQDVVKLLSSAPAELCGLGKKKGALRVGMDADFVVWDPETRIQIEESGILHKNKLTPYLGEKLYGKVFATVVRGNFVYKDGVFSSEPLGKLLLRDDFLYAI

SEQ ID NO: 64795 - DNA, 1653 bp, Magnaporthe grisea 70-15
  CDS (1)..(1653)
atgggatctcaagttgaaccactcgccgtactggtgtccacccgggcagtactcaccctcgaagatgacagtttggtcctctctccagcaaccatcaccatctccccaaactctggcaagatcatagccattgtcccaacaatactaccagcaagctctttcccatcgtcggtagcatatattgaccagtcgccaaaacttttactccctggattagtcgacgctcatgttcacctcaacgagcccggcaggacagaatgggaggggttcaacacgggcacgcgcgctgctgcatcagggggcgtcaccacggtcatcgacatgcccctgaacgccatcccgcccaccacgacggtggcaaactttcaagagaagctcaaggcaagcgtggggcagtgctgggtcgacgtgggcttctacggcggcgtgatcccgggcaactcccaagacctcctccccctggtggacgcgggcgtccgtgggttcaagggtttcctgatcgactcgggagtggatgagttccccgcggtgtcggcaaaggacattgcactggcaatgaaggcgctcaaggatgcgccgacgacgctcatgttccacgcagaaatgatccctccgatcgcggacagcgtcggcgactcggtgcagtcgtcggcaccaccgcttgcacccaagggcgcgctgacggcatacagcacgttcctcgagtcgcgccctcccgagttcgagacgtgcgccgtgagcgagatcctgagcatgacggacctcgcgcccgatctgcacctgcacattgtgcacctgtccgcgaccgagtgcatcccgctgctgcgcgaggcgcgcaggaggggcgtcaacgtcacggccgagacgtgcttccactacctgggcctggcgtccgacgacatcgaggacggcgacacgcggcacaagtgctgcccccccatccgcagcaagaccaaccaggacggcctctggagcgagctggtgcgggccgaccagcacgacggcgtcatcaagaccgtcgtcagcgaccactcgccctgcacgcccgagctcaagctcctgcccaaccgcctcgcgccgccgcccgcccgacccccgttcccgcaccactcggactcgggcatcgacgtgtcgttcagcccgaccgagaagaacaagaagctcgaggcgagcaggaggagcagcggcagcagcagcagcgacgcacccgcaccggtgcagcacacggcgcagggcgacttcttcgccgcctggggaggcatctcgtcggtcgggctggggctcccgatcctccacaccatcgcgacgcggcgggcgcggcagggcctcgaggcgccgaccatcgtcgacatggtccggctgacgagccaggccacggccaagcaggtcggcctggcgcaccgcaagggcgggctcaaggtcggcatggacgccgacgtgtgcgtgtttgacgacgcggccgagtgggcgctgcgcagcggcgacatgaggtggaagaacaagtgctcgccctgggaagggcacgagttcaagggcagggtgctggagacgtgggtcaggggccacaaggtgtttgagtacggtggcaagaatggaggcttcgtcgggggagagcccgtcggcgaggcgatcgttgagaagaggactgcatga

SEQ ID NO: 64796 - protein, 550 aa, Magnaporthe grisea 70-15
MGSQVEPLAVLVSTRAVLTLEDDSLVLSPATITISPNSGKIIAIVPTILPASSFPSSVAYIDQSPKLLLPGLVDAHVHLNEPGRTEWEGFNTGTRAAASGGVTTVIDMPLNAIPPTTTVANFQEKLKASVGQCWVDVGFYGGVIPGNSQDLLPLVDAGVRGFKGFLIDSGVDEFPAVSAKDIALAMKALKDAPTTLMFHAEMIPPIADSVGDSVQSSAPPLAPKGALTAYSTFLESRPPEFETCAVSEILSMTDLAPDLHLHIVHLSATECIPLLREARRRGVNVTAETCFHYLGLASDDIEDGDTRHKCCPPIRSKTNQDGLWSELVRADQHDGVIKTVVSDHSPCTPELKLLPNRLAPPPARPPFPHHSDSGIDVSFSPTEKNKKLEASRRSSGSSSSDAPAPVQHTAQGDFFAAWGGISSVGLGLPILHTIATRRARQGLEAPTIVDMVRLTSQATAKQVGLAHRKGGLKVGMDADVCVFDDAAEWALRSGDMRWKNKCSPWEGHEFKGRVLETWVRGHKVFEYGGKNGGFVGGEPVGEAIVEKRTA

SEQ ID NO: 64797 - DNA, 1593 bp, Gibberella zeae PH-1
  CDS (1)..(1593)
atggcatctcccagcaccgaacagtaccccgagggtcctctttcagtcctcgtatcatcccgagttgttgttactctccctgatgattcccttgttaccactcccgcctcagttgtcgttagcccagtcactggcaagatcgtgtcaatcatccccgaagtccttccctcatccagtttcccagccggcataaactatgttgaccacggttccaagcttctcattcctggtctggtcgatgctcatgttcacttgaacgagcctggtcgaactgagtgggagggattctggactggtacccgtgctgctgccagcggtggtgtcaccaccgtggttgacatgcctctcaacgccattcctcccactactacccttcacggcttcgaggagaagcttcgagcgagccagggccaatgctgggtcgatgttggtttctacggcggtgtcatccctggcaacgccaatgagctgctccctctcatcgaggctggtgttcgaggattcaagggattcttgatcgagtccggtgttgacgagttccctgctgtctcttctcaggatatcgccttggccatggaaaccctaaaggacagcaagacgactctcatgttccacgccgagatgattcctcctatcactcaatcggtcggcgacacagtccaggcctcagaagcacccctcgctccctccggtcaactcgacgcctacaagacattcctcgagtctcgacctcctgctttcgaaacatacgccgtcgaggagattctgagccaggcgcatattgctcctcaactccacctccacatcgttcacctctctgctacccagtgcatccctctcctcaaggccgctcgccaatctggaattaatatcactgccgaaacctgcttccactacctcggtttgactgccgaggagattgagaagggtgacactcgacacaagtgctgtccacctattcgagagggcaagaaccgagatggtctttgggaggagcttgttgctgaggactcgtgcatcagaactgtcgtgtcggatcactcaccttgcacaccccagctcaagctccttcctcagcacctagagacagcgcgacccgatttgccacacaacgactcaggtatcgtgattcccgcgcccgagatggaaaaccccgtcgccgaaggaaagggccgtggcgacttcttcgcagcctggggcggtatctcatccgtcggactgggtctccctatcttgcactccgcggccaagaagcgcgccgacttttccaagacgcccagcatcaccgatatcgtgcgtctctgctgtcaagccactgccgttcaagtcggtctggcgcaccgaaagggcgccatcaaggtcgggatggatgctgacatttgcgtgtttgacgataccgaggagtggacttttacccaaggcgacatgcgatggaagaaccgctgctcaccgtgggaaggccacgagttcacgggtcgtgtcaaggagacgtggctgcgaggtaacaaggtgtttgagctcggtgcgcccaacgctggattcgtggtcagcaagccggttggcgagcccatcacggagaagcgaacagtctaa

SEQ ID NO: 64798 - protein, 530 aa, Gibberella zeae PH-1
MASPSTEQYPEGPLSVLVSSRVVVTLPDDSLVTTPASVVVSPVTGKIVSIIPEVLPSSSFPAGINYVDHGSKLLIPGLVDAHVHLNEPGRTEWEGFWTGTRAAASGGVTTVVDMPLNAIPPTTTLHGFEEKLRASQGQCWVDVGFYGGVIPGNANELLPLIEAGVRGFKGFLIESGVDEFPAVSSQDIALAMETLKDSKTTLMFHAEMIPPITQSVGDTVQASEAPLAPSGQLDAYKTFLESRPPAFETYAVEEILSQAHIAPQLHLHIVHLSATQCIPLLKAARQSGINITAETCFHYLGLTAEEIEKGDTRHKCCPPIREGKNRDGLWEELVAEDSCIRTVVSDHSPCTPQLKLLPQHLETARPDLPHNDSGIVIPAPEMENPVAEGKGRGDFFAAWGGISSVGLGLPILHSAAKKRADFSKTPSITDIVRLCCQATAVQVGLAHRKGAIKVGMDADICVFDDTEEWTFTQGDMRWKNRCSPWEGHEFTGRVKETWLRGNKVFELGAPNAGFVVSKPVGEPITEKRTV

SEQ ID NO: 64799 - DNA, 1599 bp, Kluyveromyces lactis NRRL Y-1140
  CDS (1)..(1599)
atgatacaagccgtcgcttcaaaccatgttgcattccatgagggcgtagctcctggcacgattatctatagtgtagagaatggtaaaattttggatgtactacaaggaagggtagccaccgaaagagaactaataggctgtggatggaatttagaatcctatgacattgtttcgccgtacttaataatgcctggattggtggacgctcatgtacatttgaatgaacctggtagaactgaatgggaaggattcgagacggggaccaaagcagccgtcgctggtggtgttactactgtcatagacatgcctttgaatgccatcccaccaacaacgaatattaagaatttcaagctgaaattggatgcagcagagggccagctgtggtgcgacgttggattttggggcgggttagtaccggacaacttagccgatttgaaaccgctagtagaagctggcgtaagaggtttcaaagggtttcttatagattccggtgtcgatgagtttcctgcaattgataaacgatacatccaacaggcgttgcacttattgcaaggtgagaaaactatggttatgttccatgctgaattacagctaccagaacctggccacgaacacactattgtagactataatggtgaactggggactgacagtaatgccgagaacttgctttctgcaaccaagtcattatcatctgtcgaaccaaaatatggtcaagtttcggaattaatccaacatcacgaagatcatttggattcaataactacacctctcgaagccgcagaaaatgaaatatgcgaccattcattgtccaaaatagatccatgcgaatacaatagctttttattatccagaccggatcattttgaaacagacgcagtagcattaattgtcagttgtttacgcaacagcatccttcagaatgggatcgaaaagtcaccgttcgttcatatagtacatctagcatcgatggaagctttaccaatcttgaaacgggctaaggatatgggacttccaatcaccgccgaaacttgcttccattatctttcattggcagctgaaagggttcctaaatccaagactttttacaaatgttgtccaccgatacgtagtgagaagaacagaaaggaactttggagagccttaagagaaggtctaatcacttctgtagtaagtgaccattctccatgtataccggagctaaaagacctcgcaaaaggtgatttttttagtgcatggggaggaattgcatccgtcgggttgggactaccattactatacactaacggtgcttccatcgctgaaatcattcaatggtgttgcgagaacaccagtaagcaagttggtcttgatcacaggaagggtttcctaagaactggatacgacgcagattttgttatcttcgacatcaatacctatcagactgtcgacaacgataaagtttatttcaaaaacaaactgacagcctatgatgggttcaaactgaaaggtttagtgagaaacacctatgttagaggaaaattggcttttgaacttgacggcatgggacataataaaaaccctcccggccagacaattcttgaacgcagaagaacatga

SEQ ID NO: 64800 - protein, 532 aa, Kluyveromyces lactis NRRL Y-1140
MIQAVASNHVAFHEGVAPGTIIYSVENGKILDVLQGRVATERELIGCGWNLESYDIVSPYLIMPGLVDAHVHLNEPGRTEWEGFETGTKAAVAGGVTTVIDMPLNAIPPTTNIKNFKLKLDAAEGQLWCDVGFWGGLVPDNLADLKPLVEAGVRGFKGFLIDSGVDEFPAIDKRYIQQALHLLQGEKTMVMFHAELQLPEPGHEHTIVDYNGELGTDSNAENLLSATKSLSSVEPKYGQVSELIQHHEDHLDSITTPLEAAENEICDHSLSKIDPCEYNSFLLSRPDHFETDAVALIVSCLRNSILQNGIEKSPFVHIVHLASMEALPILKRAKDMGLPITAETCFHYLSLAAERVPKSKTFYKCCPPIRSEKNRKELWRALREGLITSVVSDHSPCIPELKDLAKGDFFSAWGGIASVGLGLPLLYTNGASIAEIIQWCCENTSKQVGLDHRKGFLRTGYDADFVIFDINTYQTVDNDKVYFKNKLTAYDGFKLKGLVRNTYVRGKLAFELDGMGHNKNPPGQTILERRRT

SEQ ID NO: 64801 - DNA, 1632 bp, Kluyveromyces lactis NRRL Y-1140
  CDS (1)..(1632)
atgagtacatatgatcttttgattaaaaacggtacggtagtcaccgcctctgacatctacccagctgatattgctatcagaaacggtaaagtcattctagttggccaagatttggatacggctctagctgaagaagtaattgatgcagaaggtgcatatgtgacccctggtgggatcgatgcccatgtccatgtagatgaaccattgaagctcttgggaccagttgcagacactatggaagaagctactatgtcagctgtagctggtggtacaaccacagtaattactttcgccactcaagataaaacgaagactggacctgaagcgctttccgactccgtgaaagcggatatcgagctctatgagacgcagaaattgtactgtgactatgctctgcatttaattctatttcacattgaaaaaccatctatcagtggaaccaaactacttgattcacaacttgcaagtatgtatgaaaactatggtgtcacctcggtcaaagtctttatgacataccctgggctacaaattagtgattatgatattttaactacgatgcaagccaccagaaagaatggtttcacaacaatggttcatgcagagaacggagatatggttaaatggatgattgagcaacttgaagagcaaaatatgacctccccttactttcatggtgtctctagaccaaccatagttgaaggagaagctacaaatagagccattgtgctagccaaaatgatggacaccccaatcctgttcgttcatgtatcatcgccggaggccattgatacaattaggtcagcgcaaacaaaaggtctcaaagtatacgccgagacatgtccacagtatgcccttctttctgatattgataccaaatgtcaccacgaattagagcagcagcagagtacttgttcggatgcaaataaatcagaaccaagggtaaaactaactgcaaaggaaattgatgataaatttataggagcaaaagcaatatgttctcctccaatccgtccggagcactgtcaagagtcagtctggaaagccatgaacaatggaacatttacaattgttggatctgatcattgtgcctataattactacgacaaaacgagcggtaaattggacgcatttaaagacaataagaacggagagttcaagtatattcccaatggtatgccgggagtttgtactagaatgcctttgctatttgattatggcgttcttcaagggaaacttgctaacatgaccaagttcgtggagcttcagtgtactaatcccgctaaactatatggactgtatccgaaaaaaggttccattcttcctggcgtcagtgatgctgatttagtggtttggtatccaccaaattacaaaggtggaaagaaacctaaaactgtaacaaatgacttgttagttcatggatgtgattacacaccatatgaagggtttgaaataaataactggccaaggttcaccattgttaaaggcagcatagtctacaaagaaggcgaaataatcaaagaaaatgcaaagggcacttatgtaaaaagaggaaagagtcaactctgtacagctaatgatgaatgggtaacggagtggagaccacaatacctaaatggtcaaaagagtggctaa

SEQ ID NO: 64802 - protein, 543 aa, Kluyveromyces lactis NRRL Y-1140
MSTYDLLIKNGTVVTASDIYPADIAIRNGKVILVGQDLDTALAEEVIDAEGAYVTPGGIDAHVHVDEPLKLLGPVADTMEEATMSAVAGGTTTVITFATQDKTKTGPEALSDSVKADIELYETQKLYCDYALHLILFHIEKPSISGTKLLDSQLASMYENYGVTSVKVFMTYPGLQISDYDILTTMQATRKNGFTTMVHAENGDMVKWMIEQLEEQNMTSPYFHGVSRPTIVEGEATNRAIVLAKMMDTPILFVHVSSPEAIDTIRSAQTKGLKVYAETCPQYALLSDIDTKCHHELEQQQSTCSDANKSEPRVKLTAKEIDDKFIGAKAICSPPIRPEHCQESVWKAMNNGTFTIVGSDHCAYNYYDKTSGKLDAFKDNKNGEFKYIPNGMPGVCTRMPLLFDYGVLQGKLANMTKFVELQCTNPAKLYGLYPKKGSILPGVSDADLVVWYPPNYKGGKKPKTVTNDLLVHGCDYTPYEGFEINNWPRFTIVKGSIVYKEGEIIKENAKGTYVKRGKSQLCTANDEWVTEWRPQYLNGQKSG

SEQ ID NO: 64803 - DNA, 1374 bp, Yarrowia lipolytica CLIB122
  CDS (1)..(1374)
atgaaagctattgccggccgagctcttctggagggcgcctcggaaccaaccgaggtgaccattctgtacgacaccaagatccacaaaatccacaagggactcatcaacaatggagatttggatgtcgacgatttcatgtccgttccccctgagcaagtgattcttcctggcctggtcgacgcgcatgtgcatctcaatgagcctggacgaaccgaatgggagggattcgccactggcaccaaggccgcggctgctggaggagtcaccaccgtcattgatatgcctcttaacgccattcctcccactaccaccgtggccaactttgacacaaagctagcagctgcgcgtggccagtgctgggtcgatgtgggattctggggaggtgccatcccaggtaactccgaggatctcgttcctctcatcgaaaagggagttcgaggcttcaagtgcttcctcattgagtctggggtggatgagttcccctgcctggaggttccggatgtcaagaaggccctcaaagccattgagggacaccccaccatattcatgttccacgccgagatggctaatggagagtctacagaccttcctcccaatgcagaccccaagtcttacatgtccttcttgcactctcgaccggacaagctggaattgaccgccatcaactcaatcattgaggcctccaaatcctcgccagacgtgaagcttcacattgttcatctggctactgccgaggctgttcccatcatcaaaaaggccaaggaggagggtgttcctctgtctgtggaaacctgtttccactacctccatttcgctgccgagtccatccccgagaagtccacccagcacaagtgctgcccccctattcggacggaagacaacagatccctgctgtggaaggccctagaagacggtgtggtgacctcggtcgtctcagaccactctccctgcacccccaatctcaaggacttgcagaccggggactttttcaaggcttggggtggaattgcctccgtcggactgggcctacccattctgtggaccactgctcgaaaggacggccgaaatgtgactgttgcagacatttccaagtggtgcagttacaacactgccgagcaggtgggtctgctcaagtccaagggttccatcaaggagggtaaggatgctgacttctgcatctttgatcccgaggccaaggtcaagatcaccaccgacaagctgcatttcaagaacaagatctcaccctacaaggatggcactttggtgggagaggtgcgacgaaccattgttcggggccaggtcgtttatgacaccgaggagggcatgtctctcaagcctcttggctctctgcttcttgagcctcgaactgagtga

SEQ ID NO: 64804 - protein, 457 aa, Yarrowia lipolytica CLIB122
MKAIAGRALLEGASEPTEVTILYDTKIHKIHKGLINNGDLDVDDFMSVPPEQVILPGLVDAHVHLNEPGRTEWEGFATGTKAAAAGGVTTVIDMPLNAIPPTTTVANFDTKLAAARGQCWVDVGFWGGAIPGNSEDLVPLIEKGVRGFKCFLIESGVDEFPCLEVPDVKKALKAIEGHPTIFMFHAEMANGESTDLPPNADPKSYMSFLHSRPDKLELTAINSIIEASKSSPDVKLHIVHLATAEAVPIIKKAKEEGVPLSVETCFHYLHFAAESIPEKSTQHKCCPPIRTEDNRSLLWKALEDGVVTSVVSDHSPCTPNLKDLQTGDFFKAWGGIASVGLGLPILWTTARKDGRNVTVADISKWCSYNTAEQVGLLKSKGSIKEGKDADFCIFDPEAKVKITTDKLHFKNKISPYKDGTLVGEVRRTIVRGQVVYDTEEGMSLKPLGSLLLEPRTE

SEQ ID NO: 64805 - DNA, 1521 bp, Aspergillus nidulans FGSC A4
  CDS (1)..(1521)
atgaatggcgagatcccgtccattgccgtcttcacctcgtcgcgagccgtcatcggcggccgtctgacctccgccacgattgtcgtctcgcgtactactggcaaggtcactgctgttttcgactcggtcatccccgcctccgactttcctgacggcactccctacacggacttctccccgtacgtattgcttcctggcctggtagatgctcatgtccacctcaatgaacccggccgcaccgaatgggagggcttctatacaggcacccaggccgctgcctttggcggtgtcaccaccgtcatcgacatgcctttgaacgccattcctcccacgacaactgtagagaacttcaagttgaagctcaaggccgccgagggcaagtgttgggttgatgtcggcttttacggcggcatcatccccggcaacgcaggcgagctcaaggctctagtccgcgaaggtgttcgtggcttcaaaggattccttatcgacagtggggttgacgaattccccgccgtctcatcagaagacgtccgcaaggccatggccgaactggccgatgagccaaccacgctcatgttccacgccgagatggttccccccaagacaccgtcagaactccccgaagtcatgcctgagggtgctccagaggcctactcgactttcctggcctctcgtccctcagaatacgagctttgtgcagtagaggagatcctttcgttgtcccacctagctcccaagctccccttgcacatcgtacatctatctgccatggaggccatcccactcctgcgcaaggcccgtgccgagggtgttcccattacagccgaaacctgctaccattacctctcccttgcagccgaggagattcgtgatggcgacacccggcacaaatgctgcccgcccatccgttccaagtccaaccaagacgctctctgggccgaacttgaccgccacgccgaggatggcgtcatcaagaccattgtctccgaccattccccttgcacaccagacctcaagcttctcccctcccatatcccgggcaactgcagccatggctcgtcaaagcatgccaacacaacacctgtcgttaacgaaggcagcttcctctccgcttggggcggcatctcctccgtcggcctgggcctgcccatcctctggaccgaactctcccgccgcaagggcctgacttcctcaccagacgacacaacaaccaaacaagctctccaggatatcgtccatctttgctgcgccaacaccgcggcccaggttgggctgcataaatccaagggcgaccttgtccccggatacgacgcggacttttgtgtctttgacgacacagcggagtgggaagttgagccgagtaccatgctcttccgtaacaaatgctcgccgtaccagggacggacgatgcgcgggatggtccgggaaacgtggctgcgcggtgagaagatcttcaacagggatgacggattcactgtcaaggcgccttccgggtcactgctcctggagaaaagggtttga

SEQ ID NO: 64806 - protein, 506 aa, Aspergillus nidulans FGSC A4
MNGEIPSIAVFTSSRAVIGGRLTSATIVVSRTTGKVTAVFDSVIPASDFPDGTPYTDFSPYVLLPGLVDAHVHLNEPGRTEWEGFYTGTQAAAFGGVTTVIDMPLNAIPPTTTVENFKLKLKAAEGKCWVDVGFYGGIIPGNAGELKALVREGVRGFKGFLIDSGVDEFPAVSSEDVRKAMAELADEPTTLMFHAEMVPPKTPSELPEVMPEGAPEAYSTFLASRPSEYELCAVEEILSLSHLAPKLPLHIVHLSAMEAIPLLRKARAEGVPITAETCYHYLSLAAEEIRDGDTRHKCCPPIRSKSNQDALWAELDRHAEDGVIKTIVSDHSPCTPDLKLLPSHIPGNCSHGSSKHANTTPVVNEGSFLSAWGGISSVGLGLPILWTELSRRKGLTSSPDDTTTKQALQDIVHLCCANTAAQVGLHKSKGDLVPGYDADFCVFDDTAEWEVEPSTMLFRNKCSPYQGRTMRGMVRETWLRGEKIFNRDDGFTVKAPSGSLLLEKRV

SEQ ID NO: 64807 - DNA, 1761 bp, Candida albicans SC5314
  CDS (1)..(1761): transl_table=12
atgtcacgagcattatcatcgactagagtgttggttaatgacacacttttaccagccaccatcattttttcggtagagtcaggcacgattttagagattgttgatagggttttaccgcccaatgatccgattttggcacgctataatgtttttcctatagactatagaaatgttacgccagcagtgattatgcctgggctagttgatgcacatgtccacttgaacgagcccggtagaactgaatgggaagggtttgaaactgggaccaaagctgctgcatcgggaggtgtcactactgtgattgatatgccgttgaatgccattcctcctaccactactgttgccaactttaacttgaaaattaatgccgccaagggccagacgtgggttgatgtggggttttggggcgggttgatccctgataatttgtacgatttgaaaccgttgattcgaatgggtgtgcgtgggtttaaagcatttttgatcgagtctggggtcgatgagtttcctgctattacgccagcccatattttggcggccatgaaggaggttaaagacgaaaagacgatgttgatgttccatgctgaaatgcagccgcgggaaaaagaggagtttagcgactcggcagatacgttaacggccgagattgacgactttgatttgggaatgtcggccagctttattgatagggcacccacaccagtagtcaggttattgagcaacgacccaggggaccaccatcacgaacatgagaattgtcggttaccacacaaccatgctgggtctatcaacccgtcggtcttgtcagataaacaagccaaggcgttggcacacacgccgatcttggcaggggccgagcctacttttggtaagaatgccaggaaagtcaacacgcaccatctgcgctcatatagctacaccgaagaagacaccaaagtcaacaccccgttattgttggcgcaacaggagaacgccgagttggccaatatcgaccccactgcgtatgcaacgtttttggcatcgagacccgataattttgaaaccactgctattgctgagattataaactgctcgacactattgccaacggtgccactccatattgtgcacttggcgacccacgaagctgtgccattgttgcgtgctgccaaagccaaggggttgccggtaactgctgaaacttgtttccattacttgtcgttgtgtgctgaaagaattgggagctgttcgacgcatttcaagtgttgtccaccgattagaactgacgataatcgtaaattgttgtggaaagcacttcgaaacgatgtgataaccactgttgtttctgaccattctccgtgtacgccagatttgaaaggtatggaaaagggcgatttctttgaagcctggggtgggatttcgtctgttgggtttggattgccgatattgtacactgaaggccttaaattggacccgcccatcagcttggcggaaattaacaaatggtgttcatggaatactgctaagcaagtagggttgagtcattgtaagggcaccattagggtggggtacgatgctgatttgttgattttcgatactgacgccaagtatgtagtggaaaacaaggagacgtatttcaaaaacaagttgacggcgtatgatgggatggagtttagggggcgggtattggagacgttggttagaggtaatacggtatttgctatgggaagagggttttcgggacccaaaggtaaattaattttagagccgagatttgagtag

SEQ ID NO: 64808 - protein, 586 aa, Candida albicans SC5314
MSRALSSTRVLVNDTLLPATIIFSVESGTILEIVDRVLPPNDPILARYNVFPIDYRNVTPAVIMPGLVDAHVHLNEPGRTEWEGFETGTKAAASGGVTTVIDMPLNAIPPTTTVANFNLKINAAKGQTWVDVGFWGGLIPDNLYDLKPLIRMGVRGFKAFLIESGVDEFPAITPAHILAAMKEVKDEKTMLMFHAEMQPREKEEFSDSADTLTAEIDDFDLGMSASFIDRAPTPVVRLLSNDPGDHHHEHENCRLPHNHAGSINPSVLSDKQAKALAHTPILAGAEPTFGKNARKVNTHHSRSYSYTEEDTKVNTPLLLAQQENAELANIDPTAYATFLASRPDNFETTAIAEIINCSTLLPTVPLHIVHLATHEAVPLLRAAKAKGLPVTAETCFHYLSLCAERIGSCSTHFKCCPPIRTDDNRKLLWKALRNDVITTVVSDHSPCTPDLKGMEKGDFFEAWGGISSVGFGLPILYTEGLKLDPPISLAEINKWCSWNTAKQVGLSHCKGTIRVGYDADLLIFDTDAKYVVENKETYFKNKLTAYDGMEFRGRVLETLVRGNTVFAMGRGFSGPKGKLILEPRFE

SEQ ID NO: 64809 - DNA, 1365 bp, Bacillus licheniformis ATCC 14580
  CDS (1)..(1365): transl_table=11
atgaattttgattcaattatcaaaaatggattagtcattctagaaaatggtgaacaagaagtcgaagtagggatcaaagatggcaaaatcgcagcaatcggtcaggatttgggtacaagtgcaaaaattatcgatgcaaaaggatctattgtatctccaggtatgattgatgcacatgtgcatatcacagagccgggcggcggctatcgtgatgaatgggagggctatgacacaggaacacgtgccgctgcaaaaggcggtgtaacgacgtttattgaaatgccattaaatcaagtgccagcaacggtagatgaggaatctattcaagaaaaatttaaagccggaaaaggaaaattatcagtagacgttgcgagttacggcggtttagtaccatttgacttagatgggggtattcaagaattagatagcaatggtgttgttgcatataaatgttttttagcaacatgtggcgaccgttctatagaaggagatttcatgaacgtagatgactattccctctacgaaggcatgaaacaaattgcgaagacaggcaaaatattatctatacacgctgaaaatgccgcaattaccgataagttaggggaaatagcatctaaaaatggggaaacttcattgcgtgcttatgtagattctcgacccgtatttactgaagtagaaccgattagaaaaattattctatttgcgaaagaaacgggatgtcgtgtacacatcgttcatatagcttgtgaagagggcgtagacgaaattgtcaaagcacaacaggaaggggtcgatattacatgcgaaacatgtacacactatttatatttctataaagaagaactagatcatatcggaccggttgtaaaatgctctccgccaatccgtgagcaatcacgcttagaaggcatgtggaatcgggtattaaacggagatatttcattcgtaacatcagaccattcaccatgtaccccggacttaaaagctacggataatgcatttgaagcttggggaggtatcgcaggtttacaaaataatgtcgatgtattatttgatgaaggtgtgcaaaaacgtaatatgccattatccaaatttgcagccattattgctacaaaccctgcgaaacgttttaatctcgcatcaaaaggcagtattgcagtagggaaagatgcggatttcgtatttattaagaaagatgcaccttatgaattaaaggctgaggacttagcatatcgacacaaaattagtccgtatattggccgcaaaattggtgctcaggtagtgaaaacaatccttcgcggtgtcgaaatctatgataaagaaaaaggaatttcaaatgaaaaagtaggaagatttattccttaa

SEQ ID NO: 64810 - protein, 454 aa, Bacillus licheniformis ATCC 14580
MNFDSIIKNGLVILENGEQEVEVGIKDGKIAAIGQDLGTSAKIIDAKGSIVSPGMIDAHVHITEPGGGYRDEWEGYDTGTRAAAKGGVTTFIEMPLNQVPATVDEESIQEKFKAGKGKLSVDVASYGGLVPFDLDGGIQELDSNGVVAYKCFLATCGDRSIEGDFMNVDDYSLYEGMKQIAKTGKILSIHAENAAITDKLGEIASKNGETSLRAYVDSRPVFTEVEPIRKIILFAKETGCRVHIVHIACEEGVDEIVKAQQEGVDITCETCTHYLYFYKEELDHIGPVVKCSPPIREQSRLEGMWNRVLNGDISFVTSDHSPCTPDLKATDNAFEAWGGIAGLQNNVDVLFDEGVQKRNMPLSKFAAIIATNPAKRFNLASKGSIAVGKDADFVFIKKDAPYELKAEDLAYRHKISPYIGRKIGAQVVKTILRGVEIYDKEKGISNEKVGRFIP

SEQ ID NO: 64811 - DNA, 1347 bp, Bacillus clausii KSM-K16
  CDS (1)..(1347): transl_table=11
atgctcgatttgtgcattactgggggacgagttgtgttaccatcgggagtagaggagaccgatgtcggcattcaagctggcaaaattgcccgaatcggtccaattaataaaaaagaagcgcgttgtataatgaacgcaaacgggcaatatgtttttccaggagctgttgatacgcatgtccatttttctgaaccaggaagaaccgagtgggaaggatttttcacaggcagccgttcattagctgctggcggtacaacgacttatgtagaaatgccattgaacgctctgccagccacaaccaaccgcgccaatttgcaacgaaagcttgaggcggccaaagggcaaaactatgtagactacagtttttatggcgggcttgtgccgaccaatctccacgagttggcagacttgtccgccagcggcgttgtcgcctttaagtgttttctctctccatgtggatcggatattccaggggactttcgcaatgtcgatttgaatggccttcgcgcaggcatgcgcttattagcagaaaaagggcagctcctttgtgtccatgctgaagatccaagcatgatcagtcagctcgaggcaaaactccttagcccagttggcgctgacgcttatgtcgcttcgcggccggttgaagcagaagtaaaagcggtgtgcgacacgcttgccgcggcgcgggaaacgggttgccgaatccactttgtccacatcagttccgccgcagcaattgaagcaattgagcgggccaaagaggaaggcgtcgatgttacagtagaatcatgtccccattatttcttactgtctgctgaggagttagcggagcttggcccactagcaaaatgccaaccgccacttcgcccgaaacaagaacaggcgaaattgtgggcttgtttgcttgatggtcaaatcgactggcttgcttctgaccactcgccgtgtacgcctgacttgaaagacggcgatttccttacagcttggggcggcatctctggctgccaaaacaacatcgatatcatgtttgatgcggcagtcaagcggcgcggcatgccacctgagcaactggctcgtctcattgcgaccaatccggctaaacggatgaacttgcgagaaaaaggggaaattgccattgggaaagacgctgattttgcgtttgtggatgatcggcaaagttacacgctcacaaaagagcagctttactataaaaataagcatagcccgtatgttggccggacaattggctgcaaagtgaggcgcgtgcttcttcgtgggcaaacgatttatacagaggaaaaaggcatcattggaaaaccgagcggcgagctgctccatattcattaa

SEQ ID NO: 64812 - protein, 448 aa, Bacillus clausii KSM-K16
MLDLCITGGRVVLPSGVEETDVGIQAGKIARIGPINKKEARCIMNANGQYVFPGAVDTHVHFSEPGRTEWEGFFTGSRSLAAGGTTTYVEMPLNALPATTNRANLQRKLEAAKGQNYVDYSFYGGLVPTNLHELADLSASGVVAFKCFLSPCGSDIPGDFRNVDLNGLRAGMRLLAEKGQLLCVHAEDPSMISQLEAKLLSPVGADAYVASRPVEAEVKAVCDTLAAARETGCRIHFVHISSAAAIEAIERAKEEGVDVTVESCPHYFLLSAEELAELGPLAKCQPPLRPKQEQAKLWACLLDGQIDWLASDHSPCTPDLKDGDFLTAWGGISGCQNNIDIMFDAAVKRRGMPPEQLARLIATNPAKRMNLREKGEIAIGKDADFAFVDDRQSYTLTKEQLYYKNKHSPYVGRTIGCKVRRVLLRGQTIYTEEKGIIGKPSGELLHIH

SEQ ID NO: 64813 - DNA, 1422 bp, Colwellia psychrerythraea 34H
  CDS (1)..(1422): transl_table=11
atgagtataagtattctcaacgttcacgtttatcaaattttaaggagaagcaaggtgtctcattttgccctgcaaagtaaaaaagttattgttcatgctggtgatcagagcgaaatgatcgctgcctgcatagaaataaaaggtcaactaatccataacattcacccttatggacaagcccttgattgcccaataaccgatttaggtgaacaggtacttatgccaggtttggttgactctcatgttcatattaatgagccaggtcgcaccgaatgggaaggttttaataccgcaactcaagcagcagcggcaggcggtatcactaccttagttgatatgccactgaactgtatcccagttacaacaaccaaagctgcttttgaagaaaagctagcgtcagtacatgacaaactttgggtagattgtggcttttggggtggcgttatccctgacaatattgatgaacttgatgatttactaactgcaggtgttttaggcgttaaatccttcttaatcgactcaggcattgaagaattccctaatgttgctgcaaaagacattcgtgctgctatgcctattttagcgaaacacgacgtgccatatttgattcatgctgaactagattgcggcagttttgacgacgttaaaattaccgataaatacaatagttttttagaatcacggcctaaaagctgggaaaacaatgctatctcgttaatggtagacatggcgcgtgaatctaaagcagccggtgataactgtaaaattcacattgtgcatttatcaagtgatgaagcgctcgataccattgcaaaagcaaaagctgaaggcttgcgttttaccgcagaaacctgtccacattatttaactattgcctcagaaaacattcctgatggcaaaacgttatttaaatgttgtccacctattcgcgaaaacaaaaacagagagcagttatggcaagcggtaactgatggtcgcattagttttatcgtctcagatcactctccgtgtacaccgcaattaaaacacatagataccggtgacattgaaaaagcatggggcggtatttcagcactgcaatttggtttgccgcttatttggaccgaagcaaaaaaccgtgatttcactctggtcgatttagcccgtttgatgtcacatgaaaccgccaagtttgctggtttagacaaaataaagggccaaatatctgttggacatcatgccgatctcatggtttttgatgacaccgccagttttatcatcagcactgacatgatcaaacataaacataaaatcaccccttatgtgggacgcaaagttgatggccaaataatgcaaacatttgttcgtggtcagcaagtttactgtaatgaccaatttatcagttcgcctattggcagaccgttacttaaaggccagctgtaa

SEQ ID NO: 64814 - protein, 473 aa, Colwellia psychrerythraea 34H
MSISILNVHVYQILRRSKVSHFALQSKKVIVHAGDQSEMIAACIEIKGQLIHNIHPYGQALDCPITDLGEQVLMPGLVDSHVHINEPGRTEWEGFNTATQAAAAGGITTLVDMPLNCIPVTTTKAAFEEKLASVHDKLWVDCGFWGGVIPDNIDELDDLLTAGVLGVKSFLIDSGIEEFPNVAAKDIRAAMPILAKHDVPYLIHAELDCGSFDDVKITDKYNSFLESRPKSWENNAISLMVDMARESKAAGDNCKIHIVHLSSDEALDTIAKAKAEGLRFTAETCPHYLTIASENIPDGKTLFKCCPPIRENKNREQLWQAVTDGRISFIVSDHSPCTPQLKHIDTGDIEKAWGGISALQFGLPLIWTEAKNRDFTLVDLARLMSHETAKFAGLDKIKGQISVGHHADLMVFDDTASFIISTDMIKHKHKITPYVGRKVDGQIMQTFVRGQQVYCNDQFISSPIGRPLLKGQL

SEQ ID NO: 64815 - DNA, 1422 bp, Ralstonia eutropha JMP134
  CDS (1)..(1422): transl_table=11
atgcccgcagacaacaacctagacctggtgatccgcaatgccgacgtggtcaccgcttcggaccgcttccagtgcgatatcggcgtgcgcgacggccgcatcgtcgcgctcggccacggcttgccgcaaggcaaccgtgaagtcgatgccaccggcctgctcgcgctgcccggcggcgtcgacggccactgccacctggaccagcccatgcccgacggcatgcgcatggccgataatttcttcaccggtacgcgcgcggctgtgtgcggcggcaccaccacggtgatcccgttcgccgcgcaggaaaagggcgcttcgctcaaggccgcggtggcggactaccatcgccgcgccgaaggccgcgccgtgatcgactacgcgttccacctgatcgtggccgacccaacccccactgtgctgcaggacgaactgccctcgctgatccgcaagggctatacctcgttcaaggtctacatgacctatgacgacctcaagctgtcggatcgcgaaatgctggaagtgctggacgtcgcgcgcgaacacaaggcgctcgtgatggtccacgcggaaaactcggactgcatctcatggctgaccgacaagctgaccggcgaagggcgcatcgccccgcgtttccacgggctcgcgcgtcccgctccggtcgagcgcgaggccacgcaccgcgccatcacgttcgcggaactcgtcgacgtgccaatcctgatcgtgcatgtgtcgggcaaggaggcgatcgagcagattcgctgggcgcagggcaggggactgaagatcctggccgagacctgcccgcagtacctgtacctcaccgcggacgacatgggcctgcccggcgacgatggctatgaaggcgccaagtgcgtgtgcagccctccgccgcgcgatccggagaaccaggccgccgtgtggcgtgcgctggtgaacggcgtattcagcgtgttctcgtcggaccatgcgccgttcaattacgacgatccggaaggcaagaagcttggcggtagcaccgagcattcgttcgatcacattcccaacggcgtgccgggcatcgaaacgcgcctgccgctgctgttcgacggcgtcgctcagggcaagctgtcgctgcaccagttcgtcgagctgacctcataccgcccggccaagatctacggcctgtatccgcgcaagggcaccattgccgtcggcgccgatgcagacatcgtgctgtgggatccggcgcgcaaggtgcgcatcaccaacagcgcgctgcaccatgctgtcgactacacgccgtatgaaggcctcgacgtcaccggctggcccgtgacctgcttctcgcgcggcgacatgctggtgcgcgatggcgagtacctggagcccgcagccggacgcggcaggttcctcgaagccggccaacccgaggtctga

SEQ ID NO: 64816 - protein, 473 aa, Ralstonia eutropha JMP134
MPADNNLDLVIRNADVVTASDRFQCDIGVRDGRIVALGHGLPQGNREVDATGLLALPGGVDGHCHLDQPMPDGMRMADNFFTGTRAAVCGGTTTVIPFAAQEKGASLKAAVADYHRRAEGRAVIDYAFHLIVADPTPTVLQDELPSLIRKGYTSFKVYMTYDDLKLSDREMLEVLDVAREHKALVMVHAENSDCISWLTDKLTGEGRIAPRFHGLARPAPVEREATHRAITFAELVDVPILIVHVSGKEAIEQIRWAQGRGLKILAETCPQYLYLTADDMGLPGDDGYEGAKCVCSPPPRDPENQAAVWRALVNGVFSVFSSDHAPFNYDDPEGKKLGGSTEHSFDHIPNGVPGIETRLPLLFDGVAQGKLSLHQFVELTSYRPAKIYGLYPRKGTIAVGADADIVLWDPARKVRITNSALHHAVDYTPYEGLDVTGWPVTCFSRGDMLVRDGEYLEPAAGRGRFLEAGQPEV

SEQ ID NO: 64817 - DNA, 1416 bp, Carboxydothermus hydrogenoformans Z-2901
  CDS (1)..(1416): transl_table=11
atgggttttgatttggttttaaaaaatgccaaaatccctcaaggcaaccggactgtggacacccacatcctggtgaaggacggtaaaattgccggttttaccaatgaccttaccgggattgaggttgccgaagtaattgatgctgaaaataaccttgtattgcctgggtgcattgactcccacactcactttaatgatcccggctttacccaccgggagaattttgctaccggtactcaagctgctgcggctggtggggttacaaccatcattgatatgccctgctgtagcataccgtcggtaaggagtgtggataaccttgaagcaaagttagaagtaatcaaggacaaagcgtatgtagactatgccatgtggggtggggctaccggcgaagatgtgcggaacaatgccctctacaacattaaagaacaagccgattatggagtagtagcttttaaagtttacatgactccatcagttccaacttatccgccggcaagcgatgcggagatgctggaaattttccgggaagtagctaagaccggactacccgttggcattcacgcggaaaacttggacctttgcacttatcacgttaacaaattaagaaatgaaggccgttttgatgggccggcctgggcggaagcacggttggaacttgcggaaaaagttgctattcaaatggccattagttttgcggaagaaaccggtgcccggttacatatcgtccacatgagcaccggcatcggtggtgtgcttgtaggagaagctaagaaacggggtcttgatgtaaccgccgaaacttgtccccactacctggtcttaaatgcctatgaatcaatgaccaaatggcgtcaatttgccaagattgcaccgcctttaagaactaccagagacaatgaaatgctctgggaacaattagctgatgggcgggtagactttattgctactgaccatgcaccttatgaaattgctaccgaaaaagaagctgaaggcatggacatctggacggcgttcccggggattccgggggtagaaaccatggtaccgattattatcagcgaaggttataataaaggacgtctttccttatcccggttagttgatgttctttcccggaacgcagcaattcattacggtctgtatccgaagaaaggtgccctggaaattggctccgatgcagactttaccgtaattgaccttgactatgaatggaccattgataaagataagatgtacaccatggccaagtacacgccgtttcatggtatgaagcttaaaggcaaacctgttaagaccatcgttcgcggtaaactcgtttatgacgataagaacggtattgttggtaagccaggatacggtcaattcgtaaagcggcaaacgatttctaaattagaacgctggattaagttttaa

SEQ ID NO: 64818 - protein, 471 aa, Carboxydothermus hydrogenoformans Z-2901
MGFDLVLKNAKIPQGNRTVDTHILVKDGKIAGFTNDLTGIEVAEVIDAENNLVLPGCIDSHTHFNDPGFTHRENFATGTQAAAAGGVTTIIDMPCCSIPSVRSVDNLEAKLEVIKDKAYVDYAMWGGATGEDVRNNALYNIKEQADYGVVAFKVYMTPSVPTYPPASDAEMLEIFREVAKTGLPVGIHAENLDLCTYHVNKLRNEGRFDGPAWAEARLELAEKVAIQMAISFAEETGARLHIVHMSTGIGGVLVGEAKKRGLDVTAETCPHYLVLNAYESMTKWRQFAKIAPPLRTTRDNEMLWEQLADGRVDFIATDHAPYEIATEKEAEGMDIWTAFPGIPGVETMVPIIISEGYNKGRLSLSRLVDVLSRNAAIHYGLYPKKGALEIGSDADFTVIDLDYEWTIDKDKMYTMAKYTPFHGMKLKGKPVKTIVRGKLVYDDKNGIVGKPGYGQFVKRQTISKLERWIKF

SEQ ID NO: 64819 - DNA, 1362 bp, Frankia sp. CcI3
  CDS (1)..(1362): transl_table=11
atgaacgagcccaccgcggacgttctgccggagcggccacaggcgctacggtcacggcgagtcgtgctgcccgggggcgagcgtccggcagccgtgcacgtcgcggacggccggatcgccgcgatcaccgccgcggacgagatccctcccgggaccctggtcacggacctcggcgagctggctctgcttcccggcgtggtcgactcccacgtgcacatcaacgaaccggggcggaccgagtgggaggggttcgcgaccgcgacccgggccgccgcggccggtggtgtcaccacgatcatcgacatgccgctgaattccgttccgccgacgacctcgctcgccgccctggccgccaaacgtgcggtggcggccggccaggtcgccgtcgacgtcggcttctggggcggcatcatcggcgccgacgcccgcaacctcgatgatctggccgccctgcacggcgccggggtcttcggattcaaggccttcctggccccgtcgggggtcgaggagttcccgcacgtctcgatggacgtcctcggggccgccgcccggcgcaccgcccggatgggggccctcaccgtcgtgcacgccgaggcgccctccgttctcgccctggcacctcccaccgtggggcgggccttcgccagctggttggcgtcgcgcccgccggccgcggagaccgaggccgtggccgcgctggcggcgctgtccgccgccagcggtgcccgcctgcacgtgctgcatctggcggcggccgatgccctcgacgacgtgctcgcggcgcgggacgcggggttgccgatgacggtggagacgtgcccgcactacctgaccttcacggccgaggaggtccccgacggagctaccgtcttcaagtgcgcacctcccatccgggacagcaggaatctggaccggttgtgggacggggtggcccagggcctgttcgccgggatcgtcactgatcattcgccgtccactcccgcgttgaagcagatcgacgccggtgatttcgcggcggcgtggggtggcatcgcgtctgtccagatcgggctacccgcggtctggactcaggcccgggcgcgggggcacaccctcaccgacgtcgtcggttggatgtgtgccggaccggccgacctggtaggactggccggcaaggggcgcatcgcgatcggcgctgacgccgatctggtgatcttcgacgcggatgcgtcgttcctggtggagccctcgatgctgcgccaccgccacccgctcaccccctatgccggacgcgtgttgaacggggtggtgctggcgacctatctgcgggggcggcgagcggacggggatcgtcctccgcgggggcggctattagagaggtag

SEQ ID NO: 64820 - protein, 453 aa, Frankia sp. CcI3
MNEPTADVLPERPQALRSRRVVLPGGERPAAVHVADGRIAAITAADEIPPGTLVTDLGELALLPGVVDSHVHINEPGRTEWEGFATATRAAAAGGVTTIIDMPLNSVPPTTSLAALAAKRAVAAGQVAVDVGFWGGIIGADARNLDDLAALHGAGVFGFKAFLAPSGVEEFPHVSMDVLGAAARRTARMGALTVVHAEAPSVLALAPPTVGRAFASWLASRPPAAETEAVAALAALSAASGARLHVLHLAAADALDDVLAARDAGLPMTVETCPHYLTFTAEEVPDGATVFKCAPPIRDSRNLDRLWDGVAQGLFAGIVTDHSPSTPALKQIDAGDFAAAWGGIASVQIGLPAVWTQARARGHTLTDVVGWMCAGPADLVGLAGKGRIAIGADADLVIFDADASFLVEPSMLRHRHPLTPYAGRVLNGVVLATYLRGRRADGDRPPRGRLLER

SEQ ID NO: 64821 - DNA, 1359 bp, Desulfitobacterium hafniense Y51
  CDS (1)..(1359): transl_table=11
gtgtttaatctcgtcattaaaaacggtaagattgtgactgcggacaaaattattgaagccagtttagggatcaacaatggcaaaatcgccgcaatcatcgcagctggaacagagatcgaagccgaaaaagtcatcgatgccaaaggcaattatgtttttccgggagccatcgatactcatgcgcatttaaacgatcccggttatctctggagagaagattacgctcacggtacagcagctgcaggagtcggaggatttaccaccatcatcgacatgccattgcaaaacgaaccggccatgaccgatggcaaaattctcgataaaaagctggaagtcgtttctcccaatgcctatgtagatttttgtttctggggcggtttagtcgattataaccttaatcagctcaaagaattggacgaaaaaggctgcgtcgcctttaaatccttcatcgggcctgtttccccggattatgtatccctcaccatcggccaggccaaagaggccatggaaatttgcaaagagttcgacggccgggccggtttccactgtgaagattattccctgatcaaatgggaagaggcaagagccaaacgcaaagacaccaacgattggcaggactttctggactcccgtcccgtaattgccgaactgatcgccacccaaaatattatcgatttagccaaagaagtgggagctaaagtgcatatctgtcatgtcagtcatccccgtgtggcggaaatcatccgccaggcccaaaacgagggtgtggatgtcaccgccgagacctgcggccattacctcacctttacggatcaggatgtcgtcaaaaacggcagtcttttcaaatgcgctccccctttacgtgatgccgcagccgtggaaggcatgtgggaatacgtcaataacggaactctgtcggccattgcttccgaccactctccctgtgagcttagtgagaaaagtgaagaaaagcacggggtcttcggcgcctggggcggaatcagcggcatccagaatgtcatgcaggtggtcttcagtgaaggagtcgttaagagaggctattgccctaccctgctggcccgctctttaagtgaaggcccggccaaagcttttggaatcttcggcaaaaaaggtgccatccaagtaggctttgacgccgatctcgtgatcctggacccggaaaaagaatgggagatcacacccgaatccctgtactatgtcaatcccatatcagcctttgtgggcttaaaaggcaagggactccctgtctgcactctcgtccgcggcgaagtcgttgcccaggacggacaattggtcggacaaaaaggctatggcagctacgtaagaaaaatcaagtaa

SEQ ID NO: 64822 - protein, 452 aa, Desulfitobacterium hafniense Y51
MFNLVIKNGKIVTADKIIEASLGINNGKIAAIIAAGTEIEAEKVIDAKGNYVFPGAIDTHAHLNDPGYLWREDYAHGTAAAGVGGFTTIIDMPLQNEPAMTDGKILDKKLEVVSPNAYVDFCFWGGLVDYNLNQLKELDEKGCVAFKSFIGPVSPDYVSLTIGQAKEAMEICKEFDGRAGFHCEDYSLIKWEEARAKRKDTNDWQDFLDSRPVIAELIATQNIIDLAKEVGAKVHICHVSHPRVAEIIRQAQNEGVDVTAETCGHYLTFTDQDVVKNGSLFKCAPPLRDAAAVEGMWEYVNNGTLSAIASDHSPCELSEKSEEKHGVFGAWGGISGIQNVMQVVFSEGVVKRGYCPTLLARSLSEGPAKAFGIFGKKGAIQVGFDADLVILDPEKEWEITPESLYYVNPISAFVGLKGKGLPVCTLVRGEVVAQDGQLVGQKGYGSYVRKIK

SEQ ID NO: 64823 - DNA, 1350 bp, Desulfitobacterium hafniense Y51
  CDS (1)..(1350): transl_table=11
atgagtcattatgatctaatcctgcgcaacggaaacgtggtttgtccggatggtgtcagaaaagcagacattgccgtcagtgatggtaaaattgtgctcatcgctgaagaaatccccggagatgccaaggaagtcatcgatgccgccggcaagcatgttttccccggtatcaccgatggccatgtccactttaatgatcccggccgcacagagtgggaaacgatatccacagggtccagcgctttagcggccggcggtggagttgcctactttgatatgccgctcaactgcagtccgtgcactctggacgccgtgaactttaacaacaaactggccgtagcccagaaagactccttggtcgattacggtttctggggagggttgacctctgccaatttagataaactggatgaactggccgagtgcggagtcattggctttaaggcttttgcctgccacagcggtatcgatgagtttccaagaatggatgactatacggctttagtgggtatggagaaattagccaaactgggcctgccccttatggtccactgtgaaaatgctgagatcaccaaggagcttaccgaattatccttagccaacaatcgtaccggcgtccgggattacttcgccgcccgcccgcccattacggaaatcgaaaacgtttcccggatgattaccttcgctgaggaaaccggatgcaaactgattatcgctcacatcagcactgccaaagccgtggatcttgtagcccaagccagagcaagaggggtcgatgtctactgtgaaaccatcggtcattatttgtacctcactggtgacgatgtcgagcgtttaggtacggtagccaaatgctctcctcctattcgcgatggggaaaatcagcttcagatgtggggccggctctttaatgacaacatcgccttcgtttcttccgaccactccccctgtgatcccaagctgaaaaacggtgaattcatgcgtgtctggggcggcatctccgcttgccagaccaccttgcaaggcttgctcacccatgcttaccatgaccggaagttccccttggttaagatcgctcagctaactgcccagcatgtcaacgaaatcttcaagatcaaaggcaagggccaaatcaacctgggctatgatgctgattttgccttggttgatctgaatcatgaatttaccctgcaggcagaagatctcttctacaaacataaggtgagcccttatgtgggagaccgtttccgcggctctgtcagccaaaccattctcagaggcaccacgatctataaggacggaaaaattgtttcccaacccattggtaaacatttaaggccccatcaataa

SEQ ID NO: 64824 - protein, 449 aa, Desulfitobacterium hafniense Y51
MSHYDLILRNGNVVCPDGVRKADIAVSDGKIVLIAEEIPGDAKEVIDAAGKHVFPGITDGHVHFNDPGRTEWETISTGSSALAAGGGVAYFDMPLNCSPCTLDAVNFNNKLAVAQKDSLVDYGFWGGLTSANLDKLDELAECGVIGFKAFACHSGIDEFPRMDDYTALVGMEKLAKLGLPLMVHCENAEITKELTELSLANNRTGVRDYFAARPPITEIENVSRMITFAEETGCKLIIAHISTAKAVDLVAQARARGVDVYCETIGHYLYLTGDDVERLGTVAKCSPPIRDGENQLQMWGRLFNDNIAFVSSDHSPCDPKLKNGEFMRVWGGISACQTTLQGLLTHAYHDRKFPLVKIAQLTAQHVNEIFKIKGKGQINLGYDADFALVDLNHEFTLQAEDLFYKHKVSPYVGDRFRGSVSQTILRGTTIYKDGKIVSQPIGKHLRPHQ

SEQ ID NO: 64825 - DNA, 1368 bp, Methanococcoides burtonii DSM 6242
  CDS (1)..(1368): transl_table=11
atgaccgatatcctcatcacaaacacaaaggtcttctacaacaatattctgcagcccggtgaaattcagatcaatgacggaaaaatccaacggatagcaaagaatatcacttcagcagacccggaccttcttatcgatgcgaagggagcattaactattcctgggggtatcgatgtacatgtgcatttcagggagcctggaatgataaaaaaagaggactggtacacagggtcatgttcagcggctgctggtggtactactactgttgtcgagcatccgaacaccattccacctaccattgacaaatcatccttcaaagaaaaacttaaactcgcaaaccgcaaatcgataattgatttcggcatcaatggtggtgtaacaaagaaccttgagtcactttcccttctttgggaattgggagtcacatcgtttggtgagatattcatggccgagtccacaggcgggctgaatatagatgagaaggacttttcagaagctcttgggataatcaaggaacttgatgctgtcgcctgtatccatgcagaggatgagaacatccgccttgagaatgagaaattgttaaaacatgatctttctcccaattcacattccaggatacgctcgaatctgtgtgagggaattgctgtccagaatgcgcttgagaccatcgcagaaaagggaacaaggtcacacttttgtcacatcagtacacttgatgcattgggtctgatacgcaaagaggcatatgtggctcaaaatgaaggacgtgagagcaaagtcacctgtgagacggcaccacaccaccttttcctttccacaagggactgggacaggcttggtacttttgggaagatgaaccctccactgcgtgatcgcaggaacgtaaaagcgctgatgaatgccataaatgatggaactgttaatgcgatagcttccgatcatgcaccgcattccgaatttgataaggaccttgacatcagaagcgcaccctccggtgtgccaggtgtggagacacttatgccacttatgctcatggccgtcaagaagaacctgcttccaattggcaggatgatagaggtaacaagccgaaatcctgctcgtatctttggtcttgatacaaagcattcaaagggcgtatttgctgaagggtatgatgctgatctgatcattgtggatacacacacagctacccccataaaagcagacaagcttcacagtaaagccgggtggaccccatttgagaacatggatgctatattccccaaaatgaccatttcaaagggtgaggttatctgggatggtgaactcattgccgaaaagggacgtggaagtttccttgaaggttgtggatgtcttgaggatgaatga

SEQ ID NO: 64826 - protein, 455 aa, Methanococcoides burtonii DSM 6242
MTDILITNTKVFYNNILQPGEIQINDGKIQRIAKNITSADPDLLIDAKGALTIPGGIDVHVHFREPGMIKKEDWYTGSCSAAAGGTTTVVEHPNTIPPTIDKSSFKEKLKLANRKSIIDFGINGGVTKNLESLSLLWELGVTSFGEIFMAESTGGLNIDEKDFSEALGIIKELDAVACIHAEDENIRLENEKLLKHDLSPNSHSRIRSNLCEGIAVQNALETIAEKGTRSHFCHISTLDALGLIRKEAYVAQNEGRESKVTCETAPHHLFLSTRDWDRLGTFGKMNPPLRDRRNVKALMNAINDGTVNAIASDHAPHSEFDKDLDIRSAPSGVPGVETLMPLMLMAVKKNLLPIGRMIEVTSRNPARIFGLDTKHSKGVFAEGYDADLIIVDTHTATPIKADKLHSKAGWTPFENMDAIFPKMTISKGEVIWDGELIAEKGRGSFLEGCGCLEDE

SEQ ID NO: 64827 - DNA, 1398 bp, Ralstonia metallidurans CH34
  CDS (1)..(1398): transl_table=11
gtgacggatggaacagtccccggcgttgggctgccatcggcacgccgccatgcggacttgctggtgatcggcggggccctcgtcacccccaacggtgtcgagcgcgccgatgtcgcatgtgcggccggtcgcatcgtggcgcttggagacctccagtgctcgtggacggccgatgccacgctcgacgcgaagggtctgcacgtactgccgggggttatcgatagtcaggtgcatttccgcgagcccggtttgacgcacaaggaaacgttggaggcgggcacgcgcggtgcggcgctgggcggcgtcacggcggtattcgagatgccgaacacgcaaccgctcacattgcgtgcggaggatctccgggccaagcttgatgcggcacaaggccgtgcgtggtgcgaccacgcgttctacatcggcgggtcgtcggtgaatgccgagcacctggagtacctggagagtctgcctggctgtgctggcgtgaagatcttcatgggcagctcgttcggcgacctgctggcggatgacgacgaggtgctatgccggatcctggcgcacggtcgccgcaggatggccgtgcatgctgaggatgaggcccggctgcgcgaacgcaggatcatcgctgagtcgagcggcgacgtgcgccagcacccggtctggcgagacgcccgcagcgcattgctggccacgcagcgcatcgtgaagcttgctggggatactggccggcgccttcatatcctgcatgtttcgactgccgaagagattgccttcctggcggatcggaaggatcgcgtgacagttgaagtgacgccgcaccacctgaccctggaggcgccagaatgctacgagcgactggggacgctggctcaaatgaatccaccagtccgtgaacgttgccaccggaacgcactatggcaggcgattcgcgagggcgtcggcgatgtcatcggtagtgaccatgcgcctcacacgcctaaggaaaagagtcgtccatatccagcttcgcccagcggcatgaccggtgtgcagacactggtgccggtgatgctcgaccatgtgcatcgtggccaattgagtcttcagcgattcgtcgacctgacaagcgccggaccggcccggatcttcggtgtcgaagggaaaggccgtatcgcgcttggctacgacgccgacttgacgctggtcgatctggcggctcgccggaccattcgcaacgactggatcgcgagtgtcagtgggtggacaccctatgacggcatcggcgttacgggctggccgatccataccgtggtgcgtggccacatcgtcgtgcgggacgaagcgctcgtcgggacgacccctctggggcgaccgttgcgcttcctcgaagcgccacctcgagtgccagccggagtctga

SEQ ID NO: 64828 - protein, 465 aa, Ralstonia metallidurans CH34
MTDGTVPGVGLPSARRHADLLVIGGALVTPNGVERADVACAAGRIVALGDLQCSWTADATLDAKGLHVLPGVIDSQVHFREPGLTHKETLEAGTRGAALGGVTAVFEMPNTQPLTLRAEDLRAKLDAAQGRAWCDHAFYIGGSSVNAEHLEYLESLPGCAGVKIFMGSSFGDLLADDDEVLCRILAHGRRRMAVHAEDEARLRERRIIAESSGDVRQHPVWRDARSALLATQRIVKLAGDTGRRLHILHVSTAEEIAFLADRKDRVTVEVTPHHLTLEAPECYERLGTLAQMNPPVRERCHRNALWQAIREGVGDVIGSDHAPHTPKEKSRPYPASPSGMTGVQTLVPVMLDHVHRGQLSLQRFVDLTSAGPARIFGVEGKGRIALGYDADLTLVDLAARRTIRNDWIASVSGWTPYDGIGVTGWPIHTVVRGHIVVRDEALVGTTPLGRPLRFLEAPPRVPAGV

SEQ ID NO: 64829 - DNA, 1365 bp, Rubrobacter xylanophilus DSM 9941
  CDS (1)..(1365): transl_table=11
gtgtcggccttcgacctcatcgtgcggggagggacggtggtgcgcggcggctgcgaggtggccgacgtaggcgtcgcggatggtgtgatctccgctgtcggccccgacctcgaggggggcgcccgcgaggagatagacgcccgcgggctcctcgtcctccccggcgcgatcgacgcccacgtccacttcaacgagcccgggcgcacgcgctgggaggggttcgcgagcggcacccgcgcgctcgccgccggggggacgaccctctgcgtcgagatgccgctcaacgcccacccccccaccaccgacggcgagagcttcgacctcaagctcgccgccgcaaaggcctcggcccacgtggacttcgcgctgtggggcgggatcgtgccgggcagggtggggcggatggaggagctcgccgggcgcggggtcgcggggttcaaggcgttcatgtccgccaccggcacccccgacttcgaggccgcggacgacctcaccctctacgaggggatgcaggaggccgcgcgtctcggcctccccgtcctcgtccacgcggagaaccgccagatcaccgacgccctcgcccgccgggcgacctcagccctgcgcaccacgatgcgcgactacctcgcctcccggcccgccgtagccgagctcgaggcgatagggcgcgcgatcctcctcgcctccgaggccggctgctcgctgcacatcgtccacgtgagcaccgggcggggggtcgccctggtcgccgcggcgcgagagcggggggtggacgtcacctgcgagacctgcccgcactacctcctgttcaccgacgaggacgccgtgcggatcggggccgccgccaagtgcgccccgccgctgcgcccccgcgaggaggtggagtccctgtgggagcaggtgctcgcaggaaacgtcgcgttcgtgacctccgaccactccccctgcccgccggacatgaaggccggggaggacatgttccgggcctggggcgggatctccggctgccagtcgctcctcccggccctcctcgacgaggggtatcacgggcgggggctcccgccggagcggctggcggagctgctctctgccaacgtggcccgccgcttcggcttcgccgggaagggtgggatcgaggagggaaacgacgccgacctcgcgctcgtggacccctcgggggagcacgtgctgcgcgaggaggacctccactaccgccacccgatcagcccgtacgtcgggaggagcttccgggggcgggtggtgcggacgatcctgcgcgggaggaccgtcttcgagggcgggagggtcgtctcggggccggccggaaggttcgtaagaccgcaaagagagaaaggagagcgatga

SEQ ID NO: 64830 - protein, 454 aa, Rubrobacter xylanophilus DSM 9941
MSAFDLIVRGGTVVRGGCEVADVGVADGVISAVGPDLEGGAREEIDARGLLVLPGAIDAHVHFNEPGRTRWEGFASGTRALAAGGTTLCVEMPLNAHPPTTDGESFDLKLAAAKASAHVDFALWGGIVPGRVGRMEELAGRGVAGFKAFMSATGTPDFEAADDLTLYEGMQEAARLGLPVLVHAENRQITDALARRATSALRTTMRDYLASRPAVAELEAIGRAILLASEAGCSLHIVHVSTGRGVALVAAARERGVDVTCETCPHYLLFTDEDAVRIGAAAKCAPPLRPREEVESLWEQVLAGNVAFVTSDHSPCPPDMKAGEDMFRAWGGISGCQSLLPALLDEGYHGRGLPPERLAELLSANVARRFGFAGKGGIEEGNDADLALVDPSGEHVLREEDLHYRHPISPYVGRSFRGRVVRTILRGRTVFEGGRVVSGPAGRFVRPQREKGER

SEQ ID NO: 64831 - DNA, 1434 bp, Rhizobium leguminosarum bv. viciae 3841
  CDS (1)..(1434): transl_table=11
gtgagcaactacgatctcatcatccagaatggcacggtggcgactgctgcggatgttttccaggcggatatcggcattaaagacggcaagattgtccagatcgggcagagcctctcgggtgctgcgcgcacgatcgatgcctcgggtaaatatgtccttccaggcggcatcgacagccatgtccacatctcccagccttcgggcgacggaatcgagatggcggacgacttcgagagcggaacgctgtcggcggtgttcggcggcaataccaccatcatgccgttctgccttcaggaaaagggcaagtcgctgcgagaggtgctgacggcctatcatgcgctcgcagagggccagtgttataccgacgtcagttttcatctgatcatatccgacccgagcgacgccgtgctgggccaggagttgccagcgcttgtggccgacggctatccgtcgctgaaggtcttcatgacctatgagagcctgcgcctcgatgacgcgcagatactgatgacgctcgatgtggcgcgacggacgggcgccaccgtcatggtccattgtgaaaacgaagacgcaatcaggttcctgatcgaaaagcacgagctggcgggcgatgttgccccacgcgctcatgcctctacccgtccggtcgctgtcgaacgtgaagcaacgcatcgcgccctgacgctcgccgaaatcgtagacgttcccattgtcattgtgcatgtctcgaacggcgaggcgatggaagagatcgctcgcgcaaggacgagaggtgtcaaggtcgtcggggaaacctgcccgcaatatctgacgctcaccgccaaggacctcgacggcatggattgggagggcgcgaaacttgtctgctctccgccgccgcgggatgaagatgcccagaaagaatgctggcgcggcatcgagaccggggcattcgaactcttttcatctgatcattgtccattccgctacgatgaccagcacgggaagcttaatcccaaaggccgcacgaatttcaggcacattcccaatggcattccaggcgtcgaaacccgccttcccatcctgttttcgcaagggttcatggccggacgcatcgatctgccgcgctttgtcgccctgacttcgacgaaccatgcaaagacctatggcctctatccacaaaagggaacgattgccgtgggggcggatgcggacatcgcgatctgggatccagccatcgaacggaccatccgtcatgcggacctgcatgatggcgcatactattcgccctacgaggggatcgagatcaccggctggccgacaacgacaattgtcgccggaaagcctgtcgtcgaaaacggcgtcctggtgggcaccaagggccacgggcaatatcggaaagccgcggcgagacaaatcaacaagcagtcaaatctaacaagagcgacatcatga

SEQ ID NO: 64832 - protein, 477 aa, Rhizobium leguminosarum bv. viciae 3841
MSNYDLIIQNGTVATAADVFQADIGIKDGKIVQIGQSLSGAARTIDASGKYVLPGGIDSHVHISQPSGDGIEMADDFESGTLSAVFGGNTTIMPFCLQEKGKSLREVLTAYHALAEGQCYTDVSFHLIISDPSDAVLGQELPALVADGYPSLKVFMTYESLRLDDAQILMTLDVARRTGATVMVHCENEDAIRFLIEKHELAGDVAPRAHASTRPVAVEREATHRALTLAEIVDVPIVIVHVSNGEAMEEIARARTRGVKVVGETCPQYLTLTAKDLDGMDWEGAKLVCSPPPRDEDAQKECWRGIETGAFELFSSDHCPFRYDDQHGKLNPKGRTNFRHIPNGIPGVETRLPILFSQGFMAGRIDLPRFVALTSTNHAKTYGLYPQKGTIAVGADADIAIWDPAIERTIRHADLHDGAYYSPYEGIEITGWPTTTIVAGKPVVENGVLVGTKGHGQYRKAAARQINKQSNLTRATS

SEQ ID NO: 64833 - DNA, 1374 bp, Solibacter usitatus Ellin6076
  CDS (1)..(1374): transl_table=11
atgagtgaatgcgtagtccgtggtgggcaggtggtgcaggcaggcggggtcgtgtccgcggacgtggcgatcgaagacggaagaatctcggccattgggcccgagcttcccggcgcgaagcgcgagatcaatgcgcgcggattgaccgtattccccggcgtgatcgacgatcatctccacttcaacgaaccgggccgcaccgagtgggaaggcgcggcaacgggcagcagggcgctggcggcgggtggcggtacggcttttttcgacatgccgctcaactccacgccgtgtacggtggatcgcgcggccttcgccggaaagcgcgcggcgctggagcgcgcgtcgatcgctgacttcgcgctgtggggcggcatcgtgccgggcaatctcagcgaactggcgccgctcgcggaaagcggcgtgatcggcttcaaggccttcctttccgactcgggcctgcccgaatttccgcgcgccgacgacctcacgctgtacgaaggcatgcgtgaagccgcgcgactgggactgccggtcgctgtgcacgcggaaagcgaagagatcacgtcgcggctcacgcggcgcgcgcgtgacgccggacgcaccagcgcgcgcgactatctggactcgcgcccggtgatcgccgaagtcgaggcgatccatcgcgccgcgctcctggcgcgcgaggccggctgcaaattgcacatcgtccacatcagctccggacgcggtgtggctgcggctctcgaagcgcgcaccatgggcaccgatattgcgatcgaaacctgtgcgcactatctcttcttcacggaggatgacttgctgcgcctgggcgcgatagccaagtgcgcgccgccgctgcgcgatcgccaggagttcgacaggttgtgggcgcacgtgctgggtggcatcgtggacgtggtcgcttccgatcattcgcccgcgccgcccgcgatgaaaaccggcgacgatttcttcgccatctggggcggcatcgccggcgtgcaatccacgctcgccgtgctgctcgaggccggccactttcaacgcggcctcaggttggagcgaatcgcggagctcactgccggatatccggcgcgacgatttgctctgcacaacaaaggcagcatcgcggttggcaacgacgcggacctcacgctggtggacatggatggccaagaaaacctcgagccggaatctctgtggcagaagcacccggtcaacccatataccggaaacagttttcgcggctcgattcgccgcacgatgctgcgcggcacgacgattttcaatcatgacgaaattaccgtaaagtccggcggccaactgctccgcccgaaagcaaacacctatgcaacgtctgggattcacccgtag

SEQ ID NO: 64834 - protein, 457 aa, Solibacter usitatus Ellin6076
MSECVVRGGQVVQAGGVVSADVAIEDGRISAIGPELPGAKREINARGLTVFPGVIDDHLHFNEPGRTEWEGAATGSRALAAGGGTAFFDMPLNSTPCTVDRAAFAGKRAALERASIADFALWGGIVPGNLSELAPLAESGVIGFKAFLSDSGLPEFPRADDLTLYEGMREAARLGLPVAVHAESEEITSRLTRRARDAGRTSARDYLDSRPVIAEVEAIHRAALLAREAGCKLHIVHISSGRGVAAALEARTMGTDIAIETCAHYLFFTEDDLLRLGAIAKCAPPLRDRQEFDRLWAHVLGGIVDVVASDHSPAPPAMKTGDDFFAIWGGIAGVQSTLAVLLEAGHFQRGLRLERIAELTAGYPARRFALHNKGSIAVGNDADLTLVDMDGQENLEPESLWQKHPVNPYTGNSFRGSIRRTMLRGTTIFNHDEITVKSGGQLLRPKANTYATSGIHP

SEQ ID NO: 64835 - DNA, 1392 bp, Solibacter usitatus Ellin6076
  CDS (1)..(1392): transl_table=11
atgaacaccctaatccgtaacggaaaagtggtaactgccaacgagacgaagatggccgacgtcctcatcgagggcgagctcatcaaggaagtccgcgcgggcattccggtgaactccgccgagcgcgtgatcgacgccgcgggcatgtacgtcctgcccggcggcatcgattgccacactcatctcgacatgcccttcggcggcaccaccagcgccgacgatttcgagaccggcacccgcgccgcggccttcggcggcaccaccagcattgtcgatttcgccatccaggcgcgcggtaccagaatgcgcgacgcgctcgatacctggtggaagaaggccgaaggcaaagcctgtatcgattacggcctccacatgatcgtcaccgacctgggctcctccggcctggaggacatggacgaaatggtggatgagggcgtggccagcttcaagctcttcatggcctaccccaacgtcctgatggtggatgacgccacgattttcaaggccctggcgcgtaccgcgaagaacggtgcgctcatctgcatgcatgccgagaacggcagcgtcatcgatgtgatcgtcgccaaggcagtggccgaaggcaaaacggcgcccatctatcatgcgctcacgcggcctacccgcgccgaggccgaagctgtccatcgtgccatcgcgctcgccgaaatcgccggtgcgcccgtctacatcgtccacctctcgagcgaagatgccctcaaccaggtgcgtgaagcgcgcgatcgcggcgtgccggccttcgccgagacctgtccgcaatacctgctgctctccatcgaagagctcgaacgccccaatttcgaaggcgcgaaatacgtcttcacgccgcccttgcgcaccaaggaaaatctgccgaagctctgggaaggcctcaagcacgatcacctgcaggtggtctccaccgaccactgccccttctgcttcgaagaccagaagatcctcggtaaggacgacttcaccaagattcccaacggcgggccgggcatcgaaaaccggctgcaattaatgcatcactacggcgtgggcgcgggacagatctcgctcaaccgcttcgtcgaaatcacttcgaccacgcccgcgcgcatcttcggcatgtatcccaagaagggcgaaatcgccgccggcagcgacgcagacctcgtcgtgtgggaccccgcatcgctctacaccatcagcgcgaaaacccatcacatgcgcgtcgattactcgatgttcgaaggctacgaagtgaagggcaacgtccgcaccgtgctctcccgcggcgaagttatcgtggagggaaaccagttcctgggcaaccccggccgcggcaattatctgcggcgcgccgcgcgcggcggcgcgtggaagtga

SEQ ID NO: 64836 - protein, 463 aa, Solibacter usitatus Ellin6076
MNTLIRNGKVVTANETKMADVLIEGELIKEVRAGIPVNSAERVIDAAGMYVLPGGIDCHTHLDMPFGGTTSADDFETGTRAAAFGGTTSIVDFAIQARGTRMRDALDTWWKKAEGKACIDYGLHMIVTDLGSSGLEDMDEMVDEGVASFKLFMAYPNVLMVDDATIFKALARTAKNGALICMHAENGSVIDVIVAKAVAEGKTAPIYHALTRPTRAEAEAVHRAIALAEIAGAPVYIVHLSSEDALNQVREARDRGVPAFAETCPQYLLLSIEELERPNFEGAKYVFTPPLRTKENLPKLWEGLKHDHLQVVSTDHCPFCFEDQKILGKDDFTKIPNGGPGIENRLQLMHHYGVGAGQISLNRFVEITSTTPARIFGMYPKKGEIAAGSDADLVVWDPASLYTISAKTHHMRVDYSMFEGYEVKGNVRTVLSRGEVIVEGNQFLGNPGRGNYLRRAARGGAWK

SEQ ID NO: 64837 - DNA, 1422 bp, Mycobacterium smegmatis str. MC2 155
  CDS (1)..(1422): transl_table=11
atggttaccaccctgatccggggcggcaccgtggtttcggcgacggggcgccagtcgatcgacgtgctgatcgacggggccaccatcgcggccctgatcgagcccggtgccgcgccgttcggtgatgggctcgccgaacgtgtcgacaacgtcgtcgacgccaccggcaagtacgtgatccccggcggcgttgacgcccacacccacatgcagatgccgttcggtggcaccaccgcgtcggacacgttcgaaaccggcacgcgcgcagccgcactgggcggcaccaccaccatcgtcgatttcgcgatccagaccccaggcgaacatgttcaggacactctgcaggcgtggcacgagaaagcggcagggaactgcgcgatcgattacggattccaccagatcatcggtgacgtcaacaccgaatcactcgcggcgatgggcgagctgatcgacgaaggggtcacgagcttcaagctgttcatggcttacccgggcgtctactactccaccgacgggcagatcttgcgggcgatgcagaagtgcgcggagatcggcgggctgatgatgatgcacgccgagaacggcatcgcgatcgacgagttggtggctcagcacctgggtcgcggcgagacgggcccctacttccacggggtctcgcggccctggcagctcgaggaggaggccactcaccgggcaatcatgctcgccgacgtgaccggtgcgccgttgtacgtcgtccatgtttcggcacaccaggcactcgaacagatcgccaccgcgcggggcgccggcgggaatgtgttcgccgagacctgcccgcaatacctgtacctgtcgttggaggaacagctcggcgccggaggtttcgagggcgccaagtgggtgtgctccacaccgttgcgtgcccgctccgaaggccaccaggaccagttgtggcgctatatccgcaccggcgacgtcgcgggtgtggccaccgaccactgcccgttctgcatggtcggccagaaggaactgggtatcggcaatttctcgaaaatccccaacggcatcggcggtgtcgagcaccgcatggatctgatgttccaaggtgtcgtcgacgggcgaatcagcctcgaacggtgggtggaggtctgcgcgaccaccccggcgcgcatgttcggcctgtacccccgcaaaggtgtcatctcgccaggggccgacgctgacgtggtgatctacgaccccgccgggcacaccagtatcggcgtcggcaagacccaccacatgaacatggaccactcggcctgggagggcttcgagatagacggcgccgtgacggccgtgtggtcgcgcggaaagaaggtcgtcgaggacaggcgctacctgggagccaagaccgacggtcgattcgtgcgccgcgaactttcccagaatctcatctga

SEQ ID NO: 64838 - protein, 473 aa, Mycobacterium smegmatis str. MC2 155
MVTTLIRGGTVVSATGRQSIDVLIDGATIAALIEPGAAPFGDGLAERVDNVVDATGKYVIPGGVDAHTHMQMPFGGTTASDTFETGTRAAALGGTTTIVDFAIQTPGEHVQDTLQAWHEKAAGNCAIDYGFHQIIGDVNTESLAAMGELIDEGVTSFKLFMAYPGVYYSTDGQILRAMQKCAEIGGLMMMHAENGIAIDELVAQHLGRGETGPYFHGVSRPWQLEEEATHRAIMLADVTGAPLYVVHVSAHQALEQIATARGAGGNVFAETCPQYLYLSLEEQLGAGGFEGAKWVCSTPLRARSEGHQDQLWRYIRTGDVAGVATDHCPFCMVGQKELGIGNFSKIPNGIGGVEHRMDLMFQGVVDGRISLERWVEVCATTPARMFGLYPRKGVISPGADADVVIYDPAGHTSIGVGKTHHMNMDHSAWEGFEIDGAVTAVWSRGKKVVEDRRYLGAKTDGRFVRRELSQNLI

SEQ ID NO: 64839 - DNA, 1299 bp, Nocardioides sp. JS614
  CDS (1)..(1299): transl_table=11
gtgagcaccagctacctgatcaagaacgtctccgtcctgggcggcacgccgaccgacctgctgctcgaggacggggtgatccgcgaggccgcggaccggcccgacgccgaggtgatcgatgcgaccggcctgatcgcactgcccgggctggtcgacctgcacacccacctgcgcgagcccggtcgcgaggacgccgagaccgtcgagaccggtacgcacgccgccgcgatgggcggcttcaccgccgtgcacgcgatggccaacaccgagccggtggccgacaccgccggcgtcgtcgagcaggtctggcggctgggccgcgaggccggctactgcgacgtgttcccggtcggcgccgtcaccgtgggcctccagggcgagcgcctcgccgagctcggtgcgatggcggactcggccgcccgggtgcgggtgttctccgacgacgggaagtgcgtcagcgacgcggtgctgatgcgccgcgcgctggagtacgtcaaggcgttcgacggcgtcgtcgcgcagcacgcccaggagccacggctgaccgagggcgcccagatgaacgagggcgagctgtccggccggctcggactggccggctggccggcggtcgccgaggaggcgatcatcgcccgcgacctgctgctcgccgagcacgtcgggtcccggctgcacgtctgccacgtgtcgacggccggctcggtcgagctgatccgctgggccaaggcgaaggccgagaaggacgggcactgggaggtcacggccgaggcgtgcccccaccacctgctgctgaccgacgagctggcggcgacctacgacccgatctacaaggtgaaccccccgctgcgcaccgcggcggacgcccaggcgctccgtgccgggctggccgacggcacgatcgacatcgtcgccaccgaccacgcgccgcacccccacgaggacaaggactgcgagtgggcggccgccgcgttcggcatgctcggcctggagacggcgctctcggtggtccagcagacgatggtggacaccgggctgctcgactgggccggcctggccgagcggatgtcctacgccccggcccggatcggccgggtctccgaccagcacgggcgcccggtcgcgatcggtgagcccgcgaacatggtgctctacgaccccggagccacccgcacgatcgacccgtcggagtcggccagcctgagccgcaacacgccgtaccgcggcatggagctgcccggccgggtggtcgcgacattcctgcgtggccgcgccacggtgctcgacgggaagctgcagtga

SEQ ID NO: 64840 - protein, 432 aa, Nocardioides sp. JS614
MSTSYLIKNVSVLGGTPTDLLLEDGVIREAADRPDAEVIDATGLIALPGLVDLHTHLREPGREDAETVETGTHAAAMGGFTAVHAMANTEPVADTAGVVEQVWRLGREAGYCDVFPVGAVTVGLQGERLAELGAMADSAARVRVFSDDGKCVSDAVLMRRALEYVKAFDGVVAQHAQEPRLTEGAQMNEGELSGRLGLAGWPAVAEEAIIARDLLLAEHVGSRLHVCHVSTAGSVELIRWAKAKAEKDGHWEVTAEACPHHLLLTDELAATYDPIYKVNPPLRTAADAQALRAGLADGTIDIVATDHAPHPHEDKDCEWAAAAFGMLGLETALSVVQQTMVDTGLLDWAGLAERMSYAPARIGRVSDQHGRPVAIGEPANMVLYDPGATRTIDPSESASLSRNTPYRGMELPGRVVATFLRGRATVLDGKLQ

SEQ ID NO: 64841 - DNA, 1320 bp, Nostoc punctiforme PCC 73102
  CDS (1)..(1320): transl_table=11
atgtcatctccacaaattttactgatccgtcgcgcctgcatagtcctacccaatggtgaaatgatgattggggatgtgttgacccgtgatcgccaaatagtcgaagttgcgccagaaatctcccaaacagcagtagtcactgaaattgacgcagaagggttaactttgttgccgggagtgatcgatccgcaggtacatttccgggaacctggcttagaacacaaggaagatttattcaccgctagttgtgcctgcgctaaaggtggagtcacttcttttttagaaatgcctaatacgcgccccctaacaacgacacagcaagctttggacgacaagctagaacgggcctcacaaaagtccttggttaattatggcttttttattggggcaacagcagagaatcttccagacttgcttttggccaagcccacaccaggaattaagattttcatggggtcgatgcacggtcaattgctagttgatggtgaaacaacattggagacgatatttgctaaaggcgatcgcttgattgctgttcatgccgaagaccaagctagaatcaaccaacgtcgccaagaatttgccaacattcacgatccagccgttcactcgcaaattcaagataatcaagcggctttgttggcaacccaactggtattaaaactttctcaaaaatatcaccgtcgtctgcatattcttcacatgtcaacagccgaagaagcagatttactgcgtcaggagaaacctagttgggtgacagcagaggtaacgccacagcatttggtgttgaacaccagtgcttatgaaaagattggtactttagcacagatgaatccacctttgcgatcgccccacgataacgaagtcctttggcaagctttacgcgatggcgtgattgatttcatcgctacagatcacgcaccccacaccttagaagaaaaagctcaagaataccccaatagtccttcaggaatgcctggggtggaaacttccctagctttgatgttaactgcggcgatggagggaaagtgtactgtttcccaagttgtcaactggatgtctaagaatgtagctgtggcttatggtattcccaataaaggagtgatcgcacctggttatgatgccgatttagtgcttgtagatttaaatacataccgtccagtccggcgcgaggaacttttaaccaaatgccattggagcccctttgaaggctggaacctcaccggctgggctacaacaaccattgtcggcggtgaaatagtttatgacaaaggccaggtaaatacgcaagtccggggtcaagctttaactttcttgtag

SEQ ID NO: 64842 - protein, 439 aa, Nostoc punctiforme PCC 73102
MSSPQILLIRRACIVLPNGEMMIGDVLTRDRQIVEVAPEISQTAVVTEIDAEGLTLLPGVIDPQVHFREPGLEHKEDLFTASCACAKGGVTSFLEMPNTRPLTTTQQALDDKLERASQKSLVNYGFFIGATAENLPDLLLAKPTPGIKIFMGSMHGQLLVDGETTLETIFAKGDRLIAVHAEDQARINQRRQEFANIHDPAVHSQIQDNQAALLATQLVLKLSQKYHRRLHILHMSTAEEADLLRQEKPSWVTAEVTPQHLVLNTSAYEKIGTLAQMNPPLRSPHDNEVLWQALRDGVIDFIATDHAPHTLEEKAQEYPNSPSGMPGVETSLALMLTAAMEGKCTVSQVVNWMSKNVAVAYGIPNKGVIAPGYDADLVLVDLNTYRPVRREELLTKCHWSPFEGWNLTGWATTTIVGGEIVYDKGQVNTQVRGQALTFL

SEQ ID NO: 64843 - DNA, 1317 bp, Crocosphaera watsonii WH 8501
  CDS (1)..(1317): transl_table=11
atgacagcacttcttattcgtcatcctcgtattcttctacctgatggtgagtttttgctaggtgatatcctaattcaacagggtaaaatcgtccagattgctccagaaattacagcaccggatggtagtaatatcatagacgctacgggattaactttgttacctggggtgattgatcctcaagtgcattttcgagaacctggtttagaacacaaagaaaacctctttacggcgagttgtgcttgtgctaaggggggagtcacttcgttcttggaaatgccgaatacaaagcctttaaccaccactcaggctcccttagaccagaagttacagttagcttccgaaaagtgtttagttaattatggcttttttatcggagcgactcctgaaaatttgcctgatttgttaacaactaatccggtttgtggtattaaaatttttatgggatcgtctcatggggctttgttggtgtctcgagaagctgaaattgaacctattttcgctcgaggcgatcgcttaattgcagtccatgcagaggatcaagcaagaattttacaacgtcgtcaagagtttaaagggatcactgatccagcaattcattctcaaattcaagatgaaactgctgctttaaatgcgaccaagttagctctcaaactctcccaaaagtatcaaagacgcttacatattttacatctgtctactggtattgaagcagaatttttaagagagaataaacccagttgggtaacggcagaggtaacaccacaacatctattgttgaacacagaagcttatgaaaaaataggcactttagcacaaatgaatcccccgctaagatcccctgaaaataatcaaattctctggcaagctttattggatggggtgatcgattttattgctacagatcacgctccccataccctagaagaaaaggctaaaggttatcctaactccccttcgggaatgccaggggtagagacttctttgcctttaatgttaacccaagcgatggcaggaaaatgtagtgtttctcaggtgtcttcttggatggccactaaaccagcagaagcttataaaattcccaataaggggttaattaaaactgggtatgatgctgatttagtgttagttgatttagataattatcgtcctgttttaagggaagacttacaaacaaaatgtggttggagtccctttgaaggctggaatttaactggatggcctattattactattgtcgggggcaatattgtttatgaaagaggaaaattaaatacagaggttagagggaaagctttacaatttgggaaaaattaa

SEQ ID NO: 64844 - protein, 438 aa, Crocosphaera watsonii WH 8501
MTALLIRHPRILLPDGEFLLGDILIQQGKIVQIAPEITAPDGSNIIDATGLTLLPGVIDPQVHFREPGLEHKENLFTASCACAKGGVTSFLEMPNTKPLTTTQAPLDQKLQLASEKCLVNYGFFIGATPENLPDLLTTNPVCGIKIFMGSSHGALLVSREAEIEPIFARGDRLIAVHAEDQARILQRRQEFKGITDPAIHSQIQDETAALNATKLALKLSQKYQRRLHILHLSTGIEAEFLRENKPSWVTAEVTPQHLLLNTEAYEKIGTLAQMNPPLRSPENNQILWQALLDGVIDFIATDHAPHTLEEKAKGYPNSPSGMPGVETSLPLMLTQAMAGKCSVSQVSSWMATKPAEAYKIPNKGLIKTGYDADLVLVDLDNYRPVLREDLQTKCGWSPFEGWNLTGWPIITIVGGNIVYERGKLNTEVRGKALQFGKN

SEQ ID NO: 64845 - DNA, 1503 bp, Kineococcus radiotolerans SRS30216
  CDS (1)..(1503): transl_table=11
gtgacccggcggaccacgggggacctcgacgcgcggcccggcgggccgccgtggtggagcccgccggacgtcgaacgaggtgtgctgaccggaggaagggtggagggcgtggtggacggcgggtcgggcgacgtggtgccggcggttgggggcggaccgcgggcggacgtggtgctgcgggcggcgcgggccgtggtggacggtgcgacgcgggcggtgtccgtggcggtgcgggaggggcggatcgtcgccgtggaggcgttcgagcacccctgggcggccgcgcgcgaggtcgtcctggctgaggacgaggtgctgctgccggggctggtggacacccacgtccacgtcaacgaaccgggccgcaccgagtgggagggtttcgcctccgcgacccgtgccgcggccgccgggggcatcacgaccatcctggacatgccgctgaacagcgtccccgccaccctcgacccggccgcgctcgcggtgaagcgggccgcggcggcggggcagtgcacggtcgacgtggggttctggggtggcgccgtgcccggcaacgccgaccagctcgctccgctgcacgcggcgggggtgttcggggtgaagtgcttcctgctcgactccggcgtggcggagttccccccgctggacgccgccggcctggcggtggcgctggccgaactggcccgcttcgacggcctgctgctggcccacgccgaggacgccgaggagatcgacgcccacgcccaccccgggggccggagcttcgccgacttcgtggcctcgcgcccgccgagcgcggaggcccgtgcggtgcgggcgctcgcggaggccgccgcccgcgccggggcgcgggcccacgtggtgcacctgtcctcggccgcggggctggccgaggtcgccgcggccaaggccgcggggacccgcctgagcgcggagacgtgcccgcactacctgaccctggacgccggcgccgtccccgacggggacacctcgttcaagtgctgcccgccgatccgcgaccgcgccgagcaggacgcgctgtgggccggcttgctcgacggcacgatcgactgcgtggtctcggaccactccccgtgcaccgtggagctgaagcggctggaggagggcgacttcgggatcgcctggggcgggatcgcctccgtgcagctggggctccccgcggtgtggaccgcggcccgctcgcgcggggtggggttggagacggtggtggggtggatggcgtcggcgacggcggacctggccggtctgcgcgaccgggggcgcatcgcggtgggcaacgtcgcggacttcgcggtgttcgcgccggaggaggagtgggtcgtcgacgcgcggtccctgcaccaccgcaacgcggtgacgccctacgaggggcggcggttcaccggcgcggtgcgttcgacgtggttgcgggggaaccggatcgacctggagggcgaaccccggggggaactgctgcacgccccggcccgcgagcgcccctga

SEQ ID NO: 64846 - protein, 500 aa, Kineococcus radiotolerans SRS30216
MTRRTTGDLDARPGGPPWWSPPDVERGVLTGGRVEGVVDGGSGDVVPAVGGGPRADVVLRAARAVVDGATRAVSVAVREGRIVAVEAFEHPWAAAREVVLAEDEVLLPGLVDTHVHVNEPGRTEWEGFASATRAAAAGGITTILDMPLNSVPATLDPAALAVKRAAAAGQCTVDVGFWGGAVPGNADQLAPLHAAGVFGVKCFLLDSGVAEFPPLDAAGLAVALAELARFDGLLLAHAEDAEEIDAHAHPGGRSFADFVASRPPSAEARAVRALAEAAARAGARAHVVHLSSAAGLAEVAAAKAAGTRLSAETCPHYLTLDAGAVPDGDTSFKCCPPIRDRAEQDALWAGLLDGTIDCVVSDHSPCTVELKRLEEGDFGIAWGGIASVQLGLPAVWTAARSRGVGLETVVGWMASATADLAGLRDRGRIAVGNVADFAVFAPEEEWVVDARSLHHRNAVTPYEGRRFTGAVRSTWLRGNRIDLEGEPRGELLHAPARERP

SEQ ID NO: 64847 - DNA, 1419 bp, Kineococcus radiotolerans SRS30216
  CDS (1)..(1419): transl_table=11
atgacgcgcaccctcgtcagcggcgggaccctcgtctccaccaccggcgccacccccaccgacgtcctcatcgagggcgagaccgtcaccgccctgctcgcccccgggacgggcgaggagttcagcgtcgacacccgcatcgacgccaccggctgctacgtcctgcccggcggggtggacgtccacacccacatgcagatgcccttcgggggcaccgaggcctcggacaccttcgcgaccggcacccgcgccgcggccttcggcgggacgacgaccatcgtcgacttcgcggtgcagcgcaccggggaggtcgtcgaggagtcgctggcggcctggcacgccaaggccgaggggaactgcgcgatcgactacgggttccacgtgatcctcgggggcgtcgacgaggactcgctcaaggcgatggactccctcgtcgcccacgagggcatcagcagcttcaagctgttcatggcctaccccggggtgttccactccgacgacgggcagatcctgcgggccatgcagcgcgccaccgacaacggcgcgacgatcatgatgcacgccgagaacggcaccgccatcgacgtcctcgtccagcaggccctggccgccgggaacaccgaccccgtcttccacgggctcacccggcccgccgccctggagggcgaggccgtcaaccgggccatcgccctggccgaggtcgccggcgacaccccgctgtacgtcgtgcacgtgtcgtcctccccggcgctggaccggatcgcgtcggcgcgcagcgagggccgcaacgtgttcgccgagacctgcccgcagtacctgtacctcaccctggaggaccacctcggcgcgggcggaccgggcagcttcgagggggcgaagtacgcctgctccaccccgctgcgctccaagcacgaaccccacgccagggacctgtggaaggggctgcgcaccgacgacctcgccgtcgtctccaccgaccactgccccttctgcttcaacgaccagaagcagctcggccgcggggacttctcgaggatccccaacggcctcgggctcgtcgagcaccggatggacctcgtccaccagggcgtcgtcgacgggaacctgtccctgcagcgctgggtggagacgtgctcgaccaccccggcccggatgttcgggatgtacccgcgcaagggcaccgtcgcccccggttcggacgccgacatcgtgatctacgacccggccgccacgacgacgatcagcgcgcagacccaccacatgaacctggaccactccgcgttcgagggcgtgaccctgcagggacgggtgcgcaccgtcctgtcccggggccggaccgtcgtcgaccgcggcacgtggtcggggcgggagggccacggccgctacgtccggcgcgggctgtcgcagtacctgcgctga

SEQ ID NO: 64848 - protein, 472 aa, Kineococcus radiotolerans SRS30216
MTRTLVSGGTLVSTTGATPTDVLIEGETVTALLAPGTGEEFSVDTRIDATGCYVLPGGVDVHTHMQMPFGGTEASDTFATGTRAAAFGGTTTIVDFAVQRTGEVVEESLAAWHAKAEGNCAIDYGFHVILGGVDEDSLKAMDSLVAHEGISSFKLFMAYPGVFHSDDGQILRAMQRATDNGATIMMHAENGTAIDVLVQQALAAGNTDPVFHGLTRPAALEGEAVNRAIALAEVAGDTPLYVVHVSSSPALDRIASARSEGRNVFAETCPQYLYLTLEDHLGAGGPGSFEGAKYACSTPLRSKHEPHARDLWKGLRTDDLAVVSTDHCPFCFNDQKQLGRGDFSRIPNGLGLVEHRMDLVHQGVVDGNLSLQRWVETCSTTPARMFGMYPRKGTVAPGSDADIVIYDPAATTTISAQTHHMNLDHSAFEGVTLQGRVRTVLSRGRTVVDRGTWSGREGHGRYVRRGLSQYLR

SEQ ID NO: 64849 - DNA, 1359 bp, Desulfitobacterium hafniense DCB-2
  CDS (1)..(1359): transl_table=11
gtgtttaatctcgtcattaaaaacggtaaggttgtgactgcggacaaaattattgaagccagcttagggatcaataatggcaaaatcgccgcaatcatcgaggctggaacagagatccaagccgaaaaagtcatcgatgccaaaggcaattatgtctttccgggagccatcgatactcatgcgcatttaaacgatcctggttatctctggagagaagattacgctcacggtacagcagctgcaggagtcggaggatttaccaccatcatcgacatgccgttgcaaaatgaaccggccatgaccgatggccaaattctcgataaaaagctggaagtcgtttctcccaatgcctatgtagatttttgtttctggggcggtttagtcgattataaccttaatcagctcaaagaattggacgaaaaaggctgcgtcgcctttaaatccttcatcgggccagtctccccggattatgtatccctcaccatcggccaggccaaagaggccatggaaatctgcaaagagttcgatggccgggcaggcttccactgcgaagattattccctgatcaaatgggaagaagcaagagccaaacgcaaagacaccaacgattggcaggatttcctggactcccgtcccgtgattgccgaactgatcgccacccaaaatattatcgatttagccaaagaagtgggagctaaggtgcatatctgtcatgtcagtcatccccgtgtggcggaaatcatccgccaggcccaaaacgagggtgtggatgtcaccgctgagacctgcggccattacctcacctttacggatcaggatgtcgtcaaaaacggcagtcttttcaaatgtgctcctcctctacgtgatgccgcagccgtggaaaggatgtgggaatacgtcaataacggaaccctgtcggccattgcttccgaccactctccctgtgagcttagtgagaaaagtgaagaaaagcacggggtcttcggagcctggggcggaatcagcggcatccagaacgttatgcaggtagtcttcagcgaaggggtcgttaagagaggctattgccctaccctgctggcccgctctttaagcgaaggcccggccaaagctttcggcatcttcggcaaaaaaggtgccatccaagtaggctttgacgccgatctcgtgatcctggacccggaaaaagaatgggagatcacacccgaatccctctactatgtcaatcccatatcagcctttgtgggcttaaagggcaagggactccctgtctgcactctcgtccgcggcgaagtcgtcgcccaggacggacaattagtcggacaaaaaggccatggcgaatacgtaagaaaaatcaagtaa

SEQ ID NO: 64850 - protein, 452 aa, Desulfitobacterium hafniense DCB-2
MFNLVIKNGKVVTADKIIEASLGINNGKIAAIIEAGTEIQAEKVIDAKGNYVFPGAIDTHAHLNDPGYLWREDYAHGTAAAGVGGFTTIIDMPLQNEPAMTDGQILDKKLEVVSPNAYVDFCFWGGLVDYNLNQLKELDEKGCVAFKSFIGPVSPDYVSLTIGQAKEAMEICKEFDGRAGFHCEDYSLIKWEEARAKRKDTNDWQDFLDSRPVIAELIATQNIIDLAKEVGAKVHICHVSHPRVAEIIRQAQNEGVDVTAETCGHYLTFTDQDVVKNGSLFKCAPPLRDAAAVERMWEYVNNGTLSAIASDHSPCELSEKSEEKHGVFGAWGGISGIQNVMQVVFSEGVVKRGYCPTLLARSLSEGPAKAFGIFGKKGAIQVGFDADLVILDPEKEWEITPESLYYVNPISAFVGLKGKGLPVCTLVRGEVVAQDGQLVGQKGHGEYVRKIK

SEQ ID NO: 64851 - DNA, 1350 bp, Desulfitobacterium hafniense DCB-2
  CDS (1)..(1350): transl_table=11
atgagtcattatgatctaatcctgcgcaacggaaacgtggtttgtccggatggtgtcagaaaagcagacattgccgtcagtgatggtaaaattgtgctcatagctgaagaaatccccggagatgccaaggaaatcatcgatgccgccggcaagcatattttccccggtatcaccgatggccatgtccactttaatgatcccggcagaacagagtgggagaccattaccacagggtccagcgctttagcggccggcggcggagttgcctactttgatatgcccctcaactgcagtccctgcactctggacgccgtgaactttaacaacaaactggccgtagcccagaaagattccttggtcgattacggtttctggggagggttgacctctgccaatttagataaattggatgaactggccgagtgcggagtcattggttttaaggctttcgcctgccacagcggtatcgatgagtttccaagaatggatgattatacggctttagtgggtatggagaaattagccaaactgggcctgccccttatggttcactgtgaaaacgctgagatcaccaaggaacttaccgaattatccttagccaacaatcgtaccggcgtacgggattatttcgccgcccgcccccccattacggaaatcgaaaacgtttcccggatgattaccttcgctgaggaaaccggatgcaaattgattatcgcccatatcagcactgccaaagccgtggagcttgtagctcaagccagagcaagaggtgtggatgtctactgtgaaaccatcggtcattatttatacctcaccggtgacgatgtcgagcgtttaggtacggtagccaaatgctctcctcccattcgcgatggggaaaaccagcttcagatgtggggccggctctttaatgacaacatcgctttcgtttcttccgaccactccccctgtgatcccaagctgaaaaacggtgaattcatgcgtgtctggggcggcatctccgcttgccagaccaccttgcaaggcttgctcacccatgcttaccatgaccggaaattccccttggttaagatcgctcagttaactgcccagcatgtcaacgaaatcttcaagatcaaggacaaaggtcaaatcgccctgggctatgatgctgattttgccttggtcgatctggatcatgaatttaccctgcaggcagaagatctcttctacaaacataaggtgagcccttatgtgggagaccgtttccgcggctctgtcagccaaaccattctcagaggaaccacgatctataaggacggaaaaattgtttcccaacccatcggtaaacatttaagaccccatcaataa

SEQ ID NO: 64852 - protein, 449 aa, Desulfitobacterium hafniense DCB-2
MSHYDLILRNGNVVCPDGVRKADIAVSDGKIVLIAEEIPGDAKEIIDAAGKHIFPGITDGHVHFNDPGRTEWETITTGSSALAAGGGVAYFDMPLNCSPCTLDAVNFNNKLAVAQKDSLVDYGFWGGLTSANLDKLDELAECGVIGFKAFACHSGIDEFPRMDDYTALVGMEKLAKLGLPLMVHCENAEITKELTELSLANNRTGVRDYFAARPPITEIENVSRMITFAEETGCKLIIAHISTAKAVELVAQARARGVDVYCETIGHYLYLTGDDVERLGTVAKCSPPIRDGENQLQMWGRLFNDNIAFVSSDHSPCDPKLKNGEFMRVWGGISACQTTLQGLLTHAYHDRKFPLVKIAQLTAQHVNEIFKIKDKGQIALGYDADFALVDLDHEFTLQAEDLFYKHKVSPYVGDRFRGSVSQTILRGTTIYKDGKIVSQPIGKHLRPHQ

SEQ ID NO: 64853 - DNA, 1515 bp, Medicago truncatula
  CDS (1)..(1515)
atggatcagctactatggagagtattgccactgttaacactcctaatttcattctcactattcttctatttacaatctcctattataaagttaccaggagatgagtgcagtcttcttccatatagtcattattggatatccagcaaacgtattttgacttcacaaggattcatttctggatcagtggagataaacgaagggaagatagtttctattgttgaaggttatggcaagaaggataattctgtgcatcaagtgattgattatggagatgctgttgtcatgcctggcttgattgatgtgcatgtacatcttgatgaacccgggagaactgattgggagggatttgttactggtacccaagctgctgctgctggaggtgtaactaccgtcgttgacatgcctctaaacaatcatccaacaaccatgtctaaggaaacgctagaacttaagcttgaagctgcagaggataaaatctatgtcgatgttggtttttggggaggcctggttcctgaaaatgcacaaaataccagtattcttgaaggtctcttagatgctggtgttcttggtttaaagtctttcatgtgtccttcaggaattgatgacttcccgatgactactattgaacatatcaaggagggattgtctgtgttggcaaaatacagaagacctttacttgtgcactccgagattcaacaagattctgaaagtagttcggaacttgaaggtaatggcgaccctcattcttacaagacatatctcgacactaggccaccttcttgggaggaggcagccattaaagaacttgtagatgctacaaaggatactagaatcggtggttctttagaaggagcacatgttcacattgtccacttgtctgattcaagtgcttccttggatcttattaaggaagcaaaacgccgtggggacagcatcagcatcgaaacttgcccccattacctaacattctcatctgaagagataccagataaagatactcgttacaagtgttccccgcccattcgtgatgcatcaaaccgagaaaagttatgggaggctctactggacggacacattgacctattaagttctgatcattcaccaactgtacctaaactcaagcttcttaaggaaggtgacttcttgaaagcgtggggtggcatatcatctttgcagttcgatcttccagtgacttggtcatatgggaagaagcatgggttaactctagaaaaattatcgttattgtggagccagaaacctgcaaaattagcggggttagaatcaaagggagccattgcagttggaaatcatgcagatattgtagtgtggcagccagaggtggagtttgaccttaacgacgattatcctgttttcattaaacatcctagcctgtctgcatatatgggaagtaggttagcaggaaaagttttggacacttttgtgagaggaaaccttgtctttaaggatggtaagcatgctcctgctgcctgtggtgttccgattctagccaaatga

SEQ ID NO: 64854 - protein, 504 aa, Medicago truncatula
MDQLLWRVLPLLTLLISFSLFFYLQSPIIKLPGDECSLLPYSHYWISSKRILTSQGFISGSVEINEGKIVSIVEGYGKKDNSVHQVIDYGDAVVMPGLIDVHVHLDEPGRTDWEGFVTGTQAAAAGGVTTVVDMPLNNHPTTMSKETLELKLEAAEDKIYVDVGFWGGLVPENAQNTSILEGLLDAGVLGLKSFMCPSGIDDFPMTTIEHIKEGLSVLAKYRRPLLVHSEIQQDSESSSELEGNGDPHSYKTYLDTRPPSWEEAAIKELVDATKDTRIGGSLEGAHVHIVHLSDSSASLDLIKEAKRRGDSISIETCPHYLTFSSEEIPDKDTRYKCSPPIRDASNREKLWEALLDGHIDLLSSDHSPTVPKLKLLKEGDFLKAWGGISSLQFDLPVTWSYGKKHGLTLEKLSLLWSQKPAKLAGLESKGAIAVGNHADIVVWQPEVEFDLNDDYPVFIKHPSLSAYMGSRLAGKVLDTFVRGNLVFKDGKHAPAACGVPILAK

SEQ ID NO: 64855 - DNA, 1509 bp, Aspergillus niger
  CDS (1)..(1509)
atgaaggctaccccaggaatcgacttgattatcatcaacgctacagtgcagcaggccaccgcctccgatgtagttcccaatcaagatatcgccatctccgacggcaagatcgtccttctgggacagaatctcccggcactcttccatagcgcagcaacgctcgatgcagaaggcgcatacgtgacgccaggtggtgtcgacagccatgtgcatctgcagcaggacaactctccgaccggtgatacctgggagtcagggactcgctcggccatcgcaggagggacaaccacggtcctagcctttgccagtcagaaacgcaccgatgagtctctctttcctgtcgttgaggaatatcaccgaagggccagcggccaggcttactgcgactacggcttccatctcatcctgaccaacccaactccaaccgtcctcgataaggagctcccagtgctagtcagcagtggcatcagctctgtaaagctgtacatgacatatcagccgatgcggctgggagatggcgagattctggatgtcatggagtccacccgccggctggggatgacgacgatggtgcacgccgagaatcatgagatgatccagtggatgacggagaaattggaggcacgccgccgtactgagccatatggtcatgctctggcgcgtcctaatattgcagaagatgaggcgacatatcgtgttatttctctgtctgagctggctgatgttcccatcttgatcgtgcacatgtcgtccaagctggctgcggcacatgtgcgagcggcccagacacggctgctgccggtccacgcggaaacctgcccacactatctgttcttcacgagcgagcgcctaaaagatgaaaactttgaaggagccaaatgtgtatgctcgccagcgttgcgagaggatccgatggacctggaggcgatgtgggcgggactggcgaattcgaccttcacgacagtctcaagcgaccacgcaccatccaaatttgatcatcctctcggcaagaagaagggcacatccagcttcactcagatccccaatggcttgcccgggttggaaactcgactacccacgatgttctgcggcggtgtgctcaccggtcgcatctcgatccagaagttcgtcgaactgacgagctcaaacccagccaagctgtacggacttgggagtaccaaggggacaatccagcccggtttcgacgcggatctgacgatctggtatcccacgccagagcaagctgcctctcacggcacgtctatcatgacaccgttccagctgtccaacgacatgctgcaccatgacatcgactacacgccgtttgagggattggagttcaccaactggcctcggtacacgatcctccgcggacagaccgtgtggaaccgcgacgctgggggcatcaccggcagcaagggagacggagctttcctgaagagagggccgagcacattgagcaagccgcggaatgtgtttgtcaatgagtttaatccgtactctagttag

SEQ ID NO: 64856 - protein, 502 aa, Aspergillus niger
MKATPGIDLIIINATVQQATASDVVPNQDIAISDGKIVLLGQNLPALFHSAATLDAEGAYVTPGGVDSHVHLQQDNSPTGDTWESGTRSAIAGGTTTVLAFASQKRTDESLFPVVEEYHRRASGQAYCDYGFHLILTNPTPTVLDKELPVLVSSGISSVKLYMTYQPMRLGDGEILDVMESTRRLGMTTMVHAENHEMIQWMTEKLEARRRTEPYGHALARPNIAEDEATYRVISLSELADVPILIVHMSSKLAAAHVRAAQTRLLPVHAETCPHYLFFTSERLKDENFEGAKCVCSPALREDPMDLEAMWAGLANSTFTTVSSDHAPSKFDHPLGKKKGTSSFTQIPNGLPGLETRLPTMFCGGVLTGRISIQKFVELTSSNPAKLYGLGSTKGTIQPGFDADLTIWYPTPEQAASHGTSIMTPFQLSNDMLHHDIDYTPFEGLEFTNWPRYTILRGQTVWNRDAGGITGSKGDGAFLKRGPSTLSKPRNVFVNEFNPYSS

SEQ ID NO: 64857 - DNA, 1437 bp, Aspergillus niger
  CDS (1)..(1437)
atggaggcttctcagatcccatccattgcagtgatcgcctcgtcgcgcgccgtcatctccggccgtttgacatcagccactattgtcatctctcgcaccaccggcaagatcacggctgtctttgattcggtgatcccggcttctgatttccctgctggcaccccctatactgattattccccccacgttctgctccccggtctggttgacgcccatgtccacctgaacgagccgggccgcaccgaatgggagggcttctacaccggcacccaggcggccgcttttggcggtgtcaccacggtcatcgacatgcccctgaatgctatccctcccaccaccacggtggccaacttcaaggagaaactccgtgctgcccaagggaagtgctgggttgatgtcggtttttatggcggcatcatccccggcaatgccggcgacttgaaagcccttgtccaggagggtgttcgcggcttcaagggcttcctcattgacagcggagtcgacgaattccccgccgtgtcttccgaagacatccgtaaggccatggctgaactagcggatgagcctacgacgctcatgttccacgccgagatgctgccgccctccactgcagccgaggagaaggaccaagctctcgaaggtcccgcagaggcgtattcgactttcctcgcatcccgtccgtcggccttcgaaacttgtgccgtggaggagatcattaccctgtctcaggtggcccccaagctccccctccacattgttcacctgtctgccatggaagccatccctctgttgcgcaaagctcgcgcggatggcgtccctatcactgcggagacctgcttccactacctgtccttagcggccgaggagatccgggatggagacacccgccacaagtgttgtccgcccatccgttcccagtcaaaccaggacgctctttgggatgagttggagcgccatgcggaagatggcgtgattcagactgttgtctcagaccactccccctgcacccctgatctcaagctcctaccatcgcacggtagcttcctttccgcctggggcggtatctcctcagtgggcctcggccttcccatcctgtggacggagcttagccacgaaaccacgacccaacaggccctgcaggacgttgtacgactctgctgcaccaacacggccgtccaggttggcctgcagcaccaaaagggcgacctggttcccggccacgacgccgacatttgtgtcttcgatgacaccgcggaatggatcgtcgaacccagcaccatgctcttccgcaacaagtgctcaccgtaccagggccgcaagcttcgtggaatggtccgcgagacctggctgcgtggcgagaagatcttcagtcgcgacgatggcttcagcaccaagacgccctccggcggcctgcttctcgagaagcgtgcttgttaa

SEQ ID NO: 64858 - protein, 478 aa, Aspergillus niger
MEASQIPSIAVIASSRAVISGRLTSATIVISRTTGKITAVFDSVIPASDFPAGTPYTDYSPHVLLPGLVDAHVHLNEPGRTEWEGFYTGTQAAAFGGVTTVIDMPLNAIPPTTTVANFKEKLRAAQGKCWVDVGFYGGIIPGNAGDLKALVQEGVRGFKGFLIDSGVDEFPAVSSEDIRKAMAELADEPTTLMFHAEMLPPSTAAEEKDQALEGPAEAYSTFLASRPSAFETCAVEEIITLSQVAPKLPLHIVHLSAMEAIPLLRKARADGVPITAETCFHYLSLAAEEIRDGDTRHKCCPPIRSQSNQDALWDELERHAEDGVIQTVVSDHSPCTPDLKLLPSHGSFLSAWGGISSVGLGLPILWTELSHETTTQQALQDVVRLCCTNTAVQVGLQHQKGDLVPGHDADICVFDDTAEWIVEPSTMLFRNKCSPYQGRKLRGMVRETWLRGEKIFSRDDGFSTKTPSGGLLLEKRAC

SEQ ID NO: 64859 - DNA, 1494 bp, Oryza sativa
  CDS (1)..(1494)
atggcgatggcggcggcgaagggcagggtcctgccactgctggcggtggcggcggcgctcgcggcggcgctcctctaccgcgcgcccttttccaaggtctccgggagattccctttcccccggtattcgaatccgcgatctcttctctcgtacgagaaagctgaggagaatccctttgtctttgcagagcctgggcgtggaggtgaagggagggctgatcaacgcgatcgccgtcggggattaccggagcttcctgctccggcgaccggtggtggactacggcacgcgcatcttgatgagccaggacgtgctgagtgggaggggttctccactggtacaagagcagcagctgcaggtggcattacaacattagtggacatgcctcttaatagctacccgtcaactgtttctgaagaaactctcaagctgaagttggatgcagctaaggataaactacatgttgatgtagggttctggggaggcctcgttccagagaatgccctcaatccaagtgcactagagagcctattaaattcaggcgtcttagggctcaagtcatttatgtgcccctcaggtataaatgacttccccatgacaaattcaactcatattgaggagggcctggttacattggcaaagtataaaaggccgttacttatccatgcagaacgcatacccgatgttcagaatgaagatgggatcgatggtgaactagatcctaaagcctatacgacatatcttaaatctagaccaccagcatgggaggaagcagcgatcaaagatctgcaacgtgcgatgaaagacacggagatagggggtcggtcagaaggagctcatattcacatagttcatctctcagatgcaaaaacttctcttgggcttcttaaggatgcaaaacaaaatggtgcaagggttagtgtagaaacctgtcctcattacctggcgttttcagctgaagaagttcctgatggagatactcgctttaaatgtgctcctcctatacgcgattcaaccaacagggataatctctgggaagctctgcttgatggacacatagacatgttgagctcagaccattcaccatcagctcctgatctcaaactcatggaggaaggtaacttcttaagggcatggggaggcatatcatctttgcagtttgttctccctgtaacatggtcgcatgggaaaaaatacggtatcagtttgaatcaactggcatcatggtggagcgaaaggcctgctatgcttgcagggttaaagaaaaagggtgctgttctgccgggataccgtgctgatattgtggtatggaaacctgaggctcaattccatcttgatgacagccatcctgtctaccataagcatcggaatatttcggcatatttgggaaagcagctttcagggaagatactgtccacctttgtgggtgggaatcttgtgttcgctgaagacaaacatgcaaaggttgcatgtggtgctccaatcctcgccaaataa

SEQ ID NO: 64860 - protein, 497 aa, Oryza sativa
MAMAAAKGRVLPLLAVAAALAAALLYRAPFSKVSGRFPFPRYSNPRSLLSYEKAEENPFVFAEPGRGGEGRADQRDRRRGLPELPAPATGGGLRHAHLDEPGRAEWEGFSTGTRAAAAGGITTLVDMPLNSYPSTVSEETLKLKLDAAKDKLHVDVGFWGGLVPENALNPSALESLLNSGVLGLKSFMCPSGINDFPMTNSTHIEEGLVTLAKYKRPLLIHAERIPDVQNEDGIDGELDPKAYTTYLKSRPPAWEEAAIKDLQRAMKDTEIGGRSEGAHIHIVHLSDAKTSLGLLKDAKQNGARVSVETCPHYLAFSAEEVPDGDTRFKCAPPIRDSTNRDNLWEALLDGHIDMLSSDHSPSAPDLKLMEEGNFLRAWGGISSLQFVLPVTWSHGKKYGISLNQLASWWSERPAMLAGLKKKGAVLPGYRADIVVWKPEAQFHLDDSHPVYHKHRNISAYLGKQLSGKILSTFVGGNLVFAEDKHAKVACGAPILAK

SEQ ID NO: 64861 - DNA, 1515 bp, Aspergillus oryzae
  CDS (1)..(1515)
atggaaacgcaacaaatcccctctatcgcggtggtgacgtcgtctcgagccgtcatctcgggtcgtctaacgtcagccacaatcgttatctctcgcacctctggaaagatcactgcggtctttgactccgtcattcctgcctctgacttccctgaagggactccctataccgactattcgccttatgtcttgcttcccggcttggttgatgcccatgttcacctgaacgagcccggccgcaccgaatgggagggcttctatacaggcacccaggctgctgcctttggtggtgtcaccaccgtcattgacatgcctctgaacgctatcccgcccaccaccaccgtggcaggtttcagggagaagctgaatgctgcccaaggcaagtgttgggtcgatgtcggcttctatggcggcatcatccccggcaacgctggcgaactgaaggccctcgttaaccaaggtgtccgcggcttcaaggggtttctcattgacagtggggttgacgaattccccgccgtctcctcggaagacatccgtaaggccatggcggaacttgccgatgagcccaccaccctcatgttccatgcggaaatggtgccccccaacacatcctcccaggcagaccaaccccagatccccgaaggccccgcggaagcatactccactttcctggcatctcgtccctccgcatatgagacctgtgctgtagaagagatcctgtcattggcccacctggctcccaagcttgctttgcatattgtccacctatcggccatggaggctattccactcctgaagaaagcccgtgcagacggaatttctatcactgcagagacttgtttccattatctatccctggccgccgaggagatccgggacggtgatacccgccacaagtgctgcccaccgattcgctcacagcttaaccaggatgccctctgggccgaattggaacgccacgccgaggatggtgtcatcaagaccgtcgtgtcggaccactccccgtgcaccccggatctgaagctccttccttcccatatcccgggtagctgcacctccaagggcgatgccgccatcgaaaagaaccaaggcagcttctcctccgcctggggcggtatctcttctgtcggtctgggtcttccaatcctgtggacggagctcagccgccggaagggtctcacctctgctccggaggataccaacaccaagcgggccctccaagacattgtacgcctgtgctgtgccaacaccgcggcacaggttggacttgagcgccagaaaggtgatctcgtccccgggtttgacgccgacatctgtgtcttcgacgactctgccgaatgggtcgtggagcctagcaccatgctcttccggaacaagtgctcgccgtaccagggtcgcaccctgcgcggcatggtccgtgagacgtggctgcgcggcgagaaggtctttagccgagacggcggcttcagcaggaagactccaaccggcacattgctgttagagaaacgtgtttga

SEQ ID NO: 64862 - protein, 504 aa, Aspergillus oryzae
METQQIPSIAVVTSSRAVISGRLTSATIVISRTSGKITAVFDSVIPASDFPEGTPYTDYSPYVLLPGLVDAHVHLNEPGRTEWEGFYTGTQAAAFGGVTTVIDMPLNAIPPTTTVAGFREKLNAAQGKCWVDVGFYGGIIPGNAGELKALVNQGVRGFKGFLIDSGVDEFPAVSSEDIRKAMAELADEPTTLMFHAEMVPPNTSSQADQPQIPEGPAEAYSTFLASRPSAYETCAVEEILSLAHLAPKLALHIVHLSAMEAIPLLKKARADGISITAETCFHYLSLAAEEIRDGDTRHKCCPPIRSQLNQDALWAELERHAEDGVIKTVVSDHSPCTPDLKLLPSHIPGSCTSKGDAAIEKNQGSFSSAWGGISSVGLGLPILWTELSRRKGLTSAPEDTNTKRALQDIVRLCCANTAAQVGLERQKGDLVPGFDADICVFDDSAEWVVEPSTMLFRNKCSPYQGRTLRGMVRETWLRGEKVFSRDGGFSRKTPTGTLLLEKRV

SEQ ID NO: 64863 - DNA, 1815 bp, Robinia pseudoacacia
  CDS (55)..(1593)
  misc_feature (1782)..(1782): n is a, g, c or t
ggcacgaggatcaaatcacactcataattgactgaggataatactgggtgggaaatggatcagctagtgtggagggtattacccatgttagcactcttagtttccttcctagtattcttctacttgcaggattcttacaaggctcaattatctcctttcataaagttaccgggtgatgagtgcagccttcttccccatcgtcattactggatatctagcaaacgcattgtgaccccacaagggatcatttctggatcagtggagataaatgaaggggagattgtatctattattgaaggctatggtaagcaggggaattctatgcaagaagcagtgattgattatggagaggctgttgtcatgcctggcttgattgatgtgcatgtacatcttgatgagccaggaagaactgaatgggagggatttgatactggaaccagagctgctgctgctggaggtgtaacaacagtggttgacatgcctctaaacaattaccctacaactgtgtctaaggaaacactgcaacttaagcttgaagctgcagagaagaaactctatgttgatgttggtttttggggaggactaatccctgaaaatgcactaaacaccagtattcttgaaggtctcttaagtgccggtgttcttggtgtaaagtcttttatgtgtccttcaggaattgatgactttcctatgactactattgaccatatcaaggagggattgtctgtgttggcaaaatatagaagaccattacttgtgcatgctgaaattcaacaagattctaaaaatcatttggaacttaaagggaatggtgatccgcgtgcttatttgacctatctcaacactagaccaccttcatgggagcaagccgccattaaagaacttgtagatgttactaaggacactataattggtggtcctttagaaggagcacatgttcacattgtccacttgtctgattcaagtgcttccttagatctgattaaggaagcaaaaagtcgtggtgacagcataagtgttgagacttgcccccattacttagctttctcatctgaagagataccagatagagatactcgtttcaagtgttccccacccattcgcgatgcattaaacaaagaaaagttgtgggaggctgtattggagggacacattgacctattaagttctgatcattcaccaactgtacctgaactcaagcttcttgaggagggtgacttcttgagggcatggggtggcatatcatctttgcagtttgatcttccagtgacgtggtcatatgggaagaaacatggactaacactagaacaattatcgttattgtggagcaagaaacctgcaacatttgcggggttggaatcaaagggggccattgcagttggaaaccatgcggatattgtagtgtggcaaccagagctggagtttgacttgaatgatgattatcctgttttcattaaacatcctagcctctctgcttacatgggaagaaggttgtccggaaaagttttggacacttttgtcagaggaaaccttgtcttcaaggatgggaagcatgctcctgcagcctgtggtgttccaattctagccaaatgataagttaaaatttgatgggtttcattcagatgctacttgccttgggtcataaataagagatggaagtagctaatggcttcagtgattgagctagacgttctcatcctcatagactaatgttgtagcttgtattatcgctatgtggatgtttggacaatgaaacaatgtcatacttattgaatgtatacnaagtttctgtcttcaaaaaaaaaaaaaaaaaaa

SEQ ID NO: 64864 - protein, 512 aa, Robinia pseudoacacia
MDQLVWRVLPMLALLVSFLVFFYLQDSYKAQLSPFIKLPGDECSLLPHRHYWISSKRIVTPQGIISGSVEINEGEIVSIIEGYGKQGNSMQEAVIDYGEAVVMPGLIDVHVHLDEPGRTEWEGFDTGTRAAAAGGVTTVVDMPLNNYPTTVSKETLQLKLEAAEKKLYVDVGFWGGLIPENALNTSILEGLLSAGVLGVKSFMCPSGIDDFPMTTIDHIKEGLSVLAKYRRPLLVHAEIQQDSKNHLELKGNGDPRAYLTYLNTRPPSWEQAAIKELVDVTKDTIIGGPLEGAHVHIVHLSDSSASLDLIKEAKSRGDSISVETCPHYLAFSSEEIPDRDTRFKCSPPIRDALNKEKLWEAVLEGHIDLLSSDHSPTVPELKLLEEGDFLRAWGGISSLQFDLPVTWSYGKKHGLTLEQLSLLWSKKPATFAGLESKGAIAVGNHADIVVWQPELEFDLNDDYPVFIKHPSLSAYMGRRLSGKVLDTFVRGNLVFKDGKHAPAACGVPILAK

SEQ ID NO: 64865 - DNA, 1452 bp, Ctenocephalides felis
  CDS (1)..(1452)
atgaaaagcagtacctgtatttttcttctggtcattatgctgaattgcaagaaccttgttaatgctgcgtgcaccaacaacgcgcctccaatgaagatattccgtagccgaagagttcttctcggtgatggtactgaaagagatgctggcattgtagttgattcctccggaagaataaaaagtataatttcaggagaagaagtggaaaggatagctaacgaaactaaagttgaggtgttggactacggtcaattttcaatatggccaggtgtgatagactctcatgtgcacgtcaacgaaccaggaagagaatcctgggaaggatacaccacagctactaaagcagcagcttggggcgggattaccacaatagtagacatgcctttgaattccatcccacctacaactactgtagagaatttgagaacaaaagtgaattcagcctgtggtaaaacgcatgttgatgtcgctttctggggaggcgtgattcctggcaatgcgcacgaattgttgccacttatcaacgccggagtaagaggattcaaatgttttacaagtgaaagtggtgtcgatgagtttccacaggttactaaaaatgatctggaaatggctctaaaagagctccagaaagcaaattccgtacttctgtaccatgccgaattacccgctcctcaagaaaatgttacaagcaatgaaactgaaaagtacatgacttacctgaaaacacgacctccaagtatggaagtaaatgctattgatatgattatagacctcacaaaaaaatataaagttaggtctcacatagtgcatctatcagcagcaggtgctttaccgcaattgaaaaaagcgcgctcagagaacgttccactttcgattgaaacttgtcatcattacttaacctttgctgctgaagatgttccagatggacatactgaatacaaatgcgctccaccaattagagaagaaagtaatcaagaaaaattatggcaagctttggaaaacagagatattgatatggtagtcagtgatcattctccatcacctgctgcactgaaaggcctgtgcaatggttgtcatcctgatttcctaaaagcttggggtggaattgctggtatgcagtttggattatctttaataaggaccggtgcttctaaaagaggctttaaagctcatgatgtatctcgtttattatctgcgggacctgcgaaattaactggactggatggcataaaaggacaaatcaaagaaggcttggatgctgatttagtaatttgggatcctgaggaagaatttaaggtcactaaagacataatccaacacaagaataaagaaacaccatacttaggaatgacgttgaagggcaaagttcatgcaactgttgtacgaggagactttgtttaccgtaatggacaaccattcgaaattccaaaaggaaatttacttattgaatga

SEQ ID NO: 64866 - protein, 483 aa, Ctenocephalides felis
MKSSTCIFLLVIMLNCKNLVNAACTNNAPPMKIFRSRRVLLGDGTERDAGIVVDSSGRIKSIISGEEVERIANETKVEVLDYGQFSIWPGVIDSHVHVNEPGRESWEGYTTATKAAAWGGITTIVDMPLNSIPPTTTVENLRTKVNSACGKTHVDVAFWGGVIPGNAHELLPLINAGVRGFKCFTSESGVDEFPQVTKNDLEMALKELQKANSVLLYHAELPAPQENVTSNETEKYMTYLKTRPPSMEVNAIDMIIDLTKKYKVRSHIVHLSAAGALPQLKKARSENVPLSIETCHHYLTFAAEDVPDGHTEYKCAPPIREESNQEKLWQALENRDIDMVVSDHSPSPAALKGLCNGCHPDFLKAWGGIAGMQFGLSLIRTGASKRGFKAHDVSRLLSAGPAKLTGLDGIKGQIKEGLDADLVIWDPEEEFKVTKDIIQHKNKETPYLGMTLKGKVHATVVRGDFVYRNGQPFEIPKGNLLIE

SEQ ID NO: 64867 - DNA, 1795 bp, Arabidopsis thaliana
  CDS (19)..(1539)
agagatcaagagagagatatggagagaactttgcttcaatggagactattgcctcttctcgcactcatcgttgctcttttctccttcttcttcgcttctcctcgctctttacaggggaataataagtgtagtcttcttcctcatgatcattactggatctcaagtaaacgcatcgtcacacctaatggtctcatctctggttctgtggaggtgaagggaggaattattgtgtcggtggtgaaggaagttgattggcataagagtcaaaggagtcgagtgaaagtgattgattatggagaagctgtcctcatgcctggtctcattgatgtgcatgttcatcttgatgatcctggaagaagtgaatgggaaggttttccttctggaactaaggctgctgctgctgggggaataactacattggttgacatgcccttaaacagtttcccttcaactgtatctcctgaaactttgaaactcaagattgaagctgcgaaaaacagaatacatgttgatgttgggttctggggaggtctggtacctgacaatgcactcaactcaagtgctcttgagtctctcttagatgctggagttcttggtctcaagtcctttatgtgcccttcaggaatcaacgattttccaatgacaaacatcactcatataaaggaaggactatctgtattagctaaatacaaacgaccattgcttgtacacgcagagatcgagagagacttagagattgaagatggtagtgaaaatgatcctcgttcttatctgacttatttaaaaaccaggcctacttcatgggaggagggagcaatcagaaacctattatcggttactgaaaacacaagaattggtggttctgcagaaggagctcatcttcatattgtacatttatctgatgccagttcttccttggatttgataaaggaagcaaaaggcaaaggagacagtgttactgttgaaacatgtccacattacctagctttctcagccgaagagattccagaaggtgatactcgtttcaaatgctcccctcctatacgtgatgcggcaaatagagaaaaattgtgggaagctttgatggaaggagacattgatatgctgagctctgatcattcacctacaaagcctgaactcaaacttatgagtgatggcaacttcttgaaagcttggggtgggatatcttctttacagtttgttcttcctatcacatggtcttatggaaaaaagtatggagtaacgctcgagcaggtaacttcttggtggagtgataggccttccaaactcgctcgactacactctaagggagcggttacggttggaaaacacgcagatcttgttgtgtgggaacctgaagccgaatttgatgtagatgaagatcatccaattcacttcaaacaccctagtatctcagcttatttgggaagaagattatcaggcaaagtggtttcgacatttgtgagagggaacttggtttttggagaaggcaagcatgcttctgatgcttgcgggtctctgcaacttgcaactacttaacttaaaaagggatttaaaagatcttgatctgcaccatttaaacaaatgtaaatatgcgattaagagttgctctcatgttgcaagatggttgatgtaatgagtgagtcttttttgccaattgtaagtttaagactctctaaatcttgttgttggctttaaggttagtggactcatgtatatattgttgatgcaaataatttatatcgcttaagtaaatgatgtatatattgttgatgcaaataatttaaaagtatac

SEQ ID NO: 64868 - protein, 506 aa, Arabidopsis thaliana
MERTLLQWRLLPLLALIVALFSFFFASPRSLQGNNKCSLLPHDHYWISSKRIVTPNGLISGSVEVKGGIIVSVVKEVDWHKSQRSRVKVIDYGEAVLMPGLIDVHVHLDDPGRSEWEGFPSGTKAAAAGGITTLVDMPLNSFPSTVSPETLKLKIEAAKNRIHVDVGFWGGLVPDNALNSSALESLLDAGVLGLKSFMCPSGINDFPMTNITHIKEGLSVLAKYKRPLLVHAEIERDLEIEDGSENDPRSYLTYLKTRPTSWEEGAIRNLLSVTENTRIGGSAEGAHLHIVHLSDASSSLDLIKEAKGKGDSVTVETCPHYLAFSAEEIPEGDTRFKCSPPIRDAANREKLWEALMEGDIDMLSSDHSPTKPELKLMSDGNFLKAWGGISSLQFVLPITWSYGKKYGVTLEQVTSWWSDRPSKLARLHSKGAVTVGKHADLVVWEPEAEFDVDEDHPIHFKHPSISAYLGRRLSGKVVSTFVRGNLVFGEGKHASDACGSLQLATT

SEQ ID NO: 64869 - DNA, 1341 bp, Bacillus subtilis
  CDS (1)..(1341): transl_table=11
atggcttacgatatggtgataaaaggtgcgaaggcagttacgccagatggcgttatagaagctgatattgtagttcaaaacggtgtcattgccgagataggttctgacattgaagcaagcgggacggaaatcatccaggcagacgggaaatacgtgtttcctggtgtgatagattgccatgttcattttaatgaaccgggcagggaggattgggaggggtttgaaacaggttctcaaatgatggccgcaggcggttgcactacctattttgatatgccgctcaactgtattccatcaaccgtgacggcagagcatcttctcgcaaaagctgagctaggcaggcaaaaatctgccgtggattttgcgctatggggcggccttgtgccaggccatatcgaggacatccgtccgatggctgaagcgggagcgatcgggtttaaagcgtttttatcaaagtcaggcactgatgagttccgctctgttgatgaacggacattgctcaaaggcatggcagaaatcgcggctgcaggaaaaatcctcgctctccacgcggaaagcgacgcgatcacaagctacttgcagatggttttggccaataaaggaaaggtggatgcggatgcgtacgccgcctcccgcccggaggaagcagaagttgaagcggtgtatcgcacgattcagtatgcgaaggtgacaggctgtccggttcattttgtccatatcagcacggcgaaagcggtccggctgatcagagaggcgaaacaggaaggtcttgatgtttcggttgaaacatgtccgcattatgtcttgttcagccatgacgatttacggcaaaggggctctgtcgcaaaatgcgcgcctccgctccggtcacggcaatcaaaagagacgctgatcgagacgctcattgccggggacattgacatggtttcctcagaccattccccttgccgtccatccttgaagcgggaggataacatgtttttatcatggggcggaatcagcggcgggcagttcactttattaggaatgctggaactggcgcttgagcatcagattccatttgaaaccatcgcagaatggacagcggcggcccctgcaaaacgattcggccttcagaaaaaagggcggcttgaggcggggtgtgatgcagatttcgtgctcgtcagcatggagccgtacactgttacaagagaatcgatgtttgcaaagcataaaaaaagcatttacgaaggacatacatttccctgcagcatttcggccacttacagcaaaggccggtgcgtgtacaatgatggggaaaaagtcactgaaattgacggagctctggtcgttccttcgtaa

SEQ ID NO: 64870 - protein, 446 aa, Bacillus subtilis
MAYDMVIKGAKAVTPDGVIEADIVVQNGVIAEIGSDIEASGTEIIQADGKYVFPGVIDCHVHFNEPGREDWEGFETGSQMMAAGGCTTYFDMPLNCIPSTVTAEHLLAKAELGRQKSAVDFALWGGLVPGHIEDIRPMAEAGAIGFKAFLSKSGTDEFRSVDERTLLKGMAEIAAAGKILALHAESDAITSYLQMVLANKGKVDADAYAASRPEEAEVEAVYRTIQYAKVTGCPVHFVHISTAKAVRLIREAKQEGLDVSVETCPHYVLFSHDDLRQRGSVAKCAPPLRSRQSKETLIETLIAGDIDMVSSDHSPCRPSLKREDNMFLSWGGISGGQFTLLGMLELALEHQIPFETIAEWTAAAPAKRFGLQKKGRLEAGCDADFVLVSMEPYTVTRESMFAKHKKSIYEGHTFPCSISATYSKGRCVYNDGEKVTEIDGALVVPS

SEQ ID NO: 64871 - DNA, 1347 bp, Deinococcus radiodurans
  CDS (1)..(1347): transl_table=11
atgagccttgacctgctcctgcgtggcgcggtcctcgtgaccccggaaggtgaacgccgcgccgacctcggcattgtgggcgggcagattgccgaactcaccgacgagattgccacccccgccgcccagaccctcgacgtgagcggcctgcacgtctttcccggcgtcctcgacgaccacgtgcacctcaacgagccgggccgcacccactgggaaggcttcgagaccggcacgcaggcgctcgcggcaggcggggcgaccagctttctcgacatgccgctcaattcctcgccgccggtcctgacccgcgagcgctttgaggacaaggcgcggctgggtgaggaaaaatcgctcatcgacttcgggctgtggggcgggctgacgccgctgaatctcgaccagctcgacgacctcgccgaatgcggcgtcatcggcctcaaggcgttcatgtcgcacagcggcctcgacgagtttccggcggcggacgacctgacgctgtacgaggggatgcgaaccgccaagcgccacggcctcgtcgtcgccacccacgccgagagcaacgaatttacccgccgcctgaccgaaaccgcccgcgcccagggcaaaagcggcgtgcgcgactacctggagagccgcccggtcgtcaccgaactcgaagcggtgcagcgggcgctgctgttcgcgcaggacactggcgcggcgctccacctcgttcacgtgagcagtggggcggcggtggcgctcgcctacgaaggcaagcaaaagggcatcgacgtaaccatcgaaacctgcccgcactacctccacttcaccggcgaggacgtggagcgcgtcggcgcggcgctcaaatgtgcgcccccactgcgtgacccggcggtgcaggaggagctgtggcgcgagttgctcgccgggcacatcgacactgtgggcagtgaccactcgcccgcgccgcccgacatgaagaccagcgaggactttttctctctctggggcggcatcagcggcgcccagagcaccctgaacgtgatgctggaagacggctacgcccagcgcgggctgccgcttgaaatcattgccgcgttgctggcgctgaatccggcgcagcgcttcggcctgccgcaaaaaggccggttggcggtcggggccgacgccgatttcgcgctggttgctctgggcgagaaattcaccctcgacaccctctacgaccgctggcagcaaaacccctaccggggccagagcttccagggccgggtgcacgccacctacctgcgcggccagccggtctaccagaacggcgagttcacgggcaccccgcgtgggcgtctgctgcggccccggtccctctaa

SEQ ID NO: 64872 - protein, 448 aa, Deinococcus radiodurans
MSLDLLLRGAVLVTPEGERRADLGIVGGQIAELTDEIATPAAQTLDVSGLHVFPGVLDDHVHLNEPGRTHWEGFETGTQALAAGGATSFLDMPLNSSPPVLTRERFEDKARLGEEKSLIDFGLWGGLTPLNLDQLDDLAECGVIGLKAFMSHSGLDEFPAADDLTLYEGMRTAKRHGLVVATHAESNEFTRRLTETARAQGKSGVRDYLESRPVVTELEAVQRALLFAQDTGAALHLVHVSSGAAVALAYEGKQKGIDVTIETCPHYLHFTGEDVERVGAALKCAPPLRDPAVQEELWRELLAGHIDTVGSDHSPAPPDMKTSEDFFSLWGGISGAQSTLNVMLEDGYAQRGLPLEIIAALLALNPAQRFGLPQKGRLAVGADADFALVALGEKFTLDTLYDRWQQNPYRGQSFQGRVHATYLRGQPVYQNGEFTGTPRGRLLRPRSL

SEQ ID NO: 64873 - DNA, 1362 bp, Escherichia coli
  CDS (1)..(1362): transl_table=11
atgtcttttgatttaatcattaaaaacggcaccgttattttagaaaacgaagctcgcgttgtagatatcgccgttaaaggcggaaaaattgctgctatcggtcaggatctgggcgatgcaaaagaagttatggatgcgtctggtctggtggtttcgccgggcatggttgatgcgcacacccatatttctgaaccgggtcgtagccactgggaaggttatgaaaccggtactcgcgcagcggcaaaaggtggtatcaccaccatgatcgaaatgccgctcaaccagctgcctgcaacggttgaccgcgcttcaattgaactgaagttcgatgccgctaaaggcaagctgactattgatgcggcacaactcggtggcctggtgtcttacaacatcgaccgtctgcatgagctggatgaagtgggcgttgtcggcttcaaatgcttcgttgcgacctgtggcgatcgcggtatcgacaacgacttccgtgatgtaaacgactggcagttcttcaaaggtgcgcagaagctgggcgaactgggtcagccggtgctggtgcactgcgaaaacgcgctgatttgtgacgaactgggcgaagaagcgaagcgtgaaggtcgcgtaaccgctcatgactatgtggcttcgcgtccggtatttaccgaagtggaagcaattcgccgcgtactgtatctggcgaaagttgctggttgccgtctgcacgtttgccacgtcagcagcccggaaggtgttgaggaagtgactcgtgcacgtcaggaaggtcaggacgttacttgtgaatcctgcccgcattactttgtactggataccgatcagttcgaagaaatcggtactctggcgaagtgttcaccgccgatccgcgatctggaaaaccagaaaggcatgtgggaaaaactgtttaacggtgaaatcgactgcctggtttccgaccactctccatgcccgccggaaatgaaagccggtaacatcatgaaagcatggggcggtatcgccggtctgcaaagctgcatggacgtgatgttcgatgaagcggtacagaaacgcggtatgtctctgccaatgttcggcaaattaatggcgactaacgcagcagatattttcggtctgcagcaaaaaggccgtatcgccccaggaaaagatgccgacttcgtcttcattcagccgaatagcagctatgttcttaccaatgacgatctggaatatcgccacaaagtcagcccgtatgttggccgtaccattggcgcgcgtatcacgaaaaccatcttacgtggtgatgtgatttacgacattgaacagggcttccctgttgcgccgaaaggtcaatttatccttaaacatcagcagtaa

SEQ ID NO: 64874 - protein, 453 aa, Escherichia coli
MSFDLIIKNGTVILENEARVVDIAVKGGKIAAIGQDLGDAKEVMDASGLVVSPGMVDAHTHISEPGRSHWEGYETGTRAAAKGGITTMIEMPLNQLPATVDRASIELKFDAAKGKLTIDAAQLGGLVSYNIDRLHELDEVGVVGFKCFVATCGDRGIDNDFRDVNDWQFFKGAQKLGELGQPVLVHCENALICDELGEEAKREGRVTAHDYVASRPVFTEVEAIRRVLYLAKVAGCRLHVCHVSSPEGVEEVTRARQEGQDVTCESCPHYFVLDTDQFEEIGTLAKCSPPIRDLENQKGMWEKLFNGEIDCLVSDHSPCPPEMKAGNIMKAWGGIAGLQSCMDVMFDEAVQKRGMSLPMFGKLMATNAADIFGLQQKGRIAPGKDADFVFIQPNSSYVLTNDDLEYRHKVSPYVGRTIGARITKTILRGDVIYDIEQGFPVAPKGQFILKHQQ

SEQ ID NO: 64875 - DNA, 1896 bp, Bacillus stearothermophilus
  CDS (303)..(1718): transl_table=11
gaattcatcgtgagcgctgtattcagtgcaataagtgctacatttcttgtgaagatgcttcccatcaatgcattgagcgtctcgtagacgaaaacggaaaagaatatttaaaagtgcgcgaagaagattgtgtaggatgcaatttatgttccatcgtctgtccggttgacggagcgattgagatggtcgaagtgccaagcgaacatcccccgatgacatggaatgaacggcaagtggcccttggccggctaagcggttgcagtgtggatatcaaatcattataaatgaaggagggtatcatgatgacaaaattgataaaaaatggaacaattgtcaccgctacagatatatatgaagccgatctcctcattcaagatgggaaaattgcagtaatcgggagaaatttagatgagagcggagcggaagtgattgatgccacaggttgttatgtgtttccaggaggcattgatccgcacacccatttagatatgccgtttggcggcactgtgacaaaagacgactttgagtcggggacgattgccgccgcatttggcgggacgacgaccattattgatttttgcttaacgaataaaggtgagcccctgaaaaaagcgattgaaacttggcataacaaagcgacggggaaagcggtgatcgattacgggttccatttgatgatcagtgaaataacggacgatgtgcttgaagagcttccaaaagtgatcgaagaagaaggaattacctcctttaaagtatttatggcgtataaagatgtgtttcaagctgatgatggaaccttgtatcggacgctagtcgcggcaaaagaactcggagcgcttgtcatggtgcatgccgagaatggagacgtgattgactatttaacgaaaaaagccttggaggacgggcatactgatccgatttatcatgcattaacgagacctccagagctagaaggagaagcgacggggcgcgcctgtcaattgacagaactcgctggttcgcaattgtacgtcgttcatgtatcgtgtgctcaagcggtagagaaaattgctgaagcgcgcaataaggggttgaatgtatggggcgaaacttgtccccagtatctggtgctcgatcagtcctatttagaaaagccgaattttgaaggtgctaaatatgtatggtcaccgccgcttcgtgagaaatggcatcaagaagtgctatggaatgccttgaaaaacggccagctgcaaacgctcggatctgaccaatgctcatttgattttaaaggccaaaaagaattaggaaggggagattttaccaaaatcccaaatggtggtcctattattgaggatcgggtgagtattcttttcagtgaaggagtgaaaaaagggagaattaccctcaaccagtttgttgatattgtatcaacaagaatcgccaaattgtttggtctattcccgaagaaaggaaccattgccgtcggtgcggatgcggatttagtcatttttgatccaacggttgaacgggtgatttcagccgaaacacaccatatggctgtggattataatccgtttgaagggatgaaagtaacaggggaacctgtgtcggttttatgtagaggagaatttgtggtacgtgataaacaatttgtcgggaaaccggggtacggccaatatgttaaacgcgcgaaatatggggcgctaatggccgaccaagatgtggtgaaaatgtcctaacgtaaataaatcattgaacaccaacaagctgtgcctggcggtaaggatgcgggtcacgacgagaagcggggggtgtgtgatgacttaccatcagtttctacgtgagcgagaaaagatcgattacttaattgaacaaggatactatatgaaaagcgtaaaagaaaatttaagcggatcc

SEQ ID NO: 64876 - protein, 471 aa, Bacillus stearothermophilus
MTKLIKNGTIVTATDIYEADLLIQDGKIAVIGRNLDESGAEVIDATGCYVFPGGIDPHTHLDMPFGGTVTKDDFESGTIAAAFGGTTTIIDFCLTNKGEPLKKAIETWHNKATGKAVIDYGFHLMISEITDDVLEELPKVIEEEGITSFKVFMAYKDVFQADDGTLYRTLVAAKELGALVMVHAENGDVIDYLTKKALEDGHTDPIYHALTRPPELEGEATGRACQLTELAGSQLYVVHVSCAQAVEKIAEARNKGLNVWGETCPQYLVLDQSYLEKPNFEGAKYVWSPPLREKWHQEVLWNALKNGQLQTLGSDQCSFDFKGQKELGRGDFTKIPNGGPIIEDRVSILFSEGVKKGRITLNQFVDIVSTRIAKLFGLFPKKGTIAVGADADLVIFDPTVERVISAETHHMAVDYNPFEGMKVTGEPVSVLCRGEFVVRDKQFVGKPGYGQYVKRAKYGALMADQDVVKMS

SEQ ID NO: 64877 - DNA, 1404 bp, Streptomyces coelicolor
  CDS (1)..(1404): transl_table=11
atgagcagccgtaccgtcatccgcggcggcctcgtcatcaccgcgtccgacgagatccacgccgacgtcctgatcgaggacggccgcgtcgccgccctcgccgcgaccggcaccccggcggccgaggcgttcaccgccgagaacgtcatcgacgcgagcggcaagtacgtcattccgggcggcgtcgacgggcacacccacatggagatgcccttcggcggcacctacgccgccgacaccttcgagaccggcacccgcgccgccgcctggggcggcacgaccaccatcgtcgacttcgccatccagagcgtcgggcactccctgcgcgagggcctggacgcctggcacgccaaggccgagggcaactgcgccatcgactacggcttccacatgatcgtctccgacgtgaaccaggagacgctcaaggagatggacctgctggtggaggagggggtgacctccttcaagcagttcatggcgtaccccggcgtcttctactccgacgacggacagatcctgcgcgccatgcagcgcgccgccgagaacggcggcctgatcatgatgcacgccgagaacggcatcgcgatcgacgtcctcgtcgagcaggccctcgcccgcggcgagaccgacccccgcttccacggcgaggtccgcaaggccctcctggaggcggaggcgacccaccgcgccatccggctcgcccaggtcgccggggcgccgctgtacgtcgtgcacgtctcggcgacggaggcggtcgccgagctgacccgggcccgcgacgagggcctgcccgtcttcggggagacctgcccgcagtacctgttcctgtccaccgacaacctcgccgagccggacttcgagggcgccaagtacgtgtgcagcaccccgctcaggcccaaggagcaccaggcggcgctgtggcggggcctgcgcaccaacgacctccaggtggtctccaccgaccactgccccttctgcttcagcggccagaaggagctgggccggggcgacttctccaggatccccaacgggatgccgggcgtcgagaaccgcatggacctgctccaccaggccgtcgtcgaggggcacatcggccgccgccgctggatcgagatcgcctgcgccaccccggcccggatgttcggcctgtacccgaagaagggcaccatcgcgcccggcgcggacgccgacatcgtcgtctacgacccgcacgccgagcaggtcatctccgccgagacccaccacatgaacgtcgactactcggcgtacgagggcaggcggatcaccggccgggtggagacggtgctctcgcgcggcgaaccggtcgtcaccgagcgggagtacaccgggcgcaagggccacggcgcctacaccccccgcgccacctgtcagtacctcacctag

SEQ ID NO: 64878 - protein, 467 aa, Streptomyces coelicolor
MSSRTVIRGGLVITASDEIHADVLIEDGRVAALAATGTPAAEAFTAENVIDASGKYVIPGGVDGHTHMEMPFGGTYAADTFETGTRAAAWGGTTTIVDFAIQSVGHSLREGLDAWHAKAEGNCAIDYGFHMIVSDVNQETLKEMDLLVEEGVTSFKQFMAYPGVFYSDDGQILRAMQRAAENGGLIMMHAENGIAIDVLVEQALARGETDPRFHGEVRKALLEAEATHRAIRLAQVAGAPLYVVHVSATEAVAELTRARDEGLPVFGETCPQYLFLSTDNLAEPDFEGAKYVCSTPLRPKEHQAALWRGLRTNDLQVVSTDHCPFCFSGQKELGRGDFSRIPNGMPGVENRMDLLHQAVVEGHIGRRRWIEIACATPARMFGLYPKKGTIAPGADADIVVYDPHAEQVISAETHHMNVDYSAYEGRRITGRVETVLSRGEPVVTEREYTGRKGHGAYTPRATCQYLT

SEQ ID NO: 64879 - DNA, 1404 bp, Methanosarcina acetivorans
  CDS (1)..(1404): transl_table=11
atgcctgatattcacatcaaaaacacgagaatttattacaataactctcttcggcctgctgaaatccttattgagaacggcaaaattacaaaaatcggaaaggatttcagggtctcaagttcggatatggtgatagatgcagagggtgcacttactctgcctgccgggattgatgtacacgtccacttcagggaaccgggcatgaccctgaaggagaactggtacacggggtcctgcgctgcagctgccgggggtattgccactgttattgaccagccgaacaccatacctcccacaaccgacaggcgctcttttgaacagaaactcaaacttgcccggaaaaagtccattgttgacttcgggattaacgggggggttaccggaaacatagaaaaactccgggaactctggaggctgggagttacggctttcggggagatctttatggctgagtccacaggggggctgaacatcaatgaagaaacattcgaagaagctctggctgagatcaaaaaactaggagcccttgccacaatccatgccgaggacgaaaagatgcgccttgaactggaacagctgttgaaaggggatgtttcctatgattaccactcaaaggtgcgcccaaacgcctgtgaggcttcggctgtccagagtgctcttgaactcatttccaggctccaggtacgggcacatttctgccatctgagtacgcttgaagccgtgggaatgatccgaaaagaaaaatatcttgcaaaaagagagaacaaaaagcctctttttacttgcgaagtcacccctcatcacctgtttctctcggcaaaggactgggaaaggctcagggcttttggtaaaatgaaccctcccctgcgggggagccacagtatcaaagcacttgtaaacggactgaatgacgggactattgacatggtggcgtcagaccatgctcctcaccttgagtctgaaaaagaccttgatataagggctgctccttccggggtacccggggttgaaaccctaatgcctctcatgcttgccgcggttcggaaaaatatcctgcccctttcgcagatgataatggttacaagctggaacccggcaaaagctttcgggcttgaccgcctgggtaagggctggcttgaggtaggctttgatgcagaccttatgattgtggatccgcgaaaccttcaacccataagggctgacatgctgcacagtaaggcgggctggacgccttttgaagggatggatgcggtcttccctgagtatacactctcccggggtgaggtaatctggatggaagattccattaatgcaaaacccggaaggggcgagttccttgagggcagtggaaaaaggtcagaagaagacgaagaagaaaactctgaagagaccggatcggattga

SEQ ID NO: 64880 - protein, 467 aa, Methanosarcina acetivorans
MPDIHIKNTRIYYNNSLRPAEILIENGKITKIGKDFRVSSSDMVIDAEGALTLPAGIDVHVHFREPGMTLKENWYTGSCAAAAGGIATVIDQPNTIPPTTDRRSFEQKLKLARKKSIVDFGINGGVTGNIEKLRELWRLGVTAFGEIFMAESTGGLNINEETFEEALAEIKKLGALATIHAEDEKMRLELEQLLKGDVSYDYHSKVRPNACEASAVQSALELISRLQVRAHFCHLSTLEAVGMIRKEKYLAKRENKKPLFTCEVTPHHLFLSAKDWERLRAFGKMNPPLRGSHSIKALVNGLNDGTIDMVASDHAPHLESEKDLDIRAAPSGVPGVETLMPLMLAAVRKNILPLSQMIMVTSWNPAKAFGLDRLGKGWLEVGFDADLMIVDPRNLQPIRADMLHSKAGWTPFEGMDAVFPEYTLSRGEVIWMEDSINAKPGRGEFLEGSGKRSEEDEEENSEETGSD

SEQ ID NO: 64881 - DNA, 1269 bp, Streptococcus pneumoniae
  CDS (1)..(1269): transl_table=11
atgctactaatcaaaaatggtcgtgtaatggatcccaagtctggtttggatcaagtttgtgatgtcttagttcaagatgggaaaattatcaaaattgcgcctgagatcacggaagaaggagcagaaacgattgatgctactggtcatgtggttgctcctggtttggtcgatattcatgtgcatttccgtgaacctggtcaaacacataaagaagacattcatactggtgccctggcagccgctgcaggtggttttactactgtcgtcatgatggctaataccagtccaaccatttcagacgtggagactttgcaagcagttctccagtcagctgccaaagagaagattaatgtcaagacagttgcgaccattactaaaaactttaatggtaaaaacttgactgactttaaggcactcttagaagctggtgcggttggtttctctgatgacggtattccgcttgagagcagtaagattgtcaaggaagccatggaggaagccaaaaaactcaatacctttatcagccttcatgaggaagatccaggtttgaacggtgttcttggctttaatgaaaatattgctagagaacatttccatatctgcggtgctactggggtggctgagtacgctatgatggcgcgtgatgtcatgattgcctatgcaactaaagcccatgttcacatccagcatttgtctaaggaagaaagtgttaaagtagtggagtttgctcaggggttaggtgcagaagtcacagcagaagtagcgccacagcatttctctaagacagaagcacttcttttaacacaaggtagcaatgctaagatgaatccaccgcttcgtttggaatcagaccgtcgtgccgttatcgaaggtctcaaatcaggtgtcatcacagttattgcgactgaccacgcgcctcatcatgtagatgaaaaaaatgttgaggatattaccaaagcgccatctggtatgactggcttagaaacatccctgtctctcggcttgacctatttagtagaagctggtgagttgagcttgatggaattacttgaaaaaatgacatacaacccagccaagctttacaactttgaagcaggttacttggctgagaatggtccagcagatatcactatttttgatgccaaggctgaccgccttgtggactcccattttgcttccaaagcagctaattcaccattcatcggtgaaaccttaaaagggcaggttaaatataccatctgtaagggacaaatcgtctatcaagcttga

SEQ ID NO: 64882 - protein, 422 aa, Streptococcus pneumoniae
MLLIKNGRVMDPKSGLDQVCDVLVQDGKIIKIAPEITEEGAETIDATGHVVAPGLVDIHVHFREPGQTHKEDIHTGALAAAAGGFTTVVMMANTSPTISDVETLQAVLQSAAKEKINVKTVATITKNFNGKNLTDFKALLEAGAVGFSDDGIPLESSKIVKEAMEEAKKLNTFISLHEEDPGLNGVLGFNENIAREHFHICGATGVAEYAMMARDVMIAYATKAHVHIQHLSKEESVKVVEFAQGLGAEVTAEVAPQHFSKTEALLLTQGSNAKMNPPLRLESDRRAVIEGLKSGVITVIATDHAPHHVDEKNVEDITKAPSGMTGLETSLSLGLTYLVEAGELSLMELLEKMTYNPAKLYNFEAGYLAENGPADITIFDAKADRLVDSHFASKAANSPFIGETLKGQVKYTICKGQIVYQA

SEQ ID NO: 64883 - DNA, 1527 bp, Oryza sativa
  CDS (1)..(1527)
atggcgatggcggcggcgaagggcagggtcctgccgctgctggcggtggcggcggcgctcgcggcggcgctcctctaccgcgcgcccttttccaaggtctccgggagattccctttcccccggtattcgaatctgcgatctcttctctcgtacgagaaagctgaggagaatccctttgtctttgcagagcctgggcgtggaggtgaagggagggctgatcaacgcgatcgccgtcggggattaccggagcttcctgctccggcgaccggtggtggactacggcacgcgcatcttgatgagccaggacgtgctgagtgggaggggttctccactggtacaagagcagcagctgcaggtggcattacaacattagtggacatgcctcttaatagctacccgtcaactgtttctgaagaaactctcaagctgaagttggatgcagctaaggataaactacatgttgatgtagggttctggggaggcctcgttccagagaatgccctcaatccaagtgcactagagagcctattaaatgcaggcgtcttagggctcaagtcatttatgtgcccctcaggtataaatgacttccccatgacaaattcaactcatattgaggagggcctggttacattggcaaagtacaaaaggccgttacttatccatgcagaacgcatacccgatgttcagaatgaagatgggatcgatggtgaactagatcctaaagcctatacgacatatcttaaatctagaccaccagcatgggaggaagcagcgatcaaagatctgcaacgtgcgatgaaagacacggagatagggggtcggtcagaaggagctcatattcacatagttcatctctcagatgcaaaacttctcttgggcttcttaaggtatgatgtcattatcaaatggacagaccagaacgatgcaaaacaaaatggtgcaagggttagtgtagaaacctgtcctcattacctggcgttttcagctgaagaagttcctgatggagatactcgctttaaatgtgctcctcctatacgcgattcaaccaacagagataatctctgggaagctctgcttgatggacacatagacatgttgagctcagaccattcaccatcagctcctgatctcaaactcatggaggaaggtaacttcttaagggcatggggaggcatatcatctttgcagtttgttctccctgtaacatggtcgcatgggaaaaaatacggtatcagtttgaatcaactggcatcatggtggagcgaaaggcctgctatgcttgcagggttaaagaaaaagggtgctgttctgccgggataccgtgctgatattgtggtatggaaacctgaggctcaattccatcttgatgacagccatcctgtctaccataagcatcggaatatttcggcatatttgggaaagcagctttcagggaagatactgtccacctttgtgggtgggaatcttgtgttcgctgaagacaaacatgcaaaggctgcatgtggtgctccaatcctcgccaaataa

SEQ ID NO: 64884 - protein, 508 aa, Oryza sativa
MAMAAAKGRVLPLLAVAAALAAALLYRAPFSKVSGRFPFPRYSNLRSLLSYEKAEENPFVFAEPGRGGEGRADQRDRRRGLPELPAPATGGGLRHAHLDEPGRAEWEGFSTGTRAAAAGGITTLVDMPLNSYPSTVSEETLKLKLDAAKDKLHVDVGFWGGLVPENALNPSALESLLNAGVLGLKSFMCPSGINDFPMTNSTHIEEGLVTLAKYKRPLLIHAERIPDVQNEDGIDGELDPKAYTTYLKSRPPAWEEAAIKDLQRAMKDTEIGGRSEGAHIHIVHLSDAKLLLGFLRYDVIIKWTDQNDAKQNGARVSVETCPHYLAFSAEEVPDGDTRFKCAPPIRDSTNRDNLWEALLDGHIDMLSSDHSPSAPDLKLMEEGNFLRAWGGISSLQFVLPVTWSHGKKYGISLNQLASWWSERPAMLAGLKKKGAVLPGYRADIVVWKPEAQFHLDDSHPVYHKHRNISAYLGKQLSGKILSTFVGGNLVFAEDKHAKAACGAPILAK

SEQ ID NO: 64885 - DNA, 1542 bp, Glycine max
  CDS (1)..(1542)
atggatcagtttttgtggagggtgttgcctttgcttacaatccttgtttcctttggagtgttcttctacttgcaggattcttacacagcacagttatttcctctcataaagttaccgcgggataagtgcagccttcttccccatcgccacttctggatatccagcaaacgtattgtgaccccacaagggatcatttctggttcagtggagataaatgatgggaaaataatatctgtcgttgagggacatgctattcaggggaagcctaagcaagaagaagtaattgattatggagatgctgttatcatgcctggcttgattgatgtgcacgtacatcttaatgagcctggaagaactgagtgggaaggatttgatactggtaccagagctgctgctgctggtggtgtaaccacagtggttgacatgcctctaaactgttaccctacaactgtgtctaaggaaaaactgaaacttaagcttgatgctgcagaggataaaatctatgttgatgttggattttggggaggcctaatccctgaaaatgcacttaatacaagtattcttgatggtctcttaagtgctggtgttcttggtgtgaagtcttttatgtgtccttcaggaatagatgacttccccatggctactattgaccatatcaaggcaggattgtctgtgttggcaaaatatagaaggcctatagttgtgcatgctgagattcaacaagattttgaaaatcatttggagcttaatgaggataaccttgatccacgtgcttacttgacctatctcaataccaggccaccttcatgggaggaggcagccattaaacaacttgtaagtgttacgaaggacacaagaaaaggtggccctttagaaggagcacatgttcacatcgtccacttgtctgattcaagtgcttccttagatctgattaaggaagcaaaaagtcatggtgacagcataagtgttgagacttgtcctcattacttagctttcacgtctgaagagataccaaatggggatactcgttttaagtgttccccacccattcgtgatgcatacaacaaagacaaattatgggaggctgtattagagggacacattgacctattaagtactgatcattcaccaactgtgcctgaactcaagcttatggaggagggtgacttcttaaaagcttgggggggcatatcatctttgcagtttaatcttccagtgacgtggtcatatgggaagaaatatggacttactctggaacaattgtctttattgtggagcaagaaacctgcaacactggcggggttagaatcaaaggggaccattgcagttggaaaccatgcagatattgtagtttggcaaccagagctggagtttgacctggatgatgattatcctgttttcatcaaacattctgagctctctgcttacatgggaagaaggttatccggaaaagttttggagacttttgtcagaggaaaccttgtgtttaaggatgggaagcatgctcctgcaccctgtggtgttcaaattttagccaaatga

SEQ ID NO: 64886 - protein, 513 aa, Glycine max
MDQFLWRVLPLLTILVSFGVFFYLQDSYTAQLFPLIKLPRDKCSLLPHRHFWISSKRIVTPQGIISGSVEINDGKIISVVEGHAIQGKPKQEEVIDYGDAVIMPGLIDVHVHLNEPGRTEWEGFDTGTRAAAAGGVTTVVDMPLNCYPTTVSKEKLKLKLDAAEDKIYVDVGFWGGLIPENALNTSILDGLLSAGVLGVKSFMCPSGIDDFPMATIDHIKAGLSVLAKYRRPIVVHAEIQQDFENHLELNEDNLDPRAYLTYLNTRPPSWEEAAIKQLVSVTKDTRKGGPLEGAHVHIVHLSDSSASLDLIKEAKSHGDSISVETCPHYLAFTSEEIPNGDTRFKCSPPIRDAYNKDKLWEAVLEGHIDLLSTDHSPTVPELKLMEEGDFLKAWGGISSLQFNLPVTWSYGKKYGLTLEQLSLLWSKKPATLAGLESKGTIAVGNHADIVVWQPELEFDLDDDYPVFIKHSELSAYMGRRLSGKVLETFVRGNLVFKDGKHAPAPCGVQILAK

SEQ ID NO: 64887 - DNA, 1617 bp, Zea mays
  CDS (1)..(1617)
atggcgacacaggcgctggcgccctccctccgcctcctcctgctgctaccgctgctcgccgccgccgccgccgccgccgcgttgtctcacccagcgcacgagttctgcgcggtcgggggtgacgcctccggctgcggcggcggaggagacggcacgaggatcctgatcaagggcgggacggtggtcaacgcgcacctcgcggaggaggccgacgtctacatcgaggacggcgtcgtcgtcgccgtccgcccagacatcccggttgatgttgataatgtcagggtaatcgacgcaacaggaaaatatgtcatgccaggtggaattgaccctcacacgcacctggagatggagttcatgggcaccgtgaccatagatgacttcttcagcggccatgctgcggcactggcgggtgggacgacgatgcatattgactttgtcattcccgtggacggcaacttgactgcagggttggagtcctacaagcacaaagccgcaaaagctgccatggattatggctttcacatggccattacaaagtggaatgatgaggttgcaagggaaatggaagtgatggttaaagaacatgggataaattctttcaagtttttcatggcatataaaggctccttgatggttactgatgacctcctcctgcaaggcctacggaaatgcaagtcgcttggtgcccttgctatggttcatgcagagaatggtgatgctgttgccgagggacaacagcggatgattgaccttgggataactggtccagaagggcatgctctctcaaggcctccaattttagaaggagaagcaactgcacgggcaatccgtttagctaagttcatcaatacgccactgtatgttgttcatgtgatgagcatcgacgcaatggatgagattgccaaggctaaaagagaagggcagagagtcatcggtgaacctgtggtttctggactagtgcttgatgattcttggctttgggatcctgacttcacgattgcttcaaagtacgtgatgagtcctccaatccgggaagcagggcatggtaaagcactccaagctgctctttcatcgggaattctacagcttgtaggtactgatcactgcacattcaactccacacagaaagcttttggttctgatgattttcggaagattcccaatggtgtaaatggtcttgaggaacggatgcatatactttgggacagcatggtggagactggcaagatttctgtaaccgactatgtcagagtgacaagcacagaatgcgccaagaccttcaacatattccctcggaaaggagcaatcctggaaggatctgacgcagatatcataatcctgaaccctgaaaggagctttgtgatgggtgctctcacacaccattcgaggtccaacaccaatgtgtacgagggcaggaaaggaaagggaatggtggaaataacaatctcaaggggccgagtggtatgggaggatggcgttctgaacattgcacctggttcaggacgatacgtcatgatgccacctttcggctacgtctttgatgggatcgagaagtccgatgcgacctacagagcttccctccgagcccctgtacagcgtggtaaagctgctgcatag

SEQ ID NO: 64888 - protein, 538 aa, Zea mays
MATQALAPSLRLLLLLPLLAAAAAAAALSHPAHEFCAVGGDASGCGGGGDGTRILIKGGTVVNAHLAEEADVYIEDGVVVAVRPDIPVDVDNVRVIDATGKYVMPGGIDPHTHLEMEFMGTVTIDDFFSGHAAALAGGTTMHIDFVIPVDGNLTAGLESYKHKAAKAAMDYGFHMAITKWNDEVAREMEVMVKEHGINSFKFFMAYKGSLMVTDDLLLQGLRKCKSLGALAMVHAENGDAVAEGQQRMIDLGITGPEGHALSRPPILEGEATARAIRLAKFINTPLYVVHVMSIDAMDEIAKAKREGQRVIGEPVVSGLVLDDSWLWDPDFTIASKYVMSPPIREAGHGKALQAALSSGILQLVGTDHCTFNSTQKAFGSDDFRKIPNGVNGLEERMHILWDSMVETGKISVTDYVRVTSTECAKTFNIFPRKGAILEGSDADIIILNPERSFVMGALTHHSRSNTNVYEGRKGKGMVEITISRGRVVWEDGVLNIAPGSGRYVMMPPFGYVFDGIEKSDATYRASLRAPVQRGKAAA

SEQ ID NO: 64889 - DNA, 24 bp, Artificial sequence
  primer
atgcctatcaatgccatcacttcc

SEQ ID NO: 64890 - DNA, 26 bp, Artificial sequence
  primer
ttaacgtctagaatcaagcaaagttt

SEQ ID NO: 64891 - protein, 719 aa, Artificial sequence
  consensus sequence
  Variant (2)..(2): Xaa in position 2 is any amino acid
  Variant (4)..(24): Xaa in position 4 to 24 is any amino acid
  Variant (25)..(38): Xaa in position 25 to 38 is any or no amino acid
  Variant (41)..(42): Xaa in position 41 to 42 is any amino acid
  Variant (44)..(44): Xaa in position 44 is any amino acid
  Variant (46)..(46): Xaa in position 46 is any amino acid
  Variant (48)..(50): Xaa in position 48 to 50 is any amino acid
  Variant (52)..(61): Xaa in position 52 to 61 is any amino acid
  Variant (62)..(64): Xaa in position 62 to 64 is any or no amino acid
  Variant (66)..(67): Xaa in position 66 to 67 is any amino acid
  Variant (70)..(71): Xaa in position 70 to 71 is any amino acid
  Variant (74)..(74): Xaa in position 74 is any amino acid
  Variant (76)..(104): Xaa in position 76 to 104 is any amino acid
  Variant (105)..(111): Xaa in position 105 to 111 is any or no amino acid
  Variant (113)..(132): Xaa in position 113 to 132 is any amino acid
  Variant (133)..(144): Xaa in position 133 to 144 is any or no amino acid
  Variant (146)..(149): Xaa in position 146 to 149 is any amino acid
  Variant (151)..(151): Xaa in position 151 is any amino acid
  Variant (153)..(180): Xaa in position 153 to 180 is any amino acid
  Variant (181)..(192): Xaa in position 181 to 192 is any or no amino acid
  Variant (196)..(216): Xaa in position 196 to 216 is any amino acid
  Variant (217)..(340): Xaa in position 217 to 340 is any or no amino acid
  Variant (343)..(345): Xaa in position 343 to 345 is any amino acid
  Variant (347)..(348): Xaa in position 347 to 348 is any amino acid
  Variant (350)..(367): Xaa in position 350 to 367 is any amino acid
  Variant (368)..(375): Xaa in position 368 to 375 is any or no amino acid
  Variant (377)..(377): Xaa in position 377 is any amino acid
  Variant (379)..(390): Xaa in position 379 to 390 is any amino acid
  Variant (391)..(404): Xaa in position 391 to 404 is any or no amino acid
  Variant (406)..(410): Xaa in position 406 to 410 is any amino acid
  Variant (413)..(415): Xaa in position 413 to 415 is any amino acid
  Variant (418)..(434): Xaa in position 418 to 434 is any amino acid
  Variant (435)..(466): Xaa in position 435 to 466 is any or no amino acid
  Variant (469)..(469): Xaa in position 469 is any amino acid
  Variant (471)..(478): Xaa in position 471 to 478 is any amino acid
  Variant (479)..(480): Xaa in position 479 to 480 is any or no amino acid
  Variant (482)..(494): Xaa in position 482 to 494 is any amino acid
  Variant (495)..(499): Xaa in position 495 to 499 is any or no amino acid
  Variant (502)..(502): Xaa in position 502 is any amino acid
  Variant (504)..(518): Xaa in position 504 to 518 is any amino acid
  Variant (519)..(576): Xaa in position 519 to 576 is any or no amino acid
  Variant (578)..(606): Xaa in position 578 to 606 is any amino acid
  Variant (607)..(622): Xaa in position 607 to 622 is any or no amino acid
  Variant (624)..(630): Xaa in position 624 to 630 is any amino acid
  Variant (631)..(633): Xaa in position 631 to 633 is any or no amino acid
  Variant (636)..(638): Xaa in position 636 to 638 is any amino acid
  Variant (639)..(639): Xaa in position 639 is any or no amino acid
  Variant (641)..(642): Xaa in position 641 to 642 is any amino acid
  Variant (643)..(643): Xaa in position 643 is any or no amino acid
  Variant (646)..(670): Xaa in position 646 to 670 is any amino acid
  Variant (671)..(684): Xaa in position 671 to 684 is any or no amino acid
  Variant (686)..(689): Xaa in position 686 to 689 is any amino acid
  Variant (691)..(694): Xaa in position 691 to 694 is any amino acid
  Variant (696)..(697): Xaa in position 696 to 697 is any amino acid
  Variant (700)..(709): Xaa in position 700 to 709 is any amino acid
  Variant (710)..(718): Xaa in position 710 to 718 is any or no amino acid
GXIXXXXXXXXXXXXXXXXXXXXXXXXXXXXXXXXXXXPGXXDXHXHXXXPXXXXXXXXXXXXXGXXAAXXGGXTXXXXXXXXXXXXXXXXXXXXXXXXXXXXXXXXXXXXDXXXXXXXXXXXXXXXXXXXXXXXXXXXXXXXXGXXXXKXFXXXXXXXXXXXXXXXXXXXXXXXXXXXXXXXXXXXXXXXXHAEXXXXXXXXXXXXXXXXXXXXXXXXXXXXXXXXXXXXXXXXXXXXXXXXXXXXXXXXXXXXXXXXXXXXXXXXXXXXXXXXXXXXXXXXXXXXXXXXXXXXXXXXXXXXXXXXXXXXXXXXXXXXXXXXXXXXXXXXXXXXXXXXXRPXXXEXXAXXXXXXXXXXXXXXXXXXXXXXXXXXHXSXXXXXXXXXXXXXXXXXXXXXXXXXXGXXXXXETXXXYLXXXXXXXXXXXXXXXXXXXXXXXXXXXXXXXXXXXXXXXXXXXXXXXXXPPXRXXXXXXXXXXWXXXXXXXXXXXXXXXXXXDHXPXXXXXXXXXXXXXXXXXXXXXXXXXXXXXXXXXXXXXXXXXXXXXXXXXXXXXXXXXXXXXXXXXXXXXXXXXGXXXXXXXXXXXXXXXXXXXXXXXXXXXXXXXXXXXXXXXXXXXXXAXXXXXXXXXXKGXXXXGXXXADXXXXXXXXXXXXXXXXXXXXXXXXXXXXXXXXXXXXXXXGXXXXGXXXXTXXRGXXXXXXXXXXXXXXXXXXXG

SEQ ID NO: 64892 - protein, 13 aa, Artificial sequence
  protein pattern
  Variant (3)..(3): Xaa in position 3 is any amino acid
  Variant (4)..(4): Xaa in position 4 is Ile or Val
  Variant (6)..(6): Xaa in position 6 is any amino acid
  Variant (8)..(8): Xaa in position 8 is Ala, Cys, Thr or Val
  Variant (10)..(10): Xaa in position 10 is Phe, Ile, Leu, Met or Val
  Variant (11)..(12): Xaa in position 11 to 12 is any amino acid
  Variant (13)..(13): Xaa in position 13 is Asp, Glu or Pro
PGXXDXHXHXXXX

SEQ ID NO: 64893 - protein, 14 aa, Artificial sequence
  protein pattern
  Variant (3)..(3): Xaa in position 3 is any amino acid
  Variant (4)..(4): Xaa in position 4 is Ile or Leu
  Variant (5)..(6): Xaa in position 5 to 6 is any amino acid
  Variant (8)..(8): Xaa in position 8 is any amino acid
  Variant (9)..(9): Xaa in position 9 is Asp or His
  Variant (12)..(12): Xaa in position 12 is Phe, Ile, Leu or Val
  Variant (13)..(13): Xaa in position 13 is any amino acid
  Variant (14)..(14): Xaa in position 14 is Phe, Ile, Leu or Val
KGXXXXGXXADXXX

SEQ ID NO: 64894 - DNA, 1032 bp, Saccharomyces cerevisiae
  CDS (1)..(1032)
atgaagttttttagtttggcagatgaggcagaatttaagtcaataatcatttcaaaaaacaaagcagtagatgttataggatctaagttaggtggtcaagtggtttctttttcagatgaatggtttgcttctgctgaaaatttaattcagccaactgctcctataagggatcctaccagatttgttcattcaggcgcatggtacgacggctgggaaacacgaagacataatgagatggaatacgattgggttatcatcaagatgggagtcgctgctgcccatattattggtggtgaaattgacactgcgtttttcaatggtaatcatgcaccatttgtatcaatagaggcgctctatgacgagggcgaagaaggtaatatagtggaagatgactcgcgttgggttgagattgttgagaaatttgagtgtggtccttcgcaaaggcatcttttcgttagaggcaacggccttactaaagaaaggtttactcacatcaagctgaagatgtaccccgatggaggaatcgccagatttagattatacggaagagttgttcctccagaactcaaaacgaaggatcatataattgacttggcttatgtttgcaatggtgctgtcgctttaaagtattctgaccaacacttcggttcagttgataatttgctactgccaggtcgaggtcatgatatgtcggacggctgggaaaccaaaagatcgagacaaccaggtcatactgattgggcggtaattcaactgggcagggagtcttctttcattgagaagattattgttgatacggcacacttcagggggaacttccctcagttcattaccgtggaaggttgcttgaaggagtcagaatcaagtgagaacactggtgaaggaacatgggtagagctagttggtaagtcaaagacggggcctgacaaagaacatgtgtatgaaatacgtaagagtataagagtctcccatgtcaaattaacgattattccagatggaggagtgaaaagaataagagtttgggggtactga

SEQ ID NO: 64895 - protein, 343 aa, Saccharomyces cerevisiae
MKFFSLADEAEFKSIIISKNKAVDVIGSKLGGQVVSFSDEWFASAENLIQPTAPIRDPTRFVHSGAWYDGWETRRHNEMEYDWVIIKMGVAAAHIIGGEIDTAFFNGNHAPFVSIEALYDEGEEGNIVEDDSRWVEIVEKFECGPSQRHLFVRGNGLTKERFTHIKLKMYPDGGIARFRLYGRVVPPELKTKDHIIDLAYVCNGAVALKYSDQHFGSVDNLLLPGRGHDMSDGWETKRSRQPGHTDWAVIQLGRESSFIEKIIVDTAHFRGNFPQFITVEGCLKESESSENTGEGTWVELVGKSKTGPDKEHVYEIRKSIRVSHVKLTIIPDGGVKRIRVWGY

SEQ ID NO: 64896 - DNA, 1155 bp, Strongylocentrotus purpuratus
  CDS (1)..(1155)
atggcaaatttacccagctttgtcaatctgactgacctcgtctctcgcaaggttggtggagaggttctattcgccacagatgactggtttgctgttgcagaaaatcttctcaaggaggatgagcctgtttggtgggaaggtgaattcactgacttcggtaagaagatggatggatgggagactagacgaaagcgcatcccaggtcacgactggtgcatcatcaaacttggtataccaggtgtcatccgtggtgtcgacgctaacaccagacacttcacaggaaactatacacccagactatccatccaggctgcttgtctgacaccagatgtggaattcccagatcgatcaagtgctatgggctccaaagcaactgaagagcagtttgaggaaatgaagaaattgcaaacagagtcttgggaggagataattccaatgaagcccctaaggtctggtactgaggaaacctgtaacaactatttcagcatcgacagcgagaaaagatggacccatatcagactcaatatgtttccagatggtggaataggaagactgagggtctacggtgatgccaaaccaaactggtcagaaattgatcagaattctttgattgatctggtagcagtagagaatggtggagtgtgcgtcggattcagtgatgccaagttctgcttccctaagaacttaatcaccaaggaaagatctgtgacaatggctgacggatgggagacagctagacagcgtgacagaccagcaatccttgagatgggtagtgatggtgtgttggaattcacaagcagagattgggccgtgtttcgccttggtacaaagggcattatagagaggattgaagtggatacaaatcattttaaagggaattacccagattcctgtacagttgaaggatgtgtcctgacagagcaagaggagaagtatggtcagactgctaggccagacagacctcacggtgattttgattccttcgactggagagccattctaccacctgccaagctttctgcccacaagagacatcactacagaaaggatgcattgaccaacatcggacctgtcactcatatccgattgaccatgaaaccagacggtggtataagcagactcagactatggggccgcatgtcatccagaatctga

SEQ ID NO: 64897 - protein, 384 aa, Strongylocentrotus purpuratus
MANLPSFVNLTDLVSRKVGGEVLFATDDWFAVAENLLKEDEPVWWEGEFTDFGKKMDGWETRRKRIPGHDWCIIKLGIPGVIRGVDANTRHFTGNYTPRLSIQAACLTPDVEFPDRSSAMGSKATEEQFEEMKKLQTESWEEIIPMKPLRSGTEETCNNYFSIDSEKRWTHIRLNMFPDGGIGRLRVYGDAKPNWSEIDQNSLIDLVAVENGGVCVGFSDAKFCFPKNLITKERSVTMADGWETARQRDRPAILEMGSDGVLEFTSRDWAVFRLGTKGIIERIEVDTNHFKGNYPDSCTVEGCVLTEQEEKYGQTARPDRPHGDFDSFDWRAILPPAKLSAHKRHHYRKDALTNIGPVTHIRLTMKPDGGISRLRLWGRMSSRI

SEQ ID NO: 64898 - DNA, 1125 bp, Nasonia vitripennis
  CDS (1)..(1125)
atgaagacgcttccggattttgttgagggtgttcaagttaactcagaagagaatggaggaacgattcttttcgctactgatgactttttcgctgtcgccgaaaatctactcaagagcgaggagcctgtttggagagaagactacacggaattcggaaaatggatggacggctgggagacgcgtcgtaagcgcattgctggacacgactgggccataatcgcactgggaaagccgagtattctaagcagcatatgcgttgacacagcctttttcacgggcaattacgcgcccaggttctccttgcagggggcttgcctatttcatactgctaaaggaattcaaaaccgcaggaacaaaatggggtcagccgctactgttgaggatctagaaaaagcttcggaattgcagtcagagaactgggaaacgatcataccaatgacgtccttgaaaagtggcaacctggatacgcgcaatcatttcttcgagctagacaccggtgaccgagtctacacgcacctgcgcctcaacatctttcctgacggcggcgtcgctcggctacgagtctacggcgaaaactcgaagtcgctaccgaacaatcggttgcatatgatgcaacccttgcgtggcaaatgcgtggagttcagcaacgcgcacttcggacatcctgacacgttgctcgtacccggaccgcccaagggcatgcacgacgcctgggagacggccagaagactggacagacctccggagattcaggtcgacgactcgggattcatgcagattaacggcgaggaatgggcaactttgcttctagaaaaggctgtctatgtacattacatcgaggtcgacacaagattcttcaaaggtaactgtccggataacgtgaaaatcgaaggcacctacctggaacctggtcaagatttgaagtcagcaagttgggacatcatcctaaaccgaactaagttgatgcccaatcagagcaacggactgaagcatccctttatagagttgatcaaccggccgatcaatcacgtgaaagtcataatagcaccggacggtggtatcgccagagtaagaatttacggcagcgactgcgattctttgaaacagcacaaacccgatgactag

SEQ ID NO: 64899 - protein, 374 aa, Nasonia vitripennis
MKTLPDFVEGVQVNSEENGGTILFATDDFFAVAENLLKSEEPVWREDYTEFGKWMDGWETRRKRIAGHDWAIIALGKPSILSSICVDTAFFTGNYAPRFSLQGACLFHTAKGIQNRRNKMGSAATVEDLEKASELQSENWETIIPMTSLKSGNLDTRNHFFELDTGDRVYTHLRLNIFPDGGVARLRVYGENSKSLPNNRLHMMQPLRGKCVEFSNAHFGHPDTLLVPGPPKGMHDAWETARRLDRPPEIQVDDSGFMQINGEEWATLLLEKAVYVHYIEVDTRFFKGNCPDNVKIEGTYLEPGQDLKSASWDIILNRTKLMPNQSNGLKHPFIELINRPINHVKVIIAPDGGIARVRIYGSDCDSLKQHKPDD

SEQ ID NO: 64900 - DNA, 1062 bp, Kluyveromyces lactis NRRL Y-1140
  CDS (1)..(1062)
atgcatacattcaaagaaaatcaagctaaggaatttgagacgattgtctcacaacaataccaatccgttgaaatattaaacaacagggttcagggtcaggttatatcctttagtgaccaatggtttgccgatgccgcaaaccttttaacacccactgctcctgtcagggacgctacaaggtttacccatgcgggtgcctggtacgacggatgggaaactagaagacataatacagaagagtatgactgggtcatcataaaggcgggtgtgtacgccgcgagaattatcggttgtgaagttgatactgcctatttcaacggtaaccatgcgccagcaattgcagttcagggtctttactccgaagtctcctctgagggtgaggaaactctttcagaaaatgattcaagatggaccgacgtaatagaaaaagtggaatgcggtccttctcaaagacacttcttcttaagagattctctcacagaatctcattataattattttaagctaaagatgttccctgatggtgggatcgcaagatttagactatacggtaaagtggttccccccatttcagattacgatggcgactctgctttgttcgattctgcaattgggttggacctctgtaacatcgtcaatggtgcagttgccatctccgtgtccgatcaacactttgggtcagctaataacttgatcatgcctggaagaggacatgatatgtccgatggttgggaaacttccagatcaagaacaccgggtcatgtcgattgggcaatcatccagctaggaagaggtaccaaacatatcaaccgtgtcgttgtggacacggctcatttccgtggtaatttcccacaattcatcactgtgcatggtattaagaccttaggtgaaagtgctccttcacatgatgattctaactggatttgtctagtcgataaatcaaagactggtcctgataaagaacatgagtacgtcattaacaaatctttagaaattacgcatatcaaattgacgatcatcccagatggtggtgtcaagagagtaagggtatttgcagcatga

SEQ ID NO: 64901 - protein, 353 aa, Kluyveromyces lactis NRRL Y-1140
MHTFKENQAKEFETIVSQQYQSVEILNNRVQGQVISFSDQWFADAANLLTPTAPVRDATRFTHAGAWYDGWETRRHNTEEYDWVIIKAGVYAARIIGCEVDTAYFNGNHAPAIAVQGLYSEVSSEGEETLSENDSRWTDVIEKVECGPSQRHFFLRDSLTESHYNYFKLKMFPDGGIARFRLYGKVVPPISDYDGDSALFDSAIGLDLCNIVNGAVAISVSDQHFGSANNLIMPGRGHDMSDGWETSRSRTPGHVDWAIIQLGRGTKHINRVVVDTAHFRGNFPQFITVHGIKTLGESAPSHDDSNWICLVDKSKTGPDKEHEYVINKSLEITHIKLTIIPDGGVKRVRVFAA

SEQ ID NO: 64902 - DNA, 1029 bp, Debaryomyces hansenii CBS767
  CDS (1)..(1029)
atgattaaggtcttatcgcaaaaagattttcaagagaaaattgttacccaatatacggatgtaattggggaaaagttaggtgggaaggtgttgaaattttcagacgaatggtttgcggaggcagaaaacttgatcaaaccgaaggcaccaatttttgatgctaacaagtttgttccagccgggaagtggtatgatgggtgggaaacacgtagacacaataccgaagaagcggattatgttattatcaagatgggagtggcatctgccaaattgataggatgcgaaatcgacactgcgttcttcaatggtaaccatgctccacatatatccgtcgaggctgtttcgttgggtgaagatgaaggcgttgagtcgcttccagattccaagtgggagtcggtgatcccaaaaactgaatgtggaccttcacaaaagcacttctttgttagagattctatcacagaaactaattatactcatgctaggttgagaatgtatccagatggaggaattgcaagattcagattgtacgggtcggttgttccaatccttcctagtgattccacgaccattttggatacggcatctgtcctcaatgggggtgtggccattgatagatcggaccaacactttggaactgctgataatttgttattgccaggtagaggccatgatatgggtgatggttgggaaacaaagagatcgagggaaccgggtcacgtagactgggtagtcattaggttgggtgcctcaacgaagattagcagtgtccttgttgatacgcttcactttaggggtaacttcccccaaaagatcaatgtaaaggctattaaggttgttaatgataaagagatacctcgttttgacagtgataaatgggacttattggtcggtgattcaaagacgggccctgataaggaactcgaattcaaggtatctggagataaagtttattcgcatgttttgtttactatgattcctgacgggggtgttaaaagagtaagagttttcggcaatatcgtttcgaactag

SEQ ID NO: 64903 - protein, 342 aa, Debaryomyces hansenii CBS767
MIKVLSQKDFQEKIVTQYTDVIGEKLGGKVLKFSDEWFAEAENLIKPKAPIFDANKFVPAGKWYDGWETRRHNTEEADYVIIKMGVASAKLIGCEIDTAFFNGNHAPHISVEAVSLGEDEGVESLPDSKWESVIPKTECGPSQKHFFVRDSITETNYTHARLRMYPDGGIARFRLYGSVVPILPSDSTTILDTASVLNGGVAIDRSDQHFGTADNLLLPGRGHDMGDGWETKRSREPGHVDWVVIRLGASTKISSVLVDTLHFRGNFPQKINVKAIKVVNDKEIPRFDSDKWDLLVGDSKTGPDKELEFKVSGDKVYSHVLFTMIPDGGVKRVRVFGNIVSN

SEQ ID NO: 64904 - DNA, 1035 bp, Yarrowia lipolytica CLIB122
  CDS (1)..(1035)
atgtccaagcaagtttccgagtccgacttcaaccgccagattgtttccaactacaccgatgtcgccggcgagaagctgggaggcaaggttctgtctttctccgacgagtggtttgcggaagccgccaacctcatcaagccctacgctcccattcgagaggcaggcaagtttgtggactctggtgcctggtacgacggctgggagacccgacgacacaacacggagcccgccgattgggtcgtatgtcgattcggcgtggctgctgctcacattgtcggcaccgagatcgatactgcatacttcaacggtaatcacgctcccgagatcagtgtggagtgcaccagtattaccagtggtctgaacgaggcagacgaggcagctgctctcaagtctgcttcttgggacactgtcatttccaagcacgaatgtggacccagccagaagcagttcttcgtgctggacaagcccacctccaagacatacacccatgcccgtctcaacatgtaccccgatggcggaattgcgcgattccggctctacggatccgttgtgcctgatttctcgcagtccaaggacgtggagattgatctggcctctgttctgaacggaggacaggccgtggctcggtcggaccagcactttggatccgctgacaacctgctgctgcccggaaagggagagaacatgggctctggatgggagacaaagcgatcccgagagcctggacacgttgactgggtggtcattcgactgggagctcccggaaccatcaacaaaatcgtgctggataccgcctggttcaagggtaacttcccccagaagatgactgtgtctgccgtcaacctgaagcctggcgagtccattgctgccgatgacgaccggtgggtcgaggtgctcgctcctgttcagggcgcccctcacgtggagaaggagtaccccgtggacaacaagcacgtgttcagccacgtgaagctcaccatcatccccgacggaggagtctctcgaatccgggtctttggtaaccgagctgagtag

SEQ ID NO: 64905 - protein, 344 aa, Yarrowia lipolytica CLIB122
MSKQVSESDFNRQIVSNYTDVAGEKLGGKVLSFSDEWFAEAANLIKPYAPIREAGKFVDSGAWYDGWETRRHNTEPADWVVCRFGVAAAHIVGTEIDTAYFNGNHAPEISVECTSITSGLNEADEAAALKSASWDTVISKHECGPSQKQFFVLDKPTSKTYTHARLNMYPDGGIARFRLYGSVVPDFSQSKDVEIDLASVLNGGQAVARSDQHFGSADNLLLPGKGENMGSGWETKRSREPGHVDWVVIRLGAPGTINKIVLDTAWFKGNFPQKMTVSAVNLKPGESIAADDDRWVEVLAPVQGAPHVEKEYPVDNKHVFSHVKLTIIPDGGVSRIRVFGNRAE

SEQ ID NO: 64906 - DNA, 1095 bp, Aspergillus nidulans FGSC A4
  CDS (1)..(1095)
atggcagacatcaccttcgtcccctctgaggacatcgataaggtcttcgcccacaccaccaacctcgcctcagccgccctcaacagcaaagtgctcgcctgctcaaacgactattttgctgctgcctctaacctgctgactccaacaccgcccatcaaccgccccggcgtcttcatccacaccggtgcttggtacgacggctgggaaacccgccggcacaacccagacccctatgactgggtagtcatcaagctcggcgtcgccagcggcgcgattcagggcgtcgaagtcgatacgggcttcttcgtcggcaactacggcgaaaaggccgaattacaggctacatatgcaccgggcatcagcgacgccgaagtcgcagaccccagctacagcgggtggacgacaattctccccccacaggaatgcggcccgtcacagcggcgcgcgtggaagttgaatagctacgacgcggcgaatccgactccgtacacgcatgtccggctgctgatgtatccagacggcgggttcggccggctacggctgtatgggcatgctatcccgccgactcttgagtcgacttcgaaggatcagaacgagttgccgacggaagaactgtcttctgcgctcttgggaggtcttgccctcggtgcctcagaccagcactatacaccctgcagcaacctacttcttcctggtcgaggaaaggacatgggcgacggctgggagacagcccggtcccgcgccaagggccacgtcgactgggctgttatcaagcttggactccctggctctgtgtcaaaggtcgttgtcgacactaaggatttccgcggcaacttccctcgcgccgtgcgtgttcatggactgcccgccggctccgttggcagtgatgaggttcctgcgcatgaccatgcgggatggacggagattgtcaaaggtgataagccctgccaggcggatacagaacatgtctttgagggcgcagatcttgcggccgactcgggaattttcactcatgctaagcttactcttgtgccggacggaggtgtgaagaggttccgggtctttggaaagagagatctctctgcaaagaaataa

SEQ ID NO: 64907 - protein, 364 aa, Aspergillus nidulans FGSC A4
MADITFVPSEDIDKVFAHTTNLASAALNSKVLACSNDYFAAASNLLTPTPPINRPGVFIHTGAWYDGWETRRHNPDPYDWVVIKLGVASGAIQGVEVDTGFFVGNYGEKAELQATYAPGISDAEVADPSYSGWTTILPPQECGPSQRRAWKLNSYDAANPTPYTHVRLLMYPDGGFGRLRLYGHAIPPTLESTSKDQNELPTEELSSALLGGLALGASDQHYTPCSNLLLPGRGKDMGDGWETARSRAKGHVDWAVIKLGLPGSVSKVVVDTKDFRGNFPRAVRVHGLPAGSVGSDEVPAHDHAGWTEIVKGDKPCQADTEHVFEGADLAADSGIFTHAKLTLVPDGGVKRFRVFGKRDLSAKK

SEQ ID NO: 64908 - DNA, 1029 bp, Candida albicans SC5314
  CDS (1)..(1029): transl_table=12
atgaccaaaattctttctcaagacgactttcaaaagcaaattgtttcacaatatacagatgttattggtgaaaaactcggtggaaaagtgttatctttctcagatcagtggtttgctgatgctgagaatttaattaagccgaagccaccaatcagagatgcgactagattcacatatgctggtgcttggtacgatggttgggaaaccagaagacacaacgaagcagaagctgactgggttattttcaaattaggtgtcagttcagccaaattgatcgcttgtgaagttgatacagcttttttcaatggtaatcatgcgccacatatttctgtcgaggcattgcaaaatttcgatgccagtgacgaaaatttacagaatgttaaagaggaagattgggaagaggtcattgctaaagtcgaatgtggcccactgcaaaaacatttcttttctagaggctcgttgacaaacaagaattacacacatgctagattgagaatgtatccggacggtgggatcgccaggttcagactctacggacaagtcataccagttaccgatcaatcatcaagttctgtcactgattttgcctctgttcaaaatggaggtgtggctattaagtttagtgatcagcattttggtactgctgacaacctcttattaccaggacgtggccatgatatgtctgatggttgggaaacaaaaagatcaagagagccaggccacacagattgggttattatcagactaggtgctcctgcaaaattactggaaattgtggttgacacagcacattttagaggtaatttccctcaaaaagtcaatgttaaaggtataaatgttgatgaggagtcaaagattgaagcaaattctgatgcttgggaagtggttgttgacgactccaaaactagtgccgacaaagaacatgcattcaaagtcaaagataactcaaaagtatattcgcatattaaattgactataattccagacggtggtgttaaaagaattcgtgcttttggtgtgaaggcttga

SEQ ID NO: 64909 - protein, 342 aa, Candida albicans SC5314
MTKILSQDDFQKQIVSQYTDVIGEKLGGKVLSFSDQWFADAENLIKPKPPIRDATRFTYAGAWYDGWETRRHNEAEADWVIFKLGVSSAKLIACEVDTAFFNGNHAPHISVEALQNFDASDENLQNVKEEDWEEVIAKVECGPSQKHFFSRGSLTNKNYTHARLRMYPDGGIARFRLYGQVIPVTDQSSSSVTDFASVQNGGVAIKFSDQHFGTADNLLLPGRGHDMSDGWETKRSREPGHTDWVIIRLGAPAKLSEIVVDTAHFRGNFPQKVNVKGINVDEESKIEANSDAWEVVVDDSKTSADKEHAFKVKDNSKVYSHIKLTIIPDGGVKRIRAFGVKA

SEQ ID NO: 64910 - DNA, 1785 bp, Ustilago maydis 521
  CDS (1)..(1785)
atgacgaccatcgctctcgatcagttcgacgccgtcctcggctccacctcgacagaaatttcgtcagtcgctctgggcggacgcatcctcagcacttcggacgaatggtttgcacctgcttcttctttgctcaaagtcggccctgctccatcgcttagaggacaattcggcccaaagggcgctctctttgatggctgggagactcgtcgtcacaaccccacgtacgactgggttatccttcgccttggccccaacgccggtggtcatcttgtcggcttcgacgttgacacggccaacttcaatggcaacgaagcacccgagatctccatccacgctctcgctctgacacccgaagaggaggctcaaatcggtaacacgcttgccgaggacgacaagaggtgggaatgtgtcgtccccatttcaccgtgtgggccgtcgcagagacacctcttcaaagtggctgagggtaagggagacaagatttacacgcatatcaagctgcatatgatcccagacggtggcattgctaggttcagggtttatggtgtgatcccaccgcctcctgtcggacaggctgacggcgagcaggtcaacaccgaaaacagcgcattcaacctgctcgatctcgctcactgcctcaacggaggacgagttgtgttcaccgatgacaaccactttggcgccggaagcaacatcatcttgcccggaagaggtaaggacatgggtgatggttgggagactcgtcgatccagggcaaagggacacttcaactggtccatcgtcaagcttggcgaaccaggcttcctatcatatgctgaagtggacacagcccacttccttggcaatttccctgaatccaccgagatcctcggtaccgtccacgactctgccactgttccatcggcggatgcgcaatgggtcactctgcttccgcgcacaaagctcggtcctgggcgacgacactttttcccgctcgtcgatggaaactctgctccctttacgcacgtcatgataaagatgcacccagacggcggtatcaagcgtttccgagtgcacgggcgacgagccagcgccattcttgctgccaagatcccaccttcttctctcccagctgtcgctgtgccagaggacattcaggatcccctgccatcggctacctcggacccattcgcacctgtaagtgctgccatctccctcgctcccacctctcccacttccgccgcaaccacccaaatgggcatcgtcgtacgcgacaagttcgtcgccgcggtagctcttaccaccgatgccttcagtaggtatggagcggtcatcgacgggccctcggtgcacaacgcggacgacgccaaggctttcaagatcgtcaaccagggaacggccaaaaagtacctcaacttggccgaaattatcaacaactatccgactcaagcggcggcaaagaccaacatccacgtctaccgctgtgacgcggctgccagcttgccattccaagtcaagctgctcgaacgacaccgttttaccacgcaggcgttcatccctatggtgcccatcgggggcaaacagcaaggtttcctcgtggtcgttgctcagaacggtcaagatgaccgcccagatttgaacaccctcgccgtgttcttggctactaccgaacaggcgattcagtaccacgccggtatctggcatcaccccatgattgctctaggcgaccagcctacggacttcgcttgcatcgtcaacgaatctgctacgcagcctcagctcgactgtgatgaggtcgaggtatga

SEQ ID NO: 64911 - protein, 594 aa, Ustilago maydis 521
MTTIALDQFDAVLGSTSTEISSVALGGRILSTSDEWFAPASSLLKVGPAPSLRGQFGPKGALFDGWETRRHNPTYDWVILRLGPNAGGHLVGFDVDTANFNGNEAPEISIHALALTPEEEAQIGNTLAEDDKRWECVVPISPCGPSQRHLFKVAEGKGDKIYTHIKLHMIPDGGIARFRVYGVIPPPPVGQADGEQVNTENSAFNLLDLAHCLNGGRVVFTDDNHFGAGSNIILPGRGKDMGDGWETRRSRAKGHFNWSIVKLGEPGFLSYAEVDTAHFLGNFPESTEILGTVHDSATVPSADAQWVTLLPRTKLGPGRRHFFPLVDGNSAPFTHVMIKMHPDGGIKRFRVHGRRASAILAAKIPPSSLPAVAVPEDIQDPLPSATSDPFAPVSAAISLAPTSPTSAATTQMGIVVRDKFVAAVALTTDAFSRYGAVIDGPSVHNADDAKAFKIVNQGTAKKYLNLAEIINNYPTQAAAKTNIHVYRCDAAASLPFQVKLLERHRFTTQAFIPMVPIGGKQQGFLVVVAQNGQDDRPDLNTLAVFLATTEQAIQYHAGIWHHPMIALGDQPTDFACIVNESATQPQLDCDEVEV

SEQ ID NO: 64912 - DNA, 996 bp, Pseudomonas syringae pv. syringae B728a
  CDS (1)..(996): transl_table=11
atgaaagtttacgccgcaccgttcgagaagttcgtgaacctggccgacgcgcgtctgggcaccaggatcctttcggtcaccgatgactggttcgccgacgccaaccggctgttccagccgaccccggccgtctggaaagaaggcgtgttcgacgacaacggcaagtggatggacggctgggagtcacgccgcaagcgtttcgaagggtacgacagcgcggtgattcgcctcggtgtggcgggaaccatcaagggtgtggacatcgacacctcgtttttcaccggtaacttcccgccttccgcatcgctggaagcgtgcttcctggcgtcgggcgagcccgatgaaaacaccgcctggaccgaagtgctgccgtctgtggagctgcaaggcaacagccatcattaccacgagatcaacaacgatcaggcgttcagccacctgcgcttcaacatctacccggacggcggtgtcgcgcgtctgcgcgtgtacggcgtgccgcatcgcgactggtcgaaagtcagcgcggacgagcagatcgatctggttgcagcactcaatggcggccgatcgattgcctgctccgatgaacactacggcagcatgagcaacatcctcaaccctggtcgcggcgtgaacatgggcgacggctgggaaaccgcgcggcgccgcacgcccggcaacgactgggtgatcgtggcgctcgggcacaagggtgaagtcgaaaaagtcatcgtcgataccctgcacttcaaaggtaactacccggacagttgctcgatccagggcgccctggtcaagggtggcaccgacagccagatcgaaacccagagcctgttctggcgcgagttgctgcccagccagaagctgaccatgcacgccgaacacgagttcgccgagcagatcaaggcgatcggcccgatcacccacatccgcctgaacgtattcccggacggtggcgtgagccgcctgcgagtgctgggcaaggtggccaggtaa

SEQ ID NO: 64913 - protein, 331 aa, Pseudomonas syringae pv. syringae B728a
MKVYAAPFEKFVNLADARLGTRILSVTDDWFADANRLFQPTPAVWKEGVFDDNGKWMDGWESRRKRFEGYDSAVIRLGVAGTIKGVDIDTSFFTGNFPPSASLEACFLASGEPDENTAWTEVLPSVELQGNSHHYHEINNDQAFSHLRFNIYPDGGVARLRVYGVPHRDWSKVSADEQIDLVAALNGGRSIACSDEHYGSMSNILNPGRGVNMGDGWETARRRTPGNDWVIVALGHKGEVEKVIVDTLHFKGNYPDSCSIQGALVKGGTDSQIETQSLFWRELLPSQKLTMHAEHEFAEQIKAIGPITHIRLNVFPDGGVSRLRVLGKVAR

SEQ ID NO: 64914 - DNA, 1068 bp, Colwellia psychrerythraea 34H
  CDS (1)..(1068): transl_table=11
atgattgaagattggttagcacaaaacaaattatctaccgaagatgcagcattagaacaaaaattaaagactcattatgtcgatttagctagcgaacgcgttggcggtgaaacactgtcatgtagtgatgatttctttgctgaaatggaaaacttattaaagcccggtcgtggtatttttatcgaagagaaatttactgaacgcggtaaatggatggacggttgggaatcacgtagaagttatggtcgtaacaatggtcgtgattcagattggtgtattattcgtttaggtatcagtggtgttatccgtgcttttgatatcgacaccaattacttccgtggcaatgctccagagaaagtatcggttgaagcttgtgtaagtgaagttcaaccaaacaaagataccgtttggcatactatttttgaagccaccgatgttgaagcacacagccaaaacctttttgtcctcgacgctgaaaaaaagctaaataacacagcttttacccatgtgcgtttaaccatgttccctgatggtggtattgcgcgttttcgtgtgtacggtgaagccgccgttaactggaatgattttgttgacggtgaactgatcgatttagcgtcaattagaaatggcgctaaagcattgttagttagcgacatgtttttcagcgataaaaacaatctaattatgccaggtcgtggtgtgaacatgggtgacggttgggaaactaaacgtcgtcgtgatccaggtccagattggtcaattgtaaaacttgccgctaccggtagtgttaataaagtcatcatagatacgtgtcatttcaagggtaatttccctgacacctttatgcttgaaggctgtattagcgatagtgatgatttttctgatagcgcaacaagcgtaacttggactccaattatcccaagtactaaattgtatgctcatcgtgaacatttattcactaaagaaataatcactgaaaaagagcaaccttttactcatgtacgtttaagcatctttcctgatggtggtatttctcgcatgcgtgtttttggtaaccgccaaggttag

SEQ ID NO: 64915 - protein, 355 aa, Colwellia psychrerythraea 34H
MIEDWLAQNKLSTEDAALEQKLKTHYVDLASERVGGETLSCSDDFFAEMENLLKPGRGIFIEEKFTERGKWMDGWESRRSYGRNNGRDSDWCIIRLGISGVIRAFDIDTNYFRGNAPEKVSVEACVSEVQPNKDTVWHTIFEATDVEAHSQNLFVLDAEKKLNNTAFTHVRLTMFPDGGIARFRVYGEAAVNWNDFVDGELIDLASIRNGAKALLVSDMFFSDKNNLIMPGRGVNMGDGWETKRRRDPGPDWSIVKLAATGSVNKVIIDTCHFKGNFPDTFMLEGCISDSDDFSDSATSVTWTPIIPSTKLYAHREHLFTKEIITEKEQPFTHVRLSIFPDGGISRMRVFGNRQG

SEQ ID NO: 64916 - DNA, 996 bp, Pseudomonas syringae pv. phaseolicola 1448A
  CDS (1)..(996): transl_table=11
atgaaagtttacgccgcaccgttcgagaagttcgtgaacctggccgacgcgcgtctgggcaccaaaatcctttcggtcaccgatgactggttcgccgacgccaaccggctgttccagccgaccccggcggtctggaaagaaggcgtgttcgacgacaacggcaagtggatggacggctgggagtcgcgccgcaagcgtttcgaaggatacgacagcgcagtgatccgcctcggtgtagctggcaccatcaagggtgtagacattgatacctcgtttttcaccggcaactttccgccttccgcttcgctggaagcgtgctttctggcctcgggcgaacccgatgaaaacaccgcctggaccgaagtgctgccgtctgtggagctgcaaggcaacagccatcattaccacgagatcaccaacgatcaggcgttcagccacctgcgcttcaatatctacccggacggcggcgtagcgcgcctgcgggtctacggcgtgccgcatcgcgactggtcgaaagtcagcgaggacgagcagatcgatctggtggcggcactcaacggtggccggtcgattgcctgctcggacgagcactacggcagcatgagcaacatcctcaaccccggccgtggcgtgaacatgggcgacggctgggaaaccgcgcgccgccgcacacccggcaacgactgggtgattgtggcgctggggcacaagggcgaagtcgagaaagtcattgtcgacactctgcacttcaagggcaattacccggacagctgctcgatccagggtgctttcgtcaagggcggtaccgacagccagatcgaaacccagagtttgttctggcgcgagctgctgccaagccagaagctgaccatgcacgccgaacacgagttcgccgagcagatcaacgccatcgggccgatcacccatatccgcctgaacgtattccctgacggtggcgtgagccgcctgcgagtgctgggcaaggtgtccaggtaa

SEQ ID NO: 64917 - protein, 331 aa, Pseudomonas syringae pv. phaseolicola 1448A
MKVYAAPFEKFVNLADARLGTKILSVTDDWFADANRLFQPTPAVWKEGVFDDNGKWMDGWESRRKRFEGYDSAVIRLGVAGTIKGVDIDTSFFTGNFPPSASLEACFLASGEPDENTAWTEVLPSVELQGNSHHYHEITNDQAFSHLRFNIYPDGGVARLRVYGVPHRDWSKVSEDEQIDLVAALNGGRSIACSDEHYGSMSNILNPGRGVNMGDGWETARRRTPGNDWVIVALGHKGEVEKVIVDTLHFKGNYPDSCSIQGAFVKGGTDSQIETQSLFWRELLPSQKLTMHAEHEFAEQINAIGPITHIRLNVFPDGGVSRLRVLGKVSR

SEQ ID NO: 64918 - DNA, 996 bp, Pseudomonas fluorescens PfO-1
  CDS (1)..(996): transl_table=11
atgaaagcttacgccgtacctttcgagaagttcgtcaacctggccgatgcacgtctgggcaccaaaatcatctcggtcaccgatgactggttcgcagacgccaatcgtctgtttcagccgaccccggccgtgtggaaggagggcgtgttcgatgacaacggcaagtggatggacggctgggagtcccgccgcaagcgcttcgaaggctacgacagcgcggtgatccgcctgggcgtaccgggttcgatcaaaggcgtggacatcgacacttcattcttcaccggcaacttcccgccatcggcctcgctggaagcctgcttcctggcgtcgggcgagccggacgaaaacacccagtggactgaagtgctgtctgccgtcgaactgcaaggcaacagccaccactaccacgaaatcagcaacgacaaggcgttcagccacctgcgcttcaacatctacccggatggcggcgtggcccgtctgcgcgtgtacggcattccgttccgcgactggtcggctgttggcgacaacgagcaagtcgacctggccgcagccctcaacggtggccgcgccctcgcctgctccgacgaacacttcggccgcatgagcaacatcctcaacccgggccgtggcatcaacatgggcgacggctgggaaaccgcacgtcgtcgcacgccgggcaatgactgggtgatcgtcgcgctgggccacccgggcgagatcgaaaaaatcatcgtcgacaccctgcacttcaagggcaactacccggacacctgctcgatccagggcgcgttcgtcaagggcggcaccgacagccagatcgaaacccagtcgctgttctggcgcgaactgctgccaagccagaagctggaaatgcacgccgaacacaccttcgtcgagcagatcaacgcactgggcccgatcacccacatccgtctgaacgtgttcccggatggtggtgtgagccgcctgcgcgtactgggcaaggtcgctaaataa

SEQ ID NO: 64919 - protein, 331 aa, Pseudomonas fluorescens PfO-1
MKAYAVPFEKFVNLADARLGTKIISVTDDWFADANRLFQPTPAVWKEGVFDDNGKWMDGWESRRKRFEGYDSAVIRLGVPGSIKGVDIDTSFFTGNFPPSASLEACFLASGEPDENTQWTEVLSAVELQGNSHHYHEISNDKAFSHLRFNIYPDGGVARLRVYGIPFRDWSAVGDNEQVDLAAALNGGRALACSDEHFGRMSNILNPGRGINMGDGWETARRRTPGNDWVIVALGHPGEIEKIIVDTLHFKGNYPDTCSIQGAFVKGGTDSQIETQSLFWRELLPSQKLEMHAEHTFVEQINALGPITHIRLNVFPDGGVSRLRVLGKVAK

SEQ ID NO: 64920 - DNA, 1014 bp, Burkholderia sp. 383
  CDS (1)..(1014): transl_table=11
atggctgttccgcttctcgatcccaacgcacccgacttcacgcggcgctacgtgaatcttgccgacccgcgtctcggtgcgcaggcgctcgaagccagcgacgatttcttcgcgccgaaggatcggatgctgaaccccgagccggccgttttcatccccggcaagtacgacgaccacggcaagtggatggacggctgggaaacgcgccgcaagcgcacgacgggctacgactggtgcatcgtcaagctcgcgcgcccgggcgtgatcaagggcttcgacatcgatacgagccacttcaccggcaacttcccgccggctgcgtcgatcgaggccgcgttcgtggccgacggcgcaccgacacatgcgaccgagtgggtcgagatcgtgccgtcgacgacgctgcagggcaacagccatcattacgtcgaagcgagcgatgcgcgcgcgtttacgcacctgcgcgtgaacatctacccggatggcggcattgcacgcctgcgcgtgtacggccagccgcagctcgactgggccggcgcgagcgcgaccgagcaattcgatctcgcggcgatggaaaacggcggttacgtggtggccgcgaacaaccagcacttcggcgtcgcgtcgaacctgctgctgccgggccgcggcgtgaacatgggcgacggctgggaaacccgccgccgccgcgaaccgggcaacgactgggcgatcatcgcgctcgcgcagccgggcgtgatccgcaagatcgaagtcgataccgcgttcttcaagggcaactacccggaccgctgctcgatccaggcggcgtacgtgtcgggcggcaccgacagctcgctgatcacgcagtcgatgttctggcccgtgctgctcggcgaacagaagctgcagatggacaagcagcactacttcgaacaggacatcgcgtcgctcggccccgtcacgcacgtgcgactgaacatcattccggacggcggcgtgtcgcgcctgcgtctgtgggggacgctcgacaaatga

SEQ ID NO: 64921 - protein, 337 aa, Burkholderia sp. 383
MAVPLLDPNAPDFTRRYVNLADPRLGAQALEASDDFFAPKDRMLNPEPAVFIPGKYDDHGKWMDGWETRRKRTTGYDWCIVKLARPGVIKGFDIDTSHFTGNFPPAASIEAAFVADGAPTHATEWVEIVPSTTLQGNSHHYVEASDARAFTHLRVNIYPDGGIARLRVYGQPQLDWAGASATEQFDLAAMENGGYVVAANNQHFGVASNLLLPGRGVNMGDGWETRRRREPGNDWAIIALAQPGVIRKIEVDTAFFKGNYPDRCSIQAAYVSGGTDSSLITQSMFWPVLLGEQKLQMDKQHYFEQDIASLGPVTHVRLNIIPDGGVSRLRLWGTLDK

SEQ ID NO: 64922 - DNA, 1155 bp, Burkholderia thailandensis E264
  CDS (1)..(1155): transl_table=11
atgcgcgtcgcggcgggttcgccgcgacgccatccgccgcgatgcgcacggcgcgtcgcgtccccgccgggcccgcgcgcgacgacgcgcggcggcggctttcattcatcgagcatcaagcactatgacaaggacaagacgatggcacttccgctttccgatccgaacgctccagaattcacgcggcgctacgtgaatctcgccgatccgcgtcttggcgcgcaggcgctcgaggcgagcgacgatttcttcgcgccgaaggagcgcatgctgagtccggagcctgcggtgttcatcccgggcaagtacgacgatcacggcaaatggatggacggctgggagacgcgccgcaagcgcacgacgggctacgactggtgcatcgtgaagctcgcgcgcccgggcgtgatcaagggcttcgacatcgatacgagccacttcacgggcaacttcccgccggccgcgtcgatcgaggccgcgcacgtgcccgatggcgtgccgaacgaggcgacgaagtgggttgaggtcgtgccgtcgacgacgctgcagggcaacagccatcactacgtcgaagcgcgcgacgcgaacgcgtatacgcatctgcgcgtgaacatctacccggacggcggcatcgcgcggctgcgcgtatacggccagccccaactcgattgggcgggcgcgagccggtccgagctgttcgatctcgcggcgatggacaacggcggctatgtcgtcgcggtgaacaaccagcacttcggcctcgcgtcgaacatgctgctgccgggccgcggcgtgaacatgggcgacgggtgggagacgcgccggcgccgcgagccgggcaacgactgggcgatcgtcgcgctcgcgcagccgggcgtgatccgcaagatcgaagtcgacaccgcacatttcaagggcaactttccggaccgctgctcggtccaggccgcatacgtgacgggcggcaccgacagctcgctcgtcacgcaggcgatgttctggccggtgctgctcggcgagcagaagctgcagatggacaagcagcacgttttcgaagccgagctcgccgcgctcgggcccgtcacgcacgtgcggctgaacatcattccggacggcggcgtgtcgcgtctgcgcgtatggggcacgctcgacaaatga

SEQ ID NO: 64923 - protein, 384 aa, Burkholderia thailandensis E264
MRVAAGSPRRHPPRCARRVASPPGPRATTRGGGFHSSSIKHYDKDKTMALPLSDPNAPEFTRRYVNLADPRLGAQALEASDDFFAPKERMLSPEPAVFIPGKYDDHGKWMDGWETRRKRTTGYDWCIVKLARPGVIKGFDIDTSHFTGNFPPAASIEAAHVPDGVPNEATKWVEVVPSTTLQGNSHHYVEARDANAYTHLRVNIYPDGGIARLRVYGQPQLDWAGASRSELFDLAAMDNGGYVVAVNNQHFGLASNMLLPGRGVNMGDGWETRRRREPGNDWAIVALAQPGVIRKIEVDTAHFKGNFPDRCSVQAAYVTGGTDSSLVTQAMFWPVLLGEQKLQMDKQHVFEAELAALGPVTHVRLNIIPDGGVSRLRVWGTLDK

SEQ ID NO: 64924 - DNA, 1014 bp, Burkholderia xenovorans LB400
  CDS (1)..(1014): transl_table=11
atggcactcccgattctcgaccccaacgcaccggaattcacgcgccgctatgtgaacctggcggacccgcgtctgggcgcgcaggcgctcgaggccagcgacgatttcttcgcaccgaaggagcgcatgctgaatccggagccggccgttttcattccgggcaagtacgacgacaacggcaaatggatggacggctgggaaacgcgccgcaagcgcgtcaccggctatgactggtgcgtggtgaagctggcgcgtccgggtgtgatcaagggactggatctcgacaccagccacttcacgggtaatttcccgccggcggcgtcggtggaagccgcgcgcgtggtggacggcgtgccgaatcagtcgacacagtggaccgaaatcgttgcgtcgaccacgttgcagggcaatagccaccactatcatgaagtcagcgacgcgaacgcgtacacgcacctgcgcgtgaatatctacccggacggcggtatcgcgcgtctgcgtgtgtatggtcagccgcaagtggactgggccggcgcgagccgcaccgagcagttcgacctggccgcgatggaaaacggcgcgtatctggtcgccgcgaacaaccagcacttcggcgccgcgtcgacgattctgatgccgggccgcggcgtgaacatgggcgacggctgggagacgcgccgccgtcgcgagccgggtaatgactgggcgatcgtcgcgctggcgcagccgggcgtgatcaggaagatcgaagtcgatacggcgcatttcaagggcaactatccggaccgctgctcgattcaggccgcgtacgtgacgggcggcacggacagttcgctgatcacgcaagccatgttctggccggtgctgctcggcgaacagaagctgaagatggacaaccagcattatttcgaaagcgaaatcgcggcactgggtccggtgacgcacgtacgcttcaatatcattccggacggcggcgtgtcgcgtctgcgtctgtggggcacgctcgcatcatga

SEQ ID NO: 64925 - protein, 337 aa, Burkholderia xenovorans LB400
MALPILDPNAPEFTRRYVNLADPRLGAQALEASDDFFAPKERMLNPEPAVFIPGKYDDNGKWMDGWETRRKRVTGYDWCVVKLARPGVIKGLDLDTSHFTGNFPPAASVEAARVVDGVPNQSTQWTEIVASTTLQGNSHHYHEVSDANAYTHLRVNIYPDGGIARLRVYGQPQVDWAGASRTEQFDLAAMENGAYLVAANNQHFGAASTILMPGRGVNMGDGWETRRRREPGNDWAIVALAQPGVIRKIEVDTAHFKGNYPDRCSIQAAYVTGGTDSSLITQAMFWPVLLGEQKLKMDNQHYFESEIAALGPVTHVRFNIIPDGGVSRLRLWGTLAS

SEQ ID NO: 64926 - DNA, 1011 bp, Burkholderia xenovorans LB400
  CDS (1)..(1011): transl_table=11
atggctaatccgatcctcgaccccaacgctcccgctttcacccgtcgctacatgaacctcgccgacccgcgtctgggcgcgcaggcgctttttgcgagcgacgaattcttcgcgccgaaagaacgcatgctcgagccgcagccggcggtgttcatccccggcaaatacgacgaccacggcaagtggatggacggctgggaaacccgccgcaagcgcaccaccggccacgactactgcgtgatccgtctcgcgcgcccgggcgtcgtgcacggcgtggatctggatacgagccacttcaccggcaactttccgccggccgcgtcgatcgacgcctgctacgtggaaggcgatgtgccgcccgacaacgccgactggcaaaccctcgtgcctgcgaccacgctgcagggcaaccagcaccactatgtcgatgtgaacgacacgcgcgcgttcacccatctgcgcgtgaatctgtacccggacggcggcctcgcgcgcctgcgcgcgtacggccagccgaagcgcgattgggagcgcgtggagcgcggcacgctgctggatctggccgccatcgagaacggcgcctatctggtcgcggcgaacaaccagcatttcgggccggcctcgcagatgctgatgcccggccgtggcatcaacatgggcgacgggtgggaaacccggcgccgccgcgagccgggcaacgattgggcgatcgtcgcgctggcgcggccgggcgtgatccgcaagatcgacgtagatacggcgcacttcaagggcaacttcccggaccgctgttcactgcaagccgcgtcggtgacgggcgggacggacgactcgctcgtcacgcaggcgatgttctggccggtgctgctcggcgagcagaaactgcagatggaccacgtccacaccttcgcggataacctcgcgtcactgggcccggtcacgcatgtgcgtttcaatatctttccggacggcggcgtgtcgcgcctgcgcctgtggggcgaaatcgcataa

SEQ ID NO: 64927 - protein, 336 aa, Burkholderia xenovorans LB400
MANPILDPNAPAFTRRYMNLADPRLGAQALFASDEFFAPKERMLEPQPAVFIPGKYDDHGKWMDGWETRRKRTTGHDYCVIRLARPGVVHGVDLDTSHFTGNFPPAASIDACYVEGDVPPDNADWQTLVPATTLQGNQHHYVDVNDTRAFTHLRVNLYPDGGLARLRAYGQPKRDWERVERGTLLDLAAIENGAYLVAANNQHFGPASQMLMPGRGINMGDGWETRRRREPGNDWAIVALARPGVIRKIDVDTAHFKGNFPDRCSLQAASVTGGTDDSLVTQAMFWPVLLGEQKLQMDHVHTFADNLASLGPVTHVRFNIFPDGGVSRLRLWGEIA

SEQ ID NO: 64928 - DNA, 999 bp, Pseudomonas aeruginosa UCBPP-PA14
  CDS (1)..(999): transl_table=11
atgaacgccaaacacgcgcccttccgccactacctcgacctcgccgacgcgcgcctgggcagccaggtggtcgccgtcagcgacgaatggttcgccccggccagccgcatgctgcaggccggcgaaccggtgtggaaggaaggcgtgttcgacgacagcggcaagtggatggacggctgggaaacccgccgcaagcgcttcgagggccatgaccaggcggtgatccgcctgggtgtgccgggcgtgctgaagggcgtcgacatcgacacccgcttcttcaccggcaaccatccgccggcggcttccctggatggctgcttctgcaccgaaggcgacccggacgacagcacgtcctggagcgaagtgctgccggcggtggggctgcagggcgatagccatcactaccacccgatagacgacgaacgtccctggacccacctgcgtctgaacatctacccggacggcggtatcgcccgcctgcgcctctatggcgtgccctaccgcgactggagcagcctgccgccgggaacggcgctcgacctggccgcagcggtcaacggcggccgggcgctggcctgttccgaccagcatttcggacgcatgggcaacctgctcaaccccggacgtgccatcaacatgggcgacggctgggaaaccggccgccgccgcacgccgggccacgactgggtgatcgtcgccctcggccatcccggcagcatcgaggcggcggtcgtcgataccttgcacttcaagggcaactatccggaaagctgcagcattcaggccgccttcgtggaaggcggaaacgaggcccggatcgaggcacagagcctcttctggcgcgagctgctgccagcgcagaagctggaaatgcaccaggaacaccggttcgagcggcacctcaacgccctcggcccgatcacccatgtacgcctgaacatctttcccgacggcggcgtcagccgcctgcgcctgttcggcagcccacaattaccgtga

SEQ ID NO: 64929 - protein, 332 aa, Pseudomonas aeruginosa UCBPP-PA14
MNAKHAPFRHYLDLADARLGSQVVAVSDEWFAPASRMLQAGEPVWKEGVFDDSGKWMDGWETRRKRFEGHDQAVIRLGVPGVLKGVDIDTRFFTGNHPPAASLDGCFCTEGDPDDSTSWSEVLPAVGLQGDSHHYHPIDDERPWTHLRLNIYPDGGIARLRLYGVPYRDWSSLPPGTALDLAAAVNGGRALACSDQHFGRMGNLLNPGRAINMGDGWETGRRRTPGHDWVIVALGHPGSIEAAVVDTLHFKGNYPESCSIQAAFVEGGNEARIEAQSLFWRELLPAQKLEMHQEHRFERHLNALGPITHVRLNIFPDGGVSRLRLFGSPQLP

SEQ ID NO: 64930 - DNA, 963 bp, Mycobacterium smegmatis str. MC2 155
  CDS (1)..(963): transl_table=11
atgagtgaaaccccacccaatttcacctggctacccgatctggccctgcggtcgttgggcggcgcggtggtgtgggccaacgacgagacgttcgcggagaaggagaacctgatctcgcccgggccgtcgcagtaccggcccgcgacgttcgggcacaagggccagatctacgacgggtgggagacccgcaggcggcgtgaggccgggcacgactcggcgatcgtgcgcctcggtgtgcccggtgtgatccgcgggatcgtcgtcgacaccgcgtggttcaagggcaactacccgcccgaggtgtcggtcgaagcgatcgaggtggacggttatcccacggccgggcagctcgccgccgatacggggtggacaccgctcatcgaacgctcccgcgttcacggcgacacccgcaacaacttcgaggtgcattccgaggaccgctggacgcacgtgcggctcaacatctttcccgacggcggcgtggcacggctgcgggtgcacggggaaggccgccccgacaaacggttcctcggcatcgggccgatggatctggcggcgctggagaacggtgcactggtgctcgactgttccaaccgcttctacagctcaccgcacaacctcatcttccccggcctggcgcaggtcatgggtgacggctgggagaccgcgcgccggcgcgacgacggaaacgactgggtgcgaatccgtttggcggggccgggacgcgtgcgcctggccgaggtcgacacgtcgtacttcgtgggtaattgccccggcgaggccgcgctgagcggcctgcgcgccgacgggcagtgggtcgaactgctgccacgcaccgcgctactgcccgacacgcggcaccggttcctcgtcgacgttgccgacgtggtgtcggaagtgcgactggacatctaccccgacggcggcctcgcgcgcctgcgactgtacggagatctggcatga

SEQ ID NO: 64931 - protein, 320 aa, Mycobacterium smegmatis str. MC2 155
MSETPPNFTWLPDLALRSLGGAVVWANDETFAEKENLISPGPSQYRPATFGHKGQIYDGWETRRRREAGHDSAIVRLGVPGVIRGIVVDTAWFKGNYPPEVSVEAIEVDGYPTAGQLAADTGWTPLIERSRVHGDTRNNFEVHSEDRWTHVRLNIFPDGGVARLRVHGEGRPDKRFLGIGPMDLAALENGALVLDCSNRFYSSPHNLIFPGLAQVMGDGWETARRRDDGNDWVRIRLAGPGRVRLAEVDTSYFVGNCPGEAALSGLRADGQWVELLPRTALLPDTRHRFLVDVADVVSEVRLDIYPDGGLARLRLYGDLA

SEQ ID NO: 64932 - DNA, 1041 bp, Azoarcus sp. BH72
  CDS (1)..(1041): transl_table=11
atggccagcatccccggcacccccgtcttcgctccccccgccgacctgcccgagtgggcgcggcgctcggtcgaccttgccagcgtccgcctcggcgcgaaggcgctctacgcctccgacgacttcttcgccccggtcgagcgcatgctcgaccccgcgccggcgcaattcgtgcccggcaagtacgacgccaacggcaaatggatggacggctgggagtcgcgccgcaagcgcgtggccgggcatgactgggcgctggtcaagctcggcgtgcgcggcgtcatccgcggcttcgacgtggataccagccacttcaccggcaactacccgccggcggtctcgatcgaggcctgcgtgtccgtcagcgacgacgtcgaggcgctgaaggcggcggcatggaccgaaatcctgcccgccaccccgctcggcccgaacagccaccacctgctggaatgcgcgagcaccgcggcctggacccacctgcgcgtcaacatctacccggacggcggcatcgcccggctgagggtgtatggccgcccgcttggtgcgctggcaaacgtgccggcggatgcaacggtcgatctggtggcgatggagaacggcggccgcgcggtgtcgtggaacgacgccagcttcggctcctccgcctccgcgctgctgctgcccgggcgcgggctggacatgggcgacggctgggagacgcgccgccggcgcgaacccggcaacgactggtgcgtgctggaactcggcacgcccggcatcatcgagcgcgtggaggtggacaccgcgttctacaagggcaactacccggaccgctgctccctccaggctgccttcgtcagcggcggcacagaccgctcgatcaccacccagagcatgttctgggcgacgctgctgcccgagcacaagctggagatggacgccgtccatagcttcaccgcactggccccgctcggcccggtcacccatgtgcgcttcaacatcttccccgacggtggcgtctcgcgcctgcgcctgtggggcaaggtcgcgccgcgctga

SEQ ID NO: 64933 - protein, 346 aa, Azoarcus sp. BH72
MASIPGTPVFAPPADLPEWARRSVDLASVRLGAKALYASDDFFAPVERMLDPAPAQFVPGKYDANGKWMDGWESRRKRVAGHDWALVKLGVRGVIRGFDVDTSHFTGNYPPAVSIEACVSVSDDVEALKAAAWTEILPATPLGPNSHHLLECASTAAWTHLRVNIYPDGGIARLRVYGRPLGALANVPADATVDLVAMENGGRAVSWNDASFGSSASALLLPGRGLDMGDGWETRRRREPGNDWCVLELGTPGIIERVEVDTAFYKGNYPDRCSLQAAFVSGGTDRSITTQSMFWATLLPEHKLEMDAVHSFTALAPLGPVTHVRFNIFPDGGVSRLRLWGKVAPR

SEQ ID NO: 64934 - DNA, 1014 bp, Burkholderia vietnamiensis G4
  CDS (1)..(1014): transl_table=11
atggctgttctgcttctcgatcccgccgcgcccgatttcacgcggcgctacgtgaacctcgccgacccgcgcctcggcgcgcaggcgctcgaagccagcgacgacttcttcgcgccgaaggagcggatgctgaacccggagccggcggtcttcatccccggcaagtacgacgaccacggcaagtggatggacggctgggagacgcgccgcaagcgcacgaccggttatgactggtgcatcgtcaagctcgcgcggcccggcgtgatcaagggcgtcgacatcgataccagccatttcaccggcaacttcccgccggccgcgtcgatcgacgccgcgtacgtcgccgacggcgcgccgacgcaggcgaccgagtggatcgagatcgtgccgtcgacgacgctgcagggcaacagtcaccattacgtcgaagcgcgcgacgcgcgcgcgttcacgcatttgcgcgtgaacatctatccggacggcggcgtcgcgcggctgcgcgtgtacggccagccgcagctcgactgggccggcgcgagcgcgaccgagcagttcgacctcgcggcgatggaaaacggcggctacgtcgtggccgcgaacaaccagcacttcgggctcgcgtcgaacctgctgctgccgggccgcggcgtgaacatgggcgacggctgggaaacgcgtcgccgccgcgaaccgggcaacgactgggcgatcgtcgcgctcgcgcagccgggcgtgatccgcaggatcgaagtcgatacggcgttcttcaagggcaactacccggaccgctgctcgattcaggccgcctacatgtcgggcggcaccgacagctcgctgatcacgcagtcgatgttctggccggtgctgctcggcgagcagaagctgcagatggacaagcagcacttcttcgaaccggaaatcgccgcactcgggccggtcacgcacgtgcgcctgaacatcatcccggacggcggcgtatcgcgtctgcgcctgtgggggacgctcgacaaatga

SEQ ID NO: 64935 - protein, 337 aa, Burkholderia vietnamiensis G4
MAVLLLDPAAPDFTRRYVNLADPRLGAQALEASDDFFAPKERMLNPEPAVFIPGKYDDHGKWMDGWETRRKRTTGYDWCIVKLARPGVIKGVDIDTSHFTGNFPPAASIDAAYVADGAPTQATEWIEIVPSTTLQGNSHHYVEARDARAFTHLRVNIYPDGGVARLRVYGQPQLDWAGASATEQFDLAAMENGGYVVAANNQHFGLASNLLLPGRGVNMGDGWETRRRREPGNDWAIVALAQPGVIRRIEVDTAFFKGNYPDRCSIQAAYMSGGTDSSLITQSMFWPVLLGEQKLQMDKQHFFEPEIAALGPVTHVRLNIIPDGGVSRLRLWGTLDK

SEQ ID NO: 64936 - DNA, 1029 bp, Oceanicola batsensis HTCC2597
  CDS (1)..(1029): transl_table=11
atgacgacaatcgacacattcgaccccgacgttcccctcttcgtgcgcagcggcatcaacctcgcctcggcggggctgggggcaaaggcgatttccgcgaccgacgaattcttcgcgccgctcgagcggatgctggacgacggtccggcgatcttctaccccgaccggttcgacgaccacggcaagtggatggacggctgggaaacccgccgccgccgcgggagcgggcatgaccacgcggtgatccggcttgcggcggcggggcggctgctggggttcgacgtcgacacgtcgcatttcaccggcaacttcgccccggccgtgcggatcgaggcctgcacctgcccgcagggcgaaccgggcgcagatcagaattgggtcgaaatccttcccaacgcgccgctcggccccagcagtcatcactattttccctgcaagagctacgagctctggacccatctgcggatccatatctatcccgacggcggaattgcccggctgcgggcctacggcgttcccgaacttgacccgtcgaaccacgggcaggacgagatcgaccttgccgccgcgctgaacggcggccgcgtcctggccttttccgatgcgcattacggcgatttccgccggcttctgtcgcccgggcgcggcgtgaccatggccgatggctgggaaacccggcgccggcgcgagccgggatacgactggatggtcgtggccctgggcgcgcgggggaggatcgaccgcgtcgtcgtggacacccacctgttcaagggcaactttcccgacagctgttcctttcgtgcggcggatctctcggagttcggcgacgggctgacggatgctctcgtgacatcgtcgatgttctgggaggaactgctgccgcgccagaagctgcaaggcgacacgatccacgaattcaccgacgaggtgatcgacatcggaccggtcacgcatgttcggttcaacatccatcccgacggcggcgtctcgcggctgcggctcttcgggcggccggcgtggcgcgggtga

SEQ ID NO: 64937 - protein, 342 aa, Oceanicola batsensis HTCC2597
MTTIDTFDPDVPLFVRSGINLASAGLGAKAISATDEFFAPLERMLDDGPAIFYPDRFDDHGKWMDGWETRRRRGSGHDHAVIRLAAAGRLLGFDVDTSHFTGNFAPAVRIEACTCPQGEPGADQNWVEILPNAPLGPSSHHYFPCKSYELWTHLRIHIYPDGGIARLRAYGVPELDPSNHGQDEIDLAAALNGGRVLAFSDAHYGDFRRLLSPGRGVTMADGWETRRRREPGYDWMVVALGARGRIDRVVVDTHLFKGNFPDSCSFRAADLSEFGDGLTDALVTSSMFWEELLPRQKLQGDTIHEFTDEVIDIGPVTHVRFNIHPDGGVSRLRLFGRPAWRG

SEQ ID NO: 64938 - DNA, 1005 bp, Oceanobacter sp. RED65
  CDS (1)..(1005): transl_table=11
atgcaacaacaaaatgatcatccgtacaaaacgtggattgatttagcggcacaacgactaggcggacaggcactgcaatgcagtgatgatttttttgcggaaatggaaaacttgcttaagccagcagccccggtttttatcgacgataaatatacagaccgtggtaagtggatggacggatgggagtctagacgcaaacgtgtagttggacacgattggtgtgtgatcaaactaggcgcaaagggtattatccatggtgttaatgtttgcacacgtttcttcgccggtaatgcacctcaaagcgtttctattgaaggctgtgtgtctgaaatagcacccaatgatagtactgaatggcaacccattttaattcagtctaacgttaatcctgacagtgataattattttggtatcgaatcgcaagaagcctttactcacattcggttgaacattttccccgacggtggtgttgcaagattgagagtctatggtgagccagtgattgactgggattggttcttacctggtgagcctattgatttggcctatgtcaaaaatggtggtcgcccaatggcatgcagcgacatgttcttcagtaatatggaaaacctgatcatgccaaatcgtggcaaggacatgggggatggttgggaaaccaagcgtcgccgtggtggtcgtgagtgtgattggatcatcgtcaagctaggggccaaaggctctattgaaaaagtcttggtggataccgcgcattttaaaggaaattatccagagagcttcactttggaggcagcatgtttagaaccacatcaaagtccagatgaaaatactgaatggcatgaggttattgggcgagaaaagctcacagcggattcagaacacttctatcgccataatattcagaataaaggacagcactttactcatgtgcgtctgaatatttttcctgatggaggtgtcagtcgcttgcgcgtgtatggttttctagccgaaaaagagggcgagtaa

SEQ ID NO: 64939 - protein, 334 aa, Oceanobacter sp. RED65
MQQQNDHPYKTWIDLAAQRLGGQALQCSDDFFAEMENLLKPAAPVFIDDKYTDRGKWMDGWESRRKRVVGHDWCVIKLGAKGIIHGVNVCTRFFAGNAPQSVSIEGCVSEIAPNDSTEWQPILIQSNVNPDSDNYFGIESQEAFTHIRLNIFPDGGVARLRVYGEPVIDWDWFLPGEPIDLAYVKNGGRPMACSDMFFSNMENLIMPNRGKDMGDGWETKRRRGGRECDWIIVKLGAKGSIEKVLVDTAHFKGNYPESFTLEAACLEPHQSPDENTEWHEVIGREKLTADSEHFYRHNIQNKGQHFTHVRLNIFPDGGVSRLRVYGFLAEKEGE

SEQ ID NO: 64940 - DNA, 1074 bp, Aspergillus niger
  CDS (1)..(1074)
atgtcttcagactacatccccgccgatcaaatcgactccaccttcgcccacaccaccaacctcgcctccgccgccctcaacagcaccgtcctctcctgctccaacgaatacttcgccgccgcctccaacctcctcaccccgacccctcccatcaaccgccccggcgtcttcatccacacaggagcctggtacgacggctgggaaacccgccgccacaaccccgccccctacgactgggccgtcatcaagctgggcgtctccagcgcccacatctacggcgtcgaagtcaacaccggcttcttcatcggtaactacggcgagaaggcctccctgcaagcgacctacgcgcccaacactcccgactcggaagtcgccgatgagaaatacactggctggacgacgattctcccgcccgtcgagtgcgggccgtcgcagcggcgcgcgtggaagctggacccggaggtgcacggcaaggcatttacgcatgtgcggttgttgatgtatcccgatggagggtttggacggttgagggtctacgggaaggcgattccgggagatgttaaggtggagggaggtgaggaggaattgagttctgcgcttgtcgggggtgtggcgctggctgcgtcggatcagcatttcacgccgtgttcgaatctgttgttgcctgggaggggtaaggatatgggggatgggtgggagacggcgaggtccagggccaagggtcatgttgattgggcgattgtgaagttggggttggtggggagtgtgagtaaggtggtggtggatacgaaggatttcagggggaacttccctagggaggtgcgcgtgcatgggcttgttgaggggagtgtgaagggcgaggaggagcctacgcatgatcatcctgggtgggtggagttggttaagggtgataggccttgtcgggcggatacggagcatgtctttgagggacaggatttggctgctggtggggaggatacgagggcgtttacgcatgttaagttgacgttggtgccggatggaggtgtcaagcggttgagggtgtttgggaagcggaaggctgttgctgcttga

SEQ ID NO: 64941 - protein, 357 aa, Aspergillus niger
MSSDYIPADQIDSTFAHTTNLASAALNSTVLSCSNEYFAAASNLLTPTPPINRPGVFIHTGAWYDGWETRRHNPAPYDWAVIKLGVSSAHIYGVEVNTGFFIGNYGEKASLQATYAPNTPDSEVADEKYTGWTTILPPVECGPSQRRAWKLDPEVHGKAFTHVRLLMYPDGGFGRLRVYGKAIPGDVKVEGGEEELSSALVGGVALAASDQHFTPCSNLLLPGRGKDMGDGWETARSRAKGHVDWAIVKLGLVGSVSKVVVDTKDFRGNFPREVRVHGLVEGSVKGEEEPTHDHPGWVELVKGDRPCRADTEHVFEGQDLAAGGEDTRAFTHVKLTLVPDGGVKRLRVFGKRKAVAA

SEQ ID NO: 64942 - DNA, 1179 bp, Branchiostoma belcheri tsingtauense
  CDS (1)..(1179)
atgtcatcaacaacaacgtctacgaccccaccccatttcacccagctgaatgacctggcctgtgcaaaggcaggaggcagggttctgtttgctacagatgactggtttgctgtggctgataatcttctcaagggtgacccaccccagtggaaagagggagtgttcactgagtatggcaagtggatggatggatgggagtcacgcaggaagagaatggagggccatgattggtgcattgtccagctgggcgtgtcaggggtcatcagtggtgtggaggtggacaccagttacttcacaggcaactacgcaccacggttctccctgcaggctgcatgtttaccagatggtaccacattcccagtcagacagcccagaatgggcactgctgcttccccacaacagctagcaggcatggaggagataaaaacagaggaatggacagagttggttcccatgacagccctgagaccaggctatcctgacacatgtcagaactacttccacatcaccagcacacagagatggactcatgtcagactcaacatgtacccagatggtggtattgccagactgcatgtctatggcattgggagtaaagattggtccacagtaaaaagcaatgaactggtagatttggttgccatggacaacggaggggtgtgtctggggttcagcaatgcccactacggccatcccaggaatgccattgggctgggaagggctgacaacatgggtgacggctgggagactgcacggaggttggacaggcctcccatattaaaagctgacgagagtggtgttcttgtggtgccaggttgtgaatgggctgtttacagactgggtcatcctggagtcattctgaagattgaaattgacaccaatcatttcaagggaaactacccagactcctgtagaattgaagcctgtacactgtcccctacagaagaaaaggctgtacttgggagggacagagccgctattgggaatgaagaagtgaagtggaagactttacttggcccaacaaagttgtctgcacatcgtcgcctgttcctgagtggaggccaggtgcagccggtgggcgtggtcagccacgtccgtctcaccatgacgccagacggtgggatcagcaggatgagactgtgggggttctctcgggctcccaaccctgccaaactgtag

SEQ ID NO: 64943 - protein, 392 aa, Branchiostoma belcheri tsingtauense
MSSTTTSTTPPHFTQLNDLACAKAGGRVLFATDDWFAVADNLLKGDPPQWKEGVFTEYGKWMDGWESRRKRMEGHDWCIVQLGVSGVISGVEVDTSYFTGNYAPRFSLQAACLPDGTTFPVRQPRMGTAASPQQLAGMEEIKTEEWTELVPMTALRPGYPDTCQNYFHITSTQRWTHVRLNMYPDGGIARLHVYGIGSKDWSTVKSNELVDLVAMDNGGVCLGFSNAHYGHPRNAIGLGRADNMGDGWETARRLDRPPILKADESGVLVVPGCEWAVYRLGHPGVILKIEIDTNHFKGNYPDSCRIEACTLSPTEEKAVLGRDRAAIGNEEVKWKTLLGPTKLSAHRRLFLSGGQVQPVGVVSHVRLTMTPDGGISRMRLWGFSRAPNPAKL

SEQ ID NO: 64944 - DNA, 1014 bp, Burkholderia mallei
  CDS (1)..(1014): transl_table=11
atggctcttccgctttcggatccgaacgctcccgaattcacgcggcgttacgtgaatctcgccgatccgcgtctcggcgcgcaggcgctcgaggcgagcgacgatttcttcgcgccgaaggagcgcatgctgaatccggagcccgcggtgttcatcccgggcaaatacgacgatcacggcaaatggatggacggctgggagacgcgccgcaagcgcacgacgggttatgactggtgcgtcgtgaagctcgcgcgtccgggcgtgatcaagggtgtcgacatcgatacgagccatttcaccggcaatttcccgcccgccgcgtcgatcgaggccgcgcacgtgcccgacggcgcgccgaacgaggcgacgaagtgggtggagatcgtgccggcgacgacgctgcagggcaacagccatcactacgtcgaagcacgcgacgcgaacgcatacacgcatctgcgcgtgaacctctacccggacggcggcatcgcgcggctgcgcgtctacggccagccgcagctcgattgggcgggcgcgagccgatcggcgctgttcgatctcgcggcgatggagaacggcggctacgtcgtcgcggcgaacaaccagcacttcggcctcgcgtcgaacgtgctgctgccgggccgcggcgtgaacatgggcgacggctgggagacgcgccgccgccgcgagccgggcaacgactgggcgatcgtcgcgctcgcgcagccgggcgtgatccgcaaggtcgaaatcgacaccgcgcatttcaagggcaactatccggaccgctgttcgatccaggccgcctatgtgcagggcggcaccgacagctcgctcgtcacgcaggcgatgttctggccggtgctgctcggcgagcagaagctgcagatggacaagcagcacgctttcgaagccgagctcgccgcgctcgggcccgtcacgcacgtgcggctgaacatcattccggacggcggcgtatcgcgtctgcgcgtatggggcacgctcgacaaatga

SEQ ID NO: 64945 - protein, 337 aa, Burkholderia mallei
MALPLSDPNAPEFTRRYVNLADPRLGAQALEASDDFFAPKERMLNPEPAVFIPGKYDDHGKWMDGWETRRKRTTGYDWCVVKLARPGVIKGVDIDTSHFTGNFPPAASIEAAHVPDGAPNEATKWVEIVPATTLQGNSHHYVEARDANAYTHLRVNLYPDGGIARLRVYGQPQLDWAGASRSALFDLAAMENGGYVVAANNQHFGLASNVLLPGRGVNMGDGWETRRRREPGNDWAIVALAQPGVIRKVEIDTAHFKGNYPDRCSIQAAYVQGGTDSSLVTQAMFWPVLLGEQKLQMDKQHAFEAELAALGPVTHVRLNIIPDGGVSRLRVWGTLDK

SEQ ID NO: 64946 - DNA, 993 bp, Photobacterium profundum
  CDS (1)..(993): transl_table=11
atggaaaaggcattgaattttgaacaatacgtaaaccttgcagaccctaaattaggtgctgaagcaatctttgcaaccgatgatttttttgcagacaaaagccgtttgatccgtaccgaagcagcggaatggaaagaggatctttatgacgataacggcaagtggatggacggttgggaatcacgccgtaagcgtagtgaagggtatgacttttgtgtcgttcgactgggtcttgcgggaacaattgcgggtttagatattgatacctcatttttcactggtaactttccaccatcagcgtctgttgatgcctgttatagcccagacggtgaaccgtctgatagcactgaatggcaagaaattctgtcgtcacaaagccttcaaggtgacagccatcacttacatgcattagataacgagcaggtctttacccatgtccgtttaaatatttaccctgacggtggtgtagcccgtttacgcgtgtatggtcgtccgagtgttaactgggatcaaatcggtattgaccaagaagttgatttagcggctgttgttaatggtggtcgagcattggcttgtagtgatgaacactttggtaagaagtccaatatattaggccctggccgtggtgaaaatatgggcgatggttgggaaaccgcacgtcgccgcacaccaggtaatgattgggtgattgttgccttaggtcgcccaggaaaaattggcaaagtcgtggttgataccgcacactttaaaggcaacttcccagatagctgttcaattcaagccgcgtatgttcaaggtggaacggatgatcaggtagagacgcaaagcttattctggcgtgaattaatgccctcgcaaaagttatctgctcataatattcaggagtttgttgagcaggtgaatgatcttggagcagtcacgcatgtgcgcctaaatattttccctgatggtggtattagccgtctgcgtcttttcggctttaaaagtgaatga

SEQ ID NO: 64947 - protein, 330 aa, Photobacterium profundum
MEKALNFEQYVNLADPKLGAEAIFATDDFFADKSRLIRTEAAEWKEDLYDDNGKWMDGWESRRKRSEGYDFCVVRLGLAGTIAGLDIDTSFFTGNFPPSASVDACYSPDGEPSDSTEWQEILSSQSLQGDSHHLHALDNEQVFTHVRLNIYPDGGVARLRVYGRPSVNWDQIGIDQEVDLAAVVNGGRALACSDEHFGKKSNILGPGRGENMGDGWETARRRTPGNDWVIVALGRPGKIGKVVVDTAHFKGNFPDSCSIQAAYVQGGTDDQVETQSLFWRELMPSQKLSAHNIQEFVEQVNDLGAVTHVRLNIFPDGGISRLRLFGFKSE

SEQ ID NO: 64948 - DNA, 996 bp, Pseudomonas fluorescens
  CDS (1)..(996): transl_table=11
atgaaaaccaacgccgtagctttcgagaagttcgtcaacctggccgatgcccggctggggaccaagatcatctcggtcaccgatgactggttcgccgacgccaaccgcctgttccaaccgactccggcggtgtggaaggaaggcatattcgatgacaacggcaagtggatggatggctgggaatcacgccgcaagcgcttcgaaggctacgacagtgcggtcatccgcctcggcgtggccggctcgatcaagggcgtggacatcgacacttcattcttcaccggcaacttcccgccctcggcctccctggaagcctgcttcctggccgcaggcgaaccggatgaaaacacccagtggaccgaagtgctgccggcggtggagttgcagggcaacagccaccactaccacgagatccacaaccaccagccgttcagccacctgcgcttcaacatctaccccgatggcggcgtagcacggctgcgggtctacggcattccctaccgcgactggtcggccatcggcgacgacgaacaggtcgacctggctgccgccctcaacggcggccgcgccctggcctgctccgacgagcacttcgggcgcatgggcaacctcctcaaccccggccgcggcatcaacatgggtgacggttgggaaaccgcccggcgccgtactcccggcaacgactgggtgatcatcgccctgggccatgccggtgaaatcgaaaagatcatcgtcgacaccctgcacttcaagggcaactaccccgacagctgttcgatccagggcgccttcgtcaagggtggcaccgacagccagatcgaaacccagagcctgttctggcgtgaactgctacccagccagaaattggaaatgcacgccgaacacagcttcgtcgaacagatcagggcactggggcctattacccacgtgcgcctgaatgtattcccggacggtggcgtcagccgcctgcggctgctgggaaaggtcaaaaaataa

SEQ ID NO: 64949 - protein, 331 aa, Pseudomonas fluorescens
MKTNAVAFEKFVNLADARLGTKIISVTDDWFADANRLFQPTPAVWKEGIFDDNGKWMDGWESRRKRFEGYDSAVIRLGVAGSIKGVDIDTSFFTGNFPPSASLEACFLAAGEPDENTQWTEVLPAVELQGNSHHYHEIHNHQPFSHLRFNIYPDGGVARLRVYGIPYRDWSAIGDDEQVDLAAALNGGRALACSDEHFGRMGNLLNPGRGINMGDGWETARRRTPGNDWVIIALGHAGEIEKIIVDTLHFKGNYPDSCSIQGAFVKGGTDSQIETQSLFWRELLPSQKLEMHAEHSFVEQIRALGPITHVRLNVFPDGGVSRLRLLGKVKK

SEQ ID NO: 64950 - DNA, 1011 bp, Ralstonia solanacearum
  CDS (1)..(1011): transl_table=11
atggcgatgcctacgctcgatccgaacgcccccgacttcacgcgccgttatccgaacctggcggacccccgcctgggcgccgtggccacgttcgcgaccgatgaattcttcgcgcccaaggaccgcatgctcaatcccgagccggccgtcttcattcccggcaagtacgacgaccacggcaagtggatggacggctgggaaacgcgtcgccgccgcaacggcggctatgaccactgcatcgtcaagctggcccggccgggcgtggtcaagggcgtggacatcgataccagccacttcaccggcaacttcccgccggccgcgtccatcgacgccgcctacctgccgcacggcgagccgaccgacgccacgcagtggaccgagatcgttccgtccaccaccctgcagggcaacagccaccactatctggacgtgttcggcacccacgcctacacccacctgcgcgtgaacatctacccggacggcggcatcgcgcgcctgcgcgtgtatggccaaccgcaggtcgactggaagggcgcggaccgcgccacgctgttcgacctggccgcgatggagaacggcgcctacgtggtcgaggtcaacaaccagcacttcgggctggcctccagcctgctgatgccgggccgcggcatcaacatgggcgacggctgggaaacccgccgccgccgcgagccgggcaacgactggtgcatcatcgcgctggcgcacccgggccgcatccgcaagatcgaagtcgacaccgcccacttcaagggcaacttcgccgaccgcgtctccctccaggccgcgcgcgtgaccggcggcaccgacgccacgctcaagacgcaggccatgttctggcagacactgctgcccgagcagaagctgcagatggaccaccagcactactacgaggccgagctcgccgacctgggccccgtcacccacgtgcgcttcaacatgttcccggacggcggcgtctcgcgcctgcgcctgtggggagcgctcgaatga

SEQ ID NO: 64951 - protein, 336 aa, Ralstonia solanacearum
MAMPTLDPNAPDFTRRYPNLADPRLGAVATFATDEFFAPKDRMLNPEPAVFIPGKYDDHGKWMDGWETRRRRNGGYDHCIVKLARPGVVKGVDIDTSHFTGNFPPAASIDAAYLPHGEPTDATQWTEIVPSTTLQGNSHHYLDVFGTHAYTHLRVNIYPDGGIARLRVYGQPQVDWKGADRATLFDLAAMENGAYVVEVNNQHFGLASSLLMPGRGINMGDGWETRRRREPGNDWCIIALAHPGRIRKIEVDTAHFKGNFADRVSLQAARVTGGTDATLKTQAMFWQTLLPEQKLQMDHQHYYEAELADLGPVTHVRFNMFPDGGVSRLRLWGALE

SEQ ID NO: 64952 - DNA, 1029 bp, Schizosaccharomyces pombe
  CDS (1)..(1029)
atgtcagtggaaaacgttgaacgactttcgcctgagcaggctgatgccttctttggccagagcagcgtagacctcatctctcgagctcttggtggtcaggtgcttgggtgtagcgatgatttctttgcatcttgcgaaaacctcatcaatcctgcggaccctattcgcaaagccggtgtattcgttgaaacgggtgcctggtatgatggatgggagacgcgtagacacaataccgctccttgtgactgggttatagttaagttagggccttcaagtggaagggttactggctgtgaaattgatactaccttttttaacggcaatcatgctccagaagtgagtgtggaagctgcttttttaccggaaggtaaccccgacgccaaaacaaattggacccctatacttcctaagcttccttgtggacccactcagagacatatctatcgctttaaggagataccacagcaaaattttacccatgttcgtttatgtatgtatcctgacggcggtatagctcgattccgtctttatggcaacgttgtgcctgttttccccgccgatttggacgctcgtttggatcttgctcacatgtacctcggtggactggttgttcaatgtagtgatcaacattttggtaagaaggacaatctcctccttcctggacgtggtgtgaacatgggcgatggttgggaaactgctagaagtagggaaaagggtcatgttgactgggttattgtaaagcttggcgcaagaggctacattgatgatgctcttatcgacactaaccactttaaaggcaattatcctaaagaggtcatcttagaagccattgattctcctgaccacattcctggccccgatgcccagtgggttacgattttaccagctcgtaagctcggtccccatatggaacatgtcttcaccaatcttcaaaataactcaaccccgatgacccatgtgcgtatgataattatccccgatggcggcgtcaagcgtcttcgtatttacggacgtcgtgctgcaaattag

SEQ ID NO: 64953 - protein, 342 aa, Schizosaccharomyces pombe
MSVENVERLSPEQADAFFGQSSVDLISRALGGQVLGCSDDFFASCENLINPADPIRKAGVFVETGAWYDGWETRRHNTAPCDWVIVKLGPSSGRVTGCEIDTTFFNGNHAPEVSVEAAFLPEGNPDAKTNWTPILPKLPCGPTQRHIYRFKEIPQQNFTHVRLCMYPDGGIARFRLYGNVVPVFPADLDARLDLAHMYLGGLVVQCSDQHFGKKDNLLLPGRGVNMGDGWETARSREKGHVDWVIVKLGARGYIDDALIDTNHFKGNYPKEVILEAIDSPDHIPGPDAQWVTILPARKLGPHMEHVFTNLQNNSTPMTHVRMIIIPDGGVKRLRIYGRRAAN

SEQ ID NO: 64954 - DNA, 26 bp, Artificial sequence
  primer
atgaagttttttagtttggcagatga

SEQ ID NO: 64955 - DNA, 25 bp, Artificial sequence
  primer
tcagtacccccaaactcttattctt

SEQ ID NO: 64956 - protein, 386 aa, Artificial sequence
  consensus sequence
  Variant (3)..(9): Xaa in position 3 to 9 is any amino acid
  Variant (11)..(12): Xaa in position 11 to 12 is any amino acid
  Variant (15)..(34): Xaa in position 15 to 34 is any amino acid
  Variant (35)..(35): Xaa in position 35 is any or no amino acid
  Variant (37)..(37): Xaa in position 37 is any amino acid
  Variant (39)..(39): Xaa in position 39 is any amino acid
  Variant (44)..(44): Xaa in position 44 is any amino acid
  Variant (47)..(51): Xaa in position 47 to 51 is any amino acid
  Variant (52)..(56): Xaa in position 52 to 56 is any or no amino acid
  Variant (58)..(62): Xaa in position 58 to 62 is any amino acid
  Variant (64)..(70): Xaa in position 64 to 70 is any amino acid
  Variant (71)..(72): Xaa in position 71 to 72 is any or no amino acid
  Variant (74)..(76): Xaa in position 74 to 76 is any amino acid
  Variant (79)..(80): Xaa in position 79 to 80 is any amino acid
  Variant (82)..(82): Xaa in position 82 is any amino acid
  Variant (85)..(86): Xaa in position 85 to 86 is any amino acid
  Variant (88)..(89): Xaa in position 88 to 89 is any amino acid
  Variant (91)..(92): Xaa in position 91 to 92 is any amino acid
  Variant (94)..(105): Xaa in position 94 to 105 is any amino acid
  Variant (106)..(129): Xaa in position 106 to 129 is any or no amino acid
  Variant (131)..(155): Xaa in position 131 to 155 is any amino acid
  Variant (156)..(160): Xaa in position 156 to 160 is any or no amino acid
  Variant (163)..(163): Xaa in position 163 is any amino acid
  Variant (165)..(168): Xaa in position 165 to 168 is any amino acid
  Variant (173)..(173): Xaa in position 173 is any amino acid
  Variant (176)..(176): Xaa in position 176 is any amino acid
  Variant (178)..(178): Xaa in position 178 is any amino acid
  Variant (181)..(192): Xaa in position 181 to 192 is any amino acid
  Variant (193)..(205): Xaa in position 193 to 205 is any or no amino acid
  Variant (208)..(211): Xaa in position 208 to 211 is any amino acid
  Variant (214)..(222): Xaa in position 214 to 222 is any amino acid
  Variant (226)..(228): Xaa in position 226 to 228 is any amino acid
  Variant (229)..(229): Xaa in position 229 is any or no amino acid
  Variant (231)..(233): Xaa in position 231 to 233 is any amino acid
  Variant (238)..(239): Xaa in position 238 to 239 is any amino acid
  Variant (247)..(247): Xaa in position 247 is any amino acid
  Variant (249)..(249): Xaa in position 249 is any amino acid
  Variant (251)..(254): Xaa in position 251 to 254 is any amino acid
  Variant (255)..(269): Xaa in position 255 to 269 is any or no amino acid
  Variant (272)..(275): Xaa in position 272 to 275 is any amino acid
  Variant (277)..(279): Xaa in position 277 to 279 is any amino acid
  Variant (280)..(280): Xaa in position 280 is any or no amino acid
  Variant (282)..(287): Xaa in position 282 to 287 is any amino acid
  Variant (291)..(292): Xaa in position 291 to 292 is any amino acid
  Variant (294)..(294): Xaa in position 294 is any amino acid
  Variant (297)..(297): Xaa in position 297 is any amino acid
  Variant (299)..(311): Xaa in position 299 to 311 is any amino acid
  Variant (312)..(332): Xaa in position 312 to 332 is any or no amino acid
  Variant (334)..(340): Xaa in position 334 to 340 is any amino acid
  Variant (342)..(347): Xaa in position 342 to 347 is any amino acid
  Variant (348)..(348): Xaa in position 348 is any or no amino acid
  Variant (350)..(360): Xaa in position 350 to 360 is any amino acid
  Variant (361)..(367): Xaa in position 361 to 367 is any or no amino acid
  Variant (369)..(374): Xaa in position 369 to 374 is any amino acid
  Variant (379)..(380): Xaa in position 379 to 380 is any amino acid
  Variant (382)..(382): Xaa in position 382 is any amino acid
  Variant (384)..(385): Xaa in position 384 to 385 is any amino acid
LGXXXXXXXDXXFAXXXXXXXXXXXXXXXXXXXXXGXWXDGWEXRRXXXXXXXXXXDXXXXXLXXXXXXXXXGXXXDTXXFXGNXXPXXSXXAXXXXXXXXXXXXXXXXXXXXXXXXXXXXXXXXXXXXWXXXXXXXXXXXXXXXXXXXXXXXXXXXXXXTHXRXXXXPDGGXARXRXYGXXXXXXXXXXXXXXXXXXXXXXXXXDLXXXXNGXXXXXXXXXHFGXXXXNXXXPGRGXXMGDGWETXRXRXXXXXXXXXXXXXXXXXXXDWXXXXLXXXXGXXXXXXVDTXXFXGNXPXXXXXXXXXXXXXXXXXXXXXXXXXXXXXXXXXXWXXXXXXXKXXXXXXXHXXXXXXXXXXXXXXXXXXHXXXXXXPDGGXXRXRXXG

SEQ ID NO: 64957 - protein, 27 aa, Artificial sequence
  protein pattern
  Variant (2)..(2): Xaa in position 2 is Phe or Tyr
  Variant (3)..(3): Xaa in position 3 is Gly or Thr
  Variant (4)..(8): Xaa in position 4 to 8 is any amino acid
  Variant (9)..(9): Xaa in position 9 is Ile or Leu
  Variant (10)..(10): Xaa in position 10 is any amino acid
  Variant (11)..(11): Xaa in position 11 is Leu or Pro
  Variant (13)..(13): Xaa in position 13 is Lys or Arg
  Variant (14)..(14): Xaa in position 14 is Ala or Gly
  Variant (15)..(15): Xaa in position 15 is any amino acid
  Variant (16)..(16): Xaa in position 16 is Asp, Asn or Thr
  Variant (18)..(18): Xaa in position 18 is Ala, Gly or Ser
  Variant (19)..(19): Xaa in position 19 is Asp or Ser
  Variant (24)..(24): Xaa in position 24 is any amino acid
  Variant (26)..(26): Xaa in position 26 is any or no amino acid
HXXXXXXXXXXGXXXXMXXGWETXRXR

SEQ ID NO: 64958 - protein, 22 aa, Artificial sequence
  protein pattern
  Variant (3)..(4): Xaa in position 3 to 4 is any or no amino acid
  Variant (6)..(8): Xaa in position 6 to 8 is any amino acid
  Variant (9)..(10): Xaa in position 9 to 10 is any or no amino acid
  Variant (15)..(15): Xaa in position 15 is Phe, Ile, Leu or Val
  Variant (16)..(16): Xaa in position 16 is Ala, Gly or Ser
  Variant (18)..(18): Xaa in position 18 is Phe, Leu or Met
  Variant (20)..(20): Xaa in position 20 is Ala, Leu or Val
  Variant (21)..(21): Xaa in position 21 is Phe, His or Tyr
THXXLXXXXXPDGGXXRXRXXG

SEQ ID NO: 64959 - protein, 13 aa, Artificial sequence
  protein pattern
  Variant (2)..(2): Xaa in position 2 is any amino acid
  Variant (4)..(4): Xaa in position 4 is any amino acid
  Variant (9)..(9): Xaa in position 9 is Ser or Thr
  Variant (12)..(12): Xaa in position 12 is His or Lys
  Variant (13)..(13): Xaa in position 13 is Asn or Arg
GXWXDGWEXRRXX

SEQ ID NO: 64960 - protein, 20 aa, Artificial sequence
  protein pattern
  Variant (2)..(3): Xaa in position 2 to 3 is any or no amino acid
  Variant (6)..(7): Xaa in position 6 to 7 is any amino acid
  Variant (9)..(9): Xaa in position 9 is Lys or Arg
  Variant (12)..(12): Xaa in position 12 is Phe or Tyr
  Variant (14)..(17): Xaa in position 14 to 17 is any amino acid
  Variant (18)..(18): Xaa in position 18 is Phe, Ile, Leu or Val
  Variant (19)..(19): Xaa in position 19 is any amino acid
  Variant (20)..(20): Xaa in position 20 is Ala or Gly
VXXDTXXFXGNXPXXXXXXX

SEQ ID NO: 64961 - protein, 20 aa, Artificial sequence
  protein pattern
  Variant (2)..(3): Xaa in position 2 to 3 is any amino acid
  Variant (4)..(8): Xaa in position 4 to 8 is any or no amino acid
  Variant (13)..(13): Xaa in position 13 is Ile or Val
  Variant (14)..(14): Xaa in position 14 is any amino acid
  Variant (16)..(16): Xaa in position 16 is Phe, Ile or Leu
  Variant (18)..(18): Xaa in position 18 is Ile, Leu or Val
  Variant (19)..(19): Xaa in position 19 is any amino acid
TXXXXXXXPDGGXXRXRXXG

SEQ ID NO: 64962 - protein, 25 aa, Artificial sequence
  protein pattern
  Variant (2)..(4): Xaa in position 2 to 4 is any amino acid
  Variant (5)..(6): Xaa in position 5 to 6 is any or no amino acid
  Variant (8)..(9): Xaa in position 8 to 9 is any or no amino acid
  Variant (11)..(11): Xaa in position 11 is any amino acid
  Variant (12)..(12): Xaa in position 12 is Phe, His or Tyr
  Variant (14)..(14): Xaa in position 14 is any amino acid
  Variant (17)..(17): Xaa in position 17 is any amino acid
  Variant (18)..(18): Xaa in position 18 is Ala, Gly, Pro or Thr
  Variant (19)..(19): Xaa in position 19 is Glu or Pro
  Variant (20)..(22): Xaa in position 20 to 22 is any amino acid
  Variant (23)..(23): Xaa in position 23 is Ile, Leu or Val
  Variant (24)..(24): Xaa in position 24 is Asp, Glu or Gln
  Variant (25)..(25): Xaa in position 25 is Ala, Cys or Gly
GXXXXXDXXTXXFXGNXXXXXXXXX

SEQ ID NO: 64963 - protein, 25 aa, Artificial sequence
  protein pattern
  Variant (2)..(6): Xaa in position 2 to 6 is any or no amino acid
  Variant (8)..(8): Xaa in position 8 is Ala, Gly or Thr
  Variant (9)..(9): Xaa in position 9 is any amino acid
  Variant (10)..(10): Xaa in position 10 is Ala, Ile or Val
  Variant (11)..(13): Xaa in position 11 to 13 is any amino acid
  Variant (14)..(14): Xaa in position 14 is Asn, Ser or Thr
  Variant (16)..(16): Xaa in position 16 is Asp, Glu or Gln
  Variant (17)..(17): Xaa in position 17 is any amino acid
  Variant (20)..(21): Xaa in position 20 to 21 is any amino acid
  Variant (22)..(22): Xaa in position 22 is Ala, Asp, Glu, Asn or Ser
  Variant (23)..(23): Xaa in position 23 is Asn, Arg or Ser
  Variant (24)..(24): Xaa in position 24 is Leu or Met
  Variant (25)..(25): Xaa in position 25 is Phe, Ile or Leu
LXXXXXGXXXXXXXDXXFAXXXXXX

SEQ ID NO: 64964 - DNA, 2079 bp, Saccharomyces cerevisiae
  CDS (1)..(2079)
atggcaggcaaaaatagagccaaaactgcttataagttattccaagtgaaaggagttggttgcgagaagggcccagaaggtttcattcattgttggtttagtgtattactaaggccgatcttaacgtctacgaaacgaagtatgatactgatctcgggatactgtcttttagtgtatagcgttattttgccagtactgatatcggcttctaagttatgtgatttggctgagttacaacgattgaacaagaatttaaaagtagacactgaatccttgccaaaataccaatggatcgctgggcagttggaacaaaactgcatgactgcggatccagcaagtgaaaatatgtcagacgtaattcaactagccaatcaaatatactacaaaattgggctgatccaattatccaacgatcaacatctaagagctattaacacatttgaaaaaatcgtttttaatgaaacttacaaaggttcttttgggaagctggcggaaaagaggctacaagagctgtatgtcgattttgggatgtgggacaaggtgcatcagaaggatgatcagtatgcgaaatatctgtccttgaatgaaaccatcagaaacaaaatatcatccaaagacgtttctgtggaggaagatatttctgagctgctacgcataacgccgtacgatgttaacgtcctctccacgcacatcgatgttctttttcacaaactagctgaagaaattgacgtttcgttagctgctgctatcattttggattacgaaacaatcctcgacaagcatttggctagcttaagcatagatacaagactttcgattcattatgtcatatctgttttacagacctttgtacttaactcagatgcgtcgttcaatataagaaaatgcctttccattgatatggactatgataaatgtaaaaaactaagcctgactatttccaaattgaacaaggtgaatccatcaaaaagacagatcctggatccagcaacatatgcatttgagaacaaaaagtttagaagttgggatagaattattgaattttatttgaaggataagaagccatttattacaccaatgaaaattcttaacaaagatacaaactttaaaaacaactacttctttttagaggaaattatcaaacaattgatagaagacgttcaactgtcgagacctttggcaaaaaatttattcgaagatcccccaataaccgatggttttgtcaaaccaaaatcatactatcataccgattatctagtatacattgattccattctttgtcaggcttctagcatgagtccggacgtcaagagagctaaactggctgcgccgttctgtaaaaagagtttgaggcattcactaacactagaaacatggaaacactatcaggatgctaagtccgagcaaaaacctttacctgagacggtattgagtgatgtatggaattccaatcctcatttgctgatgtatatggtaaactcaatacttaataaaagtaggtctaaacctcattcacagttcaaaaagcaattatatgaccagataaacaaatttttccaagataacggcctctcagagtcgaccaatccatacgtgatgaagaacttccgattattacagaaacaattacaaacctataaagagcataaacatcggaatttcaaccagcaatatttccaacaacaacaacagcagcaacaacaccaacgacatcaagcacccccagcagcgcctaactacgacccaaaaaaggactattataaaattcttggagtatcgcctagtgctagttcgaaagaaataaggaaagcatatttaaatttaaccaaaaaataccacccagacaaaataaaggccaaccataacgacaaacaagaatcaattcacgaaactatgtcacaaatcaatgaagcgtacgaaacattaagtgatgacgataaaaggaaggaatacgatctttccagatcaaacccccgccgcaacacttttcctcaggggcctaggcaaaataacatgttcaaaaatccaggaagtggcttcccattcggaaatggctttaaaatgaattttgggctttga

SEQ ID NO: 64965 - protein, 692 aa, Saccharomyces cerevisiae
MAGKNRAKTAYKLFQVKGVGCEKGPEGFIHCWFSVLLRPILTSTKRSMILISGYCLLVYSVILPVLISASKLCDLAELQRLNKNLKVDTESLPKYQWIAGQLEQNCMTADPASENMSDVIQLANQIYYKIGLIQLSNDQHLRAINTFEKIVFNETYKGSFGKLAEKRLQELYVDFGMWDKVHQKDDQYAKYLSLNETIRNKISSKDVSVEEDISELLRITPYDVNVLSTHIDVLFHKLAEEIDVSLAAAIILDYETILDKHLASLSIDTRLSIHYVISVLQTFVLNSDASFNIRKCLSIDMDYDKCKKLSLTISKLNKVNPSKRQILDPATYAFENKKFRSWDRIIEFYLKDKKPFITPMKILNKDTNFKNNYFFLEEIIKQLIEDVQLSRPLAKNLFEDPPITDGFVKPKSYYHTDYLVYIDSILCQASSMSPDVKRAKLAAPFCKKSLRHSLTLETWKHYQDAKSEQKPLPETVLSDVWNSNPHLLMYMVNSILNKSRSKPHSQFKKQLYDQINKFFQDNGLSESTNPYVMKNFRLLQKQLQTYKEHKHRNFNQQYFQQQQQQQQHQRHQAPPAAPNYDPKKDYYKILGVSPSASSKEIRKAYLNLTKKYHPDKIKANHNDKQESIHETMSQINEAYETLSDDDKRKEYDLSRSNPRRNTFPQGPRQNNMFKNPGSGFPFGNGFKMNFGL

SEQ ID NO: 64966 - DNA, 1971 bp, Candida glabrata CBS 138
  CDS (1)..(1971)
atggttgtacttcgaaagctttttggtttggttcccttgattgggtttaccattgcggaaagtacgtgtgaatataaggccttaagcaacgaggctcaaagcttgaagaatgacattgattccttgaacagctatgacaccttgataagcatagtagaagaatgtctcgtggcagataagcataaggactacgacgacctgataaaactgtcgtaccaattatactacaaaaatggtttgatacaactgtcggcaggaagatatcataaggccgtggcgctgtttgagagggcgctcggtggaaatacgaatactggtgattcttatttcctacttattgcgaagaagttgcagcagatttatatagatttcggattatggagtaatataacatccactactctgcctattactgagaaaattgatcctgcactaaaagaaacatatgaggagagacaaagagtgtatcatgatactttaaatcggatcaaagaaacgttttcaaaaaacaaaaatgaacagcaccttgaagaactctttgattcattgacagaaatatctccctataaccgtgaggtcatatatatggccattgattattacaatgctaatattattaccaataatagggttgacctaacaagagttataaaattgaaggagaaatatgaaacattactggaagtgcatagtacttcgcttaccctgaacgaaaggctcgaaactcatttcaagatttcggtaatccaaatatttttgttaggacaggatcctcttattcaaggaagttcttctcatttgagaagatgtctaaatattgacatggactatggtccatgtaaagatttgatcaagctaagttctcgtttgaacaaggtaaatcccgacatgaggctggtgaaagatcccgaggcatataaaaatgggcatattataattgaagattggaaaaatgttgtagacttctatattaacaataagccctctttgaaattatttaccttaatgaaaggtgccaaatttgacactaaaactaactatgatttgttgaaaaggcttcagttccatctgctctctacattaactggacaacaagaacaaccagaaaagttgatcacaatgttttttgtaaacttagatgtgatactttgtcaagcgtcttctttcttgtcaaaaaaggataaaaaggaaacatctaaaatgtgtttacatgctctaagcagtattggtctcgagacaaaagaagcttatcgcgaaagtttgtcaaatggatcgcctctgccggctgaaactgttattgatctatggaattcttatccacacatgcttatctacaccatgactaatattgttaagaagtatggtaaaaaacaaagaggtagtgacaatttggttgaacaggtgagcaaattttggaatgaaaataacttgagggaaagtaaaaatccatatgttgtaaacttgaataacttaatggaaaaagtggataagaacaagagggagcagcagtttagacaacaacagcagcaacaacaaaggttttttcaacagcaacagcaacagcaacaaagatatcaacaacagcaggccagtgggttaactgatagccaaactgctaaaaattattaccaaattttaggtataaaacctgaagcatctgataaggaaattcgtaaggcctatttaagtttgactaaaaagtatcatccagataagcaaggtaaacaactatcagaagaggaagaaaagaagaatgacgagaagatgtcagagattaatgaagcgtatgaagtattaaatgatgaagaaaaaaggaaggaatatgactctatcagatcaggatcgaggcagtttcaacctagaaacaattttagaactaaccagagaagaggtggttatcaaggcttccaaggtggatttccgggaggctttccgggcggctttccatttggtagtggttttggtttttaa

SEQ ID NO: 64967 - protein, 656 aa, Candida glabrata CBS 138
MVVLRKLFGLVPLIGFTIAESTCEYKALSNEAQSLKNDIDSLNSYDTLISIVEECLVADKHKDYDDLIKLSYQLYYKNGLIQLSAGRYHKAVALFERALGGNTNTGDSYFLLIAKKLQQIYIDFGLWSNITSTTLPITEKIDPALKETYEERQRVYHDTLNRIKETFSKNKNEQHLEELFDSLTEISPYNREVIYMAIDYYNANIITNNRVDLTRVIKLKEKYETLLEVHSTSLTLNERLETHFKISVIQIFLLGQDPLIQGSSSHLRRCLNIDMDYGPCKDLIKLSSRLNKVNPDMRLVKDPEAYKNGHIIIEDWKNVVDFYINNKPSLKLFTLMKGAKFDTKTNYDLLKRLQFHLLSTLTGQQEQPEKLITMFFVNLDVILCQASSFLSKKDKKETSKMCLHALSSIGLETKEAYRESLSNGSPLPAETVIDLWNSYPHMLIYTMTNIVKKYGKKQRGSDNLVEQVSKFWNENNLRESKNPYVVNLNNLMEKVDKNKREQQFRQQQQQQQRFFQQQQQQQQRYQQQQASGLTDSQTAKNYYQILGIKPEASDKEIRKAYLSLTKKYHPDKQGKQLSEEEEKKNDEKMSEINEAYEVLNDEEKRKEYDSIRSGSRQFQPRNNFRTNQRRGGYQGFQGGFPGGFPGGFPFGSGFGF

SEQ ID NO: 64968 - DNA, 1896 bp, Kluyveromyces lactis NRRL Y-1140
  CDS (1)..(1896)
atgtctgtatggtatacttggatatctctcagtcttcttatattccatggtttgagcagtattgacaaagtgcatggctcagacgttgatccgatttgcgatctagccaatgttacgaaggttatcgaagcacaaaagtttgaccgagaatcgattcaagagtaccaggacctaatacctatgatacgaacacattgtgacggaaaacaatgggatcggatcatcaatcaaatcaattacaaccttggcatcacatatctttcattgggacaagaaccacaagcactgaaatcgttcaatgctgttattgattcagatgaatcctcattcaaagaactctcagtttcaagactgaatgaattgaacaaaaaatatgcagattggaataaaatatcggatcctgcatccaaaactgatgaggaattatttaatgagttgtatgattctatatctacaaagctcggcaaaccagattctatggaatatttggaggcaaaatttcaagaaatactaacaatctcacctttttcactgaaggtgaggattctttacaatgatttccttttagatcaaatagctgatgtcatcgatttgaattttgcacataaggcagtagaaaacattcagaccatattggataaatttggcaataaaatcgagttagacaaaagactagcattgcatcatgagcttgctgttatccaactcttcattttgaatactcagccacaggtttcactacgtaaatgtctcaacctagatatggactatcagccgtgcaaagatctaatgagggtctggaatcaaatttcaaaggtacttccccaaccttctaggataatgaatgctgatgaatacactgattttgacacagaatggaataaaattagccagttcttgcttgataataaaagaagcgttgttaaaacatatgggatgaaagaacaaaattttgaggtattaacgaagtaccacaatgaccaaataaagaaagtcttggaagaaagacctttgagtagcaaaacatggacgtatgagaattttgatgcccaaacagacttcatgatctacctaaacgctgcgttgtgtgaatcattagacatgcaagcgtcttccaaaaaggcttccaaatattgttacaacgctatgaaacaatcactcactccagatgagatacaaaatcttaagcactatctaaaaacatttgactcacctcatatcattaaagaactgttgacagcgttgtttgacacctaccctcatatttctgttaaccttttgcattccgttgcacagaagttatccatcgctgagaaaaaacatcctggaattaattctgccgaacactgggcagttttgttcaaatttgcacaagataacaatttagctcactctagattaaagttcgttaaaaaccttgcaaacgttgtgacaaaaacgtatcacagtattcaacaacaacagcagcaaaaacaacaacagtattttcaacagatgtttggaaaccaacagcagtatcatcaacagcaacagcatcaacaacagcagcaatttgctgaaccaaatataaagacagataaagattattacaagatcttaggtgtagataaatcagcgacaccaaaagatgttagaagatcgtacttacagctgacgaagaaattccaccctgataaacagaaaaatctgaatgacgaacaaagacaaaagaatgaagaaaagatggctgaaataaatgaagcatatgaaattctaagtgatgatgataaacgtacaaaatatgataatgcaagagctaattctaggaactctcgaggagcacatggattcgaaggacatggaggattcaaaccgttcgataaatctgcaaaataccacaggaagaaacaaaattaa

SEQ ID NO: 64969 - protein, 631 aa, Kluyveromyces lactis NRRL Y-1140
MSVWYTWISLSLLIFHGLSSIDKVHGSDVDPICDLANVTKVIEAQKFDRESIQEYQDLIPMIRTHCDGKQWDRIINQINYNLGITYLSLGQEPQALKSFNAVIDSDESSFKELSVSRLNELNKKYADWNKISDPASKTDEELFNELYDSISTKLGKPDSMEYLEAKFQEILTISPFSLKVRILYNDFLLDQIADVIDLNFAHKAVENIQTILDKFGNKIELDKRLALHHELAVIQLFILNTQPQVSLRKCLNLDMDYQPCKDLMRVWNQISKVLPQPSRIMNADEYTDFDTEWNKISQFLLDNKRSVVKTYGMKEQNFEVLTKYHNDQIKKVLEERPLSSKTWTYENFDAQTDFMIYLNAALCESLDMQASSKKASKYCYNAMKQSLTPDEIQNLKHYLKTFDSPHIIKELLTALFDTYPHISVNLLHSVAQKLSIAEKKHPGINSAEHWAVLFKFAQDNNLAHSRLKFVKNLANVVTKTYHSIQQQQQQKQQQYFQQMFGNQQQYHQQQQHQQQQQFAEPNIKTDKDYYKILGVDKSATPKDVRRSYLQLTKKFHPDKQKNLNDEQRQKNEEKMAEINEAYEILSDDDKRTKYDNARANSRNSRGAHGFEGHGGFKPFDKSAKYHRKKQN

SEQ ID NO: 64970 - DNA, 1938 bp, Saccharomyces cerevisiae
  CDS (1)..(1938)
atgatactgatctcgggatactgtcttttagtgtatagcgttattttgccagtactgatatcggcttctaagttatgtgatttggctgagttacaacgattgaacaagaatttaaaagtagacactgaatccttgccaaaataccaatggatcgctgggcagttggaacaaaactgcatgactgcggatccagcaagtgaaaatatgtcagacgtaattcaactagccaatcaaatatactacaaaattgggctgatccaattatccaacgatcaacatctaagagctattaacacatttgaaaaaatcgtttttaatgaaacttacaaaggttcttttgggaagctggcggaaaagaggctacaagagctgtatgtcgattttgggatgtgggacaaggtgcatcagaaggatgatcagtatgcgaaatatctgtccttgaatgaaaccatcagaaacaaaatatcatccaaagacgtttctgtggaggaagatatttctgagctgctacgcataacgccgtacgatgttaacgtcctctccacgcacatcgatgttctttttcacaaactagctgaagaaattgacgtttcgttagctgctgctatcattttggattacgaaacaatcctcgacaagcatttggctagcttaagcatagatacaagactttcgattcattatgtcatatctgttttacagacctttgtacttaactcagatgcgtcgttcaatataagaaaatgcctttccattgatatggactatgataaatgtaaaaaactaagcctgactatttccaaattgaacaaggtgaatccatcaaaaagacagatcctggatccagcaacatatgcatttgagaacaaaaagtttagaagttgggatagaattattgaattttatttgaaggataagaagccatttattacaccaatgaaaattcttaacaaagatacaaactttaaaaacaactacttctttttagaggaaattatcaaacaattgatagaagacgttcaactgtcgagacctttggcaaaaaatttattcgaagatcccccaataaccgatggttttgtcaaaccaaaatcatactatcataccgattatctagtatacattgattccattctttgtcaggcttctagcatgagtccggacgtcaagagagctaaactggctgcgccgttctgtaaaaagagtttgaggcattcactaacactagaaacatggaaacactatcaggatgctaagtccgagcaaaaacctttacctgagacggtattgagtgatgtatggaattccaatcctcatttgctgatgtatatggtaaactcaatacttaataaaagtaggtctaaacctcattcacagttcaaaaagcaattatatgaccagataaacaaatttttccaagataacggcctctcagagtcgaccaatccatacgtgatgaagaacttccgattattacagaaacaattacaaacctataaagagcataaacatcggaatttcaaccagcaatatttccaacaacaacaacagcagcaacaacaccaacgacatcaagcacccccagcagcgcctaactacgacccaaaaaaggactattataaaattcttggagtatcgcctagtgctagttcgaaagaaataaggaaagcatatttaaatttaaccaaaaaataccacccagacaaaataaaggccaaccataacgacaaacaagaatcaattcacgaaactatgtcacaaatcaatgaagcgtacgaaacattaagtgatgacgataaaaggaaggaatacgatctttccagatcaaacccccgccgcaacacttttcctcaggggcctaggcaaaataacatgttcaaaaatccaggaagtggcttcccattcggaaatggctttaaaatgaattttgggctttga

SEQ ID NO: 64971 - protein, 645 aa, Saccharomyces cerevisiae
MILISGYCLLVYSVILPVLISASKLCDLAELQRLNKNLKVDTESLPKYQWIAGQLEQNCMTADPASENMSDVIQLANQIYYKIGLIQLSNDQHLRAINTFEKIVFNETYKGSFGKLAEKRLQELYVDFGMWDKVHQKDDQYAKYLSLNETIRNKISSKDVSVEEDISELLRITPYDVNVLSTHIDVLFHKLAEEIDVSLAAAIILDYETILDKHLASLSIDTRLSIHYVISVLQTFVLNSDASFNIRKCLSIDMDYDKCKKLSLTISKLNKVNPSKRQILDPATYAFENKKFRSWDRIIEFYLKDKKPFITPMKILNKDTNFKNNYFFLEEIIKQLIEDVQLSRPLAKNLFEDPPITDGFVKPKSYYHTDYLVYIDSILCQASSMSPDVKRAKLAAPFCKKSLRHSLTLETWKHYQDAKSEQKPLPETVLSDVWNSNPHLLMYMVNSILNKSRSKPHSQFKKQLYDQINKFFQDNGLSESTNPYVMKNFRLLQKQLQTYKEHKHRNFNQQYFQQQQQQQQHQRHQAPPAAPNYDPKKDYYKILGVSPSASSKEIRKAYLNLTKKYHPDKIKANHNDKQESIHETMSQINEAYETLSDDDKRKEYDLSRSNPRRNTFPQGPRQNNMFKNPGSGFPFGNGFKMNFGL

SEQ ID NO: 64972 - DNA, 25 bp, Artificial sequence
  primer
atggcaggcaaaaatagagccaaaa

SEQ ID NO: 64973 - DNA, 26 bp, Artificial sequence
  primer
tcaaagcccaaaattcattttaaagc

SEQ ID NO: 64974 - protein, 652 aa, Artificial sequence
  consensus sequence
  Variant (2)..(13): Xaa in position 2 to 13 is any amino acid
  Variant (15)..(15): Xaa in position 15 is any amino acid
  Variant (17)..(18): Xaa in position 17 to 18 is any amino acid
  Variant (20)..(22): Xaa in position 20 to 22 is any amino acid
  Variant (24)..(32): Xaa in position 24 to 32 is any amino acid
  Variant (33)..(33): Xaa in position 33 is any or no amino acid
  Variant (35)..(44): Xaa in position 35 to 44 is any amino acid
  Variant (45)..(52): Xaa in position 45 to 52 is any or no amino acid
  Variant (54)..(55): Xaa in position 54 to 55 is any amino acid
  Variant (57)..(58): Xaa in position 57 to 58 is any amino acid
  Variant (60)..(62): Xaa in position 60 to 62 is any amino acid
  Variant (65)..(70): Xaa in position 65 to 70 is any amino acid
  Variant (72)..(74): Xaa in position 72 to 74 is any amino acid
  Variant (76)..(84): Xaa in position 76 to 84 is any amino acid
  Variant (85)..(87): Xaa in position 85 to 87 is any or no amino acid
  Variant (89)..(91): Xaa in position 89 to 91 is any amino acid
  Variant (93)..(96): Xaa in position 93 to 96 is any amino acid
  Variant (98)..(106): Xaa in position 98 to 106 is any amino acid
  Variant (108)..(126): Xaa in position 108 to 126 is any amino acid
  Variant (127)..(142): Xaa in position 127 to 142 is any or no amino acid
  Variant (144)..(154): Xaa in position 144 to 154 is any amino acid
  Variant (155)..(156): Xaa in position 155 to 156 is any or no amino acid
  Variant (158)..(165): Xaa in position 158 to 165 is any amino acid
  Variant (167)..(167): Xaa in position 167 is any amino acid
  Variant (169)..(172): Xaa in position 169 to 172 is any amino acid
  Variant (174)..(178): Xaa in position 174 to 178 is any amino acid
  Variant (180)..(202): Xaa in position 180 to 202 is any amino acid
  Variant (203)..(204): Xaa in position 203 to 204 is any or no amino acid
  Variant (206)..(206): Xaa in position 206 is any amino acid
  Variant (208)..(218): Xaa in position 208 to 218 is any amino acid
  Variant (221)..(222): Xaa in position 221 to 222 is any amino acid
  Variant (224)..(227): Xaa in position 224 to 227 is any amino acid
  Variant (229)..(229): Xaa in position 229 is any amino acid
  Variant (231)..(231): Xaa in position 231 is any amino acid
  Variant (233)..(233): Xaa in position 233 is any amino acid
  Variant (235)..(242): Xaa in position 235 to 242 is any amino acid
  Variant (243)..(247): Xaa in position 243 to 247 is any or no amino acid
  Variant (249)..(249): Xaa in position 249 is any amino acid
  Variant (252)..(253): Xaa in position 252 to 253 is any amino acid
  Variant (258)..(259): Xaa in position 258 to 259 is any amino acid
  Variant (262)..(262): Xaa in position 262 is any amino acid
  Variant (264)..(271): Xaa in position 264 to 271 is any amino acid
  Variant (274)..(274): Xaa in position 274 is any amino acid
  Variant (276)..(285): Xaa in position 276 to 285 is any amino acid
  Variant (287)..(292): Xaa in position 287 to 292 is any amino acid
  Variant (293)..(295): Xaa in position 293 to 295 is any or no amino acid
  Variant (297)..(301): Xaa in position 297 to 301 is any amino acid
  Variant (303)..(306): Xaa in position 303 to 306 is any amino acid
  Variant (308)..(319): Xaa in position 308 to 319 is any amino acid
  Variant (320)..(325): Xaa in position 320 to 325 is any or no amino acid
  Variant (327)..(329): Xaa in position 327 to 329 is any amino acid
  Variant (331)..(362): Xaa in position 331 to 362 is any amino acid
  Variant (363)..(379): Xaa in position 363 to 379 is any or no amino acid
  Variant (382)..(396): Xaa in position 382 to 396 is any amino acid
  Variant (397)..(399): Xaa in position 397 to 399 is any or no amino acid
  Variant (401)..(405): Xaa in position 401 to 405 is any amino acid
  Variant (406)..(406): Xaa in position 406 is any or no amino acid
  Variant (408)..(438): Xaa in position 408 to 438 is any amino acid
  Variant (439)..(440): Xaa in position 439 to 440 is any or no amino acid
  Variant (443)..(453): Xaa in position 443 to 453 is any amino acid
  Variant (455)..(457): Xaa in position 455 to 457 is any amino acid
  Variant (458)..(460): Xaa in position 458 to 460 is any or no amino acid
  Variant (462)..(473): Xaa in position 462 to 473 is any amino acid
  Variant (474)..(475): Xaa in position 474 to 475 is any or no amino acid
  Variant (478)..(480): Xaa in position 478 to 480 is any amino acid
  Variant (482)..(482): Xaa in position 482 is any amino acid
  Variant (484)..(485): Xaa in position 484 to 485 is any amino acid
  Variant (487)..(490): Xaa in position 487 to 490 is any amino acid
  Variant (492)..(499): Xaa in position 492 to 499 is any amino acid
  Variant (501)..(514): Xaa in position 501 to 514 is any amino acid
  Variant (515)..(517): Xaa in position 515 to 517 is any or no amino acid
  Variant (519)..(520): Xaa in position 519 to 520 is any amino acid
  Variant (522)..(523): Xaa in position 522 to 523 is any amino acid
  Variant (526)..(526): Xaa in position 526 is any amino acid
  Variant (527)..(528): Xaa in position 527 to 528 is any or no amino acid
  Variant (532)..(535): Xaa in position 532 to 535 is any amino acid
  Variant (537)..(547): Xaa in position 537 to 547 is any amino acid
  Variant (549)..(549): Xaa in position 549 is any amino acid
  Variant (552)..(552): Xaa in position 552 is any amino acid
  Variant (556)..(559): Xaa in position 556 to 559 is any amino acid
  Variant (561)..(562): Xaa in position 561 to 562 is any amino acid
  Variant (564)..(565): Xaa in position 564 to 565 is any amino acid
  Variant (567)..(568): Xaa in position 567 to 568 is any amino acid
  Variant (571)..(571): Xaa in position 571 is any amino acid
  Variant (576)..(576): Xaa in position 576 is any amino acid
  Variant (581)..(593): Xaa in position 581 to 593 is any amino acid
  Variant (594)..(594): Xaa in position 594 is any or no amino acid
  Variant (596)..(596): Xaa in position 596 is any amino acid
  Variant (598)..(599): Xaa in position 598 to 599 is any amino acid
  Variant (606)..(606): Xaa in position 606 is any amino acid
  Variant (608)..(608): Xaa in position 608 is any amino acid
  Variant (610)..(611): Xaa in position 610 to 611 is any amino acid
  Variant (614)..(615): Xaa in position 614 to 615 is any amino acid
  Variant (618)..(619): Xaa in position 618 to 619 is any amino acid
  Variant (621)..(623): Xaa in position 621 to 623 is any amino acid
  Variant (625)..(636): Xaa in position 625 to 636 is any amino acid
  Variant (637)..(645): Xaa in position 637 to 645 is any or no amino acid
  Variant (647)..(648): Xaa in position 647 to 648 is any amino acid
  Variant (649)..(651): Xaa in position 649 to 651 is any or no amino acid
CXXXXXXXXXXXXKXDXXSXXXYXXXXXXXXXXCXXXXXXXXXXXXXXXXXXQXXYXXGXXXLSXXXXXXAXXXFXXXXXXXXXXXXSXXXLXXXXLXXXXXXXXXWXXXXXXXXXXXXXXXXXXXXXXXXXXXXXXXXXXXIXXXXXXXXXXXXXEXXXXXXXXIXPXXXXVXXXXXDXXXXXXXXXXXXXXXXXXXXXXXXXTXLXXXXXXXXXXXRLXXHXXXXVXQXFXLXXXXXXXXXXXXXRXCLXXDMDYXXCKXLXXXXXXXXKVXPXXXXXXXXXXYXXXXXXXXXWXXXXXFXXXXKXXXXXXXXXXXXXXXXXXNXXXLXXXXXXXXXXXXXXXXXXXXXXXXXXXXXXXXXXXXXXXXXXXXXXXXXLCXXXXXXXXXXXXXXXXXXCXXXXXXSXXXXXXXXXXXXXXXXXXXXXXXXXXXXXXXXXPHXXXXXXXXXXXKXXXXXXKXXXXXXXXXXXXXXKFXXXNXLXXSXXXXVXXXXXXXXKXXXXXXXXXXXXXXXXXQXXFXXQQXXXQQQXXXXQXXXXXXXXXXXKXYYXILGXXXXAXXKXXRXXYLXLTKKXHPDKXXXXXXXXXXXXXXEXMXXINEAYEXLXDXXKRXXYDXXRXXXRXXXXXXXXXXXXXXXXXXXXXGXXXXXF

SEQ ID NO: 64975 - DNA, 1323 bp, Saccharomyces cerevisiae
  CDS (1)..(1323)
atgctttcttgttccgtttcgtttcgagatgacaaaaaactggtcattttttccgttaagtgcaactcacagcagtatcggccgctgagaaatgcccggacaaatttttttgagccggattggtcaccgtttctttcttcggcgcggcttcccattcccgtccatccaaaaaaatctacctatataaatcgacttttcacctctaaaggcagtttattccttgtatgtcctttaagtacagttaataacgagcaatttttttttttttttttagccatctacccatcaacttgtacactcgttaccatgtcaaccacagcatccacgccttcatctttacgtcatttgatttctataaaagatctttctgatgaagaattcagaatcttagtacaaagagctcaacatttcaagaatgtttttaaagcaaataaaacgaatgatttccaatccaaccatctgaaactattgggtagaactatagccttaatatttactaaaagatcaactagaacgagaatttcgaccgaaggtgcagccaccttctttggtgcccaaccgatgtttttaggtaaagaggatattcagcttggtgtcaatgaatcattttacgataccaccaaggttgtatcatctatggtttcatgtatttttgcccgtgtgaacaaacatgaagacatacttgctttttgcaaggattcctctgtaccgatcatcaactctctatgtgacaaattccaccctttgcaagcaatttgtgatcttttaacaataatcgaaaacttcaatatatctctagatgaagtaaataagggaatcaattcaaaattgaagatggcatggattggtgatgccaataatgtcataaatgatatgtgcatcgcatgtctgaaattcggtataagtgtcagtatttccactccccccggtattgaaatggattccgatattgtcgatgaagcaaagaaagttgctgagagaaacggtgcgacatttgaattaacacacgactctttaaaggcctccaccaatgccaatatattagtaaccgatactttcgtttccatgggtgaagaatttgcgaaacaggccaagctgaaacaattcaaaggttttcaaatcaatcaagaacttgtctctgtggctgatccaaactacaaatttatgcattgtctgccaagacatcaagaagaagttagtgatgatgtcttttatggagagcattccatagtctttgaagaagcagaaaacagattatatgcagctatgtctgccattgatatctttgttaataataaaggtaatttcaaggacttgaaataa

SEQ ID NO: 64976 - protein, 440 aa, Saccharomyces cerevisiae
MLSCSVSFRDDKKLVIFSVKCNSQQYRPLRNARTNFFEPDWSPFLSSARLPIPVHPKKSTYINRLFTSKGSLFLVCPLSTVNNEQFFFFFLAIYPSTCTLVTMSTTASTPSSLRHLISIKDLSDEEFRILVQRAQHFKNVFKANKTNDFQSNHLKLLGRTIALIFTKRSTRTRISTEGAATFFGAQPMFLGKEDIQLGVNESFYDTTKVVSSMVSCIFARVNKHEDILAFCKDSSVPIINSLCDKFHPLQAICDLLTIIENFNISLDEVNKGINSKLKMAWIGDANNVINDMCIACLKFGISVSISTPPGIEMDSDIVDEAKKVAERNGATFELTHDSLKASTNANILVTDTFVSMGEEFAKQAKLKQFKGFQINQELVSVADPNYKFMHCLPRHQEEVSDDVFYGEHSIVFEEAENRLYAAMSAIDIFVNNKGNFKDLK

SEQ ID NO: 64977 - DNA, 1098 bp, Oryza sativa (japonica cultivar-group)
  CDS (1)..(1098)
atgtcggcggcgatctccggcgccagcctcgtcctctcctcgccccccgcgcccggggcccggccccagccgcgccccgcgcgggtgtcggtcgccgccgccgcgcccgccgcgcgacgcggggtcgttgccgccgcagcggtgtcgagccccgccgtgtcgtcctctgctggtaaagatgccaaacagattcctaaggactttcttcatattgatgatttcgacaaggatacaatcatgaagatccttaatcgggctattgaggtcaaggcaatgataaagtcaggagacaggagcttccaacctttcaaagggaaatcaatggcaatgatatttgccaagccgtcaatgagaacccgtgtttcatttgagacaggattctttttgcttggtggccatgctatctacctgggtcctgatgatatccagatgggcaagcgtgaagagacccgtgatgttgctcgtgtgctttctggatataatgacatcattatggccagggtttttgctcaccaagacattttggacttggcaaagtatgcagctgtacctgtcataaatggccttacggactacaaccatccatgccagataatggctgatgcacttactatgctcgaacacattggtcgtattgaaaacactaaggttgtctatgttggagacgggaacaatattgtccactcatggcttcgattggctgctttatttcctttacattttgtatgtgcctgtcctaagggcttcgagccagatgcaaagactgtggagatagccaggagtgctggtagtaagattgaaataacagatgaccctatggaagcagttaagggagcagatgttgtgtatacagatgtctgggccagcatgggccaaaaggaggaagctgaatatagaaaaaaagtgttccaaggattcacggtggatgaagctatgatggagatggctgggccaaatgccttccttatgcattgtttgcctgcagagagagggatagagtttctccctgggggcaggagggtagagattttggagaagttcactatgttcagatgctttggattgtctgataatactattttgtacttttcgtggtag

SEQ ID NO: 64978 - protein, 365 aa, Oryza sativa (japonica cultivar-group)
MSAAISGASLVLSSPPAPGARPQPRPARVSVAAAAPAARRGVVAAAAVSSPAVSSSAGKDAKQIPKDFLHIDDFDKDTIMKILNRAIEVKAMIKSGDRSFQPFKGKSMAMIFAKPSMRTRVSFETGFFLLGGHAIYLGPDDIQMGKREETRDVARVLSGYNDIIMARVFAHQDILDLAKYAAVPVINGLTDYNHPCQIMADALTMLEHIGRIENTKVVYVGDGNNIVHSWLRLAALFPLHFVCACPKGFEPDAKTVEIARSAGSKIEITDDPMEAVKGADVVYTDVWASMGQKEEAEYRKKVFQGFTVDEAMMEMAGPNAFLMHCLPAERGIEFLPGGRRVEILEKFTMFRCFGLSDNTILYFSW

SEQ ID NO: 64979 - DNA, 972 bp, Brucella melitensis 16M
  CDS (1)..(972): transl_table=11
ttgcaaatccgatcagcaagacggtgtgatatcatggcaaacgataacggtatcaaacactttatcgatctctccaccgttccggcgacggagcttcgcgccattctggaagatgccaaggcgcgcaaggcgcgcctgaaagctggcgaagtcgaacggccctacgccggcaaggtgctggcgatgatctttgaaaagctttccacgcgtacgcgcgtttcctttgacgtcggaatgcgccagctcggcggcgaaacgatcatgctgacgggttcggaaatgcagcttggccgcagcgaaaccatcgccgacacggcgaaggttctctcacgctatgtggatgcgatcatgatccgcaccaccgcgcatgaacgtatgctggaactggccgaatatgccactgttcccgttatcaatgcgttgaccgacgacacccacccttgtcagatcatggcagacgttcttacatatgaggaacatcgcggcccgatcaagggcaagacctttgcctggatgggggatggcaacaacgtcctgcattcgcttgtggaagctgcagcgcggtttgatttcaacgtcaatatcgcgacaccgaaaggcagtgagccgaagtcgcaatatatcgactgggcgcgggccaacggcgcgggcatcatgtccaccaccgacccggaaaaggcggcaagcggcgcagattgcatcgtgaccgatacatgggtgtcgatggggcaggaagatcatgcccgtggacacaatgttttcataccatatcaggtcaatgcgaacctgatggcaaaggctgacccgaaggcattgttcatgcactgcctgcccgcgcatcgcggcgaggaagtgaccgatgaagtcatcgacgggccgcaatcggtcgtgttcgatgaagcggaaaacaggctccacgcccagaaggccattctggcctggtgcctgcaagaccgcggtttgggagcataa

SEQ ID NO: 64980 - protein, 323 aa, Brucella melitensis 16M
MQIRSARRCDIMANDNGIKHFIDLSTVPATELRAILEDAKARKARLKAGEVERPYAGKVLAMIFEKLSTRTRVSFDVGMRQLGGETIMLTGSEMQLGRSETIADTAKVLSRYVDAIMIRTTAHERMLELAEYATVPVINALTDDTHPCQIMADVLTYEEHRGPIKGKTFAWMGDGNNVLHSLVEAAARFDFNVNIATPKGSEPKSQYIDWARANGAGIMSTTDPEKAASGADCIVTDTWVSMGQEDHARGHNVFIPYQVNANLMAKADPKALFMHCLPAHRGEEVTDEVIDGPQSVVFDEAENRLHAQKAILAWCLQDRGLGA

SEQ ID NO: 64981 - DNA, 1074 bp, Strongylocentrotus purpuratus
  CDS (1)..(1074)
atgaattccatctcttcctcgttccgtcgtttctgcggcgttgtaggcacagaattgttaccagtcaagtctaaatctcgactgttatgtgcaagtcttcataccagcaagaaggtgtacaatgatggccaggacatgggctggtcttcgcttgtcgggcgtcacttcctcacgctcaaatacttcaccaagaccgagattgaacagctgctttggacggctgcagacttgaagatccgctacaagcaaaacggtgaggcctacagacccttggaaggcaagtctgctgccctgatctttgagaaacgtagcaccagaaccagggtttccaacgaaacaggatttgctttgctcggtggacatgctgctttcttatcaccagcagacattcatctaggagtcaatgaatctgtgaaagatacagcaaaagttttgtctggctttgttgacatcgctctcgctcgagtctacgaccacgagactctcctcaccttgtcaacagagggctatattccaattgtgaatggtctctctgagatataccatcctctccaggctcttgcggatttccaaaccctccaggagcattacggttctgtgaaaggtttgactgtggcctgggttggagacggaaacaacatcatacactccctcatgatggctgctgctcctttgggagtcaacgtaagagttgcaacacctaagggttatgaggttttccctcaagtggagaaggatgcagccaaactagcagagcaatacggtacgtccttctactataccaacgatcctatggaagcatgtcaaggggcaaatgtcatcgtcacggatacctgggtcagcatgggtcaggaagaagagaaggcggaaaggttgaaggtgtttgagggctaccaggtcaatatgaagatgtgtggcgtagcagccaaggattggacgttcctgcattgtctacccaggaaatcagaggaggtgaacgacgaggtcttctattctcctagatccctggctttccctgctgctgagaaccgcaagtggaccgccatggtaagaaagtcactctctatcaactag

SEQ ID NO: 64982 - protein, 357 aa, Strongylocentrotus purpuratus
MNSISSSFRRFCGVVGTELLPVKSKSRLLCASLHTSKKVYNDGQDMGWSSLVGRHFLTLKYFTKTEIEQLLWTAADLKIRYKQNGEAYRPLEGKSAALIFEKRSTRTRVSNETGFALLGGHAAFLSPADIHLGVNESVKDTAKVLSGFVDIALARVYDHETLLTLSTEGYIPIVNGLSEIYHPLQALADFQTLQEHYGSVKGLTVAWVGDGNNIIHSLMMAAAPLGVNVRVATPKGYEVFPQVEKDAAKLAEQYGTSFYYTNDPMEACQGANVIVTDTWVSMGQEEEKAERLKVFEGYQVNMKMCGVAAKDWTFLHCLPRKSEEVNDEVFYSPRSLAFPAAENRKWTAMVRKSLSIN

SEQ ID NO: 64983 - DNA, 1056 bp, Magnaporthe grisea 70-15
  CDS (1)..(1056)
atgaggccgtcaacccttcgtgccatcaacagggcattggccggcaatgaagcccggacatattcctcctcggcctcaccccgacatctcatgtcgatagccgacctgacgcctacggagctgacaaccctcgttcgctctgccgccactcacaagcatgccgtcaagtcgggagcaggcgcacccctccatctggcccagtctctcaccggcaagaccgtcgccatgatgttcagcaagcgcagcacccgtacccgcgtgtctaccgaggccgcggttgccatgatgggcggtcatcccatgtttctgggcaaagatgacattcagcttggtgtgaacgaatccctcttggacacgtcaaccgtcatctcttcaatgacctcatgcatggttgcccgcgtcggcccccactcggacgtgacaggtctggccaagcactcatctgtccccgtcatcaacgccctgtcggatgacttccaccctctccagaccatcgccgacttcctcaccatccactcccaccacccatcctccaccccaggctcacttggcctcgagggtctcaagatcgcctggatcggcgactccaacaacgtgctgttcgacctggccctcggcgccgccaagctcggctgtcacgttgccgtggcctcgcccacgggctacggcatccctgaaaacatgaggacgctgatccagtccgcctccaaggcctcaggctccggcggctccctctccgagaccactgtgcccgaggaggccgtcaaggacgccgacatactcgtcaccgacacgtgggtgtcgatgggccaggaggccgaggccaagaagcgtctcgccgcatttgccggcttccaaatcacaaacgacctcgccaagcgcggcggtgccaagaaggattggaagttcatgcactgcctgccccgccacccggaggaggtacatgacgaggtcttttacagccccaggtcgctcgtctttgaggaggccgagaataggctgtgggctgctgttgctgctcttgaggcatttgtggtgaacaagggaaaaatctga

SEQ ID NO: 64984 - protein, 351 aa, Magnaporthe grisea 70-15
MRPSTLRAINRALAGNEARTYSSSASPRHLMSIADLTPTELTTLVRSAATHKHAVKSGAGAPLHLAQSLTGKTVAMMFSKRSTRTRVSTEAAVAMMGGHPMFLGKDDIQLGVNESLLDTSTVISSMTSCMVARVGPHSDVTGLAKHSSVPVINALSDDFHPLQTIADFLTIHSHHPSSTPGSLGLEGLKIAWIGDSNNVLFDLALGAAKLGCHVAVASPTGYGIPENMRTLIQSASKASGSGGSLSETTVPEEAVKDADILVTDTWVSMGQEAEAKKRLAAFAGFQITNDLAKRGGAKKDWKFMHCLPRHPEEVHDEVFYSPRSLVFEEAENRLWAAVAALEAFVVNKGKI

SEQ ID NO: 64985 - DNA, 1011 bp, Gibberella zeae PH-1
  CDS (1)..(1011)
atgaagacttcaactttccgaatcgctcgaggagccgctgcgggccttcaaaagcgagcctatacgaaggctacgacggcaccacggcatcttatgacaattgctgatctcactcctactgagttcgcaaacctcgttcgtgatgctaacactcggaaaatcgccgtcaaggctatgatgttcagcaagcgcagtactcgtacccgagtttctactgaagctgccgtcacaatgctcggtggtcatcctatgtttctgggcaaggacgacattcagttgggtgtgaacgaatcactctatgacacctcaaaggtcatttcatccatgacctcctgtatggttgcccgcgttggccctcattctgatgtcgctactctggccaagcactcaagtgtccctgtcataaatgctctgtctgatgactttcaccctcttcagactattgccgacttcctgactcttgctgagactttccctgcatctacttctaagggggctactctgggtctgaatggcctcaaggttgcctgggttggcgatgctaacaacgttcttttcgatcttgccattggctgcgtcaagatgggtgttgacatttcagtcgctgctcccaaaggatatgagatccccgacgctatgaggcagctcatcacctccgccggtgacggcctttcctcgcccggcaagcttatcgagacaaatgttcccgaggaggccgttaaggatgccaatgttctggtcacggatacctgggtctccatgggccaagaagctgatacccagaagcgtctcaaggactttgctggattccaaatcactaatgacctagctaagcgaggaggtgccaaggctgactggaagtttatgcactgcttgccccgccaccctgaggaggttgccgacgaggtcttctacagccctcgatctctggttttccccgaagccgagaaccgcctttgggctgctctttccgctcttgaaggcttcgttgtgaacaagggtaagttttaa

SEQ ID NO: 64986 - protein, 336 aa, Gibberella zeae PH-1
MKTSTFRIARGAAAGLQKRAYTKATTAPRHLMTIADLTPTEFANLVRDANTRKIAVKAMMFSKRSTRTRVSTEAAVTMLGGHPMFLGKDDIQLGVNESLYDTSKVISSMTSCMVARVGPHSDVATLAKHSSVPVINALSDDFHPLQTIADFLTLAETFPASTSKGATLGLNGLKVAWVGDANNVLFDLAIGCVKMGVDISVAAPKGYEIPDAMRQLITSAGDGLSSPGKLIETNVPEEAVKDANVLVTDTWVSMGQEADTQKRLKDFAGFQITNDLAKRGGAKADWKFMHCLPRHPEEVADEVFYSPRSLVFPEAENRLWAALSALEGFVVNKGKF

SEQ ID NO: 64987 - DNA, 981 bp, Candida glabrata CBS 138
  CDS (1)..(981)
atgaactccaatagcaaaatccgtcacttggtgtctattaaagatctatcggatgaagaatttgaaatccttgtaaacagggcagagcatttcaagaaaatattcaagtctggtaacactgaagaatttcaagaacaacatttaaagctgctgggcagaactattgcaatgatcttcaccaagagatccactagaactagaatttcaacagaaggagcctctacattttttggtgctcaacctatgtttttaggtaaagaagatatccaactgggtgtcaacgaatcattttatgataccgctaaggttgtgtcttctatggtttcgtgcattttcgcacgtgtgaacaagcatgaagatatccaattgctatgtcagcactcttctgttcctattatcaactctctgtgtgacacatatcatcctttgcaagcaatttgtgatatgctaactattaaagagcatcttgactacaccaagaacaagcttaaaatcacttggatcggtgactctaataacgttatcaatgatatggccattgcttgtttaaagcttggtatggatgtttccatagctactccgccaggtattgaaatggatccggagatcatgaacgcagcaaaaaagatttgtgctaagaacggtacacagattgaagttactcacgattcaaaacatgcatcggttggtgcacatgttcttgtgacagacactttcgtgtctatgggtgaagaatttgctaaggaggccaaactaaagcaattccaagggttccaggttagccaagaacatgcctccgttgccgcacctaactttaagttcatgcattgtctgccaagacatcacgaagaagtcactgatgacatattttatggtgaccactcaatagtttttgatgaagctgaaaacagactatatgctgccatggctgctattgatgtgttcgtggtacataagggcgattttaacgcttgcaaataa

SEQ ID NO: 64988 - protein, 326 aa, Candida glabrata CBS 138
MNSNSKIRHLVSIKDLSDEEFEILVNRAEHFKKIFKSGNTEEFQEQHLKLLGRTIAMIFTKRSTRTRISTEGASTFFGAQPMFLGKEDIQLGVNESFYDTAKVVSSMVSCIFARVNKHEDIQLLCQHSSVPIINSLCDTYHPLQAICDMLTIKEHLDYTKNKLKITWIGDSNNVINDMAIACLKLGMDVSIATPPGIEMDPEIMNAAKKICAKNGTQIEVTHDSKHASVGAHVLVTDTFVSMGEEFAKEAKLKQFQGFQVSQEHASVAAPNFKFMHCLPRHHEEVTDDIFYGDHSIVFDEAENRLYAAMAAIDVFVVHKGDFNACK

SEQ ID NO: 64989 - DNA, 1005 bp, Kluyveromyces lactis NRRL Y-1140
  CDS (1)..(1005)
atgactataatgagcgctgcttcttcctcttcttctggtgatattcgtcatttgatttcgatcaaggatttgagcgatgatgagttcaagagcttggtcgatagagccgagtattacaagaaggtgttcaagagtaatgatatttcagaattccaaaaacaacatttgaagttgttgggtaagaccatcgctttaattttcaccaagagatctactagaaccagaatttccacagaaggtgcggccgcattcttcggtggtcaaccaatgttcttggggaaagatgatatccaattaggtgttaatgaatcattctatgatacaactaaggttgtgtcttccatggtttcatgtatctttgcccgtgtcaatagacatgctgacattttgaacttggccaaggattcttctgtgccaattatcaatgctctttgtgacaagttccatcctttgcaggccatttgtgatatgttgaccattaaggaacatttggactacgataacaataaattgaagatggcttgggttggtgatgccaacaatgtgattaacgatatggctattgctgctttgaaactggggatcgatgtcgccgtagccactcctccaggtattgaattggacagcgacatccaacaagagggtcaaaaattagctgctcagaacaactgtgagtttgtctgcactcatgattcgatggctgcttgtacagacgctaatatcttggtgacagacacttttgtttccatgggtgaagaattcgctaaggaagctaaattaagacaatttgctgggttccaaattaattcagaactatgttctgttgctgcaccaaactataaattcatgcattgtttaccaagacaccaggaagaagttacggaagaagtcttctacggtaaaaactccattgttttcgaagaagcagaaaatagactatatgcagccatggccgctattgacatatttgtgaaccacaagggtgacttcttctcacatccataa

SEQ ID NO: 64990 - protein, 334 aa, Kluyveromyces lactis NRRL Y-1140
MTIMSAASSSSSGDIRHLISIKDLSDDEFKSLVDRAEYYKKVFKSNDISEFQKQHLKLLGKTIALIFTKRSTRTRISTEGAAAFFGGQPMFLGKDDIQLGVNESFYDTTKVVSSMVSCIFARVNRHADILNLAKDSSVPIINALCDKFHPLQAICDMLTIKEHLDYDNNKLKMAWVGDANNVINDMAIAALKLGIDVAVATPPGIELDSDIQQEGQKLAAQNNCEFVCTHDSMAACTDANILVTDTFVSMGEEFAKEAKLRQFAGFQINSELCSVAAPNYKFMHCLPRHQEEVTEEVFYGKNSIVFEEAENRLYAAMAAIDIFVNHKGDFFSHP

SEQ ID NO: 64991 - DNA, 1029 bp, Debaryomyces hansenii CBS767
  CDS (1)..(1029)
atgatgctgatgccaataaaaaacatgatcgggagaagatcattctcaagttccgcttttcttaaatcaaaaccaagacatttggtaaataccatagaactttcgaatgaagagttggcctcgttagtcggtaaagctgaagcattcaagaagcaagtcagatcaggcaactctgtacctattgagcaacatcaaaagcttttagggaagcttgttgcattactcttttccaaaagatctacaagaacaagaattagtactgaaggcgctgctgcttactttggagcacaaccaatgttcttggggaaagaagacatccaattgggagtcaacgagtctacatacgacactaccaaagtgatttcttctatgacatcgtgtatttttgccagagtcaacagtcatcaagaaatactcgatttgtgtgagcattcttctgttccaatcattaactcattatgtgacatgtaccacccattgcaagccattaccgacatcttgacaataaaagaagcatttggaaagactgaagggttgaagttggcatggatcggagattcaaataacgtcatcaacgatttagcgattgcatcattaagatcaggtatatcggtggcaatttcgatcccaaaggacatcgaatttgaccccgaagttggcaaagcggcctccgaaatagccagtgacaagggcttatcatttgacatattccatgagccatcgaaggcaattgataacgctaacgtcattgtcaccgacacatggatctcaatgggccaagaatccgagaagcaagccaagatgttacaattcgacggctatcagataacccagaacatgatctctcaaggaaatgcttcgtccgactggaaattcatgcattgcttaccaagacatgcagaagaagtagcagatgatgtgttctacagtaaaaactccttggtatttgaggaagctgaaaacagattatacgccgcaatggctgttatagaagcctttgttgttaacaaaggtgatctacttaaataa

SEQ ID NO: 64992 - protein, 342 aa, Debaryomyces hansenii CBS767
MMLMPIKNMIGRRSFSSSAFLKSKPRHLVNTIELSNEELASLVGKAEAFKKQVRSGNSVPIEQHQKLLGKLVALLFSKRSTRTRISTEGAAAYFGAQPMFLGKEDIQLGVNESTYDTTKVISSMTSCIFARVNSHQEILDLCEHSSVPIINSLCDMYHPLQAITDILTIKEAFGKTEGLKLAWIGDSNNVINDLAIASLRSGISVAISIPKDIEFDPEVGKAASEIASDKGLSFDIFHEPSKAIDNANVIVTDTWISMGQESEKQAKMLQFDGYQITQNMISQGNASSDWKFMHCLPRHAEEVADDVFYSKNSLVFEEAENRLYAAMAVIEAFVVNKGDLLK

SEQ ID NO: 64993 - DNA, 963 bp, Debaryomyces hansenii CBS767
  CDS (1)..(963)
atgtcccctcgtcatttagtaagcatccaggatttactggtccaagaattagagtctttagttgaacaagctacaaatttcaaagcacaatataaatctaacgagaatgctcaagaaaaccacaataagttattaggaaaggtgatcgcattattgttttccaagagatctaccagaacaagaatcagcacagaaggagcagcagcattttttggtgcccatgctatgtttttgggtaaggacgatattcagttaggtgttaatgaatcgttgtacgacacaaccagagtcatctcgtcaatgacatcatgtatttttgccagggttaacaaacaccaggaaatattagatttgtgcaaggattcatccgtgccaataattaactcattgtgtgatagatatcatccgttgcaagccataactgatattttgtcgataaaggaatcgttcaatggtaacataaaagggttgaaattggcttggataggagatgcaaacaacgttattaacgatttgagcattgcagctttgaagctgggtatgaatgtgagcattgccattccaggttcaataagctttgattctctcatagccgataaagctaaccaaatagctaaagaattgaacgttagttttgagatcgttaatgaaccagcaaaagctttgaatggcgccaatgtcatagtaacagatacatggatatctatgggagaagaggcagaaaagcaaaacaaattgaaacagttcaatgatttccaaatcactaaggacctaatttcaaggggaaatgtgaattctgattggaggttcatgcattgtttaccaagacatcaagaagaggtagacgacgagattttctatagtgataactcaattgtttttgaagaagcggaaaacagattatatgctgcaatggcagtcattgatgaattcgttgttgggaataagactgtatcaaaataa

SEQ ID NO: 64994 - protein, 320 aa, Debaryomyces hansenii CBS767
MSPRHLVSIQDLLVQELESLVEQATNFKAQYKSNENAQENHNKLLGKVIALLFSKRSTRTRISTEGAAAFFGAHAMFLGKDDIQLGVNESLYDTTRVISSMTSCIFARVNKHQEILDLCKDSSVPIINSLCDRYHPLQAITDILSIKESFNGNIKGLKLAWIGDANNVINDLSIAALKLGMNVSIAIPGSISFDSLIADKANQIAKELNVSFEIVNEPAKALNGANVIVTDTWISMGEEAEKQNKLKQFNDFQITKDLISRGNVNSDWRFMHCLPRHQEEVDDEIFYSDNSIVFEEAENRLYAAMAVIDEFVVGNKTVSK

SEQ ID NO: 64995 - DNA, 987 bp, Yarrowia lipolytica CLIB122
  CDS (1)..(987)
atgattcgaccgttctcgacgctgaccaaaatgaccccccgacacctcatctccatcggcgacctgtcccccaaagagctgactaagctggtcgaccgaggtctggttctcaagaagtggatcaagcaggagaacaagaccgagaccgataagctgtccgatctgctcaagggcaagacggtgcctctcatcttctcgaaacgatcgacccgaacccgagtgtccaccgagggagccgtggcgtttctgggaggccagcccatgtttctgggtaaggacgacatccagctgggcgtcaacgagtccacttatgacaccgcccgagtcgtgtcttccatgacctcgtgtatcgttgcccgagtgggagcccaccaggagattctcgatctgtcggccgcctcctccgtgcccgtcatcaacgccctctgcgaaaagtaccaccccctgcaggccatcaccgacatgatcaccatcaaggagacctttggagacgccaagaacctcaagctcgcctgggttggagacgcaaacaacgtgctgcacgacctggcaattgccgctctcaagtccggcatttccgtcaccgccgccacccccaaagagtaccccgtttccgaagacattatccagatctgcaatgatgccgccaaggagtccggagccaccttcaccaccactaccgaccccaaggaggcagtaaaggactccgatgtcattgtcaccgacacctggatctccatgggccaggagagcgaaaagcagctcaagatgcaacagtttgctggctaccaggtcactgaggagcttggaaagctcgccaagcccacctggaagttcatgcattgccttccccgacaccccgaggaggtttccgatcaggtcttctactcggaccgatctctggttttccccgaggctgagaacagattgtacgctgccattgctgttctcgaggcttttgtggtccacaagggcaagattgagtaa

SEQ ID NO: 64996 - protein, 328 aa, Yarrowia lipolytica CLIB122
MIRPFSTLTKMTPRHLISIGDLSPKELTKLVDRGLVLKKWIKQENKTETDKLSDLLKGKTVPLIFSKRSTRTRVSTEGAVAFLGGQPMFLGKDDIQLGVNESTYDTARVVSSMTSCIVARVGAHQEILDLSAASSVPVINALCEKYHPLQAITDMITIKETFGDAKNLKLAWVGDANNVLHDLAIAALKSGISVTAATPKEYPVSEDIIQICNDAAKESGATFTTTTDPKEAVKDSDVIVTDTWISMGQESEKQLKMQQFAGYQVTEELGKLAKPTWKFMHCLPRHPEEVSDQVFYSDRSLVFPEAENRLYAAIAVLEAFVVHKGKIE

SEQ ID NO: 64997 - DNA, 1194 bp, Aspergillus nidulans FGSC A4
  CDS (1)..(1194)
atgagtcattcacgaatcatttctcagttatttgtggatgccctcgttctgtccacaatttctttccgccccaagtcttttaagttctttaacatctatattcttgcacttccaatggcatcccttcgctccgtactcaagagccagagcttgcgacacaccgtgcgatcctactcctcgcaaaccatgcctcccgcctcaccctttgctccccgccacttcctctccattgcggacctctcgccctccgagttcgcaacccttgttcgcaatgcctcctcacacaaacgggctatcaagtcggggtcaatgccccaaaacttgcagggatcactccttgggaaaactgtggccatgatcttcagcaaacgaagcacgaggacaagggtatctacagaaggggccgttgtgcagatgggaggtcatccgatgttcttgggcaaggatgatatccaactaggtgtcaacgagtccctatacgacacctccgttgtcatttcgtccatggtatcctgcattgtagcccgtgtcggtaaacatgcagaggtcgcagatctggcgaagcactcttcggttccagtcatcaatgctttgtgtgactctttccaccctctccaagccgtggccgatttccagaccatctatgaagcattcacccccaaggcgcaccacctttcaagtctagggttggaaggattgaagatcgcttgggtgggtgacgccaacaacgtcctgttcgatatggccattgctgctacaaaaatgggtgtcgacattgctgtcgctactcccaaggggtacgaaatccctcctcacatgctggagctcatcaagtctgctggagagggtgtctcgaaaccaggaaagcttctgcaaaccaatattcccgaagaagcggtcaaggacgccgatattctggtcacagacacctgggtctctatgggccaagaggaagagaaggctcagaggctgaaggagtttgatggtttccaaatcactgctgaactcgccaagcgaggaggagctaaggagggctggaagttcatgcactgtctcccgcgacaccctgaggaggtcagcgacgaggttttctacagcaaccggtcacttgtcttccctgaggctgagaaccggttatgggctgcgatttccgccttggagggtttcgttgtcaataagggaaaaattgaataa

SEQ ID NO: 64998 - protein, 397 aa, Aspergillus nidulans FGSC A4
MSHSRIISQLFVDALVLSTISFRPKSFKFFNIYILALPMASLRSVLKSQSLRHTVRSYSSQTMPPASPFAPRHFLSIADLSPSEFATLVRNASSHKRAIKSGSMPQNLQGSLLGKTVAMIFSKRSTRTRVSTEGAVVQMGGHPMFLGKDDIQLGVNESLYDTSVVISSMVSCIVARVGKHAEVADLAKHSSVPVINALCDSFHPLQAVADFQTIYEAFTPKAHHLSSLGLEGLKIAWVGDANNVLFDMAIAATKMGVDIAVATPKGYEIPPHMLELIKSAGEGVSKPGKLLQTNIPEEAVKDADILVTDTWVSMGQEEEKAQRLKEFDGFQITAELAKRGGAKEGWKFMHCLPRHPEEVSDEVFYSNRSLVFPEAENRLWAAISALEGFVVNKGKIE

SEQ ID NO: 64999 - DNA, 1038 bp, Candida albicans SC5314
  CDS (1)..(1038): transl_table=12
atgatgtcttccgttagaactattactacaactagattattatccactactccaatcaaagcaactgcgtcttcacaaacaccacgtcatttgatcaatatagctcaattaaccaatgatgaattttcttcattgataaataaagcttatcaatttaaacaattggtcaaatcagataaaccatcaattgaaaatcatcaaaaattgttaggtaaattagtggctttattattcacaaaaagatctactagaactagaataagtactgaaggagcggcatcattttttggagctcaaccaatgtttttaggtaaagatgatattcaattaggtgttaatgaatcaatgtatgatacgacaaaagtgattagttcaatgacgtcgtgtatttttgctcgtgttaacaaacatcaagatattttagatttatgtcaacatagttctgttcctattgtcaattcattatgtgataaatatcatccattacaagccattgctgacttattaaccataaaggaacaatttggtgataatttaaaggggttaaaattaacatggattggtgatgctaataatgttattaatgatttatcgattgcttgtttgaaattaggtataaatgtatctatttcaatacctaaagatattacatttgatcaagatgtagttgaaatagctgaaaaattagctaaggaacaaaatttgacatttgaaattgttaatgatccaataattgctttaaataatgctaatattgttgtcactgatacttggatttctatgggtgaagaagaacaaaaattggctaaattgaaacaatttcaaggttatcaaattactcaagaaatgtgtaaattgggtaaagtcaattcaaattggaaatttatgcattgtttaccaagacaccaagaagaagttgctgatgatgtgttttatagtgataattcagtggtttttgaagaagctgaaaatagattatatgctgctatggctgtgattgatggatttgtcatcaataaaggtgacctcttgaaataa

SEQ ID NO: 65000 - protein, 345 aa, Candida albicans SC5314
MMSSVRTITTTRLLSTTPIKATASSQTPRHLINIAQLTNDEFSSLINKAYQFKQLVKSDKPSIENHQKLLGKLVALLFTKRSTRTRISTEGAASFFGAQPMFLGKDDIQLGVNESMYDTTKVISSMTSCIFARVNKHQDILDLCQHSSVPIVNSLCDKYHPLQAIADLLTIKEQFGDNLKGLKLTWIGDANNVINDLSIACLKLGINVSISIPKDITFDQDVVEIAEKLAKEQNLTFEIVNDPIIALNNANIVVTDTWISMGEEEQKLAKLKQFQGYQITQEMCKLGKVNSNWKFMHCLPRHQEEVADDVFYSDNSVVFEEAENRLYAAMAVIDGFVINKGDLLK

SEQ ID NO: 65001 - DNA, 1143 bp, Ustilago maydis 521
  CDS (1)..(1143)
atgactggacgacaagcagccactgctcttctgcgcaatgccgccagtccagcgctgcgtcgttgtgcctcgagctctgctgccacggccacccgcgctccacctcacctcttgacgctcgccgatctgtctcccgctcagatcgcctcggtgttggagtcagcaattgagttcaagcgtgctttccgagcgtcatccttggctcttcccgaaacgtctcgcaagcagcttgcagctggcgaatcgcctatcgtgcagagcttgaagaacaagtcaatcgccatcatgttcagcaagcgcagcactcgaactcgtgtcgcatctgagaccagtgtagcttcactcggaggtacaggcttgttcttggctccctctgatatccaattgggtgtcaacgagagcttgtacgacactgcaaaggttgtgagctccatggtggacggtatcatggctcgtgtcggtggacacgacgaggtggagctgctctccaagcactcgactgtaccagtaatcaacgctctttcggctcggtaccatcctacgcagatcctggctgaccttcagacgatgctcgagatctacgcacccgcatcgtctcctaccgacctcgcctgcttggcaggtctcaaagttgcttgggtcggagacagcaacaacattctcaacgacatgctggtcgcctacccacgccttggtatcaacctttccgttgctacacccaaaggtccggcttatcaacgtgacgagctcgtctggggtaccatgcaagatggactcggggcactctccaagtcaggctcctcgcctgtcagtctcggccaagtcacttggtccaacgaccccgccgaagccgtcaaggacgccgacattatcgttaccgatacatggatcagcatgggcgacgaagcacaaaaggaacagcgcctgcgcgactttgccggcttccaggtcaccgaacagatggccaagcaaggcggcgccaaacctgattggaagtttatgcactgcttgccgcgaaagggcgacgaggtggacgaccaggtgttctactcggatcgttctgttgtcttccctgaggccgagaaccgaaagtggaccatcatgagcttgttcgatcgaatgtttggtcgttgggaattgtga

SEQ ID NO: 65002 - protein, 380 aa, Ustilago maydis 521
MTGRQAATALLRNAASPALRRCASSSAATATRAPPHLLTLADLSPAQIASVLESAIEFKRAFRASSLALPETSRKQLAAGESPIVQSLKNKSIAIMFSKRSTRTRVASETSVASLGGTGLFLAPSDIQLGVNESLYDTAKVVSSMVDGIMARVGGHDEVELLSKHSTVPVINALSARYHPTQILADLQTMLEIYAPASSPTDLACLAGLKVAWVGDSNNILNDMLVAYPRLGINLSVATPKGPAYQRDELVWGTMQDGLGALSKSGSSPVSLGQVTWSNDPAEAVKDADIIVTDTWISMGDEAQKEQRLRDFAGFQVTEQMAKQGGAKPDWKFMHCLPRKGDEVDDQVFYSDRSVVFPEAENRKWTIMSLFDRMFGRWEL

SEQ ID NO: 65003 - DNA, 951 bp, Bacillus licheniformis ATCC 14580
  CDS (1)..(951): transl_table=11
atgtctactgtaaacatcggggcgacccgggagatcaatctgtcaggcaaggatttcttaagcctgaaagacttttcaaaagaggagatcgtctatttgctgaaagaggcagcggcaatgaagcgaaataaaattcaagacatctttaaaggaaaaacattggcgatgatctttgaaaaatcgtcgacgagaacgcgcgtatcgtttgaagccggaatggcgcagctcggcggaaacgccctgtttttaagcagtaaagacatgcagctgggcagaggggaaacgatcgcagataccgcgaaagtgctttcgcgatatgtggacgcgattatgatccgcacattcgaacacgaaaaagtcgaagagcttgccaagcacgccgagattcccgtgatcaacggattgaccgatctttttcatccgtgtcaagcgcttagtgacctattaacgattcaagagatgaaaggaacattaaaagggctgaaagccgtttatgttggcgacggaaacaatgtcgcgcattcgctgttaatcggctgcgcgaaagtgggatgcgacattacggtggcttcacccaaagggtatgagccgaatcaggacgtggtgaaactggccgagacattcgccgaagaatccggtgcggccgtcacgatcacaaatgatcccgtgtcagccgttcaacaagcggatgtcatctattctgatgtttttacaagcatgggacaggaggaggaagccgaagaacggatgaagatttttgctccttaccaagtcaacggaacgcttgtctcccatgccaagcctgattacatctttctgcactgccttcctgcccaccgggaggaagaggtcaccgcagagatcattgacggtccgaattcagcggtatttcagcaggctgaaaaccgcctgcacgtccaaaaagctttattaaaagcactgttatcttaa

SEQ ID NO: 65004 - protein, 316 aa, Bacillus licheniformis ATCC 14580
MSTVNIGATREINLSGKDFLSLKDFSKEEIVYLLKEAAAMKRNKIQDIFKGKTLAMIFEKSSTRTRVSFEAGMAQLGGNALFLSSKDMQLGRGETIADTAKVLSRYVDAIMIRTFEHEKVEELAKHAEIPVINGLTDLFHPCQALSDLLTIQEMKGTLKGLKAVYVGDGNNVAHSLLIGCAKVGCDITVASPKGYEPNQDVVKLAETFAEESGAAVTITNDPVSAVQQADVIYSDVFTSMGQEEEAEERMKIFAPYQVNGTLVSHAKPDYIFLHCLPAHREEEVTAEIIDGPNSAVFQQAENRLHVQKALLKALLS

SEQ ID NO: 65005 - DNA, 897 bp, Methylococcus capsulatus str. Bath
  CDS (1)..(897): transl_table=11
atgaaaccgcgtcatttcgtcaccttgcgcgatctcagttccgccgaattccgtgcgctgatcgcccgcgccatcgatctcaaggcccggaaggaaccctacgaacccctgaaaaacaaggtcctgggaatggtgttcgaaaaatcgtcgacccgtacccgggtgtcgttcgaggtcggcatggcccagttcggcggcagttccatcttcctgtcgccgcgggacacccagctcgggcgcggcgagccgatcgaggattcggcacgggttttatcccgcatggtggactgcatcatgcttcgcacccacgcccatcgcaccgtggaaatcttcgccgagtattccagggtaccggtgatcaacgggctgacggaccgcttccacccctgccagctgctggcagacatgcagacctatttcgaacaccggggagacatcgccggcaagaccgtcgcctggatcggcgacggcaacaacatgtgccagacctacgtccacgccgccggactgctcgatttccggttgcgcatcgcctgcccgccggggtatgaacccgaagccgagctggtcgaagcggcggggaaatgcgtggaggttggtcatgacgtccggaccgcggtgaacggcgccgacctggttgtgaccgacgtctgggccagcatggggcaggagagtgagcagaccgagcgcacgggcgcgtttcgggactaccaggtgaatgcggcgctcatggccctggcccacgccgacgcgctgttcatgcactgccttcccgcccaccgcggcgaggaagtgtccgcggaggtgctggaaggaccacaaagcgtagtctgggacgaagccgaaaaccggctgcatgcccagaaagccttgctggaattcctgctgacggcctga

SEQ ID NO: 65006 - protein, 298 aa, Methylococcus capsulatus str. Bath
MKPRHFVTLRDLSSAEFRALIARAIDLKARKEPYEPLKNKVLGMVFEKSSTRTRVSFEVGMAQFGGSSIFLSPRDTQLGRGEPIEDSARVLSRMVDCIMLRTHAHRTVEIFAEYSRVPVINGLTDRFHPCQLLADMQTYFEHRGDIAGKTVAWIGDGNNMCQTYVHAAGLLDFRLRIACPPGYEPEAELVEAAGKCVEVGHDVRTAVNGADLVVTDVWASMGQESEQTERTGAFRDYQVNAALMALAHADALFMHCLPAHRGEEVSAEVLEGPQSVVWDEAENRLHAQKALLEFLLTA

SEQ ID NO: 65007 - DNA, 921 bp, Campylobacter jejuni RM1221
  CDS (1)..(921): transl_table=11
atgaaacattttttaactttaagagatttttctaaggaggaaattttaagccttgtaaatcatgctagcgagcttaaaaaagagcctaaaaaacttttacaagataaaactttagcaatgatttttgagaaaaactctacaagaacaagaatggcctttgaattagccataacagagcttggcggaaaggctttatttttaagcagcaatgatttacaacttagtcgtggcgagcctgtaaaggatacagctagggtgataggggcgatggttgattttgtgatgatgagagtcaataaacatgaaactttactcgaatttgcaagatattctaaagcccctgtgatcaatgctttaagcgagctttatcaccctactcaggttttaggagatttgcttactatcaaagaatggaataagatgcaaaatggtatagcaaaagttgcttttatcggagatagtaacaatatgtgcaattcttggcttattgcggctgcgattttgggttttgaatttagtatagctataccaaaaaactataaaattagccctgaaatttgggaatttgctatgaaacaggctttgatttcaggagctaaaatttccttaagtcatgatagatttgaagccttaaaggataaagatgtagtcattaccgatacttgggtttctatgggtgaagagaatgaaaaagaacgcaagattaaagaatttgaaggatttatgattgatgaaaaggctatgagcgttgccaataaagacgcgatattgcttcattgtttgcctgcttataggggttatgaagtgagtgaagaaatttttgaaaaacatgcagatgtgatttttgaagaagcaagaaatcgcctttatgtggtaaaagccttgctttgctttttggataatcagagaggaagagaatga

SEQ ID NO: 65008 - protein, 306 aa, Campylobacter jejuni RM1221
MKHFLTLRDFSKEEILSLVNHASELKKEPKKLLQDKTLAMIFEKNSTRTRMAFELAITELGGKALFLSSNDLQLSRGEPVKDTARVIGAMVDFVMMRVNKHETLLEFARYSKAPVINALSELYHPTQVLGDLLTIKEWNKMQNGIAKVAFIGDSNNMCNSWLIAAAILGFEFSIAIPKNYKISPEIWEFAMKQALISGAKISLSHDRFEALKDKDVVITDTWVSMGEENEKERKIKEFEGFMIDEKAMSVANKDAILLHCLPAYRGYEVSEEIFEKHADVIFEEARNRLYVVKALLCFLDNQRGRE

SEQ ID NO: 65009 - DNA, 924 bp, Psychrobacter arcticus 273-4
  CDS (1)..(924): transl_table=11
atgagtttgcgccattttttgaccttatctgatttcaccaaacaagaactagaaaacctcatcaaacgcgccagcgaattgcgcaagatgcaacatgcaggcgagatatatcagccctttgttggtcggacgctcggcatgatatttgagaagtcatcaacccgtacgcgtatctcatttgagacaggtatggggcaattcggtggcaatgccatcttcttatcgccaaatgatacccaacttggacgcggtgagcctttagaagattctgctcgcgtcatctctagtatggtcgatatcattatgattcgcacctttggtcacgaaaaagtcgagacttttgcaaagtactcaagtgtccctatcatcaatgccctgaccgacgaatttcatccctgccagctactggctgacatgcaaacttattatgagcatcgcggcagtatcgaaaacaaaatcgtcacttgggtcggtgatggcaataatatgtgcgcctcatttatgcaagctgctcatcagtttggttttgagctgcgtgtcgccgcgccttatggctttgagcctgactcagcacttatggaacgcttctcgcattgcgtcagccttgtcgaaaatgtacaagatgcggcaaaagactccaacttgattgttactgatgtatgggcaagtatgggtcaagagtctgaacaaaatactcgcgcacgtcgatttgctccttatcaagtgacgccatcactgcttgataaagctgatcctgaagtggtgtttatgcactgcttgccagcgcatcgcggtgaagaaatctctcatgatatgctagatgatccacgctctgtggtatgggatgaggctgaaaaccgtttacatgcccaaaaagctttaatggagtttttattaaaagataagatcaaattgcctgcataa

SEQ ID NO: 65010 - protein, 307 aa, Psychrobacter arcticus 273-4
MSLRHFLTLSDFTKQELENLIKRASELRKMQHAGEIYQPFVGRTLGMIFEKSSTRTRISFETGMGQFGGNAIFLSPNDTQLGRGEPLEDSARVISSMVDIIMIRTFGHEKVETFAKYSSVPIINALTDEFHPCQLLADMQTYYEHRGSIENKIVTWVGDGNNMCASFMQAAHQFGFELRVAAPYGFEPDSALMERFSHCVSLVENVQDAAKDSNLIVTDVWASMGQESEQNTRARRFAPYQVTPSLLDKADPEVVFMHCLPAHRGEEISHDMLDDPRSVVWDEAENRLHAQKALMEFLLKDKIKLPA

SEQ ID NO: 65011 - DNA, 957 bp, Prochlorococcus marinus str. NATL2A
  CDS (1)..(957): transl_table=11
atggcttcagcatcttcaagcttagcttctaaattaactcctttaagtaaaagcaacttcctttcttcctctgatttaaatagcgatcaaattttatctttatttgaattagctaaacagctaaaaacaggtaacagaagaattgatctaggtaatagagttcttggattgatattcaaaaaagcctctactaggacaagagtgagttttcaagtcgctatggcaagactgggaggtcagactgttgatttaaatcctcaaatcacacaacttggtaggggtgaacctattaaagacacagccagggttttgagtcgttattgtgacgcactagcaattaggactttttctcaacaagaacttgaagaatatgcagaatggtccactattcctgtcattaatgctttaactgacctcgaacatccttgtcagtcgcttgctgattatttaacaattcaagaaaagtttggggagcttaaagggataaatctttcttacatcggagatggcaataatgttgccaactctttgatgatatgcggcgcaatgctgggagttaatgtgaaaatttgctctccaaaaggttttgaagcggattctaaaattgtagaaaaggcaaaatcgctctcggaatttggttcgaaaatatctatttgtaatgatcctttgaaggctatgaagcacgctcaagtgctttacacagatgtctgggcttctatggggcaagaagaagaacatttgaagaggaaaaaaatttttgaaaactataaagttgatcaaaaattaatagaacttgcagatgagggagcaatcattatgcattgcttgcctgctcatagaggagaagaaataactgaagaggctttagagagcaaaagtagtcatgtctttgatcaggctgagaacagactgcatgttcagcaagccttgctcgccgtccaacttggaggcatttag

SEQ ID NO: 65012 - protein, 318 aa, Prochlorococcus marinus str. NATL2A
MASASSSLASKLTPLSKSNFLSSSDLNSDQILSLFELAKQLKTGNRRIDLGNRVLGLIFKKASTRTRVSFQVAMARLGGQTVDLNPQITQLGRGEPIKDTARVLSRYCDALAIRTFSQQELEEYAEWSTIPVINALTDLEHPCQSLADYLTIQEKFGELKGINLSYIGDGNNVANSLMICGAMLGVNVKICSPKGFEADSKIVEKAKSLSEFGSKISICNDPLKAMKHAQVLYTDVWASMGQEEEHLKRKKIFENYKVDQKLIELADEGAIIMHCLPAHRGEEITEEALESKSSHVFDQAENRLHVQQALLAVQLGGI

SEQ ID NO: 65013 - DNA, 924 bp, Ralstonia eutropha JMP134
  CDS (1)..(924): transl_table=11
atgagctcaaccccgatcaagcattacctccagttcagcgacttgactcccgacgagtacgagtacctgctggaccgcgcacggatcctcaaggccaagttcaagaactacgagacatggcatccgctgcacgaccgcacgctggccatgatcttcgagaagaactcgacgcgtacgcgcctgtcgttcgaagccggcatccaccagctcggcggccatgcggtgttcctcaacacgcgcgactcgcagcttggccgtggcgaaccgatcgaagatgcggcgcaggtgatttcgcgcatggtcgatatcatcatgatccgcacgttcgggcaggacatcatcgaacgcttcgccgcgcattcgcgcgtgccggtgatcaacggcctgaccaacgaatatcacccgtgccaggtgctggccgacgtgttcacctatatcgagcagcgcggcagcatccgcggcaaaacggtggcgtggatcggcgatgccaacaacatggcctatacctggattcaggcagccgaacggctgggcttcacgttccatttctcggcgccgccggggtaccagctcgatccggccctggtgccggcatcggcggcaggccagctgaaggtgtttgaagatccgctcgctgcttgcaagggcgcgagcctggtgaccaccgatgtgtggaccagcatgggcttcgaagccgagaacgaggcgcgcaagcgcgcgttccagaactggatggtgaccacggcgatgatggaccgtgccgagccggacgctctgttcatgcactgcctgcccgcccaccgcggcgaggaagtcgaggccgccgtgatcgacggccccaagagcgtggtctgggacgaggcggaaaaccgcctgcacgtgcagaaggcgctgatggaatatctgctctgcggccgctactga

SEQ ID NO: 65014 - protein, 307 aa, Ralstonia eutropha JMP134
MSSTPIKHYLQFSDLTPDEYEYLLDRARILKAKFKNYETWHPLHDRTLAMIFEKNSTRTRLSFEAGIHQLGGHAVFLNTRDSQLGRGEPIEDAAQVISRMVDIIMIRTFGQDIIERFAAHSRVPVINGLTNEYHPCQVLADVFTYIEQRGSIRGKTVAWIGDANNMAYTWIQAAERLGFTFHFSAPPGYQLDPALVPASAAGQLKVFEDPLAACKGASLVTTDVWTSMGFEAENEARKRAFQNWMVTTAMMDRAEPDALFMHCLPAHRGEEVEAAVIDGPKSVVWDEAENRLHVQKALMEYLLCGRY

SEQ ID NO: 65015 - DNA, 909 bp, Methanosarcina barkeri str. Fusaro
  CDS (1)..(909): transl_table=11
atgaagaaggatgtactttcgataactgacctgtccaaagaagagatttatgaactcctcgaatcggccatggacctgaaagaaaaacgcaaagctggagaacctacagagtacctgaaaaacaaaagcctggggatgatttttgagaaagcttccacaagaaccagggtttcctttgaggttgcaatgaccgatttcggtggacattccctttacctgaattccagagatattcagataggtagaggcgaaactattgaggacactgccagaactctctcaggttaccttcacggaatcatggccagagttatgagccacgagaccgtagagaaattggccaaatactcaaccatacccgtgattaatgcgctttcggaccgggagcacccctgtcagatccttggtgacttcatgaccataatggagtacaaggacaaattcgaagacctgaagttcgcctgggtaggagacggaaacaacgtctgtaattcagccctgctaggctcggcgattgtggggatggaattcgcagttgcctgcccgaaaggatacgaacctaaacccgagtttcttgaaaaggcaaaatccctcggaggcaagtttacagtcacggatgacccgaaggttgctgtaaaagatgcggatatcatttatacggatgtctgggtctccatgggtgatgaagccgagcaggagaaacgcctgaaggaatttgccacgttccaggtcaataccgaactccttggagttgcaaaaccggacgtaatagttatgcactgcctgccagcccgtagaggtcttgagattacggatgaagttatggacggcccgaattccgtaatttttgaagaggctgaaaaccgcctacatgcgcaaaaagctcttatcctgaaattgatgaaatga

SEQ ID NO: 65016 - protein, 302 aa, Methanosarcina barkeri str. Fusaro
MKKDVLSITDLSKEEIYELLESAMDLKEKRKAGEPTEYLKNKSLGMIFEKASTRTRVSFEVAMTDFGGHSLYLNSRDIQIGRGETIEDTARTLSGYLHGIMARVMSHETVEKLAKYSTIPVINALSDREHPCQILGDFMTIMEYKDKFEDLKFAWVGDGNNVCNSALLGSAIVGMEFAVACPKGYEPKPEFLEKAKSLGGKFTVTDDPKVAVKDADIIYTDVWVSMGDEAEQEKRLKEFATFQVNTELLGVAKPDVIVMHCLPARRGLEITDEVMDGPNSVIFEEAENRLHAQKALILKLMK

SEQ ID NO: 65017 - DNA, 918 bp, Thiobacillus denitrificans ATCC 25259
  CDS (1)..(918): transl_table=11
atgctgaagcactttctccagttcagggacctctcgcgcgacgaacatctctatctgttcgaacgtgcgcgcgtgatcaagtcgcgcttcaagcgctacgaaccctaccatccgctcgctgaccgcacgctcgcgatgatcttcgagaagagctcgacgcggacgcgtctgagcttcgaagccggcatgcaccaacttggcggttcggcaatctatctcaacacccgcgacacccagctcggccggggcgagccggtcgaggacgcgggcgaagtcatttcgcgcatggtcgacatcgtgatgatccgcaccttcgaacaggagatcatcgagcggtttgcctcccattcgcgcgtgcccgtcatcaacggcctgaccaacgaatatcacccatgccaggtgctcgcggacatcttcacgttcatcgaacaccgcgggccgatccacggcaagacggtcgcctggatcggcgactcgaacaacatgtgcaacacctggctgcaggccgcagagctgctcgacttcaacgtccacgtctcgaccccgcccggctacgaggtcgagcccgaacgcgcgggcctgtatggcaccgaccacttcgaaagcttcgtcgacccgatggacgcctgccgcggcgccgatcttgtgaccaccgacgtgtggacgagcatgggctgggaagcggaaaacgacgcacgcatgaaggccttcgccgactggcaggtcgacgccgagatgatggcggtggcgaagcctgaagcggttttcatgcactgcctgccggcgcatcgcggcgaggaagtgaccgccgaagtcatcgacgggcggcagtccgtggtctgggacgaggcggaaaaccggctgcacgtgcaaaaagccttgatggaatatcttctcctcggaaaactggaaacctga

SEQ ID NO: 65018 - protein, 305 aa, Thiobacillus denitrificans ATCC 25259
MLKHFLQFRDLSRDEHLYLFERARVIKSRFKRYEPYHPLADRTLAMIFEKSSTRTRLSFEAGMHQLGGSAIYLNTRDTQLGRGEPVEDAGEVISRMVDIVMIRTFEQEIIERFASHSRVPVINGLTNEYHPCQVLADIFTFIEHRGPIHGKTVAWIGDSNNMCNTWLQAAELLDFNVHVSTPPGYEVEPERAGLYGTDHFESFVDPMDACRGADLVTTDVWTSMGWEAENDARMKAFADWQVDAEMMAVAKPEAVFMHCLPAHRGEEVTAEVIDGRQSVVWDEAENRLHVQKALMEYLLLGKLET

SEQ ID NO: 65019 - DNA, 1011 bp, Pseudomonas fluorescens PfO-1
  CDS (1)..(1011): transl_table=11
atggcgttcaacattcacaaccgtaacctgctcagcctggaacaccacaccccacgtgagctgcgctacctgctcgacctgtcgcgcgacctgaagcgcgccaagtacaccggcaccgagcagcaacacctgaagggcaacaacatcgccctgatcttcgaaaaaacctcgacccgcacccgctgcgcgttcgaagtcgccgcttatgaccagggcgccaacgtcacctacatcgacccgaactcctcgcagatcggccacaaggaaagcatgaaggacaccgcccgcgttctggggcgcatgtacgacgccatcgagtaccgtggcttcaagcaggaaatcgtcgaagagctggccaagttcgccggcgtaccggtgttcaacggcctgaccgatgaatatcacccgacccagatgattgccgacgtgctgaccatgcgtgagcacgccgacaagccgatccacgagatcagctacgcctacctgggcgacgcgcgcaacaatatgggcaactcgctgctgctgatcggcgccaaactcggcatggacgtgcgcatctgcgcgccgaaagccctgtggccccacgatgatctggttgatcgctgcaagaaatacgcagaggaaagcggcgcccgcatcaccctgaccgaagacccgaaagcggcggtcaaaggcgtggacttcatccacaccgacgtctgggtatcgatgggcgagccggtggaagcctgggccgagcgtatccagcaactgctgccgtatcaggtcaacgccgagctgatgaaagccaccggcaacccgcgcaccaagttcatgcactgcctgccggcgttccacaacagcgataccaaggtcggcaaacagatcgccgaacaatatccgcacctgaaaaacggcatcgaagtgaccgacgacgtgttcgagtcgccggcctgcatcgccttcgagcaagcggaaaaccgcatgcacaccatcaaggcgattctggtgtcgaccctggctgatctgtaa

SEQ ID NO: 65020 - protein, 336 aa, Pseudomonas fluorescens PfO-1
MAFNIHNRNLLSLEHHTPRELRYLLDLSRDLKRAKYTGTEQQHLKGNNIALIFEKTSTRTRCAFEVAAYDQGANVTYIDPNSSQIGHKESMKDTARVLGRMYDAIEYRGFKQEIVEELAKFAGVPVFNGLTDEYHPTQMIADVLTMREHADKPIHEISYAYLGDARNNMGNSLLLIGAKLGMDVRICAPKALWPHDDLVDRCKKYAEESGARITLTEDPKAAVKGVDFIHTDVWVSMGEPVEAWAERIQQLLPYQVNAELMKATGNPRTKFMHCLPAFHNSDTKVGKQIAEQYPHLKNGIEVTDDVFESPACIAFEQAENRMHTIKAILVSTLADL

SEQ ID NO: 65021 - DNA, 936 bp, Carboxydothermus hydrogenoformans Z-2901
  CDS (1)..(936): transl_table=11
atgatagcatcctaccggggacgggattttctttcaatgaacgatttgaccggggaggagatagaggaagtattggatttagcttcggaattaaaaatccggcaaaaaaagggaatttcgactccgattttaaaagggaaaaccttggcgatgatttttagcaaaaattccacccggaccagggtttcctttgaagttggtatggtgcagttaggaggatatcctctttttataaccgctaccgactcgcaattaagccggggtgaaccgattgccgatactgcccgggtcttatcccggatggtggatggtattatgattcgcacctacagtcatagcgaagtagaagaactggcctactatgccgatgtgccggttattaacggtcttaccgattacgaacatccctgtcaaatcatggcggatttactgacaattaaagaacataaggggcagttaagaggtttaaaggtggcctgggtaggggatggcaacaacgtctgccattcgttaatgattggtgcagccaaggtaggtatggaagtggccgtggcaaccccaccgggatatgaaccggatcaaaaagtaagtttaattgcccaaaaggaaaccagcaggtggggaacaaaattattattaacccacgatccggtggaagcggttaccggtgccgatgtggtggtaaccgatgtttgggcttcgatggggcaggaggcggaaagtgctgagcgggttaaagtctttgaaccctatcaggttaacggtgaactggtaagccatgccaagcaggactttatcttcctccactgcctgcctgcccaccggggtgaagaagtgaccgccgaagtgatcgatggtgaacattcggtggtctttgctgaggcggaaaaccggctgcacgcccaaaaggctatcttgactttactcttaggataa

SEQ ID NO: 65022 - protein, 311 aa, Carboxydothermus hydrogenoformans Z-2901
MIASYRGRDFLSMNDLTGEEIEEVLDLASELKIRQKKGISTPILKGKTLAMIFSKNSTRTRVSFEVGMVQLGGYPLFITATDSQLSRGEPIADTARVLSRMVDGIMIRTYSHSEVEELAYYADVPVINGLTDYEHPCQIMADLLTIKEHKGQLRGLKVAWVGDGNNVCHSLMIGAAKVGMEVAVATPPGYEPDQKVSLIAQKETSRWGTKLLLTHDPVEAVTGADVVVTDVWASMGQEAESAERVKVFEPYQVNGELVSHAKQDFIFLHCLPAHRGEEVTAEVIDGEHSVVFAEAENRLHAQKAILTLLLG

SEQ ID NO: 65023 - DNA, 927 bp, Prochlorococcus marinus str. MIT 9312
  CDS (1)..(927): transl_table=11
atggtaaaaccaaataagcttgctaataataattatctatcaagctttgatatgacaactgatgagtttattaatattttagaccttgcaaaaaattttaaaaataaaaagataaatattgatcctaacaataaagttttaggattaatatttgataagtcatcaacacgaacaagagttagttttcaagtcgcgatgtcacgacttggtggaaccactatcgacctaaatccgattacatcccaaataggaagaggagagcccattaaagatactgctagagttctaagtagatattgcgatgttattgcaattagaacttttaatcattcagatctagaagaatatgcaaaatggtctacgataccagtaattaatgctcttacagatttagaacatccctgccaagctctagcagattttttgacaattcaagaggagtttatcgattttagaaatgtagttttgacatttataggtgatggtaataacgtcgcaaactcccttattctatgtggagcattactaggagtagaagttagaattgcatgcccaagaggttatgaaccaaatgtctcggttattaacaaagcacttgaaatttacaaaaataagaatttgttgaaaatcattcatgatccttatgatgctgtattaggggcaaatgttctttatacagatgtttggtcatctatgggagaggaaaatcaaaaagaagataaagataaagattttaaaggatttactattaatagcagtttagtaagaaaggcaaataaagatgcaattattctccattgtctgccagcatataggggtaaagaaatttcagcagaagtttttgagagtaaaattagtagaatttttaagcaggcagaaaataggttgcatgtccagcaagctcttttggcaggattgttaagttaa

SEQ ID NO: 65024 - protein, 308 aa, Prochlorococcus marinus str. MIT 9312
MVKPNKLANNNYLSSFDMTTDEFINILDLAKNFKNKKINIDPNNKVLGLIFDKSSTRTRVSFQVAMSRLGGTTIDLNPITSQIGRGEPIKDTARVLSRYCDVIAIRTFNHSDLEEYAKWSTIPVINALTDLEHPCQALADFLTIQEEFIDFRNVVLTFIGDGNNVANSLILCGALLGVEVRIACPRGYEPNVSVINKALEIYKNKNLLKIIHDPYDAVLGANVLYTDVWSSMGEENQKEDKDKDFKGFTINSSLVRKANKDAIILHCLPAYRGKEISAEVFESKISRIFKQAENRLHVQQALLAGLLS

SEQ ID NO: 65025 - DNA, 909 bp, Syntrophus aciditrophicus SB
  CDS (1)..(909): transl_table=11
atgaaaaaggatctgttaagcatctatgatcttgaagcaggagattttaaggctatttttgagaaagcccggcatctcaagtcggtgcatgagcaaggggtggcctacactcctctgaaggggaaaacgctgggaatgatttttgacaaatcttcaaccagaacgaggatttctttcgaagtcggcatgtatcagctcggcggtctggctctttttctcagcaatcgggacacacagctcggacggggggaaacggttgccgacagcgcccggattatgtcacgctacctcaatggaatcatgattcgcaccttctctcacctcatcattgaagaatttgccgcccatgccaccatcccggtgatcaacggcctgacggatctgctgcatccctgtcagatcctgagcgacctctttacgatcattgagaaaaaagggagttacgagaggttgaaaatcgtttatgtgggcgacgggaacaacatcgccaattcctggatcaacgctgcagccaggctcccattccatttggcgctttcctgtccggaaggatatgatccggattccgggattctcgaccgcggggtgaaggaagcaaaggagggggtgtctctcatgcgcgatccgtatgaggccgtaaggaatgccgacgtcgtctataccgatgtctgggccagcatgggacaggaagcggaacaggaggcgcgggccagagtcttccggccttatcagatcaatgaggctctgctttctccggcaaaaaaggacgccatcgtcatgcattgccttcccgcgcaccggggtgaagaaattaccgcggcagttctagatggcccccggtcggtcatcatcgatcaggcggaaaaccgtctgcatgttcagaaagcgatactggaaattttaatttag

SEQ ID NO: 65026 - protein, 302 aa, Syntrophus aciditrophicus SB
MKKDLLSIYDLEAGDFKAIFEKARHLKSVHEQGVAYTPLKGKTLGMIFDKSSTRTRISFEVGMYQLGGLALFLSNRDTQLGRGETVADSARIMSRYLNGIMIRTFSHLIIEEFAAHATIPVINGLTDLLHPCQILSDLFTIIEKKGSYERLKIVYVGDGNNIANSWINAAARLPFHLALSCPEGYDPDSGILDRGVKEAKEGVSLMRDPYEAVRNADVVYTDVWASMGQEAEQEARARVFRPYQINEALLSPAKKDAIVMHCLPAHRGEEITAAVLDGPRSVIIDQAENRLHVQKAILEILI

SEQ ID NO: 65027 - DNA, 912 bp, Saccharophagus degradans 2-40
  CDS (1)..(912): transl_table=11
atgactaaaccaagacactttttaacactagaagacctttctgcaaaagaattagaagaggttattcagcgcgctattgatttaaaagcccaacacaaagcgggcaccactgatgagcccttcaaaaaccaagtactggggatgatatttgaaaaatcatccacgcgtacgcgagtgagctttgaagcaggtatggctcaactaggtggcagcgcaatatttttaagctctcgcgatacacagcttggccgcggtgaacctattgaagactccgcgcgtgtactatcacgcatggtagacattgttatgatccgcactttcgagcactcgattgtagaacgatttgcggaatattcgcgcgtaccggttatgaatgcgttaacagacgactaccacccctgccaattgctagccgacattcaaacgtttgttgaacacagaggcagccccaagggtaaaacagtagcttgggttggtgatggtaacaacatgtgccattcatacattaacgccgcaaagctttgcgactttaaactacaaattgcctgccccgaaggcttcgatccagcccctcagcttattgcagaaaacagtgaccgcgtaaccgttacccgcattcctgaagaagctgtaaaaaatgccgattgggtagccacagatgtgtgggcaagcatgggccaagaagacgagaaaaagaaacgcttagccgcttttgctggctacgaagtgaatcataagcttatgagtcacgccaaaaaagacgcaatattcatgcactgcttacctgcccacagaggcgaggaagttagcgcagaattattagaagacgaaaacatatcggtagtatgggatgaagccgaaaatagactacacgcacaaaaagcccttatgctatttttaatgggtaaataa

SEQ ID NO: 65028 - protein, 303 aa, Saccharophagus degradans 2-40
MTKPRHFLTLEDLSAKELEEVIQRAIDLKAQHKAGTTDEPFKNQVLGMIFEKSSTRTRVSFEAGMAQLGGSAIFLSSRDTQLGRGEPIEDSARVLSRMVDIVMIRTFEHSIVERFAEYSRVPVMNALTDDYHPCQLLADIQTFVEHRGSPKGKTVAWVGDGNNMCHSYINAAKLCDFKLQIACPEGFDPAPQLIAENSDRVTVTRIPEEAVKNADWVATDVWASMGQEDEKKKRLAAFAGYEVNHKLMSHAKKDAIFMHCLPAHRGEEVSAELLEDENISVVWDEAENRLHAQKALMLFLMGK

SEQ ID NO: 65029 - DNA, 930 bp, Burkholderia xenovorans LB400
  CDS (1)..(930): transl_table=11
atgaccgccaagaaaattcgccactacctgcagttcaaggatttctcgctggaagactacgagtacgtgctggaacgcgcgcgcattctgaaacgcaagttcaagaactacgagacctaccatccgctgcacgatcgcacgctggcgatgatcttcgaaaaaaattcgacacgcacgcgcctgtcgttcgaagccggcatcttccagttgggcggccacgccgttttcatgagcacgcgtgacacgcagctcggtcgcggcgaaccgatcgaagacgcagcgcaggtcatctcgcgcatggtcgacatcatcatgatccgcacgttcgggcaggacattctccagcgcttctccgagaattcgcgcgtgccggtgatcaacgggctgaccaacgaatatcacccgtgccaggtgctggcggacatcttcacgtacttcgagcatcgcggcccgattcgcggcaagacggtcgcgtgggtcggcgacgccaacaacatgctgtacacgtggatcgaagccgcgcagattctcggcttcaagctgcgcctgtccacgccgccgggctacaagctcgaccgcgccgtggtcgccgccgagagcgcgccgttctacgaagaattcgacgatccgaacgaggcctgcgccggcgccgacctcgtgaccaccgacgtctggaccagcatgggcttcgaagccgaaaacgaagcgcgcaagaaagccttcgccgactggtgcgtcgacgccgacatgatggcgcgcgccaatccagatgcgctcttcatgcactgcctgcccgcccaccgcggcgaggaagtgagcgcggaggtgatcgacggcccgcaaagcgtcgtgtgggacgaggcggaaaatcgtctgcatgtgcagaaggcgttgatggaatacctgctgctcggcaagctgaatcattga

SEQ ID NO: 65030 - protein, 309 aa, Burkholderia xenovorans LB400
MTAKKIRHYLQFKDFSLEDYEYVLERARILKRKFKNYETYHPLHDRTLAMIFEKNSTRTRLSFEAGIFQLGGHAVFMSTRDTQLGRGEPIEDAAQVISRMVDIIMIRTFGQDILQRFSENSRVPVINGLTNEYHPCQVLADIFTYFEHRGPIRGKTVAWVGDANNMLYTWIEAAQILGFKLRLSTPPGYKLDRAVVAAESAPFYEEFDDPNEACAGADLVTTDVWTSMGFEAENEARKKAFADWCVDADMMARANPDALFMHCLPAHRGEEVSAEVIDGPQSVVWDEAENRLHVQKALMEYLLLGKLNH

SEQ ID NO: 65031 - DNA, 972 bp, Acidobacteria bacterium Ellin345
  CDS (1)..(972): transl_table=11
atgttcgcatccgactttctctcgattcgcgacttcacgccgcagcagatacggcatctgctcgacctcgccatgcacattaaggcgatgccgcaggcctactcgcgctcgttgcgcgggaagaccatggcgttgatcttcgagaagccgtcgctgcggacccgggtttcgtttgacgtgggcatccagcagcttggtggtttttccgtctatctctcgcctgctgagatcaacctcggcaagcgggagggcgtgtatgacgtggccaagaacctggagcgcatggtgcagggaatcatgattcgcacctttgcgcaccggatcgtggaggacatggcggcattcgcgtccattccgatcattaacggccttaccgactacagtcacccctgccaggcgatggccgattacatgaccatcttcgaagccaaaggacgcctatccgggctgaagttggcttacgtgggcgacggcaataatgttgcgcactcgcttatgttcgccggcgcacagctcggtgttcacgtgtgggtggcaactcctgatggttacgagcccgatcatgcggcgcgcgaatgggcgaccaggcgcgcggcagagaccggcggaagttgcaccatcaccaacgatccggtggcggccgtagaggacgccgacgtgatctacaccgacgtgtgggcgagcatgggccaggagtccgaggctgcgctgcgcaagaagatcttcctgccgtatcaagtgaacgggaaactctttgcgcaggctaagccggacacgatcttcatgcactgcctgccggcacatcgcggcgatgaagtgaccgacgaggtcatcgattcgccacgttcgttcgtcttcccagaggccgagaaccggctgcatgcacagaaggcgatcatgctggaacttatgcgcgacgagtccgtcgagcacgagcacggcgtgctgcacgaagtggagatggtgaagtaa

SEQ ID NO: 65032 - protein, 323 aa, Acidobacteria bacterium Ellin345
MFASDFLSIRDFTPQQIRHLLDLAMHIKAMPQAYSRSLRGKTMALIFEKPSLRTRVSFDVGIQQLGGFSVYLSPAEINLGKREGVYDVAKNLERMVQGIMIRTFAHRIVEDMAAFASIPIINGLTDYSHPCQAMADYMTIFEAKGRLSGLKLAYVGDGNNVAHSLMFAGAQLGVHVWVATPDGYEPDHAAREWATRRAAETGGSCTITNDPVAAVEDADVIYTDVWASMGQESEAALRKKIFLPYQVNGKLFAQAKPDTIFMHCLPAHRGDEVTDEVIDSPRSFVFPEAENRLHAQKAIMLELMRDESVEHEHGVLHEVEMVK

SEQ ID NO: 65033 - DNA, 927 bp, Hyphomonas neptunium ATCC 15444
  CDS (1)..(927): transl_table=11
atgacgatccgccacttcctcgacatctggccgcttgagagcgcagagcttcgtgcgatcctcgatcaggcacacgccatgaagaaggcccgtgccggctggccgaagggcaagattgatgcgggcgcgccgctcgatggccacacgctggcgatgattttcgagaaatcctccacgcgcacccgcttctccttcgacatggcaatgcgccagctcggcggctcgtcgatcacggcgacatccaacgacatgcagcttggccgcggtgaaaccgtggaagataccgccaaggtgctctcgcgctttgtcgatgccgtgatgatccgcgccaatgaccatgccgatgtcgaggcatttgccgacgccgccagcgtcccggtcatcaacggcctcacggaccgctcccacccctgccagatcatggcagacctgatgacgctggaagaacacggcctgacgctccggggcgcgcgccttgcctgggttggcgatggcaataatgtctgcgccagcttcatccatgccgcgcccaaattcggcttctcgctggcggtcggcacacccaaacgctttgctccggatgaggacgatctggaaatcgccgccgagcttcagggccggatcgacctttatgagaccgccgaggaagccgtcgccggcgccgatgtcgtcatcgcggacacctttgtgtcgatgggcgacgtggacgccgaacgccgcctcgaaatcctcgacccctacgcggtcaccgaggagctgatggaactggccgctggcggggcaaaattcctgcactgcctcccggctcaccggggcgaggaagtcgatgccgaagtgatcgacggtccggccagcctcgtcttcgacgaagcggaaaaccgcctccacgcccagaaagccatcctgcgctggtgtctcggtaaataa

SEQ ID NO: 65034 - protein, 308 aa, Hyphomonas neptunium ATCC 15444
MTIRHFLDIWPLESAELRAILDQAHAMKKARAGWPKGKIDAGAPLDGHTLAMIFEKSSTRTRFSFDMAMRQLGGSSITATSNDMQLGRGETVEDTAKVLSRFVDAVMIRANDHADVEAFADAASVPVINGLTDRSHPCQIMADLMTLEEHGLTLRGARLAWVGDGNNVCASFIHAAPKFGFSLAVGTPKRFAPDEDDLEIAAELQGRIDLYETAEEAVAGADVVIADTFVSMGDVDAERRLEILDPYAVTEELMELAAGGAKFLHCLPAHRGEEVDAEVIDGPASLVFDEAENRLHAQKAILRWCLGK

SEQ ID NO: 65035 - DNA, 915 bp, Rhizobium leguminosarum bv. viciae 3841
  CDS (1)..(915): transl_table=11
atgagccctaaacacttcctcgatctttcggcggtcacatccgccgatctcagaacgatcatgaacgatgcgctcgcccgtaagcaggccttcaaggcaggcacgggcgacaagccgctcgccggcaagatgctggcgatgatcttcgagaagccgtcgacgcgcacccgcgtctccttcgacgtcggcatgcgccagctcggcggtgaaacgctgttcctgtccggcaccgagatgcagctcggccgcgccgagacgatcggcgacaccgccaaggtgctgtcgcgctatgtcgatgcaatcatgatccgcaccaccgagcactcgcggctgctggaactggctcagcatgcgaccgtgcctgtgatcaatgcgctgacggatgacacccatccctgccagatcatggccgatatcatgaccttcgaagagcaccgcggcccgatcaagggcaagaccatcgcctggaccggcgacggcaacaatgtgctgcattcgctggtcgaaggggctgcgcgtttcggctaccgcatgaacatggccgtgccccttggctcggagcccaaggatcactatctgaactgggcccgcaatgagggcgccgaaatcatgctttgccatgatgccgaccgtgcggtcgccggcgtcgattgcgtggtgaccgatacctgggtctccatgaatcaggaacatcgggcccggggtcacaatgtcttccagccttatcaggtcaacgcggccttgatggcgaaagccggcaatgatgcattgttcatgcattgcctgcccgcccatcgcggtgaggaagtgactgatgatgtgatcgacggtccgcaatccgtagtcttcgatgaggcggaaaaccgtcttcatgcgcagaagtcgattcttgcttggtgcctgggcgcgatctga

SEQ ID NO: 65036 - protein, 304 aa, Rhizobium leguminosarum bv. viciae 3841
MSPKHFLDLSAVTSADLRTIMNDALARKQAFKAGTGDKPLAGKMLAMIFEKPSTRTRVSFDVGMRQLGGETLFLSGTEMQLGRAETIGDTAKVLSRYVDAIMIRTTEHSRLLELAQHATVPVINALTDDTHPCQIMADIMTFEEHRGPIKGKTIAWTGDGNNVLHSLVEGAARFGYRMNMAVPLGSEPKDHYLNWARNEGAEIMLCHDADRAVAGVDCVVTDTWVSMNQEHRARGHNVFQPYQVNAALMAKAGNDALFMHCLPAHRGEEVTDDVIDGPQSVVFDEAENRLHAQKSILAWCLGAI

SEQ ID NO: 65037 - DNA, 924 bp, Mycobacterium smegmatis str. MC2 155
  CDS (1)..(924): transl_table=11
atgatccggcatttcctgcgtgacgacgacctgtcgcccgaagagcaggccgaggtactcaccctggccgccgacctcaagaagacgccgttctcgcggcgaccgctggagggtccgcgcggcgtcgcggtgatcttcgagaagaactcgacgcgtacgcggttctcgttcgagatgggcatcgcccagctcggtggacacgccatcgtcgtcgacggacgcagcacgcaattgggccgcgaggagaccctcgaggacaccggggcggtgctgtcgcgttacgtcgacgcgatcgtgtggcgcacgttcgcccaggagcgcctgaccgcgatggccagtggcgcctccgtcccgatcgtcaacgcgctgtccgacgagttccacccgtgccaggtgctcgccgacctgcagaccctcgccgagcgcaagggcaagctggcgggcctgcgcatgacgtacttcggcgacggcgccaacaacatggcgcactcgttgatgctgggcggcgtgaccgcgggcgtccacgtcacgatcgccgcgccggacggcttcgaacccgatccccggttcgtcgacgccgcacgccgtcgcgcggcggagaccggcgcgaccgtcgctctcacgaaggatgcgaaggccggtgccgacggcgccgacgtgctggtgaccgacacctggacgtcgatgggccaggagaacgacggtctggaccgggtgcgcccgttccgtccgttccaggtcaacgccgacctgctcgagctcgccgacccggccgccgtggtgctgcactgcctgcctgcccaccggggccacgagatcaccgacgaggtgatcgacgggccgcagagtgcggtgttcgacgaggccgagaaccggctgcacgcccagaaggcgctgctggtctggctgctggagaagcggtaa

SEQ ID NO: 65038 - protein, 307 aa, Mycobacterium smegmatis str. MC2 155
MIRHFLRDDDLSPEEQAEVLTLAADLKKTPFSRRPLEGPRGVAVIFEKNSTRTRFSFEMGIAQLGGHAIVVDGRSTQLGREETLEDTGAVLSRYVDAIVWRTFAQERLTAMASGASVPIVNALSDEFHPCQVLADLQTLAERKGKLAGLRMTYFGDGANNMAHSLMLGGVTAGVHVTIAAPDGFEPDPRFVDAARRRAAETGATVALTKDAKAGADGADVLVTDTWTSMGQENDGLDRVRPFRPFQVNADLLELADPAAVVLHCLPAHRGHEITDEVIDGPQSAVFDEAENRLHAQKALLVWLLEKR

SEQ ID NO: 65039 - DNA, 936 bp, Azoarcus sp. BH72
  CDS (1)..(936): transl_table=11
atgagttcgcccagacactatcttcagttcagcgatttcaccgctgcggagtacgaccacgtgttccagcggacgcgctggatcaaggaaaagttcaagcagtatgagccgtatcaccccctgttcgaccgcacgctcgtcatgatcttcgagaaggcgagtactcgtacccgcctctcgttcgaagccggcatgcagcaactgggcggctccgcaatctatctgaatacgcgcgactcccaactggggcgcggcgagccggtggaggacgccgcccaggtgatctcccgcatgagcgacctggtgatgatccgcactttcgagcaggacatcatcgaacggttcgcggcctattcccgggtgccggtgatcaacggcctcaccaacgaataccatccctgccagatcctcgcggatatctacaccttcatcgagcaccgcggcagcatcaagggcaagacggtggcctgggtgggggattcgaacaacatgtgcaacacctggctgcaggcggccgaggtgctggatttcaaggtgcgggtgtcgacgccgccgggatacgaggtcgaaccgaccgacgcaggtctgcgtggcaccgctcacttcgcccaattctccgatccgctcgaagcctgccgcggcgccgatctcgtcaccaccgacgtctggacctcgatgggtttcgaggcggagaacgaggcgcggatgaaggctttcgccgactggtgcgtcgacgctgaaatgatgtcggtcgccgcgccggacgcgctgttcatgcactgcctgccggctcaccgcggcgaggaagtcaccgcggaagtgatcgacggtccgcagtcggtggtatgggatgaggccgaaaaccgcctgcacgtgcagaaggccctgatggaatatctcgttctcggtcgcgtcggggacgaagagtcgaactaa

SEQ ID NO: 65040 - protein, 311 aa, Azoarcus sp. BH72
MSSPRHYLQFSDFTAAEYDHVFQRTRWIKEKFKQYEPYHPLFDRTLVMIFEKASTRTRLSFEAGMQQLGGSAIYLNTRDSQLGRGEPVEDAAQVISRMSDLVMIRTFEQDIIERFAAYSRVPVINGLTNEYHPCQILADIYTFIEHRGSIKGKTVAWVGDSNNMCNTWLQAAEVLDFKVRVSTPPGYEVEPTDAGLRGTAHFAQFSDPLEACRGADLVTTDVWTSMGFEAENEARMKAFADWCVDAEMMSVAAPDALFMHCLPAHRGEEVTAEVIDGPQSVVWDEAENRLHVQKALMEYLVLGRVGDEESN

SEQ ID NO: 65041 - DNA, 921 bp, Nostoc punctiforme PCC 73102
  CDS (1)..(921): transl_table=11
atggcagcattgctcggacgagatttattaagtctagcggatatcagttctactgaacttcaagaactcctgcaattggcaactcaacttaaatcacaacagttgaagttgcagtgtaataaggttttagggttgttgttctccaaagcttcaactcgcacgcgggtaagttttactgtggcgatgtaccaattgggtggacaggtaatcgatctgaacccgaatgtcactcaagttagccgtggggaacctttacaggatacggcgcgggtgttagaccgatatctggatattttggcaattcgcacttttgcacagcaggatttagaaacttttgctcactatgcaaagattccagtaattaatgcgcttactgatgcagaacatccttgtcaggtattagctgatttattgacgattcaagaaagctttaacacccttgctgggttaactttaacctacgtaggtgatgggaataatatggctaattctctgatgttgggctgtgctttggtagggatgaacgtcagaattgctactcctgacggatatgaaccagattctcagattgtagaacaagcaagagcgatcgctaataacaaaactgaagtccttctcactcacgatccagaattagctgctaagggttctactgtactttatactgatgtttgggcaagtatgggtcaagaaacagaagcagacaatcggatgccaattttccagccttaccaaatttcggagcaactattgagccttgctgctccagaggcaattgttttacactgcttaccagctcatcgtggtgaagaaattactgaggcagttattgaaggttctcaatcacgagtttgggaacaggcagaaaatcgcctacacgctcaaaaagctttgcttgcaagtatcttaggggcggaatga

SEQ ID NO: 65042 - protein, 306 aa, Nostoc punctiforme PCC 73102
MAALLGRDLLSLADISSTELQELLQLATQLKSQQLKLQCNKVLGLLFSKASTRTRVSFTVAMYQLGGQVIDLNPNVTQVSRGEPLQDTARVLDRYLDILAIRTFAQQDLETFAHYAKIPVINALTDAEHPCQVLADLLTIQESFNTLAGLTLTYVGDGNNMANSLMLGCALVGMNVRIATPDGYEPDSQIVEQARAIANNKTEVLLTHDPELAAKGSTVLYTDVWASMGQETEADNRMPIFQPYQISEQLLSLAAPEAIVLHCLPAHRGEEITEAVIEGSQSRVWEQAENRLHAQKALLASILGAE

SEQ ID NO: 65043 - DNA, 972 bp, Synechococcus sp. WH 5701
  CDS (1)..(972): transl_table=11
atgggaccgcacttcactcagagctatcccggtctcgctggtctgcgcggccgggatctgctgtcttcagcggatctggatgctgagcagaccctggcgctgctgaaattggcggcagatttcaaaagtggctccctgcgcctcgacctgagcggcaagtccctcggcctgatcttcaccaaggcctccacccgcacccgcgtcagcttttccgtggcgatgggccgcctggggggccaggtcctcgacctcaacccctccgtgacccaggtgggccgcggcgaaccggtggccgacaccgcccgggtgctgagccgttacgtgaatgccctggcgatccgcaccttcgagcagcaggagctggccgagtacgcccactgggcctcgattccggtgatcaatgccctcaccgatctggagcacccctgtcaggccctggctgatgtgctcaccatccgcgaaagcttcggctccctcaaaggcctcaccatggcctacgtgggtgatggcaacaacatggcccactcgctgatgctctgcggcgccctgctcggaatcaacgtgcgcgtggcctgcccggaaggctttgcacccgatcccgccgtgctggcccaggcccaggcgctggcgggccgcgccgccacggtctcggtgctgcatgagccagtgccggcggtgcggggagccgaagtgctctacaccgatgtgtgggcctcaatgggccaggagcaggagcagcagcagcggctgcaggccttcgcgggcttctgcgtggatgaggcgctgctggcggaagccgacccccgcgccatcgtgctgcattgcctgccggcccaccgcggcgaggagatcagtgccggcgtgatcgaaggcagcgccagccgggtgttcgatcaggcggagaaccgtctgcatgtgcagcaggccctgctggctgccctgctggctgatccggaaacgccctgcctctga

SEQ ID NO: 65044 - protein, 323 aa, Synechococcus sp. WH 5701
MGPHFTQSYPGLAGLRGRDLLSSADLDAEQTLALLKLAADFKSGSLRLDLSGKSLGLIFTKASTRTRVSFSVAMGRLGGQVLDLNPSVTQVGRGEPVADTARVLSRYVNALAIRTFEQQELAEYAHWASIPVINALTDLEHPCQALADVLTIRESFGSLKGLTMAYVGDGNNMAHSLMLCGALLGINVRVACPEGFAPDPAVLAQAQALAGRAATVSVLHEPVPAVRGAEVLYTDVWASMGQEQEQQQRLQAFAGFCVDEALLAEADPRAIVLHCLPAHRGEEISAGVIEGSASRVFDQAENRLHVQQALLAALLADPETPCL

SEQ ID NO: 65045 - DNA, 906 bp, Oceanospirillum sp. MED92
  CDS (1)..(906): transl_table=11
atgagcactagacatttcctaacactccgcgacctgtcttcagaagaattacgcacgcttgtaaagcgcgcctctgagctcaaggctatccgaaatcgcggtgaagtttacgaaccacttaagaacaaagttatggcgatgatttttgaaaaatcatcgacacgtacacgcgtttcttttgaagcaggtatggcccagtttggtggccatgccatgttcctttctccacgagacactcagcttggccgcggtgaaccgatcagcgacagcgcgaaagtcatctccagcatggtagatgtggtgatgattcgaactttcagccaccagcttgttgaagagttcgccgcaaactcaactgttccagtgattaatgcactaaccgatgaatatcacccttgccagcttctggctgacatgcagacttacttcgaacatcgcggcgatattcagggtaaaactgtgacctggatcggtgatggtaacaacatgtgtcattcctacatcaatgcagcacgtcagcttgatttcaaactgaatatcgcatgcccagaaggctttgatccggatgaaaagctagttgcagaaaatcaggaacgcattttcattacccgctctcctgtagaagcggtaactggcagtgatctggttgtgactgacgtttgggcatctatgggtcaagaggaagagcaaaaagaacgcgaagccaaatttgatggcttccaggtttcccctgctctaatggacaacgccaacaaagatgctctcttcatgcactgcctgcctgcccaccgaggcgaggaagtcagcatggatatgctagaagacccacgttctgtggtattcgatgaagcagaaaatcgcttgcacgcacaaaaagctttacttgaattcctgatggttaagtaa

SEQ ID NO: 65046 - protein, 301 aa, Oceanospirillum sp. MED92
MSTRHFLTLRDLSSEELRTLVKRASELKAIRNRGEVYEPLKNKVMAMIFEKSSTRTRVSFEAGMAQFGGHAMFLSPRDTQLGRGEPISDSAKVISSMVDVVMIRTFSHQLVEEFAANSTVPVINALTDEYHPCQLLADMQTYFEHRGDIQGKTVTWIGDGNNMCHSYINAARQLDFKLNIACPEGFDPDEKLVAENQERIFITRSPVEAVTGSDLVVTDVWASMGQEEEQKEREAKFDGFQVSPALMDNANKDALFMHCLPAHRGEEVSMDMLEDPRSVVFDEAENRLHAQKALLEFLMVK

SEQ ID NO: 65047 - DNA, 915 bp, marine gamma proteobacterium HTCC2207
  CDS (1)..(915): transl_table=11
atggctattagacattttctctctttgcgcgacctgagccctgcggaactatcccaggtcatcgacctagccattgaaatgaaagcagccaaacgtgaaggccgccaagaacctatttttgagggcaaagtactgggtatgatttttgagaaatcatccacccgaacccgcgtttcctttgaagccggtatggcccaactgggcggcgatgcgatatttctgtcatccaatgacacgcagcttggccgtggcgaacctgttgaagactctgctcgcgtgatctcgcgcatggtggatattgttatgatccgaacccatggtcaggagatcgtcgaacgttttgcggcaaattcgaaagtaccagtgatcaatgcactgaccaatgaatatcacccctgccagttattggccgatgtgcaaacctttgtcgagcatcgcggttctatccaaggcaaaacagttgcttggattggcgatggcaacaatatgtgtagctcgtggatcaatgcagctattcagtttgattttaaattacagatcgccacgccagttggctatgaacccaatgccgccctggtggcagaggcgggtaagcgtctcagtgtctcaaatgatcctgtagcagccgcgactggtgccgacttggtgacgacagatgtatttgcctcaatggggcaggaagccgagcaggaagagcgcctcaagcactttgctggctttcaagtgaatcatgcgctgatggctcacgccgcagacaacgcgctatttatgcactgcctgcccgctcatagggatgaagaagtgtctggggaattgatggaagatgaggctatttcggtggtctgggatgaagcagagaatcgcttacatgcgcagaaagcgctgatggtgtttttgttaggtgccagcagttag

SEQ ID NO: 65048 - protein, 304 aa, marine gamma proteobacterium HTCC2207
MAIRHFLSLRDLSPAELSQVIDLAIEMKAAKREGRQEPIFEGKVLGMIFEKSSTRTRVSFEAGMAQLGGDAIFLSSNDTQLGRGEPVEDSARVISRMVDIVMIRTHGQEIVERFAANSKVPVINALTNEYHPCQLLADVQTFVEHRGSIQGKTVAWIGDGNNMCSSWINAAIQFDFKLQIATPVGYEPNAALVAEAGKRLSVSNDPVAAATGADLVTTDVFASMGQEAEQEERLKHFAGFQVNHALMAHAADNALFMHCLPAHRDEEVSGELMEDEAISVVWDEAENRLHAQKALMVFLLGASS

SEQ ID NO: 65049 - DNA, 999 bp, delta proteobacterium MLMS-1
  CDS (1)..(999): transl_table=11
ttgtttcgtcttctcgactacgactacgattacgacaacgacaacgacctgagcgacctacttttaaaattcgtggggcacggtatggcaaaacatctgctggccctggccgatttcagcggggaggagttgcgcgccctgatcgaccgggcccttcaaatgaagcgggaaagcaaggcgggggggcgccatcgggcgctggagggacgcagtgttgccctgatcttcgagaagccctccacccggacccgggtctcctttgaggccgccatgtatggcctgggtgggcaggtgatctacctctccagccgggatacccaactggcccgcaacgagcctttaaaggacatggcccgggtcatggcccgctacgttgatggtctggtggtacggaccttcggccaggagatcgtcgaggaactggcccgctattcggcggtgccggtgatcaacgccctgaccgatctccaccatccctgccaggtgttaagcgatctgatgacggtgatcgagcaccagggtgagctggagcggctgaaaatcgcctgggtgggggatggcaacaatatggccaattcctggttgcaggccgccgcccggctgggtttcgccctgaccctggcctgtcccgaaggctacgagcccgatgccgacattctggccgccgcccgggccgccgctgcccggcccatcaacctggtggccgatccccgggaggcggtggccgacgccgatgtggtcaacaccgatgtctgggccagcatgggccaggaggacgagcagttgcaccggctgcagatcttccgcccctttcagattaacgatgagttgctggccgaggccgcgcccggggccattgtcctgcactgcctgccggcccatcgggacgaggagatcagcgaggcggtgctggaaggcccccgttcggtggtctgggagcaggccgagaacaagatgcatatccataaggcgatcctggccacgtttttggatcgttga

SEQ ID NO: 65050 - protein, 332 aa, delta proteobacterium MLMS-1
MFRLLDYDYDYDNDNDLSDLLLKFVGHGMAKHLLALADFSGEELRALIDRALQMKRESKAGGRHRALEGRSVALIFEKPSTRTRVSFEAAMYGLGGQVIYLSSRDTQLARNEPLKDMARVMARYVDGLVVRTFGQEIVEELARYSAVPVINALTDLHHPCQVLSDLMTVIEHQGELERLKIAWVGDGNNMANSWLQAAARLGFALTLACPEGYEPDADILAAARAAAARPINLVADPREAVADADVVNTDVWASMGQEDEQLHRLQIFRPFQINDELLAEAAPGAIVLHCLPAHRDEEISEAVLEGPRSVVWEQAENKMHIHKAILATFLDR

SEQ ID NO: 65051 - DNA, 1011 bp, Pseudomonas putida GB-1
  CDS (1)..(1011): transl_table=11
atggcgttcaacattcacaaccgcaacctgctcagcctggaacaccacaccacgcgcgagttgcgctacctgctggacctgtcccgcgacctcaagcgcgccaagtacaccggcaccgaacagcagcacctgaagggcaacaacattgccctgatcttcgaaaaaacctccacccgtacccgctgcgcgttcgaagtggccgcctatgaccagggcgccaacgttacctatatcgacccaaactcttcgcagatcggtcacaaggagagcatgaaggacactgcccgtgtgctcgggcgcatgtacgacgccatcgaataccgtggcttcaagcaggaaatcgtcgaagagctggccaagttcgccggcgtaccggtgttcaacggcctgaccgacgaatatcacccgacgcagatgatcgccgacgtgctgaccatgcgcgaacacagcgacaagccgctgcacgacatcagctacgcctacctgggcgacgcccgcaacaacatgggcaactcgctgctgttgattggcgccaagcttggcatggatgtgcgcatcgccgcgcccaaggcgctgtggccacacgacgacctggtcgaacgctgcaagaagtacgctgaagaaagcggcgcgcgcatcaccctcaccgaagatccgaaagccgcggtcaagggtgtggacttcgtgcataccgacgtgtgggtatcgatgggtgagccgatcgaggcctggggtgagcgcatcaagcagctcaagccttatcaggtgaatgccgaactgatgaagtccaccggcaacccacggaccaagttcatgcactgcctgccggcgttccacaactccgaaaccaaggtcggcaagcagatcgccgaacagtacccagacctggccaacggtatcgaagtgaccgacgacgtgttcgagtcacccgcctgcatcgccttcgagcaggcggaaaaccgcatgcacacgatcaaggcgattctggtttcgaccctggctgacctctga

SEQ ID NO: 65052 - protein, 336 aa, Pseudomonas putida GB-1
MAFNIHNRNLLSLEHHTTRELRYLLDLSRDLKRAKYTGTEQQHLKGNNIALIFEKTSTRTRCAFEVAAYDQGANVTYIDPNSSQIGHKESMKDTARVLGRMYDAIEYRGFKQEIVEELAKFAGVPVFNGLTDEYHPTQMIADVLTMREHSDKPLHDISYAYLGDARNNMGNSLLLIGAKLGMDVRIAAPKALWPHDDLVERCKKYAEESGARITLTEDPKAAVKGVDFVHTDVWVSMGEPIEAWGERIKQLKPYQVNAELMKSTGNPRTKFMHCLPAFHNSETKVGKQIAEQYPDLANGIEVTDDVFESPACIAFEQAENRMHTIKAILVSTLADL

SEQ ID NO: 65053 - DNA, 1153 bp, Neocallimastix frontalis
  CDS (11)..(1021)
catagacaacatggacgtttcatttgaaaatgttaagcattttattactttagctgatttcactccaaaacaagttttatggttaattaaacgttccatggaaattaagagtgaattaaaaaaaggaaataagcttccacaatattttagtggaaagactttaggtatgttcttcacaaagagatccactagaactagagtttcttctgaatcaggatgggcctgttatggtggacatccaatgtttttaggtaaggatgatattcaagttggtggtggtgaaccatggaaggatacttctattgttgttagttcaatggttgattgtattcttgctcgtcttggtggccatgaagaaattgaagttttatctaaatattcttcagttccagttattaatgctttaactgctaaattccacccacttcaaattcttgctgatgttgttactatgtatgaacatttcatgccaaattatcaatctatttcaagtggagatcttccacttccaatgttcaagaatttcaaggttgcttgggttggtgatgctaataatattattaattcaatgttagtcactcttccaagaattggtattgatttagctgtttgtactccaccacaatatcaaattttagatgatgttgcaaaattcgctaatgaaaatagtaaagcaactaatccagattatggtgctgtttcttatactcatgatccaaaggttgctattaaagatgctgatgtaattgttactgatacttggattagtatgggtcaagaaagtgagaaagaaagacgtattaaagaatttgctggttatcaagttacagaaaaattagctaaagagggcggtgctaagccaaattggaaattcatgcactgtcttccaagaaaacaacatgaagttgatgatgaagttttttataatccagaaagatctattgttttcccagaagccgaaaatcgtaaatatactgttatggctgtatttgaaatgttaatggtcaatgctaaaaattaaatttaaagaaagaatttgaatataattatagagaaaaaaaaattatatcataatgaaaataaaacaatatatataatatatatataataatacaatgaataataaaaatcaagtacaaaaaaaaaaaaaaaa

SEQ ID NO: 65054 - protein, 336 aa, Neocallimastix frontalis
MDVSFENVKHFITLADFTPKQVLWLIKRSMEIKSELKKGNKLPQYFSGKTLGMFFTKRSTRTRVSSESGWACYGGHPMFLGKDDIQVGGGEPWKDTSIVVSSMVDCILARLGGHEEIEVLSKYSSVPVINALTAKFHPLQILADVVTMYEHFMPNYQSISSGDLPLPMFKNFKVAWVGDANNIINSMLVTLPRIGIDLAVCTPPQYQILDDVAKFANENSKATNPDYGAVSYTHDPKVAIKDADVIVTDTWISMGQESEKERRIKEFAGYQVTEKLAKEGGAKPNWKFMHCLPRKQHEVDDEVFYNPERSIVFPEAENRKYTVMAVFEMLMVNAKN

SEQ ID NO: 65055 - DNA, 1116 bp, Aspergillus niger
  CDS (1)..(1116)
atgccctcccccctccgcacagcggccgcagccgcccgctacgggccttccacaacccgccacgccctgcgccgcctctactcctccaccagtcactccgccgcaacgccggcaacttctcccttcgcaccgcggcacctgctctccatcgccgacctgaccccaaccgaattcgcaaccctcgtccgcaatgcctcctcccacaagcgggccatcaaatccggctccatcccccaatccctccacggcgccctctccggcaagaccgtcgccatgatgttcagcaagcgcagcacccgcacccgcatttccaccgaaggcgccgtcgtccaaatgggcggccaccccatgttcctcggcaaggacgacatccagctgggagtcaatgaatccctctacgacactgccgtggtcgtctcctccatggtggaatgtatcgttgcccgcgtgggcaagcacgctgacgtcgccgacctcgccaagcactctactaagccggttatcaatgccctgtgtgactcgtatcacccgttgcaggctattgcggattttcagactattagtgagcatttcgctgcctcgggcaaggggaagttggagggtttggggctgaatgggttgaaaatcgcttgggtgggcgatgcgaataacgtgcttttcgatatggcgatcagtgcgaggaaaatgggcgttgatgttgctgttgctacgccgaaggggtatgagatccccaaggagatgttggagattattgagaaggctggcgagggggttaagagtcctggaaagctggtgcagaccaatgttcctgaggaggcggtgaagggggccgatgtgttggttactgatacttgggtttcgatgggccaggaggaggaggccgctaagcggttgagggatttcgctggattccagattacgagtgagttggcgaagaggggtggggcgaaggaggggtggaggttcatgcactgtcttcctaggcacccggaggaggttgctgatgaggtgttctatggacatcggtcgttggtgttccctgaggcggagaatcgtctgtgggctgccatttcggcgttggagggatttgtcgtcaataagggcaagattgagtaa

SEQ ID NO: 65056 - protein, 371 aa, Aspergillus niger
MPSPLRTAAAAARYGPSTTRHALRRLYSSTSHSAATPATSPFAPRHLLSIADLTPTEFATLVRNASSHKRAIKSGSIPQSLHGALSGKTVAMMFSKRSTRTRISTEGAVVQMGGHPMFLGKDDIQLGVNESLYDTAVVVSSMVECIVARVGKHADVADLAKHSTKPVINALCDSYHPLQAIADFQTISEHFAASGKGKLEGLGLNGLKIAWVGDANNVLFDMAISARKMGVDVAVATPKGYEIPKEMLEIIEKAGEGVKSPGKLVQTNVPEEAVKGADVLVTDTWVSMGQEEEAAKRLRDFAGFQITSELAKRGGAKEGWRFMHCLPRHPEEVADEVFYGHRSLVFPEAENRLWAAISALEGFVVNKGKIE

SEQ ID NO: 65057 - DNA, 1119 bp, Aspergillus oryzae
  CDS (1)..(1119)
atgacttgcggtctgaagctggccgccgctcgttacggcaaccataccttgcgccagaagattccactcaacgctgtgcgccgatacacttctcacactgctacttctacgactccccccacctcgccattcgctcctcgccattttctttccatcgctgatcttacctcaacggagttcgcaaccctcgtccgtaatgcatcttcacacaaacgaaccatcaagtcgggatcaatccctcagaacctgcttggttctatgaccggacagactgtagctatgctgttcagcaaacgcagtaccagaaccaggatatctactgaaggggctgtggtgcgcttgggaggacatccaatgtttctgggcaaggatgatattcaactcggtgtcaatgagtccttgtatgactctgcggttgtaatctcctccatggtctcttgtattgtagcccgagtcggcaagcacgctgaggttgcagaccttgccaagcattcaaccgtgcctgttatcaacgctctctgtgactccttccaccctctccaggccattgccgattttcagaccatctacgaaacatttacacctaaggcccatcgctctgacagtttgggtctggagggcctcaagattgcctgggtcggtgatgcaaacaacgttctgttcgacatggcaattgctgctaccaagatgggtattgatatcgccgttgcgactccgaagggctatgagattcctgccccgatgttggagctcatcaagcaggccagcaacggtgtctcaaagccaggaaagattattgagaccaacgttcctgaggaggcggttaagggtgcggatatcctggtaactgacacctgggtttccatgggacaggaggcagagtcgatcaagcgggtgaaggacttcgagggcttccagatcacttcggaacttgccaagcgcggtggtgcgaacgaaggctggaagttcatgcactgcctgcctcgtcaccctgaggaagtcagcgatgaagttttctacagcccacggtccttggtcttccccgaagcggagaatcggttgtgggctgcgatctcggccatggagggctttgttgtcaataagggaaggattgagtaa

SEQ ID NO: 65058 - protein, 372 aa, Aspergillus oryzae
MTCGLKLAAARYGNHTLRQKIPLNAVRRYTSHTATSTTPPTSPFAPRHFLSIADLTSTEFATLVRNASSHKRTIKSGSIPQNLLGSMTGQTVAMLFSKRSTRTRISTEGAVVRLGGHPMFLGKDDIQLGVNESLYDSAVVISSMVSCIVARVGKHAEVADLAKHSTVPVINALCDSFHPLQAIADFQTIYETFTPKAHRSDSLGLEGLKIAWVGDANNVLFDMAIAATKMGIDIAVATPKGYEIPAPMLELIKQASNGVSKPGKIIETNVPEEAVKGADILVTDTWVSMGQEAESIKRVKDFEGFQITSELAKRGGANEGWKFMHCLPRHPEEVSDEVFYSPRSLVFPEAENRLWAAISAMEGFVVNKGRIE

SEQ ID NO: 65059 - DNA, 1113 bp, Cryptococcus neoformans
  CDS (1)..(1113)
atgccttctgccaccgtcatccgatacgccattcaaggggctcgcaagccgactcccaacgttatcatccctttcaaacccaccaatatcgccaagtcgcgacagcttcctcctcctcacctccttacccttgccgacctctctcctgaacagatttccagtctcattgctaatgccgcggctctcaagttcgtctcaaaaaatgtgcatacgacagcgattcccaaacgccttgaccgacgaactgtcgctctgatctttaacaagcgatcgacgaggaccagggttgcgagtgaaacttctgttgaggcccttggtggccatcctatgtttttaggcaaagacgatattcagctcggagtgaatgagactcttgaggatactgccaaagttgtaggtagtatgactgatggtatcatggcgcgtgtagctggtcacgaggagatcgaaacactggcccgatactcgcctgtgcccgttatcaatgctctctccgatttgtaccaccccactcaaatccttgccgaccttctgacgctgtgcgaaatctatgcccctgtacctccccccactgagatcgtttctgggcaggcatattcttctatcctaagttactatcagtctgccttgaatccaaccaagattctgcaaggcaaaaaggtggcatgggttggagacaccaacaatatcacgaacgagctcttggtgactcttcccaggtttgggatgcacttcagcgtggccgcgcccaaggggtacgataagtttgacgagcgtgtctggtccaggctcgccgaatctaagactgaatctcttgtcacgcttaccaactccccagccgaggcccttcgtgatgccgacgtcgtcgttaccgatacttggatttctatgggtcaagaaaccgaaaaagctgctcgtcttgaagccttcaagggttaccagatcacgaacaagatggtctccgaagctggtgccaaggaagactggaaattcatgcactgcctgccaaggaagaaggaagaggttgacgacgaggtgttttacggaccgaggagtgttgtgttccctgaggcggagaacaggaaatggactatcatggctgttttcgagtag

SEQ ID NO: 65060 - protein, 370 aa, Cryptococcus neoformans
MPSATVIRYAIQGARKPTPNVIIPFKPTNIAKSRQLPPPHLLTLADLSPEQISSLIANAAALKFVSKNVHTTAIPKRLDRRTVALIFNKRSTRTRVASETSVEALGGHPMFLGKDDIQLGVNETLEDTAKVVGSMTDGIMARVAGHEEIETLARYSPVPVINALSDLYHPTQILADLLTLCEIYAPVPPPTEIVSGQAYSSILSYYQSALNPTKILQGKKVAWVGDTNNITNELLVTLPRFGMHFSVAAPKGYDKFDERVWSRLAESKTESLVTLTNSPAEALRDADVVVTDTWISMGQETEKAARLEAFKGYQITNKMVSEAGAKEDWKFMHCLPRKKEEVDDEVFYGPRSVVFPEAENRKWTIMAVFE

SEQ ID NO: 65061 - DNA, 1870 bp, Pichia pastoris
  CDS (530)..(1558)
gggtgttattttcaagtaagagtcatttgaggtaagcaccaaaccgagtagtgaatgagcaaagaattttatgcttatgtaattgttttatttgttccattcgaacgttataaactgtgattaaaacgggtatatttcaattccacgcggaagcgtagtcagaatacaaacccacaattaagatggacagcttggccgctaacagtaacaaaaactaccgccagtttttccttttgtctttcaagccatcttccaatcattaatcagtgtcaagttcgccttgaaagacaaaaaaaacacagaaagtcctaaaagtgtgagcaatgatctaaagatttggcttcatgatagattactttagagtagctggcaatgaattgggatctgaacttttgtcgtctttctttcccttaatttagtatccagctgcaagtgactgaaaaaggaaatttttccaccgcggaaaactaacgatgcttggatgagtaaaaagtgaacaattactcaaatacttctcctcaactgaaaaatgagcatgtttaagatccctaagttagtgttatctcaaggatttccaagcctaaatagaaaactagctcagactaccaaacctccaaggtccttaatctccatcttggaactaagtaaccaagaactaagttcattggttgaaagagcagcataccacaagacacaatataagtcaggcaaaatctcctctcaggtatcaccgtcgctgtttggaaaagttgcagcccttctttttacaaaaagatccactagaacaagaatatccagcgagggagcagcagtgtatttcggggcacaccccatgtttctaggtaaggatgatattcagcttggagtcaacgagtccttctatgacactacgaaagtgatctcctctatgacgtcttgtatctttgcccgtgttgataaacattctcaaatccaagaacttgctcaacattccacagtgcctatcataaattctttgtgtgatagattccacccattgcaggctattacagatattctgaccattcgtgaggcattcggcttcaccaaaggtctaaagttggcttgggtaggtgattccaacaatgtcatcaatgatcttgcaatcgcagccattcgttctggaattaacgtttcaattgccattcctcaaggaatagaaatggatgaggaaattatttccaaaggccaacagattgcacaggaaacagacactgttttggaagttactcatgacccaaagaaggctgtcaaagatgccaatgtccttgtcacagacacctttgtctctatgggacaagaagcagaatccaaggcaaaattggctcaatttcaaggttttcaaatctctagtgacttggcttcaggtgctgccccggattggaaattcatgcactgcttgccgcgtcataaagaggaagtgaccgacgaagttttctactctgaccgttctttggtgttccccgaggccgagaaccgattgtacgctgccattgctgcccttgaaggattcgttatcaacgaaggtcgtttggtataaataaattacacggatttatgcttgatcacatgaccaatcataactaggcggaccatgctgcctcctgcaaaggttctcgttcccaatttcttaaagtcttatgtaatcaacctgtattttcttgcttgacgcgccccaaagaaatcaaaacaatccccttcgaaacattgttaactttgaattaactcctcaatagttcctgaaaacagctttctctggtcgcacggtctggttcccctttgcataatcatctttgacttatgctagacaaaaatagaatcttgcgaatccgcaagaagaaagatggctccg

SEQ ID NO: 65062 - protein, 342 aa, Pichia pastoris
MSMFKIPKLVLSQGFPSLNRKLAQTTKPPRSLISILELSNQELSSLVERAAYHKTQYKSGKISSQVSPSLFGKVAALLFTKRSTRTRISSEGAAVYFGAHPMFLGKDDIQLGVNESFYDTTKVISSMTSCIFARVDKHSQIQELAQHSTVPIINSLCDRFHPLQAITDILTIREAFGFTKGLKLAWVGDSNNVINDLAIAAIRSGINVSIAIPQGIEMDEEIISKGQQIAQETDTVLEVTHDPKKAVKDANVLVTDTFVSMGQEAESKAKLAQFQGFQISSDLASGAAPDWKFMHCLPRHKEEVTDEVFYSDRSLVFPEAENRLYAAIAALEGFVINEGRLV

SEQ ID NO: 65063 - DNA, 1430 bp, Oryza sativa
  CDS (103)..(1206)
cagacgcccactcgacaccagtcatcacgcacgcctcgctccccgacgacgacctcctcctcctccgccgccgccgcctcggctcccctccgattcaccgcgatgtcggcggcgatctccggcgccagcctcgtcctctcctcgccccccgcgcccggggcccggccccagccgcgccccgcgcgggtgtcggtcgccgccgccgcgcccgccgcgcgacgcggggtcgttgccgccgcagcggtgtcgagccccgccgtgtcgtcctctgctggtaaagatgccaaacagattcctaaggactttcttcatattgatgatttcgacaaggatacaatcatgaagatccttaatcgggctattgaggtcaaggcaatgataaagtcaggagacaggagcttccaacctttcaaagggaaatcaatggcaatgatatttgccaagccgtcaatgagaacccgtgtttcatttgagacaggattctttttgcttggtggccatgctatctacctgggtcctgatgatatccagatgggcaagcgtgaagagacccgtgatgttgctcgtgtgctttctggatataatgacatcattatggccagggtttttgctcaccaagacattttggacttggcaaagtatgcagctgtacctgtcataaatggccttacggactacaaccatccatgccagataatggctgatgcacttactatgctcgaacacattggtcgtattgaaaacactaaggttgtctatgttggagacgggaacaatattgtccactcatggcttcgattggctgctttatttcctttacattttgtatgtgcctgtcctaagggcttcgagccagatgcaaagactgtggagatagccaggagtgctggtagtaagattgaaataacagatgaccctatggaagcagttaagggagcagatgttgtgtatacagatgtctgggccagcatgggccaaaaggaggaagctgaatatagaaaaaaagtgttccaaggattcacggtggatgaagctatgatggagatggctgggccaaatgccttccttatgcattgtttgcctgcagagagagggatagaggtaacagacggcgccattgaagctcccaactcaatcgtattcccccaggctgagaacagaatgcacgcccagaatgctatcatgcttcacgtccttggtgcttagacctacagtcgtgtaccagttaaatgaatattgatatctgaatggcgatatcatttcggttttcgcagtttctccctgggggcaggagggtagagattttggagaagttcactatgttcagatgctttggattgtctgataatactattttgtacttttcgtggtagctgcttgtactgtaccaggtcggtaaatcctgaataaatggcgcacctttataatcc

SEQ ID NO: 65064 - protein, 367 aa, Oryza sativa
MSAAISGASLVLSSPPAPGARPQPRPARVSVAAAAPAARRGVVAAAAVSSPAVSSSAGKDAKQIPKDFLHIDDFDKDTIMKILNRAIEVKAMIKSGDRSFQPFKGKSMAMIFAKPSMRTRVSFETGFFLLGGHAIYLGPDDIQMGKREETRDVARVLSGYNDIIMARVFAHQDILDLAKYAAVPVINGLTDYNHPCQIMADALTMLEHIGRIENTKVVYVGDGNNIVHSWLRLAALFPLHFVCACPKGFEPDAKTVEIARSAGSKIEITDDPMEAVKGADVVYTDVWASMGQKEEAEYRKKVFQGFTVDEAMMEMAGPNAFLMHCLPAERGIEVTDGAIEAPNSIVFPQAENRMHAQNAIMLHVLGA

SEQ ID NO: 65065 - DNA, 1089 bp, Neurospora crassa
  CDS (1)..(1089)
atgatgtcccgggcaactactcgcaccatcaagtccgctgtcggacaaatccaggctcgctctgtgtccaacagcgccgccagcagtaccccccgccatcttctctccatcagccagcttagccctgccgagttctccaagcttgtcctcaatgcttctgcttacaagcaggccaccaaggccgccttcgctgctggccccggccaggtaccccgcactttggacggcaagctaaagggacggaccgtggccatgatgttcagcaagcgaacgaccaggacccgtgtctcgaccgaggccgctgtggcctcatggcggggccaccccatgttcctcggcaaggatgacatccaactgggtgtcaacgagtctctctatgacacttccaaggtcatctcctccatgacctcgtgcatggtagcccgcgtcggtcctcactccgacgtcgccgacctcgccagggactcatcggtacctgtcatcaacgccctgtccgatgacttccacccgctccaggccattgccgacttccagaccatccacgaggcttttgcaccaagcccgcccacgaggccagcctcggactcgaggcatgaaggtcgcctgggtcggcgatctaacaacgtacttttcgacatggctaccgctgcgtcatgctgggcgtcgacattgccgtcgcctcgcccgccggctaccgattcccgaccgcatgaagcagatcatcctcagcgtcgccgagggcttgccaagcccggcaagctgatcgagactacggtccccgaggaggctgtcaaggacgctgatatcttggttaccgatacctgggtgtccatgggtcaggaggccgagacccagaggcgtctcaaggactgtttgccggcttccaagataaccaacgagctggctaagcgtggcggcgcgaagcccggctggaagttcatgcactgccttcctaggcaccctgaggaggttgatgacgaggttttctatggtcctcagtccttggtcttccccgaggccgaaaataggctctgggctgccgtctctgcccttgaggctttcgtcgtcaacaacggtaggatactttga

SEQ ID NO: 65066 - protein, 362 aa, Neurospora crassa
MMSRATTRTIKSAVGQIQARSVSNSAASSTPRHLLSISQLSPAEFSKLVLNASAYKQATKAAFAAGPGQVPRTLDGKLKGRTVAMMFSKRTTRTRVSTEAAVASWRGHPMFLGKDDIQLGVNESLYDTSKVISSMTSCMVARVGPHSDVADLARDSSVPVINALSDDFHPLQAIADFQTIHEAFAPSPPTRPASDSRHEGRLGRRSNNVLFDMATAASCWASTLPSPRPPATDSRPHEADHPQRRRGLAKPGKLIETTVPEEAVKDADILVTDTWVSMGQEAETQRRLKDCLPASKITNELAKRGGAKPGWKFMHCLPRHPEEVDDEVFYGPQSLVFPEAENRLWAAVSALEAFVVNNGRIL

SEQ ID NO: 65067 - DNA, 1323 bp, Canavalia lineata
  CDS (7)..(1086)
gacgaaatggctgccatctcatgtcactgttactgtactgttaggggatcagacaaaccctacctctccggtcagaatctccgccgtcgcactcctctccctgccgtttctgtttcatttcgacgccgaatatcgtgcatcgccacttccgctgcacctcaaaaggttgggcagaaaaattttcttcacttagatgattttgataaggacactattttgaagatgttggatcgagcccttgaggtcaagtcattgctaaagtcaggggacaggacatttcgacccttcgaagggaaaacaatgtcaatgatatttacaaagccatccatgaggactagagtttcgttcgagactggctttactttgttaggtggccatgctatatatttaggacctgatgatattcaaatgggcaagcgagaggaaactcgtgatgttgctcgtgttttgtcccgctacaacgacatcattatggctcgtgtttttgctcatcaggacatacttgatcttgctaagtatgcaactgtgccagtcatcaatgggttgacagactacaaccatccctgccagataatggctgatgcccttactatgattgagcacattggtcggtttgaaggtacaaaggttgtctatgttggagatggaaataatattgttcactcgtggttgttgatggcatctgtaattccatttcactttgtttgtgcctgtccgaaaggatttgaacctgatgcaaaaacagttgagaaggcaaggaaggctggaatcagcaagattgagataactaatgatcccaaagaggctgttaaaggggctgacgttgtgtattcagatgtctgggctagtatggggcaaaaagaagaagctgcacatcgccgtgaagtgtttaaaggatttcaggtggaccacaatcttatgaatatagctggttcaaaggcgtttttcatgcattgtctaccagctgaaagaggggtggaggtgactgacgaagttgttgaagcttcaaattcaatagtcttcccgcaagctgagaatcgaatgcatgcacagaatgccgtaatgctccatgtacttggcaagtagatggttggacggtcatgtgaggttgcaatattattagtgtacactcgcaataacttattaggccttcagctagagtacacttggaacagttgatttttggctttcagcaggatgttcgatcgattaagttagaattttgagttggcctaaattattactagctattgaagaacatcaaaatcgtataaaattgctagtattaaatttaaaaaaaaaaaaaaaaaaaaaaaaaaaaaa

SEQ ID NO: 65068 - protein, 359 aa, Canavalia lineata
MAAISCHCYCTVRGSDKPYLSGQNLRRRTPLPAVSVSFRRRISCIATSAAPQKVGQKNFLHLDDFDKDTILKMLDRALEVKSLLKSGDRTFRPFEGKTMSMIFTKPSMRTRVSFETGFTLLGGHAIYLGPDDIQMGKREETRDVARVLSRYNDIIMARVFAHQDILDLAKYATVPVINGLTDYNHPCQIMADALTMIEHIGRFEGTKVVYVGDGNNIVHSWLLMASVIPFHFVCACPKGFEPDAKTVEKARKAGISKIEITNDPKEAVKGADVVYSDVWASMGQKEEAAHRREVFKGFQVDHNLMNIAGSKAFFMHCLPAERGVEVTDEVVEASNSIVFPQAENRMHAQNAVMLHVLGK

SEQ ID NO: 65069 - DNA, 1433 bp, Canavalia lineata
  CDS (6)..(1115)
gagaaatggcatcaatctcttccaacttttcatcaattcgaacggacaaagcttctctttcctctgcgttcttccgctcttcttccgttcccattctccgccaatctcatactttccctcgcaatatttctcacttcacactcacagtttcgtgccgtgcctcttccgttcaatcttctccggtcaccgcaaaaacggaggtgaaggattttcttcacataaatgatttcgataagaagagtatttttaagattctagatcgtgctattgaggtgaaggcattaataaaatcaggggatagggcatttcaaccatttaaagggaaaacaatggcaatggtgttttgcaagccatcgttgagaacacatgtttcatttgagactgggttcacactgttaggtggacatgctgtgtatttagcacctactgatattcaaatgggcacaagagaagagactcgtgacgttgctcgcattttgtctcgttttactgacataatcatggctcgggtctttagtcatcaggacatacttgttctttcaaagtatggaagtgtgccagtggttaatggattaacagactacaaccatccctgccaagtaatggctgatgccatcactataattgagcacattggtaagctggagggaaccaagattgcgtatgttggagatgggaataatgttgtgcactcatggttggagatggcaagtttggttcctattcaatttgtgtgtgcgagtccaaaggggtttgagccagataagaaaacggttgagaaggcaaagcaggccgggctcagcaagattgtgataactaatgatccaaaagaagctgttaaaggagctgatattgtttatacggatgtttgggccagtatgggccaaaaggaagaggctgatagacgcctagcatcatttaaaggattccaggtggatcaaagtcttatggatcttgctgggtcaaaagcgttatttatgcattgcttaccagcggaaaaagggacggaggtgaccgaggatgttattgaaggtccaagatcaattatctttgaccaagctgagaaccgattgcatgcacaaaatgccataatgctccatgtgcttggcaagtaacttgttagcgtcgtggaataacactcttgcttcgtccagtttgtcatttacaattgccgttttgagcttgctctgtatccaagctgcttatgcgttttatgtaaacgcaaatcctttagtttccttgtcgtactactattggtgttttcttttttctcctttttgggtcgtattgtcatttgtcaactattggggtcatcttcaggtatgtttgggcaatttgcatgatcaagtcttttgctgtttaaaattggattggaccaattaattgatgcacccaaaaatcgttgaaaaaaaaaaaaaaaaaaaaaaaaaaaa

SEQ ID NO: 65070 - protein, 369 aa, Canavalia lineata
MASISSNFSSIRTDKASLSSAFFRSSSVPILRQSHTFPRNISHFTLTVSCRASSVQSSPVTAKTEVKDFLHINDFDKKSIFKILDRAIEVKALIKSGDRAFQPFKGKTMAMVFCKPSLRTHVSFETGFTLLGGHAVYLAPTDIQMGTREETRDVARILSRFTDIIMARVFSHQDILVLSKYGSVPVVNGLTDYNHPCQVMADAITIIEHIGKLEGTKIAYVGDGNNVVHSWLEMASLVPIQFVCASPKGFEPDKKTVEKAKQAGLSKIVITNDPKEAVKGADIVYTDVWASMGQKEEADRRLASFKGFQVDQSLMDLAGSKALFMHCLPAEKGTEVTEDVIEGPRSIIFDQAENRLHAQNAIMLHVLGK

SEQ ID NO: 65071 - DNA, 1005 bp, Escherichia coli
  CDS (1)..(1005): transl_table=11
atgtccgatttatacaaaaaacactttctgaaactgctcgactttacccctgcacagttcacttctctgctgacccttgccgcacagctcaaagccgataaaaaaaatggcaaggaagtacagaagcttaccggtaaaaacatcgcgctcatcttcgaaaaagactcgactcgtacccgttgctctttcgaagttgccgcatttgaccagggcgcgcgcgttacctatttagggccgagcggcagccagattgggcataaagagtcaattaaggacaccgcgcgggttctcgggcggatgtatgacggcattcagtatcgcggtcacggccaggaagtggtcgaaacgctggcgcagtatgcgggcgtgccggtgtggaacgggctgaccaacgagttccacccgacccagctgctggcggacctgatgaccatgcaggagcacctgccgggcaaggcgtttaacgagatgacgctggtctacgcgggcgatgcgcgcaacaacatgggcaactcgatgctggaagcggcggcgctgaccgggctggatctgcgcctgttggccccgaaagcctgctggccggaagagagcctggtggcggagtgcagcgcgctggcggagaagcacggcgggaaaattactctgacggaagacgtggcggcaggcgttaagggcgcggactttatctataccgacgtgtgggtgtcgatgggcgaggccaaagagaagtgggcagagcggattgcgctgctgcgcgggtatcaggtgaacgcgcagatgatggcgctgaccgacaacccgaacgtgaagttcctgcactgtctgccggcgttccatgacgaccagactacgctcggcaagcagatggcgaaggagttcgatctgcacggcgggatggaggtgacggacgaggtgtttgagtcggcggcgagcatcgtgttcgaccaggcggaaaaccggatgcatacgattaaggcggtgatgatggcaacgcttggggagtga

SEQ ID NO: 65072 - protein, 334 aa, Escherichia coli
MSDLYKKHFLKLLDFTPAQFTSLLTLAAQLKADKKNGKEVQKLTGKNIALIFEKDSTRTRCSFEVAAFDQGARVTYLGPSGSQIGHKESIKDTARVLGRMYDGIQYRGHGQEVVETLAQYAGVPVWNGLTNEFHPTQLLADLMTMQEHLPGKAFNEMTLVYAGDARNNMGNSMLEAAALTGLDLRLLAPKACWPEESLVAECSALAEKHGGKITLTEDVAAGVKGADFIYTDVWVSMGEAKEKWAERIALLRGYQVNAQMMALTDNPNVKFLHCLPAFHDDQTTLGKQMAKEFDLHGGMEVTDEVFESAASIVFDQAENRMHTIKAVMMATLGE

SEQ ID NO: 65073 - DNA, 1011 bp, Photobacterium profundum
  CDS (1)..(1011): transl_table=11
atggcttttaatcttcgcaaccgtaacttcctaaaattactagactttactccacgtgaaattcaacacatgctagaactagcagctgagttgaaaaaagcgaagtacaacggttacgagcagcctcgcctaaagggtaagaacattgcgcttatctttgaaaaagcgtcaactcgtactcgttgtgcatttgaagtcgctgcatatgaccaaggcgctaacgtaacttacttgggcccatctggttctcaaatcggttacaaagagtcaatgaaagatactgcacgcgttcttggccgtatgtacgatggcattgaataccgtggcttcggtcaagagatcgttgaaacactaggcgctcacgctggtgttccagtatggaatggtctaactgacgaattccacccaactcaaatcctagctgatttccttactatgcaagaacacgcacgtggtaagcaactaagtgaagtcactttcgcatacctaggtgacgctcgcaacaacatgggtaactctctaatggtaggtgctgcgaaaatgggcatggacatccgccttgttgctcctaaagcattctggcctgaagaagagttagtcgcacaatgtcgtgaaatcgctgaagaaactggtgctaaaatcacagtaactgaagacgttcaagaaggcgttgaaggttgtgatttcctatacactgatgtttgggtatcaatgggcgaagcgaaagaagcatgggctgagcgtatcagcctaatgatgccttaccaagtaaacatggcgatgcttaaagcaactggcaacccacatgtgaaattcatgcactgcctaccagcattccacggtgaagacactgttgttggtaaagagcttgctcaagaatacccagaactaaaagacggcgttgaagtaactgacgaagtggttgagtctaagcactctatcgtattcgacgaagctgaaaaccgcctacacactatcaaagcaattatggtagcaacattaggtcaataa

SEQ ID NO: 65074 - protein, 336 aa, Photobacterium profundum
MAFNLRNRNFLKLLDFTPREIQHMLELAAELKKAKYNGYEQPRLKGKNIALIFEKASTRTRCAFEVAAYDQGANVTYLGPSGSQIGYKESMKDTARVLGRMYDGIEYRGFGQEIVETLGAHAGVPVWNGLTDEFHPTQILADFLTMQEHARGKQLSEVTFAYLGDARNNMGNSLMVGAAKMGMDIRLVAPKAFWPEEELVAQCREIAEETGAKITVTEDVQEGVEGCDFLYTDVWVSMGEAKEAWAERISLMMPYQVNMAMLKATGNPHVKFMHCLPAFHGEDTVVGKELAQEYPELKDGVEVTDEVVESKHSIVFDEAENRLHTIKAIMVATLGQ

SEQ ID NO: 65075 - DNA, 1130 bp, Pseudomonas aeruginosa
  CDS (64)..(1074): transl_table=11
ctcgagctgaacgggcgtccccaggaggggcgccgccaccgacttcccacaaggagatcaatcatggctttcaacatgcacaaccgtaacctgctcagcctgatgcaccacagcacccgcgagctgcgttacctgctcgacctgtcccgcgacctcaagcgcgccaagtacaccggcaccgagcagcagcacctgaagcgcaagaacattgccctgatcttcgagaaaacctccactcgcacccgctgcgccttcgaggtggccgcctacgaccagggcgccaacgtcacctacatcgacccgaactcctcgcagatcggccacaaggagagcatgaaggacaccgcgcgggttctcggccggatgtacgacgccatcgagtaccgcggcttcaagcaggaaatcgtcgaggaactcgcgaagttcgccggcgttccggtgttcaacggcctgaccgacgaataccacccgacccagatgctcgccgacgtgctgaccatgcgcgagcacagcgacaagccgctgcacgacatcagctacgcctacctgggcgacgcgcgcaacaacatgggcaactccctgctgctgatcggcgccaagctcggcatggacgtacgcatcgccgcaccgaaggcgctctggccgcacgacgagttcgtcgcccagtgcaagaagttcgccgaggaaagcggcgccaagctgaccctcaccgaggatccgaaggaagccgtgaagggcgtggacttcgtccacaccgacgtctgggtgtcgatgggcgagccggtggaagcctggggcgagcggatcaaggaactgctgccctaccaggtcaacatggagatcatgaaggccaccggcaacccgcgggccaagttcatgcactgcctgccggcgttccacaacagcgagaccaaggtcggcaagcagatcgccgagcagtatccgaacctggccaacggcatcgaggtgaccgaggacgtcttcgagtcgccctacaacatcgccttcgagcaggccgagaaccgcatgcataccatcaaggcgatcctcgtctcgaccctcgccgacatctgaccgcgctcctgcgcccggcccacgcggccgggcgcagccgccttccggaggtaacc

SEQ ID NO: 65076 - protein, 336 aa, Pseudomonas aeruginosa
MAFNMHNRNLLSLMHHSTRELRYLLDLSRDLKRAKYTGTEQQHLKRKNIALIFEKTSTRTRCAFEVAAYDQGANVTYIDPNSSQIGHKESMKDTARVLGRMYDAIEYRGFKQEIVEELAKFAGVPVFNGLTDEYHPTQMLADVLTMREHSDKPLHDISYAYLGDARNNMGNSLLLIGAKLGMDVRIAAPKALWPHDEFVAQCKKFAEESGAKLTLTEDPKEAVKGVDFVHTDVWVSMGEPVEAWGERIKELLPYQVNMEIMKATGNPRAKFMHCLPAFHNSETKVGKQIAEQYPNLANGIEVTEDVFESPYNIAFEQAENRMHTIKAILVSTLADI

SEQ ID NO: 65077 - DNA, 1011 bp, Pseudomonas putida
  CDS (1)..(1011): transl_table=11
atggcgttcaacattcacaaccgcaacttgctcagcctggaacaccacaccacccgtgagttgcgctacctgctggacctgtcccgcgacctcaagcgcgccaagtacacgggcaccgagcagcagcacctgaagggcaacaacatcgccctgatcttcgaaaaaacctccacccgtacccgttgtgccttcgaagtcgcagcctatgaccaaggcgccaacgtcacctacatcgaccccaactcctcgcagatcggccacaaggaaagcatgaaggacaccgcccgtgtgctcgggcgcatgtatgacgccatcgagtaccgtggcttcaagcaggaaatcgtcgaagagctggccaagttcgccggcgtaccggtgttcaacggcctgaccgacgaataccacccgacccagatgatcgccgacgtgctgaccatgcgtgagcacagcgacaagccgctgcacgacatcagctacgcctacctgggcgatgcccgcaacaacatgggcaactcgctgctgctgatcggcgccaagctgggcatggatgtgcgcatcgccgcgcccaaggcactgtggccacatgacgacctggtcgagcgctgcaagcagtacgctgaagaaagcggcgcacgcattaccctcaccgaagacccgaaagccgcggtcaagggtgtcgactttgtgcataccgacgtgtgggtatcgatgggcgagccgatcgaagcctggggtgagcgcatcaagcagctcaagccttatcaggtgaatgccgaactgatgaagtccaccggtaacccacggaccaagttcatgcactgcctgccggcattccacaactccgaaaccaaggtaggcaagcagatcgccgaacaatacccggacctggccaacggcatcgaagtgaccgatgacgtgttcgagtcgccagcgtgcatcgccttcgagcaggcggaaaaccgcatgcacacgatcaaggcgatcctggtatcgaccctggctgatctataa

SEQ ID NO: 65078 - protein, 336 aa, Pseudomonas putida
MAFNIHNRNLLSLEHHTTRELRYLLDLSRDLKRAKYTGTEQQHLKGNNIALIFEKTSTRTRCAFEVAAYDQGANVTYIDPNSSQIGHKESMKDTARVLGRMYDAIEYRGFKQEIVEELAKFAGVPVFNGLTDEYHPTQMIADVLTMREHSDKPLHDISYAYLGDARNNMGNSLLLIGAKLGMDVRIAAPKALWPHDDLVERCKQYAEESGARITLTEDPKAAVKGVDFVHTDVWVSMGEPIEAWGERIKQLKPYQVNAELMKSTGNPRTKFMHCLPAFHNSETKVGKQIAEQYPDLANGIEVTDDVFESPACIAFEQAENRMHTIKAILVSTLADL

SEQ ID NO: 65079 - DNA, 1011 bp, Staphylococcus aureus
  CDS (1)..(1011): transl_table=11
atgacagaaattcaaaaaccgtatgatttaaaaggcagatcattattaaaagaaagtgattttaccaaagcagaattcgaaggacttattgattttgcaattacattaaaagagtataagaaaaatggtatcaagcatcactacttatctggaaaaaatattgcactactattcgaaaagaattcgacgagaacgcgtgcagcgtttacagttgcgtctattgatttaggtgcgcatccagaatttttagggaaaaatgatattcaattaggcaaaaaagaatctgtagaggatactgcgaaagtattaggtagaatgttcgatggtattgaattccgtggtttttcacaacaagctgttgaagatttagcgaagttctctggtgtaccggtgtggaatggattaacagacgattggcatcctacacaaatgttagctgattttatgacaataaaagagaattttggatatctggaaggaataaacttaacttacgttggagatggacgtaataatattgcgcattcattaatggtagcaggtgctatgttaggtgttaatgtaagaatttgtacacctaaatcattaaatccaaaagatgcatatgttgatattgcaaaagaaaaagcgagtcaatatggtggttcagtcatgattacggataatattgcagaagcagttgaaaatacagatgctatatatacagatgtttgggtatcgatgggtgaagaaagtgaatttgaacaacgtattaatttattaaaagactatcaagtgaatcaacagttgtttgatttaacaggtaaagattcaacgatattcttacattgtttaccagcattccatgatacaaatacactttatggacaagaaatttatgaaaaatatggattagctgaaatggaagttacagaccaaatctttagaagtgaacattcaaaagtgtttgatcaagctgaaaatagaatgcatacaattaaggcagtaatggcagcaacattggggagttaa

SEQ ID NO: 65080 - protein, 336 aa, Staphylococcus aureus
MTEIQKPYDLKGRSLLKESDFTKAEFEGLIDFAITLKEYKKNGIKHHYLSGKNIALLFEKNSTRTRAAFTVASIDLGAHPEFLGKNDIQLGKKESVEDTAKVLGRMFDGIEFRGFSQQAVEDLAKFSGVPVWNGLTDDWHPTQMLADFMTIKENFGYLEGINLTYVGDGRNNIAHSLMVAGAMLGVNVRICTPKSLNPKDAYVDIAKEKASQYGGSVMITDNIAEAVENTDAIYTDVWVSMGEESEFEQRINLLKDYQVNQQLFDLTGKDSTIFLHCLPAFHDTNTLYGQEIYEKYGLAEMEVTDQIFRSEHSKVFDQAENRMHTIKAVMAATLGS

SEQ ID NO: 65081 - DNA, 1014 bp, Streptococcus agalactiae
  CDS (1)..(1014): transl_table=11
  misc_feature (576)..(576): y is t or c
  misc_feature (579)..(579): w is a or t
atgacacaagtatttcaaggacgtagtttcttagcagaaaaagatttttctcgtgaggaatttgaatatcttattgatttttcagctcatttaaaagaccttaaaaaacgtggtgttcctcatcattatcttgaaggtaaaaatattgctctcttatttgaaaaaacatctactcgtactcgcgcagcctttacaactgcagcaattgacctaggcgctcatccggaataccttggtgcaaatgatattcaacttggtaaaaaagaatcaacagaagatactgctaaggttttaggacgtatgtttgatggtattgaattccgtggttttagccaaagaatggttgaagagcttgctgaattttctggagtacctgtctggaatggtttaacagatgaatggcatccaacacaaatgctagctgactaccttactatcaaagaaaacttcggtaaacttgaaggtattactcttgtttactgtggtgacggacgtaacaatgttgccaactcgcttttagtggctgggactttgatgggggtcaatgtacacatcttttctccaaaagaacttttyccwgctgaagagattgttaaattggctgaaggatatgccaaagaatctggggctcacgttctcgttactgataatgtagacgaagctgtaaagggagcagacgtcttttacactgatgtctgggtatcgatgggagaagaagataagttcaaagaacgcgttgaacttcttcaaccatatcaagtaaacatggaactgattaaaaaagctaataatgataatcttatcttcttacactgcttacctgcattccatgatacaaataccgtttatggcaaagacgtcgctgaaaaatttggggtcaaggaaatggaagttactgatgaagtcttccgtagcaaatatgctcgtcatttcgaccaagctgaaaatcgtatgcacactattaaagctgtaatggctgcaacccttggaaatcttttcattccaaaagtttaa

SEQ ID NO: 65082 - protein, 337 aa, Streptococcus agalactiae
MTQVFQGRSFLAEKDFSREEFEYLIDFSAHLKDLKKRGVPHHYLEGKNIALLFEKTSTRTRAAFTTAAIDLGAHPEYLGANDIQLGKKESTEDTAKVLGRMFDGIEFRGFSQRMVEELAEFSGVPVWNGLTDEWHPTQMLADYLTIKENFGKLEGITLVYCGDGRNNVANSLLVAGTLMGVNVHIFSPKELFPAEEIVKLAEGYAKESGAHVLVTDNVDEAVKGADVFYTDVWVSMGEEDKFKERVELLQPYQVNMELIKKANNDNLIFLHCLPAFHDTNTVYGKDVAEKFGVKEMEVTDEVFRSKYARHFDQAENRMHTIKAVMAATLGNLFIPKV

SEQ ID NO: 65083 - DNA, 1017 bp, Streptococcus gordonii Challis
  CDS (1)..(1017): transl_table=11
atgacaaattcagtattccaaggacgtagcttccttgcagaaaaagactttacccgtgcagagttagaataccttattggtctttcagctcacttgaaagatttgaaaaaacgtaacattgagcaccgttaccttgctggtaaaaatatcgctctcttgtttgaaaaaacatctactcgtacgcgtgcagcctttactacagcagctatcgaccttggcgcacatccagaatatcttggtgctaatgatattcagcttggtaaaaaggaatcaactgaagatacagctaaagttttgggccgtatgtttgatggtattgaattccgtggtttcagccaacgtatggttgaagaattggcagaattctcaggtgttccagtttggaatggtttgactgacgaatggcacccaactcaaatgttagctgactacttgacagttcaagaaaactttggtcgcttagaaggcttgacattggtatactgtggtgacggacgtaacaacgttgctaatagcttactagtgactggtgcaattcttggtgttaatgttcacatcttctctccaaaagaactcttcccagaacaagaaattgttgaattggcagaaggatttgcgaaagaaagtggcgctcacatcttaatcactgaagatgctgacgaagctgtgaaaggtgctgatgtactttacactgacgtttgggtatcaatgggtgaagaagacaaatttgcagaacgtgttgctcttttgaaaccataccaagtaaacatggatttggttaagaaagctgataacgaagacttgatcttcttgcactgcttgcctgctttccacgacacaaatactgtttatggtaaggatgttgctgaaaaatttggcgtagaagaaatggaagtaactgacgaagtattccgcagtaaatatgctcgtcatttcgaccaagcagaaaaccgtatgcatacaattaaagcagttatggctgcaactttaggtaatctttacattccaaaagtataa

SEQ ID NO: 65084 - protein, 338 aa, Streptococcus gordonii Challis
MTNSVFQGRSFLAEKDFTRAELEYLIGLSAHLKDLKKRNIEHRYLAGKNIALLFEKTSTRTRAAFTTAAIDLGAHPEYLGANDIQLGKKESTEDTAKVLGRMFDGIEFRGFSQRMVEELAEFSGVPVWNGLTDEWHPTQMLADYLTVQENFGRLEGLTLVYCGDGRNNVANSLLVTGAILGVNVHIFSPKELFPEQEIVELAEGFAKESGAHILITEDADEAVKGADVLYTDVWVSMGEEDKFAERVALLKPYQVNMDLVKKADNEDLIFLHCLPAFHDTNTVYGKDVAEKFGVEEMEVTDEVFRSKYARHFDQAENRMHTIKAVMAATLGNLYIPKV

SEQ ID NO: 65085 - DNA, 918 bp, Thermoplasma volcanium
  CDS (1)..(918): transl_table=11
atggcaaagagggacattctttcagtactcgatatgaagaatgacctggatgaaataatcaatctctccatagagcttaagaagaaccggtacaggtcatacgaaagcctaaggaacaaaatgctaggtcttatattcgaaaagcccagtactcgaactagaacttcattggaggttgcaatagaccagttgggcggccatgcagtatacttgaatccgtctgagatgcagctaggccgtggtgaaaccatatctgatacaggacacgtactgtcaaggtttctcgatgctatagcgtacagggccttcgatcacaaaaacgttgtcgaactagccagaagcacaagcatacccgtaataaatgcccttgacgatgttgaacaccccctgcagatagtagccgatttcatgacggtaaaggaaaaaaagggtaaatttagcggcttaaagttctcttacataggggacgggaacaatatggccaattcgcttatgcttggagctgccattcttggtgtcgacatttacgttgcaacgccccacgggtatgagccaaaaagcgagtttgttgataaggcaaaacaggttgctaaagaaagaggcagtaaagtgataattacaaacgatgcaatcgaagctgcaaaggatgccgatgtcatatacactgatgtgtggatatccatgggtgaagaatctaagagaggagagaaagaaaaggcgttcacgaaataccagataaactctgacttagtctctaatgccaagaaagactacatatttatgcattgcttgccggcccaccgtggcttagaagtaacagatgatgttgctgacagcataaacagcgttatattcgacgaagctgagaacaggcttcactctgagaagggagtactttacaagctactctcctactaa

SEQ ID NO: 65086 - protein, 305 aa, Thermoplasma volcanium
MAKRDILSVLDMKNDLDEIINLSIELKKNRYRSYESLRNKMLGLIFEKPSTRTRTSLEVAIDQLGGHAVYLNPSEMQLGRGETISDTGHVLSRFLDAIAYRAFDHKNVVELARSTSIPVINALDDVEHPLQIVADFMTVKEKKGKFSGLKFSYIGDGNNMANSLMLGAAILGVDIYVATPHGYEPKSEFVDKAKQVAKERGSKVIITNDAIEAAKDADVIYTDVWISMGEESKRGEKEKAFTKYQINSDLVSNAKKDYIFMHCLPAHRGLEVTDDVADSINSVIFDEAENRLHSEKGVLYKLLSY

SEQ ID NO: 65087 - DNA, 1017 bp, Treponema denticola
  CDS (1)..(1017): transl_table=11
atgcttaaagaaattcgcggaaagagcgcaaaaaacttgcgcggaagaagctttctaaaattgttggattttactacagacgaaatccgctatttacttgacctttcaaaaaattttaaagacatgaaaagggccggaattcctcacagatacctagaaggaaaaaacatcgttcttctttttgaaaaaacctctacaagaacacgatgctcttttgaagttgcaggttatgaccttggaatgggcgttacctaccttgatcccaattcttcacagatgggacataaagaatctatcgaagacacagcccgtgttttaggcagaatgtatgacggtatcgagtacagaggcttcagccaagagcttgtagaaacattggccgaatattccggtgttcccgtatggaacggattaaccgaccttttccacccgactcaaatgcttgcagaccttcttacaatcgaagaaaaattcggctatttgaaaggacttaaatttacatacatgggagatgcacgaaacaacgtagccaactccctcatgatagcctgcgtaaaaatgggaatgcactttacggcatgttcacccaagcacctcttccccactgaagacttggtagccgaagcaaagaaaatagctgcccaaacaggcggaagcgtaacccttaccgaaaacgtaagcgaaggcacaaaaggcgctcatgttctttataccgacatttgggtatctatgggagaacccgacagcgtatgggaagaacgcattaagctcttaaagccctatcaggtaaacaaggccgctatggacaatgcagacaaggatgcaatcttcttgcactgcctcccctccttccatgacttaaagacaactaagggtcaggagattaacaaaaagttcggtcttcccgaaatggaagttacaaacgaggtttttgaatctcataaatcagttgtttttgatgaagccgaaaaccgcatgcatacaatcaaggctgttatgtatgccacaatgtgctaa

SEQ ID NO: 65088 - protein, 338 aa, Treponema denticola
MLKEIRGKSAKNLRGRSFLKLLDFTTDEIRYLLDLSKNFKDMKRAGIPHRYLEGKNIVLLFEKTSTRTRCSFEVAGYDLGMGVTYLDPNSSQMGHKESIEDTARVLGRMYDGIEYRGFSQELVETLAEYSGVPVWNGLTDLFHPTQMLADLLTIEEKFGYLKGLKFTYMGDARNNVANSLMIACVKMGMHFTACSPKHLFPTEDLVAEAKKIAAQTGGSVTLTENVSEGTKGAHVLYTDIWVSMGEPDSVWEERIKLLKPYQVNKAAMDNADKDAIFLHCLPSFHDLKTTKGQEINKKFGLPEMEVTNEVFESHKSVVFDEAENRMHTIKAVMYATMC

SEQ ID NO: 65089 - DNA, 918 bp, Agrobacterium tumefaciens
  CDS (1)..(918): transl_table=11
atggcttcacctaaacattttctcgacctgtcggccgttggcccgcaggacctgcggacaattcttgacgatgcgcgcgcgcgcaaggtcgccacgaaggcgggaacggcggaaaagccgctggccggcaagatgctggccatgatcttcgaaaagccgtccacccgcacccgcgtttccttcgatgtgggcatgcgccagctcggcggcgagacccttttcctgtcgggcactgaaatgcagctcggtcgtgcggaaacgatcggcgataccgccaaggtgctgtcgcgttatgtggatgccatcatgatccgtaccacggatcattcgcgcctgctcgagcttgccgaacacgcgacggtgcctgttatcaacggcctgaccgatgatacccatccctgccagatcatggccgacatcatgacgttcgaggaacatcgtggtccggtcaaaggcaagaccattgcctggacgggcgacggcaacaacgtgctgcactctttcgtcgagggctccgcacgtttcggttaccgcatgacgatggcggtgccgatgggttccgaaccgcatgacaagttcatgaactgggcccgcaacaatggcggcgagatcgcgctgtatcatgatgcggacaaggcggtcgcgggtgcggattgtgtcgtcaccgatacctgggtgtccatgaaccaggagcacaaggcgcgcggccacaacatcttccagccctatcaggtcaatgaggccctgatggccaaggcgcagaaggacgcgctgttcatgcactgcctgccggcgcatcgcggtgaagaagtgacggacgccgtgatcgacggcccgcaatcggtggtcttcgatgaggcggagaaccgtctccacgcgcagaaatccgtcatcgcatggtgcatgggcgtgatctga

SEQ ID NO: 65090 - protein, 305 aa, Agrobacterium tumefaciens
MASPKHFLDLSAVGPQDLRTILDDARARKVATKAGTAEKPLAGKMLAMIFEKPSTRTRVSFDVGMRQLGGETLFLSGTEMQLGRAETIGDTAKVLSRYVDAIMIRTTDHSRLLELAEHATVPVINGLTDDTHPCQIMADIMTFEEHRGPVKGKTIAWTGDGNNVLHSFVEGSARFGYRMTMAVPMGSEPHDKFMNWARNNGGEIALYHDADKAVAGADCVVTDTWVSMNQEHKARGHNIFQPYQVNEALMAKAQKDALFMHCLPAHRGEEVTDAVIDGPQSVVFDEAENRLHAQKSVIAWCMGVI

SEQ ID NO: 65091 - DNA, 1128 bp, Arabidopsis thaliana
  CDS (1)..(1128)
atggcggctgcaatggcttctcatgtttcgacggctcgatcaccggctctttccttctcttcttcgtcttcctccttcttccccggtactactcttcggagattctccgccgtttcactcccttctcctgctctccctcgccttcgtgtttcatgtcaagcctcctccgtcacttcgccttcttctccttccgatgtcaaaggaaaatctgacctgaaagactttctggcaatagatgattttgacacagccaccattaaaacgattttagacaaggcttcagaggttaaggccttgctgaaatcaggggagagaaattatctaccttttaaagggaagtctatgtctatgatctttgcaaaaccttccatgaggactcgggtttcgtttgagactggttttttcttgctcggtggccatgcgttatatctaggtcccaatgacattcagatgggtaagcgggaggaaactcgtgatgttgctcgtgttctttcacgctataatgacatcattatggctcgtgtatttgctcatcaggacattcttgatttggctaactactcgagtgtaccagttgtcaatggtctgactgatcataaccatccttgccaaatcatggccgatgccctcacaatgatagagcacattggtcaagttgaagggacaaaggttgtgtatgttggagatgggaacaacatggttcactcttggttagaattggcatccgttattccattccactttgtctgcgcttgcccaaaagggtatgaaccagacaaagaaagagtttcaaaggcaaagcaagctggattaagtaagatagagatcaccaatgatcctaaagaagctgttattggagcagatgttgtgtactcagacgtatgggccagtatgggtcaaaaggatgaagccgaagctcgccggaaagcattccaaggattccaggtggatgaagctctgatgaagttggcgggtcaaaaagcctatttcatgcattgtttgcctgcagagagaggagttgaggtgaccaatggagtcgtagaggctccttattccattgtctttccacaggcggagaatcgcatgcatgctcaaaatgctataatgcttcacttgctcggcttttaa

SEQ ID NO: 65092 - protein, 375 aa, Arabidopsis thaliana
MAAAMASHVSTARSPALSFSSSSSSFFPGTTLRRFSAVSLPSPALPRLRVSCQASSVTSPSSPSDVKGKSDLKDFLAIDDFDTATIKTILDKASEVKALLKSGERNYLPFKGKSMSMIFAKPSMRTRVSFETGFFLLGGHALYLGPNDIQMGKREETRDVARVLSRYNDIIMARVFAHQDILDLANYSSVPVVNGLTDHNHPCQIMADALTMIEHIGQVEGTKVVYVGDGNNMVHSWLELASVIPFHFVCACPKGYEPDKERVSKAKQAGLSKIEITNDPKEAVIGADVVYSDVWASMGQKDEAEARRKAFQGFQVDEALMKLAGQKAYFMHCLPAERGVEVTNGVVEAPYSIVFPQAENRMHAQNAIMLHLLGF

SEQ ID NO: 65093 - DNA, 924 bp, Archaeoglobus fulgidus
  CDS (1)..(924): transl_table=11
atgaagcatcttctttcgatggctgacctcgaaaaggatgagcttttcgagatactcaagcttgccgagaagctaaaggaggaaaggtacaagggcgttgttaccgattacctgaaaaacaaaagcctcgcaatgatcttcgaacttccttcaacgagaacaagagtatcttttgaggttgctatgaccgacttgggcggccacgcgctctacctcgggtgggacgaacttcagctcggcagaggggagccgataaaggacacagcgagagttctcagcagatacgttcatgcggtaatgatgagggttagggagcacagcaccatcgaggagtttgccagatactcaacagttccagttatcaacggtctgagcaaccttgagcatccgtgccaggttattgcggatttgctgacgatttacgagtacagaggggacttcaaggacgtcactctcgcatgggttggggatggaaacaacgtctgcaactccatgattctcgccgctgcgctaaccggaatgaagatggtcatctcaacacctgaaaactacgacccaaatcccgagattgttaagaaagccgaggaaatgggtgcaaagctgcggttcgtgagagacccgaaggaggctgttaaggaggcggatgtgatttacaccgacgtctggacgtcgatgggtcaggaggccgagaaggaggctaggctaaaggcgtttcagccgtatcaggtttcagatgagctgctcaagttctcaaaggatgatgtcgtcgttatgcactgcttaccagcacacagaggggaggagattacggatgaggtgatggaaggtaagcactccatcgtgtttgatcaggctgaaaacagattgcacgcccagaaggcaatactgcttaagctgctcgggaaggagagcgaggtttactga

SEQ ID NO: 65094 - protein, 307 aa, Archaeoglobus fulgidus
MKHLLSMADLEKDELFEILKLAEKLKEERYKGVVTDYLKNKSLAMIFELPSTRTRVSFEVAMTDLGGHALYLGWDELQLGRGEPIKDTARVLSRYVHAVMMRVREHSTIEEFARYSTVPVINGLSNLEHPCQVIADLLTIYEYRGDFKDVTLAWVGDGNNVCNSMILAAALTGMKMVISTPENYDPNPEIVKKAEEMGAKLRFVRDPKEAVKEADVIYTDVWTSMGQEAEKEARLKAFQPYQVSDELLKFSKDDVVVMHCLPAHRGEEITDEVMEGKHSIVFDQAENRLHAQKAILLKLLGKESEVY

SEQ ID NO: 65095 - DNA, 1113 bp, Aspergillus niger
  CDS (1)..(1113)
atgccctcccccctccgcacagcgccgcagccgccgctacgggccttccacaacccgccagccctgcgccgcctctactcctccaccagtcactccgccgcaacgccggcaacttctcccttcgcaccgcggcacctgctctccatcgccgacctgaccccaaccgaattcgcaaccctcgtccgcaatgcctcctcccacaagcgggccatcaaatccggctccatcccccaatccctccacggcgccctctccggcaagaccgtcgccatgatgttcagcaagcgcagcacccgcacccgcatttccaccgaaggcgccgtcgtccaaatgggcggccaccccatgttcctcggcaaggacgacatccagctgggagtcaatgaatccctctacgacactgccgtggtcgtctcctccatggtggaatgtatcgttgcccgcgtgggcaagcacgctgacgtcgccgacctcgccaagcactctactaagccggttatcaatgccctgtgtgactcgtatcacccgttgcaggctattgcggattttcagactattagtgagcatttcgctgcctcgggcaaggggaagttggagggtttggggctgaatgggttgaaaatcgcttgggtgggcgatgcgaataacgtgcttttcgatatggcgatcagtgcgaggaaaatgggcgttgatgttgctgttgctacgccgaaggggtatgagatccccaaggagatgttggagattattgagaaggctggcgagggggttaagagtcctggaaagctggtgcagaccaatgttcctgaggaggcggtgaagggggccgatgtgttggttactgatacttgggtttcgatgggccaggaggaggaggccgctaagcgtctgagggatttcgctggattccagattacgagtgagttggcgaagaggggtggggcgaaggaggggtggaggttcatgcactgtcttcctaggcacccggaggaggttgctgatgaggtgttctatggacatcggtcgttggtgttccctgaggcggagaatcgtctgtgggctgccatttcggcgttggagggatttgtcgtcaataagggcaagattgagtaa

SEQ ID NO: 65096 - protein, 370 aa, Aspergillus niger
MPSPLRTAPQPPLRAFHNPPALRRLYSSTSHSAATPATSPFAPRHLLSIADLTPTEFATLVRNASSHKRAIKSGSIPQSLHGALSGKTVAMMFSKRSTRTRISTEGAVVQMGGHPMFLGKDDIQLGVNESLYDTAVVVSSMVECIVARVGKHADVADLAKHSTKPVINALCDSYHPLQAIADFQTISEHFAASGKGKLEGLGLNGLKIAWVGDANNVLFDMAISARKMGVDVAVATPKGYEIPKEMLEIIEKAGEGVKSPGKLVQTNVPEEAVKGADVLVTDTWVSMGQEEEAAKRLRDFAGFQITSELAKRGGAKEGWRFMHCLPRHPEEVADEVFYGHRSLVFPEAENRLWAAISALEGFVVNKGKIE

SEQ ID NO: 65097 - DNA, 1086 bp, Aspergillus terreus
  CDS (1)..(1086)
atgattcccaccgctcgttgcggcgccttgcgccagaagatccccgtccaggccgtgcgccaatactcctcgtccacgaccctcaagacctctcccttcgcccctcgtcaccttctgtccattgccgacctcacgcccaccgaattcaccaccctcgtccgcaatgcctcctcgcacaaacactcaatcaagtccgggtcgatcccgaccaacctgcagggctccctggctggaaagacggtggccatgatgtttagcaaacggagtacccgcactcggatatccaccgaaggcgctactgtccagttgggcggacatcccatgttcctcggcaaggacgatatccagctcggagtgaatgaatccctgtacgacaccgccgtggtggtctcgtcaatggtgtccgccattgtggcccgcgtgggcaagcacgccgaagtggccgaccttgcaaagcactcgaccgtccccgtcatcaatgccctctgtgattcgttccacccgctccaggccattgccgatttccagaccatctacgagaccttcacccccaaggcccatcatctgtccagcctgggtctggagggcctgaagattgcctgggtcggcgatgcgaacaacgtcttgttcgacatggcgatcagcgctgcgaagatgggcgtcgacctggccgttgcaacccccaagggttatgagatcccggcctccatgcgggagctcatccaggaagccggcaagggcgtggccaaccccggaaagctcatccagaccaatgtccccgaagaggcggtgaagaaggccgatatcctggtgactgacacctgggtctcgatgggccaggaagaggaatcgctcaagcgtatgaaggcctttgaaggcttccagatcacgtcggaacttgccaagcgtggaggagccaacgagaactggaaattcatgcactgccttccccggcacccggaggaagtgagtgatgaggtcttctacagtaaccggtcgttagtcttccccgaggcggagaatcggctgtgggctgccatctctgctctggagggattcgttgtcaacaagggaaagattgcatga

SEQ ID NO: 65098 - protein, 361 aa, Aspergillus terreus
MIPTARCGALRQKIPVQAVRQYSSSTTLKTSPFAPRHLLSIADLTPTEFTTLVRNASSHKHSIKSGSIPTNLQGSLAGKTVAMMFSKRSTRTRISTEGATVQLGGHPMFLGKDDIQLGVNESLYDTAVVVSSMVSAIVARVGKHAEVADLAKHSTVPVINALCDSFHPLQAIADFQTIYETFTPKAHHLSSLGLEGLKIAWVGDANNVLFDMAISAAKMGVDLAVATPKGYEIPASMRELIQEAGKGVANPGKLIQTNVPEEAVKKADILVTDTWVSMGQEEESLKRMKAFEGFQITSELAKRGGANENWKFMHCLPRHPEEVSDEVFYSNRSLVFPEAENRLWAAISALEGFVVNKGKIA

SEQ ID NO: 65099 - DNA, 951 bp, Bacillus anthracis
  CDS (1)..(951): transl_table=11
atgtcaactgtacaagtaccgaagttaaatacgaaagatcttttaacactagaagaattaacgcaagaagaaatcatttctttaattgagttcgctatatatttaaaaaagaataagcaggagcctttattacaaggaaagatattagggcttatctttgataaacattcaactcgtactcgcgtatcttttgaagcaggaatggtacagcttgggggacatggaatgtttttaaatggaaaggagatgcaaatgggaagaggggagaccgtttcagatactgcaaaagtattgtctcattatattgacgggatcatgatacgcacattctcgcacgcggatgtagaagagcttgcaaaagaatcgagcattcctgttattaatggactaacagatgaccatcatccttgtcaagcattggcagacttaatgacaatatatgaagaaacaaatacattcaaaggaataaaattggcttacgtaggtgacggaaataatgtatgtcattcattgttgttagcgagtgcgaaagtcggaatgcatatgactgttgcaacgcctgtagggtataaaccgaatgaagagattgtaaaaaaagcgttagcgattgccaaggaaacaggagctgaaattgagattttgcataaccctgaattagcggtgaatgaagcagatttcatttatactgacgtttggatgagcatggggcaagagggagaagaagagaaatatactttattccaaccatatcaaattaataaagaacttgttaagcatgcgaaacaaacatatcatttcttacactgtttacctgcccatcgtgaagaggaagtaacaggcgagattatagatggaccacagtctatcgtttttgagcaagctggtaatcgattgcatgcgcaaaaagcattattagtaagtttatttaaaaatgtagaagagctttcctaa

SEQ ID NO: 65100 - protein, 316 aa, Bacillus anthracis
MSTVQVPKLNTKDLLTLEELTQEEIISLIEFAIYLKKNKQEPLLQGKILGLIFDKHSTRTRVSFEAGMVQLGGHGMFLNGKEMQMGRGETVSDTAKVLSHYIDGIMIRTFSHADVEELAKESSIPVINGLTDDHHPCQALADLMTIYEETNTFKGIKLAYVGDGNNVCHSLLLASAKVGMHMTVATPVGYKPNEEIVKKALAIAKETGAEIEILHNPELAVNEADFIYTDVWMSMGQEGEEEKYTLFQPYQINKELVKHAKQTYHFLHCLPAHREEEVTGEIIDGPQSIVFEQAGNRLHAQKALLVSLFKNVEELS

SEQ ID NO: 65101 - DNA, 951 bp, Bacillus cereus
  CDS (1)..(951): transl_table=11
atgtcaactgtacaagtaccgaaattaaatacgaaagaccttttaacactagaagaattaacgaaagaagaaattatttctttaattgagttcgcaatatatttaaaaaagaataagcaagagcctttactgcaaggcaaaatattagggcttatctttgataaacattcaactcgtactcgcgtatcttttgaagcaggaatggtacagctcgggggacacggtatgtttttaagtggaaaagagatgcaaatgggaagaggagaaaccgtttcagatactgcgaaagtattatcgcagtatattgacgggatcatgatacgtacattctcacacgcggatgtagaagagcttgcaaaagaatcgagcattcctgttattaacggtttaactgacgatcatcatccttgtcaagcattggcagacttaatgacaatatatgaagaaataaatacatttaaaggaataaaattggcttacgtcggtgacggaaataatgtatgtcattcattgttgttagcgagtgcaaaagtcggaatgcacatgactgttgcaacgcctataggatatgaaccgaatgagaagattgtaaaaaaagcgttagcgattgctgaagaaacaggagctgaaattgaaattttgcataatcctgaattagcggtgagtgaagcagatttcatttatactgacgtttggatgagcatggggcaagagggagaagaagagaaatatactttatttcaaccataccaaattaataaagaacttgttaagcatgcgaagcaaacgtatcgtttcttacactgtttacctgcccatcgtgaagaagaagtaacaggcgaaattatagatggaccaaaatctatcgtatttgagcaagccggtaatcgattgcatgcgcaaaaagcattattagtaagtttatttaaaaatgtagaagagctttcctaa

SEQ ID NO: 65102 - protein, 316 aa, Bacillus cereus
MSTVQVPKLNTKDLLTLEELTKEEIISLIEFAIYLKKNKQEPLLQGKILGLIFDKHSTRTRVSFEAGMVQLGGHGMFLSGKEMQMGRGETVSDTAKVLSQYIDGIMIRTFSHADVEELAKESSIPVINGLTDDHHPCQALADLMTIYEEINTFKGIKLAYVGDGNNVCHSLLLASAKVGMHMTVATPIGYEPNEKIVKKALAIAEETGAEIEILHNPELAVSEADFIYTDVWMSMGQEGEEEKYTLFQPYQINKELVKHAKQTYRFLHCLPAHREEEVTGEIIDGPKSIVFEQAGNRLHAQKALLVSLFKNVEELS

SEQ ID NO: 65103 - DNA, 936 bp, Bacillus stearothermophilus
  CDS (1)..(936): transl_table=11
atgaatgcagtgatgtcattaaaagggagagattttttaacgcttcttgatttctcgacagaagaaattttggacttgctggcgttagcagctgatttaaaagcgaaacaaaaagccggtgtatcgtatacgccgctttccgggaaaacaatggcgatgatttttgaaaagccgtcaggcacgcgcgtgtcgtttgaagtcggcatgattcagcttggcggccaggcgatgtatttaaacggaaaccatttgcagcttggccgcggcgaaacgatcgccgatacggcccgcgtcttgtcgcaatacgtccgtgtcattatgattcgcacatttgcccatcaaaaagtcgaggagttggccgaatatgcgtcgttccggtcatcaaacggcctgacggacgacgatcatccgtgccaggcgttggcggatttgctgacgatttatgaagtgaagaaaacgttccaaggcgtcaagctcgcctatgtcggcgacgggaacaacgtcgccaacgccttgcttgtggccgcggcgaaagtcggcatggatgtcgccatcgcctgtccaccgggctatgagccaaagaaagaatatgtcgaggctgcgtgccgggtcggtgaacagacagggcgccgcgtcacggtgacgcacgacccgcttgtggcggtggcgggggcggatcggatttatacggatgtctggacgagcatgggccaagaaagcgaaagttctgagcggctgcaagtgtttcagccgtatcaagtcaacgaagagctcgtcaaagcggcaaaaccggattatctctttttgcattgtctgccggcccaccgcggcgaagaagtgacggccggcgtcatggacggtccgaactcggtcgtctttgagcaggccggcaaccggcttcatgcgcaaaaagcgattttgttgtccgttttatag

SEQ ID NO: 65104 - protein, 311 aa, Bacillus stearothermophilus
MNAVMSLKGRDFLTLLDFSTEEILDLLALAADLKAKQKAGVSYTPLSGKTMAMIFEKPSGTRVSFEVGMIQLGGQAMYLNGNHLQLGRGETIADTARVLSQYVRVIMIRTFAHQKVEELAEYASFRSSNGLTDDDHPCQALADLLTIYEVKKTFQGVKLAYVGDGNNVANALLVAAAKVGMDVAIACPPGYEPKKEYVEAACRVGEQTGRRVTVTHDPLVAVAGADRIYTDVWTSMGQESESSERLQVFQPYQVNEELVKAAKPDYLFLHCLPAHRGEEVTAGVMDGPNSVVFEQAGNRLHAQKAILLSVL

SEQ ID NO: 65105 - DNA, 1882 bp, Bacillus subtilis
  CDS (477)..(1436): transl_table=11
agatctaaatccgcagttcaaaatcatcatgcagttgccgtgaagttccctgttttttcttctcatgcgatccaggatgtggatgtcaagcttggaccggaaatgaaatcaacgggagaaggcatgtgtgtccgatatgattctaacagcgccttgaaaaaaatctatacaagagtctggagtcaaaaaggaagcatttatttgcaaaacgttccggaagatgtgaaggagttagcagaaaacgcaggttttacaatacatgaaggaacatttgcctcatggatggaacaggaaggaaactcgctccacattaatctgagcggttctgaagaagcacgcaaagaacgtttggaagccatgacgcacggcatccccgtctttacagaagaagaaactgtgcgggcgtctttacaaagcggttcaggccatccgcagcctgtatctctcaaagacctctataaaaaggaagtggcatcatgcacacagtgacgcaaaccagtttatacggaaaagatttattaacgttaaaggaccttagtgaagaagatataaacgccttgctcgcagaagccggtgagctgaaacaaaacaaaattcagcctatattccatggcaaaaccttggcgatgatttttgaaaaatcatcaacgcggacccgtgtttcatttgaagcgggcatggcgcagctgggcgggagcgccctctttctaagccagaaagatctgcagctggggcgcggtgagactgtcgctgatacggcaaaagtgctgtcaggctatgtggatgccatcatgatccggacctttgaacatgaaaaggtggaggaacttgccaaagaagctgacattccggtgatcaatggacttaccgataaataccacccatgccaggcgctggcggatctcttgacgattaaggagataaaagggaagcttaaaggcgtaaaagtcgcgtacatcggtgacggaaataacgtggcgcactccttgatgatcggctgcgcgaaaatgggctgtgatatctcgatcgcttcaccaaagggatatgaagtgttagatgaagcagctgaagcggcaaagacatatgcacttcaatccggctcttctgtcacgctgacagatgatccgattgaagctgtaaaagacgcggacgtgatttattctgatgtgtttacaagcatggggcaggaagcggaagagcaagaacgtcttgctgtctttgcgccttatcaggtgaatgcggcgctggtcagccatgccaagcctgactatacatttttacattgtctccctgcgcatcgcgaggaagaagtgactgcggagattattgacgggccgaactctgcagtgttccagcaggcggaaaaccgtcttcatgtgcaaaaagcactgctgaaggccattttatataaaggggaatcatcaaaaaactgctgagccaaactcagcagttttttggatggcaacatattcacagccgcttagcgcatactacagcaaaaaggaaaaggaggaaaaacagtgggacagcagcaccattccggcccggacagaaatcgcctaataacggtgtctacgtagaaatcggcgagacagggagcatggttaaaaaccctcaaaaggtccatctgtcagcaggggaaatgttccccgaaacatcaaaccacaaccggctgtggacctacaaaagaaagccgtgaccactaaaaaacccaaaacaataaatgttttgggtttttggctttttaatgctggcttgcatttttgttcataggcatgatttctgctaaaaccatgattaagacatacagtacaacagcaatgacagatgatgttttgaaattatacgtaacgctgttcatgcttgcaaccaagtagcatgc

SEQ ID NO: 65106 - protein, 319 aa, Bacillus subtilis
MHTVTQTSLYGKDLLTLKDLSEEDINALLAEAGELKQNKIQPIFHGKTLAMIFEKSSTRTRVSFEAGMAQLGGSALFLSQKDLQLGRGETVADTAKVLSGYVDAIMIRTFEHEKVEELAKEADIPVINGLTDKYHPCQALADLLTIKEIKGKLKGVKVAYIGDGNNVAHSLMIGCAKMGCDISIASPKGYEVLDEAAEAAKTYALQSGSSVTLTDDPIEAVKDADVIYSDVFTSMGQEAEEQERLAVFAPYQVNAALVSHAKPDYTFLHCLPAHREEEVTAEIIDGPNSAVFQQAENRLHVQKALLKAILYKGESSKNC

SEQ ID NO: 65107 - DNA, 924 bp, Bradyrhizobium japonicum
  CDS (1)..(924): transl_table=11
atgagcaagtcgccgaagcacttcctcgatatcaacgagctcccgctgtcggagctcaagagcatgctcgatgcctcctccgccatgaaggcgaagcagaaggcgcatcagccggtgaggccgctcgaaggcaagacgctggcgatgatcttcgagcgcccgtcgacccgcacgcgggtgtcgttcgacgtcgccatgcgccagctcggcggcgagcccatcatgctcaccggcgccgagatgcaactcggccgcggcgagaccatcgccgacaccgcgcgcgtgctgtcgcgctatgtcgatgccatcatgatccgcatcctcaaccacgacgccctgctcgagcttgcggccaacgcgaccgtgcccgtcatcaacggcctgacccggcgctcgcatccctgccaggtgatggccgaccttctgacctatcaggagcaccgcggcccgatcgagggccggacggtggcctggaccggcgatgacaacaacgtgctggcgtcctgggcgcatgccgcggagcgcttcaagtttcagctcaacgtcgcaacgcctccggagcttgcgccgaagaaggcgatgcgcgactggatcaaggcttcaggcgcgccgatcatgctcggcaccgatccggaagccgccgtgcgcggcgccgattgtgtcgtcaccgacacctgggtgtcgatgggcgacaaggaaggcgagcaccgccacaacgtgctcaagccctaccaggtcaatgccaagctgatgtcgctggccaagcccgacgcgctgttcatgcactgcctgcccgcccatcgcggcgaggaggtcaccgacgaggtgatcgacggcccgcaatcggtcgtgttcgacgaggccgaaaaccgcctgcacgcgcagaagggtattctggcctggtgttttgacgcggtgaagtaa

SEQ ID NO: 65108 - protein, 307 aa, Bradyrhizobium japonicum
MSKSPKHFLDINELPLSELKSMLDASSAMKAKQKAHQPVRPLEGKTLAMIFERPSTRTRVSFDVAMRQLGGEPIMLTGAEMQLGRGETIADTARVLSRYVDAIMIRILNHDALLELAANATVPVINGLTRRSHPCQVMADLLTYQEHRGPIEGRTVAWTGDDNNVLASWAHAAERFKFQLNVATPPELAPKKAMRDWIKASGAPIMLGTDPEAAVRGADCVVTDTWVSMGDKEGEHRHNVLKPYQVNAKLMSLAKPDALFMHCLPAHRGEEVTDEVIDGPQSVVFDEAENRLHAQKGILAWCFDAVK

SEQ ID NO: 65109 - DNA, 939 bp, Brucella suis
  CDS (1)..(939): transl_table=11
atggcaaacgataacggtatcaaacactttatcgatctctccaccgttccggcgacggagcttcgcgccattctggaagatgccaaggcgcgcaaggcgcgcctgaaagctggcgaagtcgaacggccctacgccggcaaggtgctggcgatgatctttgaaaagccttccacgcgtacgcgcgtttcctttgacgtcggaatgcgccagctcggcggcgaaacgatcatgctgacgggttcggaaatgcagcttggccgcagcgaagccatcgccgacacggcgaaggttctctcacgctatgtggatgcgatcatgatccgcaccaccgcgcatgaacgtatgctggaactggccgaatatgccactgttcccgttatcaatgcgttgaccgacgacacccacccttgtcagatcatggcagacgttcttacatatgaggaacatcgcggcccgatcaagggcaagacctttgcctggatgggggatggcaacaacgtcctgcattcgcttgtggaagctgcggcgcggtttgatttcaacgtcaatatcgcgacaccgaaaggcagtgagccgaagtcgcaatatatcgactgggcgcgggccaacggcgcgggcatcatgtccaccaccgacccggaaaaggcggcaagcggcgcagattgcatcgtgaccgatacatgggtgtcgatggggcaggaagatcatgcccgtggacacaatgttttcataccctatcaggtcaatgcgaacctgatggcaaaggctgacccgaaggcattgttcatgcactgcctgcccgcgcatcgcggcgaggaagtgaccgatgaagtcatcgacgggccgcaatcggtcgtgttcgatgaagcggaaaacaggctccacgcccagaaggccattctggcctggtgcctgcaagaccgcggtttgggagcataa

SEQ ID NO: 65110 - protein, 312 aa, Brucella suis
MANDNGIKHFIDLSTVPATELRAILEDAKARKARLKAGEVERPYAGKVLAMIFEKPSTRTRVSFDVGMRQLGGETIMLTGSEMQLGRSEAIADTAKVLSRYVDAIMIRTTAHERMLELAEYATVPVINALTDDTHPCQIMADVLTYEEHRGPIKGKTFAWMGDGNNVLHSLVEAAARFDFNVNIATPKGSEPKSQYIDWARANGAGIMSTTDPEKAASGADCIVTDTWVSMGQEDHARGHNVFIPYQVNANLMAKADPKALFMHCLPAHRGEEVTDEVIDGPQSVVFDEAENRLHAQKAILAWCLQDRGLGA

SEQ ID NO: 65111 - DNA, 921 bp, Campylobacter jejuni
  CDS (1)..(921): transl_table=11
atgaaacattttttaactttaagagatttttctaaggaggaaattttaagccttgtaaatcatgctagcgagcttaaaaaagagcctaaaaaacttttacaagataaaactttagcaatgatttttgagaaaaactctacaagaacaagaatggcatttgaattagccataacagagcttggcggaaaggctttgtttttaagcagcaatgatttacaacttagtcgtggtgagcctgtaaaggatacagctagggtgataggggcgatggttgattttgtgatgatgagggtcaataaacatgaaactttactcgaatttgcaagatattctaaagctcctgtgatcaatgctttaagcgagctttatcatcctactcaggttttaggggatttgtttactatcaaagaatggaataaaatgcaaaatggtatagcaaaagttgcttttatcggagatagtaataatatgtgcaattcttggcttattacggctgcgattttgggctttgaaattagtatagctatgccaaaaaactataaaattagccctgaaatttgggaatttgctatgaaacaggctttgatttcaggagctaaaatttccttaggctatgataaatttgaagccttaaaggataaagatgtagtcattaccgatacttgggtttccatgggcgaagagaatgaaaaagaacgcaagattaaagaatttgaaggatttatgatcgatgaaaaggctatgagcgttgccaataaagacgcgatattgcttcattgtttgcctgcttataggggttatgaagtgagtgaagaaatttttgaaaaacatgcagatgtgatttttgaagaagcaagaaatcgcctttatgtggtaaaagccttgctttgctttttggataatcagagaggaagagaatga

SEQ ID NO: 65112 - protein, 306 aa, Campylobacter jejuni
MKHFLTLRDFSKEEILSLVNHASELKKEPKKLLQDKTLAMIFEKNSTRTRMAFELAITELGGKALFLSSNDLQLSRGEPVKDTARVIGAMVDFVMMRVNKHETLLEFARYSKAPVINALSELYHPTQVLGDLFTIKEWNKMQNGIAKVAFIGDSNNMCNSWLITAAILGFEISIAMPKNYKISPEIWEFAMKQALISGAKISLGYDKFEALKDKDVVITDTWVSMGEENEKERKIKEFEGFMIDEKAMSVANKDAILLHCLPAYRGYEVSEEIFEKHADVIFEEARNRLYVVKALLCFLDNQRGRE

SEQ ID NO: 65113 - DNA, 1194 bp, Emericella nidulans; identical to SEQ ID NO: 64997
  CDS (115)..(1194)

SEQ ID NO: 65114 - protein, 359 aa, Emericella nidulans
MASLRSVLKSQSLRHTVRSYSSQTMPPASPFAPRHFLSIADLSPSEFATLVRNASSHKRAIKSGSMPQNLQGSLLGKTVAMIFSKRSTRTRVSTEGAVVQMGGHPMFLGKDDIQLGVNESLYDTSVVISSMVSCIVARVGKHAEVADLAKHSSVPVINALCDSFHPLQAVADFQTIYEAFTPKAHHLSSLGLEGLKIAWVGDANNVLFDMAIAATKMGVDIAVATPKGYEIPPHMLELIKSAGEGVSKPGKLLQTNIPEEAVKDADILVTDTWVSMGQEEEKAQRLKEFDGFQITAELAKRGGAKEGWKFMHCLPRHPEEVSDEVFYSNRSLVFPEAENRLWAAISALEGFVVNKGKIE

SEQ ID NO: 65115 - DNA, 990 bp, Helicobacter hepaticus
  CDS (1)..(990): transl_table=11
atgaaacattttctcactctgaatgattttaacagagatgaaattctagcaatggttgatgttgccctagaacttaaatacgaatctttgcatattggtaacaaaccttatcttaagggtaaagttttggcgatgatttttgaaaaaagctctacgcggacacgagtaagctttgagagtggtatatttcaattaggcggacagggtatattcctttctcataaagatatacaacttggacgaggcgaacccatcaaagacaccgcacgagtgattagttcgatggtagatatgataatgatgagaacaagtgagcatagcagattagaggagttcgcctcatattcatctgtgcctgtgattaatggattgagtgatgattttcaccccgtgcagcttatcgcggattatcttacgatgatagaatgcggtatttatcttactcatcacaatcctctttatcccacgaaaggcaagggagggaggaatcctattgtagcatatattggtgatggcaataatatggcacattcgtggattaaccttgctggtattttgggctttgaattgcgtattgcttcaccaattggatatgcacctaaggcagatattatcacaaaggcacaggatatgtgtatccaaagtggaggtaaaatcaagattctaaatgacgcaaaagaggcagtgagtaatgcaaatgttgtggttaccgatacttgggcgtcaatgggacaagaagaacaaaaagaacaacgcaaatgtgcttttgcaaatttttgtgtagatgaggctatgatgagctatgcacaaaaagatgctatttttttgcattgtctccctgcatatagagggcaagaggtgagtgaaggtgtgcttgagggcgcacagagcaaagtattccaagaagcacagaatcgccttcacgcgcaaaagggcattatgctctatttagcacggataaataaaatcccgcttgtgagcgtggagtaa

SEQ ID NO: 65116 - protein, 329 aa, Helicobacter hepaticus
MKHFLTLNDFNRDEILAMVDVALELKYESLHIGNKPYLKGKVLAMIFEKSSTRTRVSFESGIFQLGGQGIFLSHKDIQLGRGEPIKDTARVISSMVDMIMMRTSEHSRLEEFASYSSVPVINGLSDDFHPVQLIADYLTMIECGIYLTHHNPLYPTKGKGGRNPIVAYIGDGNNMAHSWINLAGILGFELRIASPIGYAPKADIITKAQDMCIQSGGKIKILNDAKEAVSNANVVVTDTWASMGQEEQKEQRKCAFANFCVDEAMMSYAQKDAIFLHCLPAYRGQEVSEGVLEGAQSKVFQEAQNRLHAQKGIMLYLARINKIPLVSVE

SEQ ID NO: 65117 - DNA, 951 bp, Listeria monocytogenes
  CDS (1)..(951): transl_table=11
atgacaatgtatgcaaaaaataatacatctgggaaagatatgctcagtttgcttgaatggaataaagaagaattgacggatattattaaattggctgttgcgatgaaaacgaacccagctcattatagtcatattttaagcgggaaaattttaggaatgatatttgataagccttctactagaacgcgggtttcttttgaagcggggattctgcaattaggtgggcaagcgattgtgatgagttcaaaggaattacaaattgggcgtggtgagccgattaaagacacggcgcatgtaatgtcagaatacatcgatgcgattatgatccgaacatttagtcatgaaaaagtagaagaattggcgtatcatgcagaaattccaattattaatggcttaactgacttacatcatccatgtcaggcgttagcggatttaatgactatttatgaatggaaagatcagctggaaggtatcaaactagcctatatcggcgacggcaataatgtatgccattcattacttttagccggtgctatggtcgggatagatatccgccttgcgatgccaaaagggtatgaggtcgacgaaacaattctagcaaaggcagaaaatctggcgaagcaaagtggtggcaagattttcgttacggaagattcgaaacttgcggtgacagatgcggactttatttatacggatgtttggacaagtatgggacaagaagatgaaaatgcgaaacgtttggcggattttggcgaaaaatatcaagtaaatgcagaattagttagtggtgccaagcctgattaccacttcttacattgtttaccagcacatcgggaagaagaagtaaccactgaaattatagatggtatccattcggttatttatcaacaagcgggaaataggcttcatgcgcaaaaagcgttattagcagctattctagaagcaaaataa

SEQ ID NO: 65118 - protein, 316 aa, Listeria monocytogenes
MTMYAKNNTSGKDMLSLLEWNKEELTDIIKLAVAMKTNPAHYSHILSGKILGMIFDKPSTRTRVSFEAGILQLGGQAIVMSSKELQIGRGEPIKDTAHVMSEYIDAIMIRTFSHEKVEELAYHAEIPIINGLTDLHHPCQALADLMTIYEWKDQLEGIKLAYIGDGNNVCHSLLLAGAMVGIDIRLAMPKGYEVDETILAKAENLAKQSGGKIFVTEDSKLAVTDADFIYTDVWTSMGQEDENAKRLADFGEKYQVNAELVSGAKPDYHFLHCLPAHREEEVTTEIIDGIHSVIYQQAGNRLHAQKALLAAILEAK

SEQ ID NO: 65119 - DNA, 1005 bp, Mannheimia succiniciproducens
  CDS (1)..(1005): transl_table=11
atgccttttaatttaaaaaatcgtcatttattgagtctggttaatcatagtccccgtgaaattaaatatttgcttgatcttgcccgtgacttaaagcgagctaaatatgccggtactgaacaaccccgtttaaaaggtaaaaatatcgctttaatttttgagaaaacctcaacacgtacgcgctgttcctttgaaattgccgcttatgatcaaggggctaatgtcacttatatcgacccgacttcttcccaaatcggtcataaagaaagtatgaaagatacggcacgtgttttagggcgcttgtacgatgctattgaataccgcggttataaacaggaaaccgtcgaagagttggcaaaattttccggcgtacctgtgtttaacggtttaaccgatgagtttcacccgacacaaatgctggccgacgttttaacgatgattgaacattcaaccaagccgctaaatgaaattaaatatgtctatatcggtgatgcccgtaataacatgggtaattccctgctactaatcggtgctaaattaggtatggacgtgcgtatttgcgggccgaaatcattattgcctgaagagaatttcgtttcgatatgtgaagaaatctcaaaagaaactggtgcccgtttaactgtaacggatgatattgatcttgctgttaaagatgcggatttcgtacatacggacgtttgggtttcgatgggcgaacctattgaagcctggggcgagcgaatcaatttattaatgccgtatcaagtgaacacggatttaatgaaacgcacgggaaatccgaatgtgaaatttatgcactgcttgccggcatttcataactgtgaaaccaaagtggggcgtgaaattgcagccgcctaccctaatctggcaaacggcattgaagttaccgaagatgtgtttgaatcgccaatgaatattgcctttgaacaggcggaaaaccgtatgcatactatcaaagccgtgatggttgcttcactggcttaa

SEQ ID NO: 65120 - protein, 334 aa, Mannheimia succiniciproducens
MPFNLKNRHLLSLVNHSPREIKYLLDLARDLKRAKYAGTEQPRLKGKNIALIFEKTSTRTRCSFEIAAYDQGANVTYIDPTSSQIGHKESMKDTARVLGRLYDAIEYRGYKQETVEELAKFSGVPVFNGLTDEFHPTQMLADVLTMIEHSTKPLNEIKYVYIGDARNNMGNSLLLIGAKLGMDVRICGPKSLLPEENFVSICEEISKETGARLTVTDDIDLAVKDADFVHTDVWVSMGEPIEAWGERINLLMPYQVNTDLMKRTGNPNVKFMHCLPAFHNCETKVGREIAAAYPNLANGIEVTEDVFESPMNIAFEQAENRMHTIKAVMVASLA

SEQ ID NO: 65121 - DNA, 918 bp, Methanococcus jannaschii
  CDS (1)..(918): transl_table=11
atgcatctcttagatttggatgtgttgagtagagaagatgtactaaaaattattgaatatggaatatacttcaaaaaaaatagaagaaaacatgaaaaaatcttagaagggaagagtgtagcgattttatttgaaaaaccctcaacaagaacaagaatgagttttgatattgcagtttatgagttgggagggcatccactaataatgaaccagaatgagatacatttaggaaagaaagagtcaataaaagatactgcaaaggttatgggcagatatgttgatactatagtggcaagggtctataagcatagacatttagaggagatggctaaatattcctcagttcctgttataaatgctttaagcgatttagctcacccatgccaaatattggctgatttgatgactataaaagagtataaaggcaaattcaaaggtttaaaaatagcttatttaggagatggaaataacgtctgtaattctttaattttaggctctgctttagtaggaatggatacttatgtgggaacaccaaaaggttatgaacctaatgctaaagttgtcttaaaagctaaggagattattaataattatggagaaggttctttaacattaaccaacgacccaatagaggcagctgaagatgctgatgtattatacaccgacgtatggattagtatgggtgatgataaagacaaagaagaggttttaaaaatctttccaccattccaaattaatagcaagctcttagagtatgctaaagatgatgttatagttatgcactgcctcccagcaaatagaggatatgagataacagacgatgttattgacggagagcattcagttgtctatgatgaggctgagaataggttacatgttcagaagggagtatttaagtttatatttgagagaaagtaa

SEQ ID NO: 65122 - protein, 305 aa, Methanococcus jannaschii
MHLLDLDVLSREDVLKIIEYGIYFKKNRRKHEKILEGKSVAILFEKPSTRTRMSFDIAVYELGGHPLIMNQNEIHLGKKESIKDTAKVMGRYVDTIVARVYKHRHLEEMAKYSSVPVINALSDLAHPCQILADLMTIKEYKGKFKGLKIAYLGDGNNVCNSLILGSALVGMDTYVGTPKGYEPNAKVVLKAKEIINNYGEGSLTLTNDPIEAAEDADVLYTDVWISMGDDKDKEEVLKIFPPFQINSKLLEYAKDDVIVMHCLPANRGYEITDDVIDGEHSVVYDEAENRLHVQKGVFKFIFERK

SEQ ID NO: 65123 - DNA, 909 bp, Methanosarcina mazei
  CDS (1)..(909): transl_table=11
atgaagagagatgtactttctataactgacctgtccagggaggagatatacgaactccttgaatcggcagcggacctgaagaaaaaacgtaaggcgggagaacctaccgagtacctgaaacataaaagccttggaatgattttcgaaaaatcctccacaaggacaagggtatcctttgaggttgcaatgagcgatttcggaggacacgccctttaccttaactccagggatatccaggtaggaagaggtgagacaattgaagatacagccaggaccctttcgggatacctgcacgggatcatggcaagggttatgagccatgacaccgtggaaaagcttgccagattctcgaccatacccgtgataaatgccctctcggaccgggaacacccatgccagatccttggcgatttcatgaccatcatggaatataaaaacaggtttgaaggcctgaagttcgcctggataggagacgggaacaatgtctgcaattccgctctcctgggctctgcaatcatgggaatggagtttgtcattgcctgccctgaaggttacgaacccggagccgagttcctcgagaaagcgaaagccctgggaggcaaattctcaataacagatgaccccaaaactgccgcaaaagacgcagatataatctatactgatgtctgggtctccatgggggacgaagcagagcaggaaaagcgcctgaaagattttggttctttccaggtcaacaccgaactcctcggagtcgcaaaaccggatgtaatagtaatgcactgccttcctgccaggagaggccttgaaatcacggacgaagttatggacggcccaaactccgtgatcttcgaagaggcagaaaaccgccttcacgcgcagaaagcccttatcctgaaattgatgagataa

SEQ ID NO: 65124 - protein, 302 aa, Methanosarcina mazei
MKRDVLSITDLSREEIYELLESAADLKKKRKAGEPTEYLKHKSLGMIFEKSSTRTRVSFEVAMSDFGGHALYLNSRDIQVGRGETIEDTARTLSGYLHGIMARVMSHDTVEKLARFSTIPVINALSDREHPCQILGDFMTIMEYKNRFEGLKFAWIGDGNNVCNSALLGSAIMGMEFVIACPEGYEPGAEFLEKAKALGGKFSITDDPKTAAKDADIIYTDVWVSMGDEAEQEKRLKDFGSFQVNTELLGVAKPDVIVMHCLPARRGLEITDEVMDGPNSVIFEEAENRLHAQKALILKLMR

SEQ ID NO: 65125 - DNA, 915 bp, Methanococcus maripaludis
  CDS (1)..(915): transl_table=11
atggatttattaacactctggaatttagagcgagaagaagttttaaaaattattgaagatgctgaatactttaagaaaaatagatacgggcatgaaatactcaaaaataagagtatcgcattgatttttgaaagcccgtctacaagaaccagaatgagttttgaccttgcagtaaatgaacttggcgggcactccttgatgatgaatgaaggggaaatccaccttgggaaaaaagaaagcattgctgatactgcacgagttatgagcagatttgttgatgcaatcgttgcaagagttaaaaatcacaaaacactggaagatcttgcagaatacgggagtgttccagtaattaatgcactctgcgaccttgcacacccttgccagatattagcagatttacttacaatgaaagaaaacggcaaaaacttcaaaggattaaaattagcatactttggtgatggaaacaacgtatcaaactcattaatgattgctggagcaattttgggaatggatgttgttattgcaacccctagaagttatgagccaaacggacttttcgttaaaaaagcgcttgaaataatcgcaaaatacggggaaggaagtttaacattaaccgatgacccagaaattgctgcaaaagatgccgatgttttatatactgacgtatggatcagcatgagtgacaaaaataaacagatggatgaaatattaaaaatattcccaaaattccagataaatgatgaaattttatcaaaagcaaaaaaagatgcaatagtactccactgccttcctgcaaacaggggattagaaattacagatgaagtaatcgatggaaaacaatcaaaagtatttgatcaggctgaaaacaggcttcacgctcaaaaagcagtattaaaatacatttttgaacattaa

SEQ ID NO: 65126 - protein, 304 aa, Methanococcus maripaludis
MDLLTLWNLEREEVLKIIEDAEYFKKNRYGHEILKNKSIALIFESPSTRTRMSFDLAVNELGGHSLMMNEGEIHLGKKESIADTARVMSRFVDAIVARVKNHKTLEDLAEYGSVPVINALCDLAHPCQILADLLTMKENGKNFKGLKLAYFGDGNNVSNSLMIAGAILGMDVVIATPRSYEPNGLFVKKALEIIAKYGEGSLTLTDDPEIAAKDADVLYTDVWISMSDKNKQMDEILKIFPKFQINDEILSKAKKDAIVLHCLPANRGLEITDEVIDGKQSKVFDQAENRLHAQKAVLKYIFEH

SEQ ID NO: 65127 - DNA, 1044 bp, Pachysolen tannophilus
  CDS (1)..(1044)
atgattaatagtatttcaaatacagttttattaaaatcggtggtatcaaaaagatttttttcttcatcagcaaaaatgagttcacaagctaaaccacgtcatttggtttctatgttggagttgtcaatcaaagagttggagtctttggttaatagagcagcttatcataagcaacagattagatctggtctggttaatactactcaacctttatctggtaagactgtatctttgattttcaacaagagatcaactagaactagagtttcatcggaaggtgcagcggcttatttgggaggatgtccgatgtttttgggtaaagatgatattcaattaggtgtcaatgaatctttacatgatacgactaagattatatcgtcaatgacttcaagtatatttgctagggtcaataagcattctgatattcaagaaatgtgcaagtactcttcagtaccaattataaatgcattgtgtgatactttccacccattgcaagctataacagatatattgactataaaagaaagttttgggaatactaccaaaggtttgaagttggcatggataggtgatgtaaataacgttataaatgatttatgtattgcggctttaaaatcaggaattgatgtttcaatagcagttccttcaggtcttaaatttgaggaactgattttatccggtgcaaaagaaatctctgcagaaaatggcactacgttaaagattacaaatgatccacttgaagcaattaatggtgcaaatgtaattgtcaccgatacttggatatcaatgggtcaagaagatgaaagactgcagaaattgaaacaatttgaaggattccaaataaccaaagaaatgatttctaaaggtaaagctgctgaaaattggaaattcatgcattgtttgccaagacacccagaagaagtacatgatgaagttttctacgatgaagaaagatcattggtttttgaagaaggtgaaaatagattatatgctgctattgctgttcttgaaggtttcgttgttaacaagggtaaattattataa

SEQ ID NO: 65128 - protein, 347 aa, Pachysolen tannophilus
MINSISNTVLLKSVVSKRFFSSSAKMSSQAKPRHLVSMLELSIKELESLVNRAAYHKQQIRSGLVNTTQPLSGKTVSLIFNKRSTRTRVSSEGAAAYLGGCPMFLGKDDIQLGVNESLHDTTKIISSMTSSIFARVNKHSDIQEMCKYSSVPIINALCDTFHPLQAITDILTIKESFGNTTKGLKLAWIGDVNNVINDLCIAALKSGIDVSIAVPSGLKFEELILSGAKEISAENGTTLKITNDPLEAINGANVIVTDTWISMGQEDERLQKLKQFEGFQITKEMISKGKAAENWKFMHCLPRHPEEVHDEVFYDEERSLVFEEGENRLYAAIAVLEGFVVNKGKLL

SEQ ID NO: 65129 - DNA, 1005 bp, Pasteurella multocida
  CDS (1)..(1005): transl_table=11
atgccactcaatttacgtcatcgtcatttcttgcgtttaatggatttcacgccaaccgaaattcaattcctactcgacctctctgccaacttaaaaaaagcaaaatataccggaacagaacaacctcgtttgaaagggaaaaatattgccttaatttttgagaaaacgtcaacacgcacgcgctgttcatttgaagtggcggcgtatgatcaaggggcaaatgtcacttatatcggtccaagtggttcacaaattggtcataaagaatcgatgaaagacacggctcgagttttaggccgtatgtatgacggaattcaatatcgtggttatggacaggaattagtcgagattctcgcacagtactcaggcgttcctgtttggaatgggttaactgatgattttcatccaacacaaattcttgctgattttctgacaatgttagaacacggtgaaggcaaacgtcttaatcaaatgaaaatggcctatttgggtgatgccagaaataacatgggaaattcttttgttgaaggtgcggcattaatgggcatggatctccgtttagtcgcgcctaaagcctattggccagaacaaaaactgcttgatgaagtcgcagaaatggcgaagaaaactggcgcaaaaattacctgtacagaaaacgtagaggaaggggtgaaaggtgttgatttcctttacaccgatatttgggtctccatgggcgagcctgaagaagcttgggaacagcgcattaacttaatgaaaccataccaagtcaacaaggcgttacttgaaaaaacaggtaatccaaaagtgaaattcatgcactgtttgcctgctttccacgatgaaaatacaacggtcggtaaagaaatggcgcaaaaatatggtatgaacggtcttgaagtcaccgatgaggtatttgaatcagatgcctccatcgtgtttgatgaagcagaaaaccgtatgcatacaattaaagcagtgatggtggcaacgttaggtcagtaa

SEQ ID NO: 65130 - protein, 334 aa, Pasteurella multocida
MPLNLRHRHFLRLMDFTPTEIQFLLDLSANLKKAKYTGTEQPRLKGKNIALIFEKTSTRTRCSFEVAAYDQGANVTYIGPSGSQIGHKESMKDTARVLGRMYDGIQYRGYGQELVEILAQYSGVPVWNGLTDDFHPTQILADFLTMLEHGEGKRLNQMKMAYLGDARNNMGNSFVEGAALMGMDLRLVAPKAYWPEQKLLDEVAEMAKKTGAKITCTENVEEGVKGVDFLYTDIWVSMGEPEEAWEQRINLMKPYQVNKALLEKTGNPKVKFMHCLPAFHDENTTVGKEMAQKYGMNGLEVTDEVFESDASIVFDEAENRMHTIKAVMVATLGQ

SEQ ID NO: 65131 - DNA, 1376 bp, Pisum sativum
  CDS (38)..(1165)
gaattcggcacgagaaaacatcccaagtaaagagaaaatgggtgtcatcactgcccactgttactgtttcaccaccgttggatcacacaaaccctacctttctccctcatctcacaatttccgccattccccttccgtttctctttcttcttcttcgtcgtcgtcgccttcaccactcagaagaatctcatgccaagcctcttccgctcccgccgccgaatctactctcaccgcgaaagttggaaatgggttgaaagattttattcacatagatgattttgacaaggaaactattttgaagatattagatcgagctattgaggtgaagacattgttgaaatcaggggacaggacatttcggccttttgaagggaagacaatgtcgatgatatttgcaaagccatccatgagaacaagggtttcatttgagactggtttttcattgttaggtggtcatgctatttacttaggacccaatgacattcaaatggggaagcgagaggagactcgtgatgttgctcgagttttgtctcgctataacgatatcattatggcccgtgttttttctcatcaggacatacttgatcttgcaaagtatgcgagtgtccctgtcatcaatggtttgacagactacaaccatcccgtccagataatggctgatgcccttactatgattgagcacattggtcggtttgaaggaaccaaggttgtctatgttggagatgggaataatattgtccactcatggttgttgttggcagctgtagttccttttcactttgtttgtgcgtgtccaaaaggttttgaacctgatgcgaaaactgttgagaaggcaaggaaggctggaatcagcaagattgagataagtcatgatccgaaagaagctgttagaggagctgatgttgtgtattcagatgtctgggccagcatggggcaaaaggaagaagctgcatatcgtcgtgaagcgtttaaaggatttcaggtggatcagaatcttatggatgcggctggttccaaggcatttttcatgcactgcttaccagcggaaagaggggtggaggtgactgacgaagttgttgaagctccatattcaatagtcttccctcaagctgagaaccgaatgcatgcacagaacgctataatgctccatgtacttggcaagtagagctggttagatgataaattggtctgagcattgttggtgtacacttgcaataaattgttttagatgttagactagtgattcgcatgtaatagtcggttttatgcattcgggagcatataaagttggaacatgagttgaattttgtatgatcaaggtgaagctaaatcttttggagatgctagtatgaaactcagttttcccattttaaact

SEQ ID NO: 65132 - protein, 375 aa, Pisum sativum
MGVITAHCYCFTTVGSHKPYLSPSSHNFRHSPSVSLSSSSSSSPSPLRRISCQASSAPAAESTLTAKVGNGLKDFIHIDDFDKETILKILDRAIEVKTLLKSGDRTFRPFEGKTMSMIFAKPSMRTRVSFETGFSLLGGHAIYLGPNDIQMGKREETRDVARVLSRYNDIIMARVFSHQDILDLAKYASVPVINGLTDYNHPVQIMADALTMIEHIGRFEGTKVVYVGDGNNIVHSWLLLAAVVPFHFVCACPKGFEPDAKTVEKARKAGISKIEISHDPKEAVRGADVVYSDVWASMGQKEEAAYRREAFKGFQVDQNLMDAAGSKAFFMHCLPAERGVEVTDEVVEAPYSIVFPQAENRMHAQNAIMLHVLGK

SEQ ID NO: 65133 - DNA, 954 bp, Pyrococcus abyssi
  CDS (1)..(954): transl_table=11
atggtggtcagcttaaagggtagggatcttctctgtctccaggactacacgcctgaggagatatggactattctcgagacagcaaagatgctcaaaatctggcagaagataggaaagccccacagacttctcgagggtaaaaccttggcaatgatattccagaaaccctcaacgagaactagggttagcttcgaggttgcgatggctcacctaggaggacatgcactctacctaaacgctcaagacctacagcttagaaggggcgaaaccatagcggacaccgcaagggtcctaagcaggtacgtcgacgctataatggctagagtttatgaccacaaggacgttgaggatctagccaagtacgctagcgttccagttataaacggccttagcgacttctcacacccatgccaggctctagcggattacatgacgatttgggagaagaagggaactataaagggagttaaagtagtttacgtcggtgacggaaacaacgttgctcactcactcatgatagctggaaccaagcttggggccgatgtggtagtggcgaccccagagggttatgagccggatgagaaggttataaagtgggccgagcagaacgccgctgagagcggaggaagctttgagctacttcacgatccggtaaaagctgtcaaggacgctgacgttatttacacagatgtatgggcttcaatgggccaggaagctgaggctgaagagaggagaaagatcttcaggccgttccaagttaacaaggatttagttaagcatgccaagccagattacatgttcatgcactgcctaccggctcacaggggtgaagaagtcactgatgacgtcatagactctccaaatagtgtcgtctgggacgaggcggagaacaggttgcacgcccagaaagcagttctggctttattgcttggaggcgtaaagacgggcttctga

SEQ ID NO: 65134 - protein, 317 aa, Pyrococcus abyssi
MVVSLKGRDLLCLQDYTPEEIWTILETAKMLKIWQKIGKPHRLLEGKTLAMIFQKPSTRTRVSFEVAMAHLGGHALYLNAQDLQLRRGETIADTARVLSRYVDAIMARVYDHKDVEDLAKYASVPVINGLSDFSHPCQALADYMTIWEKKGTIKGVKVVYVGDGNNVAHSLMIAGTKLGADVVVATPEGYEPDEKVIKWAEQNAAESGGSFELLHDPVKAVKDADVIYTDVWASMGQEAEAEERRKIFRPFQVNKDLVKHAKPDYMFMHCLPAHRGEEVTDDVIDSPNSVVWDEAENRLHAQKAVLALLLGGVKTGF

SEQ ID NO: 65135 - DNA, 918 bp, Pyrobaculum aerophilum
  CDS (1)..(918): transl_table=11
atgaaacatttgttaactctaatggagtttgccccacatgaggttgaatatctcctgcgcgtgtcaagagagttcaagactagatttctcgcgggagagatatacacccccctcttccccgggagggtcctaatcctttattttgaaaaacacagcacgaggacaaggctttctctaacctcagccgcggcgcagttaggcatacaagctgtgtacactacgccaaacgagctccaaatcgccaggggcgagaccgtggccgatactatgagagttatttcccgctatgccgccgccgtggcagcgagggtttataaacacgagacgttggaggaaatggcgcggcacagcgcgattccggtgataaacgcgctctctgataaacaccacccgcttcaagcgctggccgacgcattgactttatgggaacgcgccgggaggctccacaacgtaaaaattgcctttgttggcgacgtctcaaataacgtagccactagcttagctattatcggcgccaagctgggctgggaggtgaggctagtaggcccgaaacagctgtggaatcaacggctagtggatgagctggccgaggacgcggccaaaacgggggcccgcatatatttcacagattccataaacgaagtagctggagtagacggcgtgtacaccgacgtgtgggtatctatgggctttgaaaaagaggccgaggagaggcgcaggttattaaagccctatcaagtcaaccagagggtaatggaaattgcgggcaagaaggcggtgtttctacactgtctgcccgcgcaccgcggcgaagaagtcactgatgatgtaattgacggccctcaatcagcagtgtgggaccaagctgagaatagaatgcacactgccaaggcggtgctggcctacctcttaaaataa

SEQ ID NO: 65136 - protein, 305 aa, Pyrobaculum aerophilum
MKHLLTLMEFAPHEVEYLLRVSREFKTRFLAGEIYTPLFPGRVLILYFEKHSTRTRLSLTSAAAQLGIQAVYTTPNELQIARGETVADTMRVISRYAAAVAARVYKHETLEEMARHSAIPVINALSDKHHPLQALADALTLWERAGRLHNVKIAFVGDVSNNVATSLAIIGAKLGWEVRLVGPKQLWNQRLVDELAEDAAKTGARIYFTDSINEVAGVDGVYTDVWVSMGFEKEAEERRRLLKPYQVNQRVMEIAGKKAVFLHCLPAHRGEEVTDDVIDGPQSAVWDQAENRMHTAKAVLAYLLK

SEQ ID NO: 65137 - DNA, 948 bp, Pyrococcus furiosus
  CDS (1)..(948): transl_table=11
atggtagttagcttggcaggaagagatcttctctgtcttcaagactatacagccgaagaaatctggacaattcttgaaacagcaaagatgtttaagatttggcaaaagataggaaaaccccacaggcttctcgaagggaagacattggcaatgatattccagaagccttcaactagaacaagagttagttttgaagtggcaatggctcacctgggaggccatgccctctacttaaatgcccaagacctccagcttaggagaggagaaacaatagctgacactgcaagagttctcagcagatacgttgatgcaataatggcaagagtttacgatcacaaggatgtagaagatttggccaaatacgcaaccgttccagtgataaatggtttaagcgacttctcccacccatgccaggctttggctgattacatgacaatttgggagaagaagggaactatcaagggagttaaggtagtttatgttggtgatggaaacaacgttgctcactccttgatgattgcaggaacaaagcttggagcagatgtcgtagttgcaacacctgaaggttatgagccagatgaaaaagtaatcaagtgggccgagcagaacgccgctgaaagcggaggaagctttgagcttctccacgatccggttaaggccgttaaggatgcagatgtaatctacaccgacgtttgggcctcaatgggtcaagaagctgaggctgaggagagaaggaagatcttcagaccattccaagttaacaaagatttagttaaacatgcgaagcccgactacatgttcatgcactgtctcccagcacacaggggagaagaggtaactgatgacgtaattgacagtccaaacagcgttgtgtgggatcaggcagagaatagactgcacgcccaaaaggcagtccttgctcttgtcatgggaggaattaaattctga

SEQ ID NO: 65138 - protein, 315 aa, Pyrococcus furiosus
MVVSLAGRDLLCLQDYTAEEIWTILETAKMFKIWQKIGKPHRLLEGKTLAMIFQKPSTRTRVSFEVAMAHLGGHALYLNAQDLQLRRGETIADTARVLSRYVDAIMARVYDHKDVEDLAKYATVPVINGLSDFSHPCQALADYMTIWEKKGTIKGVKVVYVGDGNNVAHSLMIAGTKLGADVVVATPEGYEPDEKVIKWAEQNAAESGGSFELLHDPVKAVKDADVIYTDVWASMGQEAEAEERRKIFRPFQVNKDLVKHAKPDYMFMHCLPAHRGEEVTDDVIDSPNSVVWDQAENRLHAQKAVLALVMGGIKF

SEQ ID NO: 65139 - DNA, 954 bp, Pyrococcus horikoshii
  CDS (1)..(954): transl_table=11
atggtagttagcttaaagggtagggatcttctctgcctccaggattatactcctgaagaaatatggacaatcctcgagacggctaagatgttcaagatctggcagaagataggaaagccccacagacttcttgaagggaagactttagccatgatattccaaaagccctcaactagaacaagggttagctttgaggttgcaatggcccacttgggcggtcacgctctctacctaaacgcccaagaccttcagcttaggaggggagagacaatagctgataccgctagagttctcagcaggtacgtcgacgctataatggctagggtttatgcccataaggatgttgaagatttagctaagtatgcaagcgtcccggttataaatggtttgagtgacttctctcatccatgccaggctttagctgattacatgacaatttgggagaagaagggaacgataaagggagttaaagtcgtatacgttggcgatggaaacaacgtctgccactccctaatgatagctgggacaaagcttggtgctgatgttgtagtggcaactccagagggttatgagccagataaaaaagtgattaaatgggccgagcagaatgcagctgaaagcggaggaagctttgagcttcttcacgatccagttaaagccgtcaaagatgccgatgtgatatacactgatgtgtgggcttcaatgggccaagaagctgaggcagaagagagaagaaagattttcagaccgttccaggttaacaaggatcttgtcaagcacgctaagtctgactacatgttcatgcactgcttaccagcccataggggagaagaagttactgacgatgtcatagactcaccaaacagcgtcgtttgggatgaagcagaaaataggttgcatgcacagaaagcagtcttagccttattgttgggaggagttaagactggcttctga

SEQ ID NO: 65140 - protein, 317 aa, Pyrococcus horikoshii
MVVSLKGRDLLCLQDYTPEEIWTILETAKMFKIWQKIGKPHRLLEGKTLAMIFQKPSTRTRVSFEVAMAHLGGHALYLNAQDLQLRRGETIADTARVLSRYVDAIMARVYAHKDVEDLAKYASVPVINGLSDFSHPCQALADYMTIWEKKGTIKGVKVVYVGDGNNVCHSLMIAGTKLGADVVVATPEGYEPDKKVIKWAEQNAAESGGSFELLHDPVKAVKDADVIYTDVWASMGQEAEAEERRKIFRPFQVNKDLVKHAKSDYMFMHCLPAHRGEEVTDDVIDSPNSVVWDEAENRLHAQKAVLALLLGGVKTGF

SEQ ID NO: 65141 - DNA, 948 bp, Pyrococcus kodakaraensis
  CDS (1)..(948): transl_table=11
atggtggttagccttgcaggaagagatgttctctgcctccaggacttcacgagggaggagcttgagactattctcaagactgccgagatgatgaagatctggaacaagattggaaagccgcaccgcgttcttgagggcaagaccctcgccatgatattccagaagccctcgacgaggacgaggatttcctttgaggtcggaatctaccagctcggcggctacggcctctacctcaacgcccaggacctccagctcaggaggggtgagaccatagccgacacggcaagggttctcagcaggtacgtcgatggaataatggctagggttttcgaccacaaggacgttgaggacctcgccaagtacgcgagcgtccctgtcataaacggcctctcggacttctcacacccgtgccaggccctagctgactaccagaccatcctcgagaagaagggcaggattcagggacttaagattgtctacgtcggtgacggaaacaacgtcgcccactccctcatgatagccggaaccaagctcggtgccaacgttgtcgttgccaccccagagggatacgagccagacccgaaggtaatcaagtgggccgagcagaacgcggccgaaagcggcggaagcttcgagctcctccacgaccctgttcaggctgtcaaggatgcggacgtcatctacaccgacgtctgggctagcatgggacaggaggccgaggccgaggagaggagaaagatattcatgcccttccaggtcaacaaggagcttgtaaagcacgccaagcccgactacatcttcatgcactgcctcccggcccacaggggagaagaagtcaccgatgatgtcatagacagcccgaacagcgtcgtcttcgaccaggccgagaacaggctccacgcccagaaggcagttatggccctcgtcatgggcgggattaaggtgtga

SEQ ID NO: 65142 - protein, 315 aa, Pyrococcus kodakaraensis
MVVSLAGRDVLCLQDFTREELETILKTAEMMKIWNKIGKPHRVLEGKTLAMIFQKPSTRTRISFEVGIYQLGGYGLYLNAQDLQLRRGETIADTARVLSRYVDGIMARVFDHKDVEDLAKYASVPVINGLSDFSHPCQALADYQTILEKKGRIQGLKIVYVGDGNNVAHSLMIAGTKLGANVVVATPEGYEPDPKVIKWAEQNAAESGGSFELLHDPVQAVKDADVIYTDVWASMGQEAEAEERRKIFMPFQVNKELVKHAKPDYIFMHCLPAHRGEEVTDDVIDSPNSVVFDQAENRLHAQKAVMALVMGGIKV

SEQ ID NO: 65143 - DNA, 1005 bp, Salmonella typhimurium
  CDS (1)..(1005): transl_table=11
atgtctacgttttaccaaaaaccttttttaaagttacttgatttcaccgccagcgagctcactgctctgttgcagcttgccgccaaactgaaagccgataagaaaaacggtaaagaagaacaaaagctggtgggtaagaatattgcgctcatcttcgaaaaagactcgacccggacacgatgctctttcgaagttgccgcatacgatcagggggcgcgcgtgacgtacctgggttccagcgggagccagatcggccataaagagtccatcaaagatactgcccgcgtcctgggccggatgtttgacggtattcagtatcgaggatatggccaggagatcgtcgaaacgctggctgaatattccggtgtgccggtatggaacggtttaaccgatgagtatcacccaacgcaattactggcggatctgcttaccatgcaggaacatctgccgggtaaagcctttaacgagatgacgttggtctatgccggcgacgcgcgtaataacatgggtaactccatgctggaagccgccgcgttaacaggattggatctccgtctggtcgcgccaaaagcctgctggccgcaagccgcgttagtggcggagtgcagcgccatggcgaaaaagaacggcggcgccataaccctgaccgaagatatcgcctcgggcgtaaaaggcgcggattttatctataccgatgtttgggtctctatgggcgaacccaaagagaaatgggcggagcgtattgccctgctgcgtgattatcaggtcaacagccagatgatggccttaaccggcaatccgcaggttaagttcctgcattgtctgcctgcgttccatgatgacgaaaccacgctcggcaaaaaaatggccgaagagtacggtttacatggcgggatggaagtgaccgacgaggtttttgagtctgcggccagcattgtctttgatgaagcggaaaaccgaatgcataccatcaaagcagtaatggtagcgacgctgtctaaataa

SEQ ID NO: 65144 - protein, 334 aa, Salmonella typhimurium
MSTFYQKPFLKLLDFTASELTALLQLAAKLKADKKNGKEEQKLVGKNIALIFEKDSTRTRCSFEVAAYDQGARVTYLGSSGSQIGHKESIKDTARVLGRMFDGIQYRGYGQEIVETLAEYSGVPVWNGLTDEYHPTQLLADLLTMQEHLPGKAFNEMTLVYAGDARNNMGNSMLEAAALTGLDLRLVAPKACWPQAALVAECSAMAKKNGGAITLTEDIASGVKGADFIYTDVWVSMGEPKEKWAERIALLRDYQVNSQMMALTGNPQVKFLHCLPAFHDDETTLGKKMAEEYGLHGGMEVTDEVFESAASIVFDEAENRMHTIKAVMVATLSK

SEQ ID NO: 65145 - DNA, 984 bp, Schizosaccharomyces pombe
  CDS (1)..(984)
atgtctttcaaaaaatttcctcgtcatttactatccattcgtgatcttagtcgcggagagattgtaaagttgatcgatcggtcttctgaaattaaacaagcttataagcagaattttcagaatcgccgttctgttcaaatgagtggtttgtcgtctcagaatgtcgccatgatcttcagtaagcgtagcactcgtactcgtgtatcagtcgaaagtgctgtcagttgccttggcggcaatgccatgtttttaggtaaagatgatatccaattaggagtgaatgagtctttatacgatacttcaaaagttatatcaagtatggtttctggtattgttgctcgcgtaaacaaatattcagatgttgctacgctcgctaaacatgcctcttgtcctgttattaatggtctttgtgacacgtttcatcctctccaggcgttagcagatttactcactattaaggaaactttcaaaagctttgacggtttaaaagttgcatgggtaggtgatgccaataacgttttacatgatttgatgattgcaaatgccaaggttggtattcatactagcgttgctaagcccaaggacgtcaacgttcgcgacgatattttatcaatcgttaacgaagctgcgaacgaaaacggttctacttttgaaattgttaacgaccccaaggttgctgttaaaaatgctgatatcgtcgttaccgacacttggatttctatgggtcaagaagctgagaaggaacaacgtcttaaacaatttacaggattccaagtcaccggagagatcatgaagcttgccaaacctagctgcaaattcatgcattgtttaccccgtcatcccgaggaagtgtctgacgaggtattttatggagagaacagtttagttttccaagaagcagagaaccgcaaatggaccactgttgctgtcttggaggctttgcttgtcaaccgtggtgaaattcttcctcctgcctcagcctaa

SEQ ID NO: 65146 - protein, 327 aa, Schizosaccharomyces pombe
MSFKKFPRHLLSIRDLSRGEIVKLIDRSSEIKQAYKQNFQNRRSVQMSGLSSQNVAMIFSKRSTRTRVSVESAVSCLGGNAMFLGKDDIQLGVNESLYDTSKVISSMVSGIVARVNKYSDVATLAKHASCPVINGLCDTFHPLQALADLLTIKETFKSFDGLKVAWVGDANNVLHDLMIANAKVGIHTSVAKPKDVNVRDDILSIVNEAANENGSTFEIVNDPKVAVKNADIVVTDTWISMGQEAEKEQRLKQFTGFQVTGEIMKLAKPSCKFMHCLPRHPEEVSDEVFYGENSLVFQEAENRKWTTVAVLEALLVNRGEILPPASA

SEQ ID NO: 65147 - DNA, 1014 bp, Shigella flexneri
  CDS (1)..(1014): transl_table=11
atgtccgggttttatcataagcatttcctgaaattactcgatttcacgccagctgaactcaacagcctgctgcagttagccgcgaagctgaaagctgataagaaaagcggtaaagaagaagccaaactcactggtaaaaacatcgcgctcatcttcgaaaaagactcgactcgtacccgatgctctttcgaagttgccgcatatgaccagggggctcgcgttacttatcttggcccaagcggtagtcagattggtcataaagagtcgattaaagacactgcccgcgtgcttggtcgcatgtatgacggtattcagtatcgcggctatggtcaggagattgtcgaaacactggcggaatacgctggcgtgccggtatggaacggcctgaccaatgagtttcaccccacgcagttgctggcggatctcctcaccatgcaggagcatttacccggtaaagcattcaacgaaatgacgctggtctatgcaggtgacgcacgtaacaacatgggcaattcgatgctcgaagctgcggcgcttaccggtctggatttgcgtctggtcgcgccacaggcatgctggccagaagctgcgctggttacggaatgccgcgccctggcacaacaaaatggcgggaatattacgctgacggaagatgtagctaaaggagttgaaggtgctgactttatctataccgatgtatgggtgtcgatgggtgaagcaaaagaaaaatgggctgaacgcattgcattactgcgtgattatcaggtgaacagcaagatgatgcagttgaccggtaacccggaggtcaaattcctccattgcctgcccgcgtttcatgacgaccaaacgacgcttggcaaaaaaatggcggaagagtttggcctacatggcggaatggaagtgactgatgaggtcttcgaatctgccgccagcattgtatttgatcaggcggaaaaccgcatgcataccatcaaagcggtgatggtcgcgacgctcagtaaattaaataattaa

SEQ ID NO: 65148 - protein, 337 aa, Shigella flexneri
MSGFYHKHFLKLLDFTPAELNSLLQLAAKLKADKKSGKEEAKLTGKNIALIFEKDSTRTRCSFEVAAYDQGARVTYLGPSGSQIGHKESIKDTARVLGRMYDGIQYRGYGQEIVETLAEYAGVPVWNGLTNEFHPTQLLADLLTMQEHLPGKAFNEMTLVYAGDARNNMGNSMLEAAALTGLDLRLVAPQACWPEAALVTECRALAQQNGGNITLTEDVAKGVEGADFIYTDVWVSMGEAKEKWAERIALLRDYQVNSKMMQLTGNPEVKFLHCLPAFHDDQTTLGKKMAEEFGLHGGMEVTDEVFESAASIVFDQAENRMHTIKAVMVATLSKLNN

SEQ ID NO: 65149 - DNA, 1008 bp, Streptomyces coelicolor
  CDS (1)..(1008): transl_table=11
atggcgacagtcccgaccgccctcgccggccgccacttcctcaaggagctggacttcaccgaggaggagttccgcggcctgatcgagctggccgcggagctgaaggccgcgaagcgggccgggacggagacgcggtacctccagggcaggaacatcgcgctgatcttcgagaagacctcgacgcgcacccgctgcgcgttcgaggtcgccgccgccgaccagggcgcctccacgacgtacctcgacccggccgggtcgcagatcggccacaaggagtccgtgaaggacaccgcccgcgtcctcggccgcatgttcgacggtatcgagtaccgcggcgacagccagaccaaggtcgaggaactggcggccttcgcgggcgtccccgtctacaacggcctgaccgacgactggcaccccacccagatgctcgccgacgtgctcacgatgaccgagcacagcgaccgccccctgcgggagatcaccttcgcctacctcggcgacgcccgcttcaacatgggcaactcctacctggtcaccggcgccctgctcggcatggacgtgcgcatcgtcgccccgaagtcctactggcccgcccaggaggtcgtcgaccgggcgcaccggctcgccgcggccagcggggcgcgcatcaccctcaccgaggacgtggccgaaggggtgcggggcgccgggttcgtcgtcacggacgtctgggtctccatgggcgagcccaaggaggtctgggcggagcggatcaaggcactcgcgccctacgccgtgaccatggacgtgctgcgcgccaccggcaacccggacgtcaggttcctgcactgcctgcccgccttccacgacctgggcaccaaggtgggccaggagatcttcgaggcccacgggctcgactccctggaggtcaccgacgaggtcttcgagtcggcgcactcggtcgtcttcgacgaggcggagaaccgcctgcacaccatcaaggccgtcctcgtcgccaccctcgcctga

SEQ ID NO: 65150 - protein, 335 aa, Streptomyces coelicolor
MATVPTALAGRHFLKELDFTEEEFRGLIELAAELKAAKRAGTETRYLQGRNIALIFEKTSTRTRCAFEVAAADQGASTTYLDPAGSQIGHKESVKDTARVLGRMFDGIEYRGDSQTKVEELAAFAGVPVYNGLTDDWHPTQMLADVLTMTEHSDRPLREITFAYLGDARFNMGNSYLVTGALLGMDVRIVAPKSYWPAQEVVDRAHRLAAASGARITLTEDVAEGVRGAGFVVTDVWVSMGEPKEVWAERIKALAPYAVTMDVLRATGNPDVRFLHCLPAFHDLGTKVGQEIFEAHGLDSLEVTDEVFESAHSVVFDEAENRLHTIKAVLVATLA

SEQ ID NO: 65151 - DNA, 921 bp, Sulfolobus acidocaldarius
  CDS (1)..(921): transl_table=11
atgttaaagggtaaaagcctactaacgttgttggatttctcgaattatgagatagaaagtattataaatctatcattctctatgaagagctttgttaatttaaacagtgttcctaaaactttagaaaataaaaagatagctctaattttcgagaagcctagtactaggaccagaataagtaccgagttagctgtaaagcttcttgggggtactagtatagtcttgtctaaatcagatattcaactaggaagaggagaaactgtagaagatactgctagagttctaggaagatatgtggatggcataggtgcacgagttctaaatcataatagccttgaaatactatcaaagtattctcggaagcctgtcataaatctgttgagtgatgtatcccatcccttacaagcgctaactgattttatgactgtcaaagagagatttggtacgtacacgaatatggcatttataggagatggaacggacaacgtgctaacaagccttatggagtttgtgtctaagatgggattagaattaagggtagccagtccaaaggagttcagaccaaagcaagaggtatggcgtagaatagaagaggagagtgaaaaaagtggtgcgatcatagagttttatgaagatccttatgaggctgtaaggggagtgaaggttgtttatacggatgtatgggtaagtatggggcaggagagtatagcagaagagaagaaaaagaagttgaaagactataaagtaaccagagatttaatgagatatgccagtaaagacgcaatttttatgcattgcttacctgcagttagaggtgaggaagtcgaggatgatgtaatagacggtcatcaaagtgctgtgtgggatcaggctgagaacagactttatactgctatggctgtgctttctctatttatttaa

SEQ ID NO: 65152 - protein, 306 aa, Sulfolobus acidocaldarius
MLKGKSLLTLLDFSNYEIESIINLSFSMKSFVNLNSVPKTLENKKIALIFEKPSTRTRISTELAVKLLGGTSIVLSKSDIQLGRGETVEDTARVLGRYVDGIGARVLNHNSLEILSKYSRKPVINLLSDVSHPLQALTDFMTVKERFGTYTNMAFIGDGTDNVLTSLMEFVSKMGLELRVASPKEFRPKQEVWRRIEEESEKSGAIIEFYEDPYEAVRGVKVVYTDVWVSMGQESIAEEKKKKLKDYKVTRDLMRYASKDAIFMHCLPAVRGEEVEDDVIDGHQSAVWDQAENRLYTAMAVLSLFI

SEQ ID NO: 65153 - DNA, 921 bp, Sulfolobus tokodaii
  CDS (1)..(921): transl_table=11
atgttaaaaggaaaaagcttgttatgcctactggatttttctaaacaggaaattgaaaaaatgatggaagtttctttccaaatgaagaatttccatatgttgagatcagtcccaagatcattagatggaaaaaccgtagcaatgttatttgagaaacccagtactaggacaagagtaagttttgagacagcaattaggttattaggtggcaatcctattgtattaaacaaatcagacattcagttaagtagaggagaaccagtagaggatacagcaagagttttagggaggtttgtagatggaatagcagcaagagttttaaaacacgaaacactagagttgttagctaaatactctaacaaacctactataaatcttttaagtgacctttctcaccctttacaagcattagcagattttatgacaataaaagaaaagtttggagaatatacttcactcacttttgtaggagatgggggagataatgtgctagtgagcttaatggcttttgtagctaaaatgggtttagaaattaagatagcttctcccaaagaatttaagcccagagatgacattatgaaaaggatagaagaagaagctgaaaaaagcggtgcgataattgaattttatgaggatccttatgaagctgtgagaggttcaaaggttgtatatactgatgtttgggttagtatgggtcaagaaagtatagctgaaaaaaagaaagagctattgagaaattatagagtaagtgttgatttaatgagatatgcgagtaaagatgcgatatttatgcactgtctgccagcagttagaggagaagaggtagaaaatgaagttatagatgggcctaagagtgcggtgtgggatcaagctgaaaacaggctttatacggcaatgagtgttctttcattacttctttaa

SEQ ID NO: 65154 - protein, 306 aa, Sulfolobus tokodaii
MLKGKSLLCLLDFSKQEIEKMMEVSFQMKNFHMLRSVPRSLDGKTVAMLFEKPSTRTRVSFETAIRLLGGNPIVLNKSDIQLSRGEPVEDTARVLGRFVDGIAARVLKHETLELLAKYSNKPTINLLSDLSHPLQALADFMTIKEKFGEYTSLTFVGDGGDNVLVSLMAFVAKMGLEIKIASPKEFKPRDDIMKRIEEEAEKSGAIIEFYEDPYEAVRGSKVVYTDVWVSMGQESIAEKKKELLRNYRVSVDLMRYASKDAIFMHCLPAVRGEEVENEVIDGPKSAVWDQAENRLYTAMSVLSLLL

SEQ ID NO: 65155 - DNA, 1128 bp, Trametes hirsuta
  CDS (1)..(1128)
atggcgctctcgacgaaagtcccgcacctgatgacgctcgcggacctgaccccgggccagatccagcgcatcatcacgcactcctaccacctcaagcgcaccgcccagccctggctcgcgccccaggggcgcgcaggcagcggcggcaagtacagcaacgccccgcacaagctgcgcatgccgtcgcagtcgctgttcagcaagtccatcgccctcctgttttcaaagcggagcacgcgcacgcggctctccgccgagaccgccgccctcctcctcggcgggcaggcgctcttcctcgggcgggaggacatccagctcggcgtgaacgagaccgtgcccgactcggcgcgggtcatcggcgggatgtgccagggcatcttcgcgcgggtgggggaccattccgagatcgaggaactcgcccggtactcgcccgtgcccgtgctcaacgcgctctcctcgctctggcacccgacgcaggtgctcgcggacatcctcacgctgcacgagcacgccgcgctcttcgacccggcctccgcgagccccacgccctccgccgcggacgcgttctcgcaaaagtacaccaagctcggcgaggtgcgcccgctcacggtcgcgtacgtcggcgacagcgcgaacgtcctgcacgacatgctcgtcacgtacccgcgcctcggccaccagctgcgcgtcgcgagccccgagaacgacaagtaccgcgcgccgaaggcggtgtgggaccgcgtcgtcgagctcggctgcgataagaacatcttctggacggcggacccgcgggcggcggtgaagggcgccgatttggtcgttactgacacctggatctcgatgggccaagaggcggagaaggcacagcgactgaaagactttgcaggctaccaagtgacggaggcgctgtgccgggaaggcggggccaacccggactggaagtttatgcattgtcttcctcggaagcaggacgaggtggacgacgaggtgttctacgggccgcgatcgctggtgttccaggagtcggacaaccggaagtggacgatcatggcgttgttcgaccttctctttggaaaatggtcgctgctcgcgcggaacggggagggcgcagatgcggggtcggagtag

SEQ ID NO: 65156 - protein, 375 aa, Trametes hirsuta
MALSTKVPHLMTLADLTPGQIQRIITHSYHLKRTAQPWLAPQGRAGSGGKYSNAPHKLRMPSQSLFSKSIALLFSKRSTRTRLSAETAALLLGGQALFLGREDIQLGVNETVPDSARVIGGMCQGIFARVGDHSEIEELARYSPVPVLNALSSLWHPTQVLADILTLHEHAALFDPASASPTPSAADAFSQKYTKLGEVRPLTVAYVGDSANVLHDMLVTYPRLGHQLRVASPENDKYRAPKAVWDRVVELGCDKNIFWTADPRAAVKGADLVVTDTWISMGQEAEKAQRLKDFAGYQVTEALCREGGANPDWKFMHCLPRKQDEVDDEVFYGPRSLVFQESDNRKWTIMALFDLLFGKWSLLARNGEGADAGSE

SEQ ID NO: 65157 - DNA, 1005 bp, Vibrio vulnificus
  CDS (1)..(1005): transl_table=11
atggcatttaatctccggaatcgcaacttcctcaagttgttggacttctcgacaaaagagatccagtttttgatcgatctgtctgctgatctaaagaaagccaaatacgctggcactgagcagaagaaactactgggcaaaaacattgcattgatctttgagaaagcgtcaactcgtacccgatgtgcttttgaagtcgccgcctttgatcaaggcgcacaagtcacctatatcggcccttctggatcgcaaattggtgataaagagtcgatgaaagacactgcgcgagtgttgggtcgcatgtacgatggcattcaatatcgtggctttggtcaagcgatcgtcgaagagctcggtgctttcgctggcgtcccggtatggaatggcttaaccgacgaatttcatcccacacaaattcttgctgacttcctcaccatgcttgaacacagccaaggcaaagcacttgccgacattcaattcgcctaccttggtgatgcgcgtaataacgtcggcaattcgttgatggtgggtgcagccaaaatgggcatggatattagccttgttggcccgcaagcttactggcccgatgaagaactcgtgaccgcctgccaagccattgccaaacaaaccggtggcaagattaccctgactgaaaatgtcgcagaaggggtacaaggctgtgatttcctctataccgacgtttgggtctccatgggtgaatcaccagaggcttgggatgagcgcgtggccttgatgaagccttatcaagtcaatacgaacgtcctcaagcaaactggcaatccgaatgtcaaatttatgcattgcctaccggctttccacaacgacgaaaccaccattggcaaacaagtggctgacaagtttggcatgaaaggcttggaagtgaccgaagaagtgtttgaatccgagcactcgattgtgtttgatgaagccgaaaatcgcatgcacaccatcaaagccgtaatggtcgcaactttaggtagttaa

SEQ ID NO: 65158 - protein, 334 aa, Vibrio vulnificus
MAFNLRNRNFLKLLDFSTKEIQFLIDLSADLKKAKYAGTEQKKLLGKNIALIFEKASTRTRCAFEVAAFDQGAQVTYIGPSGSQIGDKESMKDTARVLGRMYDGIQYRGFGQAIVEELGAFAGVPVWNGLTDEFHPTQILADFLTMLEHSQGKALADIQFAYLGDARNNVGNSLMVGAAKMGMDISLVGPQAYWPDEELVTACQAIAKQTGGKITLTENVAEGVQGCDFLYTDVWVSMGESPEAWDERVALMKPYQVNTNVLKQTGNPNVKFMHCLPAFHNDETTIGKQVADKFGMKGLEVTEEVFESEHSIVFDEAENRMHTIKAVMVATLGS

SEQ ID NO: 65159 - DNA, 1017 bp, Saccharomyces cerevisiae
  CDS (1)..(1017)
atgtcaaccacagcatccacgccttcatctttacgtcatttgatttctataaaagatctttctgatgaagaattcagaatcttagtacaaagagctcaacatttcaagaatgtttttaaagcaaataaaacgaatgatttccaatccaaccatctgaaactattgggtagaactatagccttaatatttactaaaagatcaactagaacgagaatttcgaccgaaggtgcagccaccttctttggtgcccaaccgatgtttttaggtaaagaggatattcagcttggtgtcaatgaatcattttacgataccaccaaggttgtatcatctatggtttcatgtatttttgcccgtgtgaacaaacatgaagacatacttgctttttgcaaggattcctctgtaccgatcatcaactctctatgtgacaaattccaccctttgcaagcaatttgtgatcttttaacaataatcgaaaacttcaatatatctctagatgaagtaaataagggaatcaattcaaaattgaagatggcatggattggtgatgccaataatgtcataaatgatatgtgcatcgcatgtctgaaattcggtataagtgtcagtatttccactccccccggtattgaaatggattccgatattgtcgatgaagcaaagaaagttgctgagagaaacggtgcgacatttgaattaacacacgactctttaaaggcctccaccaatgccaatatattagtaaccgatactttcgtttccatgggtgaagaatttgcgaaacaggccaagctgaaacaattcaaaggttttcaaatcaatcaagaacttgtctctgtggctgatccaaactacaaatttatgcattgtctgccaagacatcaagaagaagttagtgatgatgtcttttatggagagcattccatagtctttgaagaagcagaaaacagattatatgcagctatgtctgccattgatatctttgttaataataaaggtaatttcaaggacttgaaataa

SEQ ID NO: 65160 - protein, 338 aa, Saccharomyces cerevisiae
MSTTASTPSSLRHLISIKDLSDEEFRILVQRAQHFKNVFKANKTNDFQSNHLKLLGRTIALIFTKRSTRTRISTEGAATFFGAQPMFLGKEDIQLGVNESFYDTTKVVSSMVSCIFARVNKHEDILAFCKDSSVPIINSLCDKFHPLQAICDLLTIIENFNISLDEVNKGINSKLKMAWIGDANNVINDMCIACLKFGISVSISTPPGIEMDSDIVDEAKKVAERNGATFELTHDSLKASTNANILVTDTFVSMGEEFAKQAKLKQFKGFQINQELVSVADPNYKFMHCLPRHQEEVSDDVFYGEHSIVFEEAENRLYAAMSAIDIFVNNKGNFKDLK

SEQ ID NO: 65161 - DNA, 1008 bp, Yersinia pestis
  CDS (1)..(1008): transl_table=11
atgaatcagttctataaacgtcactttctgaggttgttagattttacccccgctgaaattattgccttgcttgatttagctactgaattgaaaaaagacaagaaatctggctgtgaacagcaaaaattggtcggtaagaatatcgcgctcatcttcgaaaaagactcgactcgcactcgatgctctttcgaagttgccgcatatgaccaaggtgctcgcgtcacttatctcgggccagggggaagccagattgggcataaagaatcaatcaaggataccgcccgtgtattaggccgtatgtatgacggcattcaatatcgtggctatgggcaacgcgtggtggaaacactcgcagaatttgccggcgtaccggtctggaatggcctgaccgatgagtttcatccaacccaactcctggctgatttgctgactatgcgggaacacctgcccaataaatcgctgaataaaatgacgttggcgtacctcggtgatacacgtaataacatggggaacagcctgttagaagcggccgcactggtaggaatggatttacgcctagtcgcaccgaaagcctgttggccagaggaagccttcgttatcagttgccaggcactggcacagaaaacggggggcaaaatcaccctgacagaagatattgccgagggagtgaacggcgctgattttctttataccgatgtctgggtctcgatgggggaacccaaagaggtctggcaggaacgcatcaacttactcaaaccttatcaggtcaatatgcgtgtactgacgctgaccggtaaccctcaggtaaaatttctgcactgcctccccgccttccacgatgaccaaaccaccatcggtaagcagatggccgaacaatatgatttacccggcggcatggaagtgactgaagaggtgtttgaatcagctcatagcattgtatttgatcaggcagaaaaccgcctgcataccatcaaagccgtgatggtcgccacgatgagcaaaatataa

SEQ ID NO: 65162 - protein, 335 aa, Yersinia pestis
MNQFYKRHFLRLLDFTPAEIIALLDLATELKKDKKSGCEQQKLVGKNIALIFEKDSTRTRCSFEVAAYDQGARVTYLGPGGSQIGHKESIKDTARVLGRMYDGIQYRGYGQRVVETLAEFAGVPVWNGLTDEFHPTQLLADLLTMREHLPNKSLNKMTLAYLGDTRNNMGNSLLEAAALVGMDLRLVAPKACWPEEAFVISCQALAQKTGGKITLTEDIAEGVNGADFLYTDVWVSMGEPKEVWQERINLLKPYQVNMRVLTLTGNPQVKFLHCLPAFHDDQTTIGKQMAEQYDLPGGMEVTEEVFESAHSIVFDQAENRLHTIKAVMVATMSKI

SEQ ID NO: 65163 - DNA, 1008 bp, Yersinia pseudotuberculosis
  CDS (1)..(1008): transl_table=11
atgaatcagttctataaacgtcactttctgaggttgttagattttacccccgctgaaattattgccttgcttgatttggctactgagttgaaaaaagacaagaaatctggctgtgaacagcaaaaattggtcggtaagaatatcgcgctcatcttcgaaaaagactcgactcgcactcgatgctctttcgaagttgccgcatatgaccaaggtgctcgcgtcacttatctcgggccagggggaagccagattgggcataaagaatcaatcaaggataccgcccgcgtattaggccgtatgtatgacggcattcaataccgtggctatgggcaacgcgtggtggaaacactcgcagaatttgccggcgtaccggtctggaatggcctgaccaatgagtttcatccaacccaactcctggctgatttgttgacgatgcgggaacatctgcccaataaatcgctgaataaaatgacgttggcgtacctcggtgatacacgtaataacatggggaacagcctgttagaagcggccgcactggtaggaatggatttacgcctggtcgcaccgaaagcctgttggccagaagaagccttcgttatcagttgtcaggcactggcacagaaaacggggggcaaaatcaccctgacagaagatattgccgagggagtgaacggcgctgattttctttataccgatgtctgggtctcgatgggggagcccaaagaggtctggcaggaacgcatcaccttgctcaaaccttatcaggtcaatatgcgtgtactgacgctgaccggtaaccctcaggttaaatttctgcactgcctccccgccttccacgatgaccaaaccaccatcggtaagcagatggccgaacaatatgatttacccggcggcatggaagtgactgaagaggtgtttgaatcagctcatagcattgtatttgatcaggcagaaaaccgcctgcataccatcaaagccgtgatggtcgccacgatgagcaaaatataa

SEQ ID NO: 65164 - protein, 335 aa, Yersinia pseudotuberculosis
MNQFYKRHFLRLLDFTPAEIIALLDLATELKKDKKSGCEQQKLVGKNIALIFEKDSTRTRCSFEVAAYDQGARVTYLGPGGSQIGHKESIKDTARVLGRMYDGIQYRGYGQRVVETLAEFAGVPVWNGLTNEFHPTQLLADLLTMREHLPNKSLNKMTLAYLGDTRNNMGNSLLEAAALVGMDLRLVAPKACWPEEAFVISCQALAQKTGGKITLTEDIAEGVNGADFLYTDVWVSMGEPKEVWQERITLLKPYQVNMRVLTLTGNPQVKFLHCLPAFHDDQTTIGKQMAEQYDLPGGMEVTEEVFESAHSIVFDQAENRLHTIKAVMVATMSKI

SEQ ID NO: 65165 - DNA, 1134 bp, Brassica napus
  CDS (1)..(1134)
atggtggcggcggctatggcttctcacgtctcttccacccgatcaccggctctttccctctcctcttcatcgtccttcttccccggcaccactctcaggcgattctccgccgtctcactcgcacctccggcgaccttctcacccctcagcctccgcgtctcctgccaagcctcatccgtcacgtccccttctacgtccgatgtgaaagggaaatctgacctgaaagactttctggccatagatgatttcgacacagagaccatcaagaagattctagacaaggcttcagaggtcaaagccctgttgaagtcaggggagagagactatctgccttttaaagggaagtctatgtctatgatctttgcaaagccctccatgaggactcgtgtttcctttgagactggctttttcttgcttggtggacatgcactgtatcttggacccaatgacatccagatgggcaagcgagaggagactcgcgacgttgctcgtgtcctgtcgcgctataatgacatcattatggcccgtgtttttgctcatcaggacattcttgatttggctaactactcgagtgtaccagttgtcaacggtctgacagatcataaccacccttgccaaatcatggccgacgcactcacaatgattgagcacattggtcaagtcgaagggacaaaggttgtctatgttggagacgggaacaatatggttcactcatggttagaattggcatccgttattcctttccattttgtctgcgcttgcccaaaagggtttgaaccagacaaagagatggttctaaaggcacagcaagctggattaagtaagatagagattaccaatgatcctaaagaagctgtcataggagctgatgttgtctactcagacgtatgggctagtatggggcaaaaggatgaagctgagtaccgccgtaaagcattccaaggattccaggtggatgaagctctgatgaagttggcgggtccaaaagcctatttcatgcattgtttgcctgcagaaagaggagtggaggtgaccaatggagtcgtggaagctccttattccatcgtcttcccacaggcggagaatcgcatgcatgcccaaaatgcgattatgcttcatttgctcggcttttaa

SEQ ID NO: 65166 - protein, 377 aa, Brassica napus
MVAAAMASHVSSTRSPALSLSSSSSFFPGTTLRRFSAVSLAPPATFSPLSLRVSCQASSVTSPSTSDVKGKSDLKDFLAIDDFDTETIKKILDKASEVKALLKSGERDYLPFKGKSMSMIFAKPSMRTRVSFETGFFLLGGHALYLGPNDIQMGKREETRDVARVLSRYNDIIMARVFAHQDILDLANYSSVPVVNGLTDHNHPCQIMADALTMIEHIGQVEGTKVVYVGDGNNMVHSWLELASVIPFHFVCACPKGFEPDKEMVLKAQQAGLSKIEITNDPKEAVIGADVVYSDVWASMGQKDEAEYRRKAFQGFQVDEALMKLAGPKAYFMHCLPAERGVEVTNGVVEAPYSIVFPQAENRMHAQNAIMLHLLGF

SEQ ID NO: 65167 - DNA, 1077 bp, Glycine max
  CDS (1)..(1077)
atggctgtgatcccgtgtcactgttaccgtaccgtcggatcagacaaaccctacctctccggtcagagtctccgccgtcgcgctcctttccccgccgtctctgtttcatttcgacgccgaatatcatgcgtcgcctcttctgccatcgctcacaaagttgggctgaaagattttcttcacttagatgattttgataaggacactattctgaagatgctggaccgggcacttgaggtcaaggccttgctgaagtcaggggacaggtcgtttcgaccttttgaggggaagacaatggcaatgatatttacaaagccgtccatgagaacgcgtgtttcgttcgagactggctttacattgttaggtggccatgctatttatttaggacctgatgatatccaaatgggcaagcgagaggagactcgtgacattgctcgtgttttgtctcgctataatgacatcattatggctcgtgtttttgctcataaggacatacttgatcttgcaaaatatgcaactgtgccagtcatcaatgggttgacagactacaaccatccctgccagataatggctgatgcccttaccatggttgagcacattggtcggtttgaaggtacaaaggttgtctatgttggagatggaaataatattgttcactcatggttgttgatggcatctgtaattccgtttcactttgtctgtgcgtgtcctaaaggatttgaacctgatgcaaaaacagttgagaaggcaaggaaagctggaatcagcaagattgagataactaatgatcccaaagaggctgttaaaggagctgatgttgtgtattcagatgtctgggccagcatgggccaaaaggaagaagctgaataccggcgccaagtttttaaaggatttcaggtgaaccaaaatcttatggatttggctggttcaaaggcatttttcatgcattgcttaccggcggaaagaggggtggaggtgactgacgaagttattgaagctccaaattcaatagtcttcccgcaagctgagaaccgaatgcatgcacagaatgccgtaatgcttcatgtacttgccaagtag

SEQ ID NO: 65168 - protein, 358 aa, Glycine max
MAVIPCHCYRTVGSDKPYLSGQSLRRRAPFPAVSVSFRRRISCVASSAIAHKVGLKDFLHLDDFDKDTILKMLDRALEVKALLKSGDRSFRPFEGKTMAMIFTKPSMRTRVSFETGFTLLGGHAIYLGPDDIQMGKREETRDIARVLSRYNDIIMARVFAHKDILDLAKYATVPVINGLTDYNHPCQIMADALTMVEHIGRFEGTKVVYVGDGNNIVHSWLLMASVIPFHFVCACPKGFEPDAKTVEKARKAGISKIEITNDPKEAVKGADVVYSDVWASMGQKEEAEYRRQVFKGFQVNQNLMDLAGSKAFFMHCLPAERGVEVTDEVIEAPNSIVFPQAENRMHAQNAVMLHVLAK

SEQ ID NO: 65169 - DNA, 1077 bp, Glycine max
  CDS (1)..(1077)
atggctgtgatcccgtgtcactgttaccgtaccgtcggatcagacaaaccctacctctccggtcagagtctccgccgtcgcgctcctttccccgccgtctctgtttcatttcgacgccgaatatcatgcgtcgcctcttctgccatcgctcacaaagttgggctgaaagattttcttcacttagatgattttgataaggacactattctgaagatgctggaccgggcacttgaggtcaaggccttgctgaagtcaggggacaggtcgtttcgaccttttgaggggaagacaatggcaatgatatttacaaagccgtccatgagaacgcgtgtttcgttcgagactggctttacattgttaggtggccatgctatttatttaggacctgatgatatccaaatgggcaagcgagaggagactcgtgacattgctcgtgttttgtctcgctataatgacatcattatggctcgtgtttttgctcataaggacatacttgatcttgcaaaatatgcaactgtgccagtcatcaatgggttgacagactacaaccatccctgccagataatggctgatgcccttaccatggttgagcacattggtcggtttgaaggtacaaaggtggtctacattggagatggaaataatattgttcactcatggttgttgatggcatctgtaattccctttcacttcgtctgtgcatgtccaaaaggatttgaacccgatgcaaaaacagttgagaaggcaaggaaagctggaatcagcaagattgagataaccaatgatcccaaagaagctgttaaaggagctgatgttgtgtattcagatgtctgggccagcatggggcaaaaggaagaagctgaataccgtcgccaagtttttaaaggatttcaggtgaaccaaaatcttatggatttggccggttcaaaggcattttttatgcactgcttacccgcggaaagaggggtggaggtgactgacgaagttattgaagctccaaattcaatagtcttcccacaagctgagaaccgaatgcatgcacagaatgctgtaatgcttcatgtacttggcaagtaa

SEQ ID NO: 65170 - protein, 358 aa, Glycine max
MAVIPCHCYRTVGSDKPYLSGQSLRRRAPFPAVSVSFRRRISCVASSAIAHKVGLKDFLHLDDFDKDTILKMLDRALEVKALLKSGDRSFRPFEGKTMAMIFTKPSMRTRVSFETGFTLLGGHAIYLGPDDIQMGKREETRDIARVLSRYNDIIMARVFAHKDILDLAKYATVPVINGLTDYNHPCQIMADALTMVEHIGRFEGTKVVYIGDGNNIVHSWLLMASVIPFHFVCACPKGFEPDAKTVEKARKAGISKIEITNDPKEAVKGADVVYSDVWASMGQKEEAEYRRQVFKGFQVNQNLMDLAGSKAFFMHCLPAERGVEVTDEVIEAPNSIVFPQAENRMHAQNAVMLHVLGK

SEQ ID NO: 65171 - DNA, 1119 bp, Zea mays
  CDS (1)..(1119)
atgacgccggcggcggcgatctccggctccagcagccacgtcgtcgtctcctccgcccgcctcaggcagccgttcacgctccctccgcgcaccgcttgcccaatcgccgccgccgcctcgcccgtgacccgccgcggggtcgcggtcgccgccgtgtcgagccccgttgtgtccgccgccgcggggaaggatgccaaacaggctcctaaggatttccttcaaatcattgattttgacaaggatacaataatgaagattcttaatcgagccatcgaggttaaggcattgataaagtctggagacaagagcttccaaccgttcaaagggaaaacaatggccatgatttttgccaagccatcaatgaggacccgtgtttcatttgagacgggattctttttacttggtgggcatgctatttatttgggtccagatgatatccagatgggcaaacgtgaggagactcgtgatgttgctagagtactttctggctataatgacatcattatggctagggtctttgctcaccaagatattctggacttggcaaaatatgcatctgtacctgtcataaatggtctcactgactataaccatccatgccagataatggctgatgcacttactatgcttgagcagattggtcgtattgaaaacactaaggttgtctatgttggagatgggaacaacattgtgcactcatggctgctattggctgctgtgcttccttttcactttgtatgtgcttgtcccaagggatttgagcctgacgcaaacacagtggagatcgccaggagtgctggaatcagtaagattgaaataacaaacagtcccagggaagcagttaagggagcagacgttgtgtacacagatgtttgggccagtatgggacaaaaggaagaagctgattatagaaaacagaagttccagggattcacggtggatgaggccctgatggagattgctggcccacaggcctaccttatgcactgtttgcctgcagagagaggagtggaggtgactgacggcgccattgaggctcccaactcaatcgtgttcccccaggctgagaacagaatgcacgctcagaacgccatcatgcttcacgtgctcggtgcttaa

SEQ ID NO: 65172 - protein, 372 aa, Zea mays
MTPAAAISGSSSHVVVSSARLRQPFTLPPRTACPIAAAASPVTRRGVAVAAVSSPVVSAAAGKDAKQAPKDFLQIIDFDKDTIMKILNRAIEVKALIKSGDKSFQPFKGKTMAMIFAKPSMRTRVSFETGFFLLGGHAIYLGPDDIQMGKREETRDVARVLSGYNDIIMARVFAHQDILDLAKYASVPVINGLTDYNHPCQIMADALTMLEQIGRIENTKVVYVGDGNNIVHSWLLLAAVLPFHFVCACPKGFEPDANTVEIARSAGISKIEITNSPREAVKGADVVYTDVWASMGQKEEADYRKQKFQGFTVDEALMEIAGPQAYLMHCLPAERGVEVTDGAIEAPNSIVFPQAENRMHAQNAIMLHVLGA

SEQ ID NO: 65173 - DNA, 1119 bp, Zea mays
  CDS (1)..(1119)
atgacgccggcggcggcgatctccggctccagcagccacgtcgtcgtctcctccgcccgcctcaggcagccgttcacgctccctccgcgcaccgcttgcccaatcgccgccgccgcctcgcccgtgacccgccgcggggtcgcggtcgccgccgtgtcgagccccgttgtgtccgccgccgcggggaaggatgccaaacaggctcctaaggatttccttcaaatcattgattttgacaaggatacaataatgaagattcttaatcgagccatcgaggttaaggcattgataaagtctggagacaagagcttccaaccgttcaaagggaaaacaatggccatgatttttgccaagccatcaatgaggacccgtgtttcatttgagacgggattctttttacttggtgggcatgctatttatttgggtccagatgatatccagatgggcaaacgtgaggagactcgtgatgttgctagagtactttctggctataatgacatcattatggctagggtctttgctcaccaagatattctggacttggcaaaatatgcatctgtacctgtcataaatggtctcactgactataaccatccatgccagataatggctgatgcacttactatgcttgagcagattggtcgtattgaaaacactaaggttgtctatgttggagatgggaacaacattgtgcactcatggctgctattggctgctgtgcttccttttcactttgtatgtgcttgtcccaagggatttgagcctgatgcaaacacagtggagatcgccaggagtgctggaatcagtaagattgaaataacaaacagtcccagggaagcagttaagggagcagacgttgtgtacacagatgtttgggccagtatgggacaaaaggaagaagctgattatagaaaacagaagttccagggattcccggtggatgaggccctgatggagattgctggcccccaggcctcccttatgcactgtttgcctgcagagagaggagtggaggtgactgacggcgccattgaggctcccaactcaaccgtgttcccccaggctgagaacagaatgcacactcagaacgccatcatgcttcacgtgctcggtgcttaa

SEQ ID NO: 65174 - protein, 372 aa, Zea mays
MTPAAAISGSSSHVVVSSARLRQPFTLPPRTACPIAAAASPVTRRGVAVAAVSSPVVSAAAGKDAKQAPKDFLQIIDFDKDTIMKILNRAIEVKALIKSGDKSFQPFKGKTMAMIFAKPSMRTRVSFETGFFLLGGHAIYLGPDDIQMGKREETRDVARVLSGYNDIIMARVFAHQDILDLAKYASVPVINGLTDYNHPCQIMADALTMLEQIGRIENTKVVYVGDGNNIVHSWLLLAAVLPFHFVCACPKGFEPDANTVEIARSAGISKIEITNSPREAVKGADVVYTDVWASMGQKEEADYRKQKFQGFPVDEALMEIAGPQASLMHCLPAERGVEVTDGAIEAPNSTVFPQAENRMHTQNAIMLHVLGA

SEQ ID NO: 65175 - DNA, 25 bp, Artificial sequence
  primer
atgctttcttgttccgtttcgtttc

SEQ ID NO: 65176 - DNA, 27 bp, Artificial sequence
  primer
ttatttcaagtccttgaaattaccttt

SEQ ID NO: 65177 - protein, 379 aa, Artificial sequence
  consensus sequence
  Variant (2)..(16): Xaa in position 2 to 16 is any amino acid
  Variant (17)..(17): Xaa in position 17 is any or no amino acid
  Variant (19)..(21): Xaa in position 19 to 21 is any amino acid
  Variant (23)..(29): Xaa in position 23 to 29 is any amino acid
  Variant (30)..(63): Xaa in position 30 to 63 is any or no amino acid
  Variant (65)..(65): Xaa in position 65 is any amino acid
  Variant (67)..(67): Xaa in position 67 is any amino acid
  Variant (73)..(73): Xaa in position 73 is any amino acid
  Variant (75)..(75): Xaa in position 75 is any amino acid
  Variant (77)..(82): Xaa in position 77 to 82 is any amino acid
  Variant (84)..(88): Xaa in position 84 to 88 is any amino acid
  Variant (90)..(94): Xaa in position 90 to 94 is any amino acid
  Variant (96)..(96): Xaa in position 96 is any amino acid
  Variant (98)..(99): Xaa in position 98 to 99 is any amino acid
  Variant (101)..(103): Xaa in position 101 to 103 is any amino acid
  Variant (105)..(105): Xaa in position 105 is any amino acid
  Variant (107)..(107): Xaa in position 107 is any amino acid
  Variant (109)..(115): Xaa in position 109 to 115 is any amino acid
  Variant (117)..(118): Xaa in position 117 to 118 is any amino acid
  Variant (120)..(129): Xaa in position 120 to 129 is any amino acid
  Variant (131)..(135): Xaa in position 131 to 135 is any amino acid
  Variant (138)..(138): Xaa in position 138 is any amino acid
  Variant (140)..(140): Xaa in position 140 is any amino acid
  Variant (142)..(142): Xaa in position 142 is any amino acid
  Variant (144)..(145): Xaa in position 144 to 145 is any amino acid
  Variant (148)..(148): Xaa in position 148 is any amino acid
  Variant (150)..(151): Xaa in position 150 to 151 is any amino acid
  Variant (154)..(155): Xaa in position 154 to 155 is any amino acid
  Variant (157)..(158): Xaa in position 157 to 158 is any amino acid
  Variant (160)..(170): Xaa in position 160 to 170 is any amino acid
  Variant (171)..(201): Xaa in position 171 to 201 is any or no amino acid
  Variant (204)..(204): Xaa in position 204 is any amino acid
  Variant (205)..(205): Xaa in position 205 is any or no amino acid
  Variant (208)..(227): Xaa in position 208 to 227 is any amino acid
  Variant (229)..(253): Xaa in position 229 to 253 is any amino acid
  Variant (254)..(271): Xaa in position 254 to 271 is any or no amino acid
  Variant (273)..(275): Xaa in position 273 to 275 is any amino acid
  Variant (277)..(280): Xaa in position 277 to 280 is any amino acid
  Variant (283)..(283): Xaa in position 283 is any amino acid
  Variant (285)..(285): Xaa in position 285 is any amino acid
  Variant (289)..(302): Xaa in position 289 to 302 is any amino acid
  Variant (303)..(304): Xaa in position 303 to 304 is any or no amino acid
  Variant (306)..(319): Xaa in position 306 to 319 is any amino acid
  Variant (320)..(321): Xaa in position 320 to 321 is any or no amino acid
  Variant (323)..(323): Xaa in position 323 is any amino acid
  Variant (328)..(331): Xaa in position 328 to 331 is any amino acid
  Variant (332)..(351): Xaa in position 332 to 351 is any or no amino acid
  Variant (354)..(356): Xaa in position 354 to 356 is any amino acid
  Variant (358)..(362): Xaa in position 358 to 362 is any amino acid
  Variant (363)..(363): Xaa in position 363 is any or no amino acid
  Variant (365)..(365): Xaa in position 365 is any amino acid
  Variant (368)..(369): Xaa in position 368 to 369 is any amino acid
  Variant (374)..(378): Xaa in position 374 to 378 is any amino acid
LXXXXXXXXXXXXXXXXAXXXKXXXXXXXXXXXXXXXXXXXXXXXXXXXXXXXXXXXXXXXXXFXKXSTRTRXSXEXXXXXXGXXXXXLXXXXXQXGXXEXXXDXAXVXXXXXXXIXXRXXXXXXXXXXAXXXXXPVXNXLXDXXHPXQXXADXXTXXEXXXXXXXXXXXXXXXXXXXXXXXXXXXXXXXXXXXXXXXXXXGDXXNNXXXXXXXXXXXXXXXXXXXXPXXXXXXXXXXXXXXXXXXXXXXXXXXXXXXXXXXXXXXXXXXXAXXXAXXXXTDXWXSMGXXXXXXXXXXXXXXXXQXXXXXXXXXXXXXXXXFXHCLPXXXXXXXXXXXXXXXXXXXXXXXXEVXXXVXXXXXXSXVFXXAENRXXXXXA

SEQ ID NO: 65178 - protein, 49 aa, Artificial sequence
  protein pattern
  Variant (2)..(5): Xaa in position 2 to 5 is any amino acid
  Variant (7)..(7): Xaa in position 7 is any amino acid
  Variant (8)..(8): Xaa in position 8 is Ala, Gly or Ser
  Variant (9)..(12): Xaa in position 9 to 12 is any amino acid
  Variant (14)..(14): Xaa in position 14 is Ala or Gly
  Variant (15)..(18): Xaa in position 15 to 18 is any amino acid
  Variant (19)..(19): Xaa in position 19 is Ile, Leu, Met or Val
  Variant (20)..(20): Xaa in position 20 is Ala, Asp, Gly, Asn, Ser or Thr
  Variant (21)..(24): Xaa in position 21 to 24 is any amino acid
  Variant (26)..(26): Xaa in position 26 is Ile, Leu, Met or Val
  Variant (27)..(29): Xaa in position 27 to 29 is any amino acid
  Variant (31)..(31): Xaa in position 31 is Glu, Pro, Ser or Thr
  Variant (32)..(33): Xaa in position 32 to 33 is any amino acid
  Variant (35)..(35): Xaa in position 35 is any amino acid
  Variant (36)..(36): Xaa in position 36 is Ala, Gly, Ser or Thr
  Variant (37)..(38): Xaa in position 37 to 38 is any amino acid
  Variant (39)..(39): Xaa in position 39 is Ile, Leu, Met or Val
  Variant (40)..(40): Xaa in position 40 is Ala, Gly or Ser
  Variant (41)..(45): Xaa in position 41 to 45 is any amino acid
  Variant (46)..(46): Xaa in position 46 is Ile, Leu, Met or Val
  Variant (47)..(48): Xaa in position 47 to 48 is any amino acid
TXXXXEXXXXXXGXXXXXXXXXXXQXXXXEXXXDXXXXXXXXXXXXXXR

SEQ ID NO: 65179 - protein, 27 aa, Artificial sequence
  protein pattern
  Variant (2)..(2): Xaa in position 2 is Ile or Val
  Variant (3)..(3): Xaa in position 3 is Ala, Asp, Glu, Ser or Thr
  Variant (4)..(4): Xaa in position 4 is any amino acid
  Variant (5)..(5): Xaa in position 5 is Ala, Asp, Glu, Gly or Gln
  Variant (6)..(6): Xaa in position 6 is any amino acid
  Variant (7)..(7): Xaa in position 7 is Phe, Ile, Leu, Met or Val
  Variant (8)..(8): Xaa in position 8 is any amino acid
  Variant (9)..(9): Xaa in position 9 is Ala, Asp, Gly or Ser
  Variant (10)..(11): Xaa in position 10 to 11 is any amino acid
  Variant (12)..(12): Xaa in position 12 is Ala, Cys, Asn or Ser
  Variant (13)..(14): Xaa in position 13 to 14 is any amino acid
  Variant (15)..(15): Xaa in position 15 is Phe or Trp
  Variant (16)..(16): Xaa in position 16 is any amino acid
  Variant (17)..(17): Xaa in position 17 is Glu or Gln
  Variant (22)..(23): Xaa in position 22 to 23 is any amino acid
  Variant (24)..(26): Xaa in position 24 to 26 is any or no amino acid
EXXXXXXXXXXXXXXXXAENRXXXXXA

SEQ ID NO: 65180 - protein, 12 aa, Artificial sequence
  protein pattern
  Variant (2)..(6): Xaa in position 2 to 6 is any amino acid
  Variant (7)..(7): Xaa in position 7 is Phe, Ile, Leu or Val
  Variant (8)..(8): Xaa in position 8 is Leu or Met
AXXXXXXXHCLP

SEQ ID NO: 65181 - DNA, 3708 bp, Saccharomyces cerevisiae
  CDS (1)..(3708)
atgcattttagaagaacgatgagtagagtgcccacattggcatctcttgaaatacgatataaaaaatctttcggccataaatttcgtgattttattgctctatgtggtcactattttgctccagttaaaaaatatatcttccccagttttatcgcggttcactacttctacacgatatccctgacattaataacttcaatcctgctatatcccattaagaataccagatacattgatacattgtttttagcagcgggcgcagttacacaaggtggcttaaatactgtggatatcaacaatctaagcttataccaacaaattgttctgtatatcgtatgctgcatatcaacaccaattgcagttcatagttgcttggcatttgtacggctttactggtttgagcgctacttcgatggtattagagactcttctagacgaaattttaagatgagaagaacgaaaacaatcttagaaagggaactaacagcaagaaccatgaccaagaatagaacaggtacccaaagaacgtcttatcctaggaaacaagctaaaacagatgatttccaagaaaaattgttcagcggagaaatggttaatagagatgagcaggactcagttcacagcgaccagaattctcatgacattagtagggacagcagcaataataatacgaatcacaatggtagcagtggcagtttagatgatttcgttaaggaagacgaaacggatgacaatggagaatatcaggagaacaactcctactcgacggtaggtagttcgtctaacacagttgcagacgaaagtttaaatcagaagcccaagccaagcagtcttcggtttgatgagccacacagcaaacaaagacccgcaagagttccctcagagaaatttgcaaaaagaaggggttcaagagatattagcccagccgatatgtatcgatccattatgatgctacaaggtaagcatgaagcaactgctgaagatgaaggtccccctttagtcatcgggtcccctgcggatggcacaagatataaaagtaatgtcaataagctaaagaaggccaccggcataaatggtaacaaaatcaagattcgagataagggaaatgaaagtaacactgatcaaaattccgtgtcaagtgaagcaaacagtacggcgagcgtttcggacgaaagctcgttacacacaaattttggtaacaaagtaccttcattaagaacaaatactcatagatcaaattcgggcccgatagccattactgataacgcagaaacagacaaaaagcatgggccatcaattcaattcgatataactaaacctcctagaaaaatttcaaaaagagtttcaaccttcgatgatttgaacccaaaatcttccgttctttatcgaaaaaaagcatcgaagaagtacctcatgaaacattttcctaaagcgcggcgaatacggcaacaaattaagagaaggctttctactggttcaattgagaaaaacagcagtaacaatgtttcagatagaaaacctattactgatatggatgatgatgatgatgacgatgacaacgacggcgataacaacgaagaatactttgctgacaacgaaagcggcgatgaagatgaacgagtacagcagtctgaaccacattctgattcagaactcaaatcgcaccaacaacagcaagaaaaacaccaactgcagcagaacctgcaccgcatgtataaaaccaaatcatttgatgataatcgttcaagagcagttcctatggaacgttccaggaccatcgatatggcagaggctaaggatctaaatgagctcgcaaggacgcctgattttcaaaaaatggtctatcaaaattggaaagcccatcatagaaaaaaaccgaactttaggaagaggggatggaataacaagatatttgaacatggtccctatgcatctgacagcgatcgcaattatcctgataatagtaatactggaaacagtattcttcattacgcagagtctattttacatcatgatggctctcataaaaatggaagcgaagaagcctcttccgactctaatgagaatatctattccacgaatggaggaagcgaccacaatggtcttaacaactatcctacttacaacgacgatgaagaaggctattatggtttacatttcgataccgattatgacctagatcctcgtcatgatttatctaaaggcagtggtaaaacgtatctatcatggcaaccaactattggacgtaactcaaacttccttggattaacaagagcccagaaagatgaattaggtggtgtcgagtacagagcaatcaaacttttatgcaccatattggttgtctactacgttggatggcatattgttgcttttgttatgttagtaccttggattattttgaaaaagcattatagtgaagttgttagagatgatggtgtttcacctacatggtggggattttggacagcaatgagtgcatttaatgatttaggtttgacattaactccaaattcaatgatgtcgtttaacaaagctgtatacccattgatcgttatgatttggtttatcattatcggaaatacagggtttcccatccttcttagatgcatcatttggataatgtttaaaatttctcctgatttatcacagatgagagaaagtttaggttttctcttagaccatccacgtcgttgtttcaccttgctatttcctaaggcagctacatggtggctacttttaacgcttgcaggattgaatataactgattggattttatttattattctagattttggctcaacagttgtgaaatcattatcgaaaggctatagagtccttgtcggcctgtttcaatctgttagcacaagaactgctggattcagcgttgtcgatttaagtcaactgcatccttctatccaagtctcctatatgctaatgatgtatgtctccgtattaccattggccatctctattcgacggacaaatgtttacgaggagcaatctttaggactatatggagatatggggggagaaccagaagatacggatactgaagacgatggtaacgatgaagatgacgacgaggaaaacgagagtcacgaaggtcaaagtagtcaaagaagtagttcgaacaacaacaacaataacaacaggaaaaagaaaaagaaaaagaaaactgaaaatccaaatgaaatatctacaaaatcctttatcggtgcccatttaaggaaacagctttcatttgacttgtggtttctatttttagggttatttatcatttgcatttgtgaaggggacaagataaaggacgtacaagaaccaaactttaatatatttgcaattctttttgaaattgttagcgcttacggtacagttgggctatcgctaggttatccggacaccaaccaatcgttttcaagacagtttactacattatctaagttggtgatcatagctatgctgatcagaggcaagaatagaggtctaccatactcactggatcgtgcaattatcttgcctagtgatagacttgaacatattgaccaccttgagggcatgaaattgaagagacaggctagaaccaatacagaagacccaatgacggaacatttcaagagaagtttcactgatgtgaaacatcgttggggagctcttaagcgtaagaccacacattcccgaaatcctaaaaggagcagcacaacgctctaa

SEQ ID NO: 65182 - protein, 1235 aa, Saccharomyces cerevisiae
MHFRRTMSRVPTLASLEIRYKKSFGHKFRDFIALCGHYFAPVKKYIFPSFIAVHYFYTISLTLITSILLYPIKNTRYIDTLFLAAGAVTQGGLNTVDINNLSLYQQIVLYIVCCISTPIAVHSCLAFVRLYWFERYFDGIRDSSRRNFKMRRTKTILERELTARTMTKNRTGTQRTSYPRKQAKTDDFQEKLFSGEMVNRDEQDSVHSDQNSHDISRDSSNNNTNHNGSSGSLDDFVKEDETDDNGEYQENNSYSTVGSSSNTVADESLNQKPKPSSLRFDEPHSKQRPARVPSEKFAKRRGSRDISPADMYRSIMMLQGKHEATAEDEGPPLVIGSPADGTRYKSNVNKLKKATGINGNKIKIRDKGNESNTDQNSVSSEANSTASVSDESSLHTNFGNKVPSLRTNTHRSNSGPIAITDNAETDKKHGPSIQFDITKPPRKISKRVSTFDDLNPKSSVLYRKKASKKYLMKHFPKARRIRQQIKRRLSTGSIEKNSSNNVSDRKPITDMDDDDDDDDNDGDNNEEYFADNESGDEDERVQQSEPHSDSELKSHQQQQEKHQLQQNLHRMYKTKSFDDNRSRAVPMERSRTIDMAEAKDLNELARTPDFQKMVYQNWKAHHRKKPNFRKRGWNNKIFEHGPYASDSDRNYPDNSNTGNSILHYAESILHHDGSHKNGSEEASSDSNENIYSTNGGSDHNGLNNYPTYNDDEEGYYGLHFDTDYDLDPRHDLSKGSGKTYLSWQPTIGRNSNFLGLTRAQKDELGGVEYRAIKLLCTILVVYYVGWHIVAFVMLVPWIILKKHYSEVVRDDGVSPTWWGFWTAMSAFNDLGLTLTPNSMMSFNKAVYPLIVMIWFIIIGNTGFPILLRCIIWIMFKISPDLSQMRESLGFLLDHPRRCFTLLFPKAATWWLLLTLAGLNITDWILFIILDFGSTVVKSLSKGYRVLVGLFQSVSTRTAGFSVVDLSQLHPSIQVSYMLMMYVSVLPLAISIRRTNVYEEQSLGLYGDMGGEPEDTDTEDDGNDEDDDEENESHEGQSSQRSSSNNNNNNNRKKKKKKKTENPNEISTKSFIGAHLRKQLSFDLWFLFLGLFIICICEGDKIKDVQEPNFNIFAILFEIVSAYGTVGLSLGYPDTNQSFSRQFTTLSKLVIIAMLIRGKNRGLPYSLDRAIILPSDRLEHIDHLEGMKLKRQARTNTEDPMTEHFKRSFTDVKHRWGALKRKTTHSRNPKRSSTTL

SEQ ID NO: 65183 - DNA, 2802 bp, Gibberella zeae PH-1
  CDS (1)..(2802)
atggctgccgaggcgcgtgcctctatatgggcgcggctcaaagctgtcaagccgcccttcgtctcaaagaaaccgcatttcaactttatttccattcattacacatggatcatcggcgcaacattatgtgcttctgttattatttacgggtctggtcgcggccaaacttcttacatcgattccctcatgttcgcaagtggagccaatacacaggctggcctaaatcccattgatgttaatcttctcaatacctttcaacaggttgttgtttatttctttactttaacctccaaccctatcactttacacacctcagtcgttttcctgcgtctgtactggttcgaaaagaggtttcaaggctgggttacagacgcccgacagcgccgcgctaccatctccaaggcaaagacccgtccacggaacgatgaccgtcagaatgaagaaggagttaatggccggcatattaccattgttcctccccagggacggcgtcaacgcatcaccaacgacggcattttattagacgggagtgaggcctatcaatctcaggcaattgtcgacgacgatgacgacaatgatcaccagcggcgccaaccaccacctgcgagcagcgacgagagtgacacagtttcagctggacgatccaatagcatagagctcagcccactcgaaaagcctggtcaggctcaccacgacaacagggatgagtggaaagaagaacaatccagaacgcagaacacaccgtctggaatcaaatttgccgagacggttaagagaagtgacggggttgacgacgacttgaccaagtttcctcaacgaaggacgcacgcagagcacattgccattttggagcgccagcgaaaccaagacaatgaagtgttgaggattcccggtccacgagaaaccgagagaggactgggcccgcgaaggctggaagaagatgatggagacgatgacaacaacactatcgccatgacgagaacagtggaatcgagaccggatcatgctaccatcgattcgaggggaccacccggtcgtagaccaaccatcgttattgccgagccgaagcgtccgctcaaacacgaattgactgacgatgccagagccattggtggcactctcgatgctattaggatgcgaaagccccgtatcctcaaccgtggccaaaaggagacacacgacgatggcgatagcacaatgagccgtgccttccgaactcgcacaatagacaccatcaggtcagctttaacaaacgaccacaccaaggacatgccttatctgagttatacaccgactatgggtcgaaactcaaactttgtggggttgactcttgagcagcgagaggaattgggtggcattgaatatcggtcactgagaacgctggccgtaatattgctttcctacttttgggggtttcagcttattgctgtaacctttctcctgccctggattctccacactgaaaagtatggcagaatcgttgaggccagtgctgtttccagaacttggtggggtttctggacagccaactctgctttcaacgacctgggtctaaccttgaccccggacagcatgaactctttcaatacttcagagtatatcatgatgatcatgtggttctttgttatcatcggaaacactggatttcctgtcatgttgcgtttcgttatctgggtcctgtctcgacttgtgccaaccaacactggcctctgggaggagctcagattccttctcgaccaccctcgtcgttgctttactctactgttcccttcaagcgccaactggtggctgttttggattctcgtcgctttgaacgccatagacttgctgttctttgtcgtacttgatttgaattcgggtccagtcgcccaactgcctgttcatactcgcattgctgatggcctctttcaagccgcttctactaggactgcgggtttctcttgcttcagcttgagtgacctccatcctgcccttccagtgctgtacatgatcatgatgtacatttccattttccctatcgcgatttccattcgccgaaccaacgtctacgaagagaagtctcttggcgtctacagcagcaagaaagacgatgacgaagaagaatcagccagtgctctcaattacgtcggcactcatttgcgtcgccaactctccttcgatctgtggtatgtcttcgtgggcttcttcctacttgccatcagcgaaggtggtagcctcaaagcgaaggacttcaacttgttcgacattctcttcgaggtcatcagcgcatacggaactgttggtctgagcatgggtgtgcccaacgtcaatgcctccctttgctcgcagttcactgttgtcggtaaactcatcattgttgctatgcaaattcgtggtcgacatcgtggtttgccttatggcttggatcgtgctgtgcttttgccaagcgaagcacgcttccagaaggaggccgaggaaaaccaaccaatcctcatacgcacacgtacaaatgcgtccatgggggcagcatctggcatggaacctccatcaagtccaggcttccctggccgaagaggaagtgccagccgtttccgcgagagagccaacagccgcatcatttcccaattcctctatcctggacctgttattcccagtaacgagatccatggccacaagcgcgcaacctcaaataattctaataacacacgagactttccacgattcaatactgaaccagtatttgaggaagagaaagatgaggttcctcccctgcggcccatcgaatcccaccaattcacgcctcggcgggcagagacaggctaa

SEQ ID NO: 65184 - protein, 933 aa, Gibberella zeae PH-1
MAAEARASIWARLKAVKPPFVSKKPHFNFISIHYTWIIGATLCASVIIYGSGRGQTSYIDSLMFASGANTQAGLNPIDVNLLNTFQQVVVYFFTLTSNPITLHTSVVFLRLYWFEKRFQGWVTDARQRRATISKAKTRPRNDDRQNEEGVNGRHITIVPPQGRRQRITNDGILLDGSEAYQSQAIVDDDDDNDHQRRQPPPASSDESDTVSAGRSNSIELSPLEKPGQAHHDNRDEWKEEQSRTQNTPSGIKFAETVKRSDGVDDDLTKFPQRRTHAEHIAILERQRNQDNEVLRIPGPRETERGLGPRRLEEDDGDDDNNTIAMTRTVESRPDHATIDSRGPPGRRPTIVIAEPKRPLKHELTDDARAIGGTLDAIRMRKPRILNRGQKETHDDGDSTMSRAFRTRTIDTIRSALTNDHTKDMPYLSYTPTMGRNSNFVGLTLEQREELGGIEYRSLRTLAVILLSYFWGFQLIAVTFLLPWILHTEKYGRIVEASAVSRTWWGFWTANSAFNDLGLTLTPDSMNSFNTSEYIMMIMWFFVIIGNTGFPVMLRFVIWVLSRLVPTNTGLWEELRFLLDHPRRCFTLLFPSSANWWLFWILVALNAIDLLFFVVLDLNSGPVAQLPVHTRIADGLFQAASTRTAGFSCFSLSDLHPALPVLYMIMMYISIFPIAISIRRTNVYEEKSLGVYSSKKDDDEEESASALNYVGTHLRRQLSFDLWYVFVGFFLLAISEGGSLKAKDFNLFDILFEVISAYGTVGLSMGVPNVNASLCSQFTVVGKLIIVAMQIRGRHRGLPYGLDRAVLLPSEARFQKEAEENQPILIRTRTNASMGAASGMEPPSSPGFPGRRGSASRFRERANSRIISQFLYPGPVIPSNEIHGHKRATSNNSNNTRDFPRFNTEPVFEEEKDEVPPLRPIESHQFTPRRAETG

SEQ ID NO: 65185 - DNA, 4059 bp, Candida glabrata CBS 138
  CDS (1)..(4059)
atggaactgaggcgaagactgagtagagtgcaaactcttactcaattcaacttctcatacaacaagagttttggtcataaattcagagatttcatagcaaaaagtggccaccatgtaaagccaattcaaaagtatatctttcccaattttattgctgtccattatttttacataatattcatgacaattctggcgtctattttactttatcctgttaaaaatttcagttatatcgatattttgtttttggcagctggggctaccactcaaggtggtttgaatacggttaatatcaatgaacttactttatatcaacagatgataatatacattatatgctgtctttgcactcccattgcaattcacggcacactcgcatttgtgagattatattggttcgagcgatactttgacaatattagagatacatccaagaggaattataaaatgagaaggacaaaaacaatcttagagagagaaaaaactgcgagaactctttctaggctacgaacgaatacaactatacctatacataaatcaaatcaagaaaattcccaaagatcaaatttccaagagaagttgtttagtggtgagtttgttaatagagatgaacaaaactcaatcgagagccaacaggacgccatggattcccaaagtacacaaaacagtttaccaacattcaaaggccttggtccaagtaaaattcaaaaaacagctagtccaagatcactaaattcaactctaccatctgggtctgttcttgaagatggtgaaagtagaacgccatatgagcagccaattgactacactatacctaactcaaacccaaaccttactgttcccgtagaacggtttaaaaggagaaggtcgagagatatatctcctcaggatatgtaccgttcaattatgatgctacaggataaacattctaatatagatgataacgaggaaggtccagcattggtaataggttcaccacaagatagacagaacataaaaccaactgtacaatcacagtcaatgggtcacaatgcacttacacctgtgcattcaatttcagacaaagaagtaagtccaaaacatgtagacgcaaatgaaataaatatgggaatgaaagtaaaggataaacatggtaatcaaggcccaagtcgcagaagtggaagtcaatcgccctctagcgagaatgcatttccgaatgagaatgatgaagaggaaaatttttctccttacactaattctcgaaaaatcaaactaaataagcatcctacaggtaggaattatgataactcttctgatgacttgaatagtgctggtaattacaattctgaagaaggattagagggtgagaatgcaacccaatcaacagaggaagtaagtcccttagattcagatgatgcttattctgacggtgattcccatgaatatgagaatacagaagtgaatgaagattcagattcaattcaggatatacaaagtggaaataatcgtttatatagaagaagaactgatcaggaacggaacctaaattatgagtcggaagcatctatcacacaggataatatcgaacgccataataacgattcaattaatagtgagaacgctgcaagcgatgattccgaaagtaatggtgaaaatacaaatgatagaaatgctagaactcccaacaaaggaggtgagccgaaaattcaattcaacattacagaacctcctaggaagagaagaacacaaaattttcatattatggaagccacaagacccaacataccacataatgcacataaaagaacatcaagtaatttatttctcaagcaattgtccaaaggtaagcggatacggcataatcttaaaaggagactttctagtggaccatttgagaaaaatgaatcgccatttaatccttcaataaaaaatgtgaacaagcagaaaggttctcagaaagagactaatcaagacaacggtgaagattactttgcagacaatgagagtgatgacgatgataataatccagccagttctgactacaatgggctatccaaaactgtatcatataacaacactgaggatagaaagcctgacccggtaagacttactatggagagagcgatgactatggataatataacacctgaggatctcaataagttagctcaaaaacctgacttccaaaaaatggtatacaaaaattggaaaagaaaacacaggaaaaacaagaagaatagaaaattaggatggaataaaaaatttgattttgaggacacactacccaccgtttttgacagtcataatgagggccatcaaaggacgatgtctaatgatgaagataacgaagacattagaaatggtaatattgacaggtataacacgattgactacaacgatggttaccaaattgatcccgacatgaatgaggagggctattttggcgtttcttttaataatgactacaattttagtcgtcatcctttttctcggacaatgagtgccaactatctgtcttgggagcctacagttggacgtaattctttatttgtcgatctaagtagagcacagaaggaagaattaggtggtgttgaatatagatcgattaaattattatgcaaaattcttgttatctattacctgggctttcatatcatgtcattcacaatgctacttccttggattactcataagacaaaatataaacatattgtaagggatgatggtgtatctccaggttggtggggtttttttacagctatgagtgcttttaatgacttgggtttgacactaactcctgattcaatgagctctttcaatcgggcagcctatccacttattgtaatgatttggttcataattataggtaacactggatttcctgtattattgagattcataatatgggtgatgtatcacttatcgtcagatttgtcacaactgagggagagtctggccttcttgctggaccatcctcgtcgttgtttcacgctattatttcctagcaccgctacatggtggttatttggaattttggtaggtctaaacattacagattggattttgtttatcattctggactttaataatgtcgttgtgaagccgaatcccaaaggttatagagttttaatgggattgtttcaagcagttagcacaagaaccgctgggttttctgttgtcgatctaagccaacttaattctgcagtgcaagtgtcatatatgattatgatgtacgtgtctgttttgcctttggctatttctattcgtagaactaatgtttacgaagagcaatctttgggtttgtacgggaatgtagaagatgatgactcaagtgattcagattatgaagaccatttaagttcggaggaagaactattagctaaaaatggagataacgacgatgacgaagaaacgctagactcacaatattattcgaaatccatacgcggtagaaatgatagcgatgaaagctcttctaatgaaggaggtagtaactcttcagcaaagaagagaaaaaggacagccaaaaaagaatcctccaaaggtaaaaagaagaaaagaagagtgtctgaaaagaaatctaaatcgtttattggtgcacatttacggcgccaattatcctttgatttatggtttttatttttaggtctttttgttatctgtatttgtgaaaacgggaagattaaagacgttgcgagacctgcatttaatgtgtttcctattctctttgagatcgtgagtgcctatggtactgtcggcctatctctcggatatccaaatacttcgcagtcactgtcaggacaatttactactctctctaagcttgtgatcattgctatgctaattagaggaagaaacagaggtctgccatacactcttgacagagccattatattaccaagtgacagacttgaacgtattgatcatattgaagatttgaagttaaaacggactgcaggcctacatgcaaggcatcaaccaaggcccgaagacgagaggaagaaatcaatagcaaagaaaagtttcaaatatatcaaaaaaggtggcaaaggtttattatacccaagcaaattgttataa

SEQ ID NO: 65186 - protein, 1352 aa, Candida glabrata CBS 138
MELRRRLSRVQTLTQFNFSYNKSFGHKFRDFIAKSGHHVKPIQKYIFPNFIAVHYFYIIFMTILASILLYPVKNFSYIDILFLAAGATTQGGLNTVNINELTLYQQMIIYIICCLCTPIAIHGTLAFVRLYWFERYFDNIRDTSKRNYKMRRTKTILEREKTARTLSRLRTNTTIPIHKSNQENSQRSNFQEKLFSGEFVNRDEQNSIESQQDAMDSQSTQNSLPTFKGLGPSKIQKTASPRSLNSTLPSGSVLEDGESRTPYEQPIDYTIPNSNPNLTVPVERFKRRRSRDISPQDMYRSIMMLQDKHSNIDDNEEGPALVIGSPQDRQNIKPTVQSQSMGHNALTPVHSISDKEVSPKHVDANEINMGMKVKDKHGNQGPSRRSGSQSPSSENAFPNENDEEENFSPYTNSRKIKLNKHPTGRNYDNSSDDLNSAGNYNSEEGLEGENATQSTEEVSPLDSDDAYSDGDSHEYENTEVNEDSDSIQDIQSGNNRLYRRRTDQERNLNYESEASITQDNIERHNNDSINSENAASDDSESNGENTNDRNARTPNKGGEPKIQFNITEPPRKRRTQNFHIMEATRPNIPHNAHKRTSSNLFLKQLSKGKRIRHNLKRRLSSGPFEKNESPFNPSIKNVNKQKGSQKETNQDNGEDYFADNESDDDDNNPASSDYNGLSKTVSYNNTEDRKPDPVRLTMERAMTMDNITPEDLNKLAQKPDFQKMVYKNWKRKHRKNKKNRKLGWNKKFDFEDTLPTVFDSHNEGHQRTMSNDEDNEDIRNGNIDRYNTIDYNDGYQIDPDMNEEGYFGVSFNNDYNFSRHPFSRTMSANYLSWEPTVGRNSLFVDLSRAQKEELGGVEYRSIKLLCKILVIYYLGFHIMSFTMLLPWITHKTKYKHIVRDDGVSPGWWGFFTAMSAFNDLGLTLTPDSMSSFNRAAYPLIVMIWFIIIGNTGFPVLLRFIIWVMYHLSSDLSQLRESLAFLLDHPRRCFTLLFPSTATWWLFGILVGLNITDWILFIILDFNNVVVKPNPKGYRVLMGLFQAVSTRTAGFSVVDLSQLNSAVQVSYMIMMYVSVLPLAISIRRTNVYEEQSLGLYGNVEDDDSSDSDYEDHLSSEEELLAKNGDNDDDEETLDSQYYSKSIRGRNDSDESSSNEGGSNSSAKKRKRTAKKESSKGKKKKRRVSEKKSKSFIGAHLRRQLSFDLWFLFLGLFVICICENGKIKDVARPAFNVFPILFEIVSAYGTVGLSLGYPNTSQSLSGQFTTLSKLVIIAMLIRGRNRGLPYTLDRAIILPSDRLERIDHIEDLKLKRTAGLHARHQPRPEDERKKSIAKKSFKYIKKGGKGLLYPSKLL

SEQ ID NO: 65187 - DNA, 3210 bp, Kluyveromyces lactis NRRL Y-1140
  CDS (1)..(3210)
atgatcttccgcaaagtggtacgaaatcctactgttcaaaacatacaaatatacagaaagactttaggtcatcagattcgtgacattatcgaaaagttaacaaagaaaatcgatcctttcgtcaaatttatatttccaaacttcattgcattccattacttttacatcattgcatttgcattactatgttctattcttatttatcccgttaagaactttgcatacatcgatattttgtttctagccacgggggccgcaacccagggtggtttaaacacagtagacttaaatgagctgtcattgtaccaacaaattgttctgtatattactaccgcgctaactaccccaattttcattcatagtggcttggcatttgtgcggttttactggtttgaacgatattttgatggtattcgtgattggtccaagagagattttgagatgagaaggaccatgacactgcgccaaagggaactgaccaaaaataatacgatggaaaatgcttctaggagtactggtcaaggtcctctcaattttcttaccagaacttttactcacggagatagagatgctagtaattttcaaggtaggcttttcagaggagaagtggtcaaaagagacgaagacaataacgacgatagctcagtcgatacaaggccaccggaggcccatagcgatcatactgagaaattcatcggtaggcggaaatccagagatatcaatccagctgatatgtacagatcgattgccatgttacagaataggcatgaaagtaatgataacataaagggaccagcgcttgtcatcaaaagcccagcggaacgggaaaaagaaatagaagaacaacgtagattacaaaaagagcgtgaggaacagcaaggtcaatctattcagtttaaagtggaaccgcgcccgacaaagtcaacgaggtcaacttttgaaccctcgggaattaggaaatcatttacccgaagaaagaggcctagcttcttcaaaggttcccaatctgccagaataatacgagacaagttgagaagaagatccaaaggttctgatgtcaacaatgttgatgatgaggaagaagaacaggatgggcatgatgcagatatggaaggatcttctgaagacgatagtgttattgaatcttcagatggacagtcagagtctatatctgctcccaattttgaccatcactcatctgagccaacactacagagtggtggtacagtatctgcaccttcttctttagagagtaatgaaatcgaagaagaagatgaggaactaagcgatttacccactggtgtttcttattatgggctgcattcaggaggcgatcctcgaaataggttaaacagggtcatgagtacaaattatttatcatatgagcctaaaattggaagaaactcaacttttgttggattatcagaatcgcaaaaagttgaattaggaggggttgaatataggtccaccaaggttttatgtctacttttgtcgatatattatctcggttttagtattttagctatgatcatattcgctgcgtggatacaacctatgaacaattataaagaaattgttagatctcaaggtgtttcgccaacatggtgggggttttggactggaatgagtgcatttggtaatcttggattaacattgactccgaactccatgatatcatttcacaagtcaatatacacgttaatttggatgatgtggttcattgttattggtaacactggatttccaatttttctccgtttcgttatttggatacttttcaaactaagtccagatctgtccttgagaaaagatagtctagggtttttattagaccatcctcgtagatgtttcacaatgctatttcctaaagcggctacatggtggctttttctgattctcattggaatgaatgctattgatttgatattattcatcattttggatttgaatacagatgttgtaaaagatctaactgctggattcaaggtacttaacggtttatttcaagctgttagcacaagaaccgcagggtttgccgtgctagatctaagtcaattgcatccatctgtacaggtatcgtacatgttaatgatgtatgtttctgtgatgcccttagctatttcaattagaagaactaatgtctacgaagagcaatcgcttggtgtttacgggaatggagaaaatcaagaagatgatgggtcggaaaagaatacaaaaagtttcattggagcacatttacgtagacaattgtctttcgatctatggtatatgtttttgggtctctttattatctgtatctgcgaaggtgggaagatccaagatccaagcaaacccagtttcaccgtttttcaatgtctcttcgaagttgtaagtgcttatggtaccgttggattgtcccttggataccctggctccaatcaatcgttttcaggacaattcacaactatatcaaaactagtcatcattgcaatgttgataagaggaagacacagaggtttgccctatactttggatcgtgccatcatcttaccaagtgcgaaattgaaggaaaatgatttactccatgagttgactcactctaggagacccacaactttaggattgaatggatctacatctcatgataacagaaccacctctgtcgctgattcgacatcttcgattggtaacaaacatatagaccggttccgtgaccgttcacgttccgtatggcacggtttaacctctgcgtttagtatgggtcatcaaccacggccacatagaaccatgacgtctagatcgttagatgataccattacaacggaccgcatgatgtccacgcaaagtaaccaatcttttaacaatgaatcacaacaacaaacattttcggatggtaacaactatccaatgcacagcatgaactcaaaccaccattatgacaacagatctatgacccccaaccaatatcacgtgtttagagattcctttgatctgagatcgggtattactgagcacaaaggtttggatggtgtacatgcaaataccgtggaagcattcgaccattcgaactataattccaacagtaatagcaacagtaacagcaattcaaacagcaagaatacggaaacttcaagctcaggaccaatcttcaatcacatcaattcctctacctcattgcattcaccacattctacaggttcaatgcaatctctgaatagctcacccagatag

SEQ ID NO: 65188 - protein, 1069 aa, Kluyveromyces lactis NRRL Y-1140
MIFRKVVRNPTVQNIQIYRKTLGHQIRDIIEKLTKKIDPFVKFIFPNFIAFHYFYIIAFALLCSILIYPVKNFAYIDILFLATGAATQGGLNTVDLNELSLYQQIVLYITTALTTPIFIHSGLAFVRFYWFERYFDGIRDWSKRDFEMRRTMTLRQRELTKNNTMENASRSTGQGPLNFLTRTFTHGDRDASNFQGRLFRGEVVKRDEDNNDDSSVDTRPPEAHSDHTEKFIGRRKSRDINPADMYRSIAMLQNRHESNDNIKGPALVIKSPAEREKEIEEQRRLQKEREEQQGQSIQFKVEPRPTKSTRSTFEPSGIRKSFTRRKRPSFFKGSQSARIIRDKLRRRSKGSDVNNVDDEEEEQDGHDADMEGSSEDDSVIESSDGQSESISAPNFDHHSSEPTLQSGGTVSAPSSLESNEIEEEDEELSDLPTGVSYYGLHSGGDPRNRLNRVMSTNYLSYEPKIGRNSTFVGLSESQKVELGGVEYRSTKVLCLLLSIYYLGFSILAMIIFAAWIQPMNNYKEIVRSQGVSPTWWGFWTGMSAFGNLGLTLTPNSMISFHKSIYTLIWMMWFIVIGNTGFPIFLRFVIWILFKLSPDLSLRKDSLGFLLDHPRRCFTMLFPKAATWWLFLILIGMNAIDLILFIILDLNTDVVKDLTAGFKVLNGLFQAVSTRTAGFAVLDLSQLHPSVQVSYMLMMYVSVMPLAISIRRTNVYEEQSLGVYGNGENQEDDGSEKNTKSFIGAHLRRQLSFDLWYMFLGLFIICICEGGKIQDPSKPSFTVFQCLFEVVSAYGTVGLSLGYPGSNQSFSGQFTTISKLVIIAMLIRGRHRGLPYTLDRAIILPSAKLKENDLLHELTHSRRPTTLGLNGSTSHDNRTTSVADSTSSIGNKHIDRFRDRSRSVWHGLTSAFSMGHQPRPHRTMTSRSLDDTITTDRMMSTQSNQSFNNESQQQTFSDGNNYPMHSMNSNHHYDNRSMTPNQYHVFRDSFDLRSGITEHKGLDGVHANTVEAFDHSNYNSNSNSNSNSNSNSKNTETSSSGPIFNHINSSTSLHSPHSTGSMQSLNSSPR

SEQ ID NO: 65189 - DNA, 3153 bp, Debaryomyces hansenii CBS767
  CDS (1)..(3153)
atgaacagggttagcaagttatggcattcctataagaggcatcgagtccatggtgatactggattaaaaattagaaacgcaattcatcggactactgaaaaagtatatccatatgtcaaagttgtaattcccaatttcagagcggcccactatacgtatatcttattcatgacgtttcttgggtcagtgatattttatcccattcgaaatattaggtacattgatgcattgttttttacgggatgtgcaagtacgcaagccggccttaatactgtgaatttgaaccgtttggcattataccagcaaattctaatctatatcatcacgactcttacaactccaatttttattcacggttcattattatttattagattgtattggtttgaaaggcattttgacaatattaaagaaagttccaagttaaataacaagatgagacgaaacgcgacgttagctgcaaggacacaatccctagatccaacaaggttgaataccgaagttaatagaggattggggcttaataacccccaaagttctggtcctgaacctgttattgatgaagtagctttctccaattcttcttcgaccctgcctgccagcaaacattcgagtcctcctcaaaatccgagtatcaattcaaataatgttaatcatataagcgaaccaagtgacacagatatatcctctggtgtcgcaccagattccagaaacccaattaacctaagtcgaccagaaagtccaccaaggtcgctcgatgggattcgatttggtaatttaccccagccatctaaaattcgccagaaagagattgaaccttccgatatgtatatgtccattgctatgctccaggataatcataaatccgaacgtaaggacaatggtgatgaagacgatgttttaattatcaaatcacccaatgagattgagaaagacagtcaaaatcctattttcacaaaaaaatcccagattcatttcaatgtaaatgataagccaattagaaaatggaagaaaaaacgtaggttttccagaggtagacaaccatggtcaaagttgaagaagacattttccaatagtggagtaagtccccggaaacatgtacgaagtttatcattcactctgttaagtaatgacgatgacgatcagtcaattgattctgaaaccaataataggacaactgatacagatgctgatgacgataatgcaataattgacgacgatgatgacgacgacgaagatgatggtgatgacgacgacgaagatgatggtgatgatgaagacgaagatgacgacgatgaggatgacgaagatgatgatcaagatgatgaagaagatgaatacaatagacagaaccgccatgatgataatctagatgatattgaaagagcccaatctaacttagtaattccttcttccgacgcaactggtggaaagaaatttaccaagagatctaatacgttagatgtcaccccaggagaaaaccacgaattgtctcattcgccaacgtttgagaaaatgataaaaagcaaaatgaaaaagaagaagaagccaaaacagacaaaaaaacagaaattgaagtatatgaaatctccaaccgtaggattaaattcgtcgttgttttcgccaaattataataacggttcagattatgacgattcggacgactcggacgaggatgatgatgacgaagaagaagatggaaaatcacttctgaaagtaatgagtaccaattatttatcgtgggtgccgactgttggaagaaattcaacgttcgttcatctaagtgaagagcaaaaagaagaattaggtggtgttgagtatagagcaattaaactacttatcaagattattgtaatatattatattgggtttcatatcttagcatttacctgcttattaccatatattttatatcaaccagtatataaagcagacgtgattaatgtgggcataactccaacgtggtgggcattttttactgcccaatcagcatttaatgatttgggacatactctaacacctaattctatgcaaagttttgataaatctgtctatgttatggtaattgttgctttttttattgttatagggaacactgggtttcctgtcatgttgcgatttattatttgggttttattcaaattatctaaaccgatgtcattatttaacgaatcgttaggttttttattggatcatccaagaagatgtttcaccttattatttccttcagtgccgacttggtggttatttattattcttgttgtattgaatgcagttgatttaattttatttattgttcttgacttgaacaataaatacttggaaagtactcccataggattgagagttatggatggattattccaagcctttagtacgagaactgctggctttgcagtagttgatttgtcagaattgcatccagcagtccaagtgagttacatgttaatgatgtatatatctgttttgccattggctatatcaatcagaaggaccaacgtttacgaagaacaatcattaggtgtttatttaaaggacaataatgacgacaacgatgatgcaccagatgacaaaactcctagaaattttataggagcccatttaagaaatcaattatcttttgatttatggttcatttttttgggactttttattatttgtattgctgaaggtccaaaactaaataagaataactacagattctcgattttcactattttattcgaaattataagtgcatacggtacggtaggattatccttgggatatcctggtgtcgatgtttcattatcgggagagtttacagtattatctaaattagttatgatcgcaatggtcatcagagggaggcacagaggtttgccctatgcattagatagagctatcatgctaccagatgacaatatgcaaaaacgtgataatcttcaagagaatcatgctatcaggagacatcaaacaatggaaacatcaaatagcttggatgatgggaatgcattcagaagagcgtttactagaagggcttcaagttttggctttgataataccaacattttaggtagaagaaaatcatcagtaaggtcaagtaaacctaagccagaaactccacattacatagttactacggagtcacacgaaatggacgacttagcataa

SEQ ID NO: 65190 - protein, 1050 aa, Debaryomyces hansenii CBS767
MNRVSKLWHSYKRHRVHGDTGLKIRNAIHRTTEKVYPYVKVVIPNFRAAHYTYILFMTFLGSVIFYPIRNIRYIDALFFTGCASTQAGLNTVNLNRLALYQQILIYIITTLTTPIFIHGSLLFIRLYWFERHFDNIKESSKLNNKMRRNATLAARTQSLDPTRLNTEVNRGLGLNNPQSSGPEPVIDEVAFSNSSSTLPASKHSSPPQNPSINSNNVNHISEPSDTDISSGVAPDSRNPINLSRPESPPRSLDGIRFGNLPQPSKIRQKEIEPSDMYMSIAMLQDNHKSERKDNGDEDDVLIIKSPNEIEKDSQNPIFTKKSQIHFNVNDKPIRKWKKKRRFSRGRQPWSKLKKTFSNSGVSPRKHVRSLSFTLLSNDDDDQSIDSETNNRTTDTDADDDNAIIDDDDDDDEDDGDDDDEDDGDDEDEDDDDEDDEDDDQDDEEDEYNRQNRHDDNLDDIERAQSNLVIPSSDATGGKKFTKRSNTLDVTPGENHELSHSPTFEKMIKSKMKKKKKPKQTKKQKLKYMKSPTVGLNSSLFSPNYNNGSDYDDSDDSDEDDDDEEEDGKSLLKVMSTNYLSWVPTVGRNSTFVHLSEEQKEELGGVEYRAIKLLIKIIVIYYIGFHILAFTCLLPYILYQPVYKADVINVGITPTWWAFFTAQSAFNDLGHTLTPNSMQSFDKSVYVMVIVAFFIVIGNTGFPVMLRFIIWVLFKLSKPMSLFNESLGFLLDHPRRCFTLLFPSVPTWWLFIILVVLNAVDLILFIVLDLNNKYLESTPIGLRVMDGLFQAFSTRTAGFAVVDLSELHPAVQVSYMLMMYISVLPLAISIRRTNVYEEQSLGVYLKDNNDDNDDAPDDKTPRNFIGAHLRNQLSFDLWFIFLGLFIICIAEGPKLNKNNYRFSIFTILFEIISAYGTVGLSLGYPGVDVSLSGEFTVLSKLVMIAMVIRGRHRGLPYALDRAIMLPDDNMQKRDNLQENHAIRRHQTMETSNSLDDGNAFRRAFTRRASSFGFDNTNILGRRKSSVRSSKPKPETPHYIVTTESHEMDDLA

SEQ ID NO: 65191 - DNA, 2913 bp, Yarrowia lipolytica CLIB122
  CDS (1)..(2913)
atgttcatagtggactacgctaaacgagcgtaccgcaagctgcgacactttcgcatcaccttcatcgtcgtgcactacttcatcatcattggctcggccattttcggcacttttctattctaccccgccaaaactacaaaatacatcgatgccctgtttcagtgtgcctgcgctgcgacacaggcaggcctcaacaccgtcgatctcaactcgctcaagctgtggcagcagatggtgctctactgcatttccatgtggacgaatccgattgtgattcactcaggagtcgtgtttatgcgtctgcactggttcgagaaatcgttcaaggacatcaagaaccagtccaaactgcagtcaaagctgcgaagaacagccacgacgttagctcgacaagacacactcgagaacggactgtttcaacgccctcctctgcgacaccagaacccaggagtggccggcctgaacagcaacatcaacaacgacagtagcgacgaaacgcctcacaaggaaggtcacaacaacgacaaccccaacctcaacaaggaaatcacattcggaaatctaccgcagccaaaacgaacgcactccgttgagcctgaagatatgtaccggtccatcaacttgctgtcccatgaacaccctgaaggacagagtgatagtgatgacgacggacctgctctggtcatcagaggccctcgtgaccgccctgaccgagacgacgacgaagaggactcacctgagatcgagagagctccacgagcaatttcgttctcgactcaggaacacccacgtgctcagaagtctgctctggaacagttcaaggaggaaatgcgtgagtcacaacgacaactggacgctgagcatgctattgatgagggtgagtcgtcagacgctacccagcccacctccatcaagcgagaagacatgtattaccgacagcatccggattccgactcttcagaaggagatacggtgaaaaaggtgcgttccaacgtgaccgttcacagaccgtctcctgaagatgacgactttgccggcacccaacccatgaaccgacgtgcatttacccttgacggcgacaacactgaagagaagaaccatgaaggagcctttgcacactttaaacggtctcttacatttgatcggtttctttctaatcgacgacgcggctcagacgccgcttcttccagtggtgccacctccaacgccgatctcaacaagaccatgtcgtccaactacctgtcttggagtcccacagttggtcgtaactctgcatttgttgatctgacagaggagcaaaaggaggagctgggaggaatcgagtatcgggctctcaaggtactgtccaaggtgctggttgcctacttcgtcggcttccatctcatgtgcgccatcatgctgctgccctgggccatctacatgcccaagtacagagactacgtgtactcgtgtggagtgacgccgacgtggtgggcatttttcaccgctcagtcgaccttcaacgatgtgggtttcactctaaccccggactccatgggatcttatcaggaagccatttatgttctgttgaccatgtccttcttcattgtcatcggtaacacgggcttccctgttctacttcggttcatcatctggatcatgttcaagctctcacctcgagactcctcactcaaggagtgtaccggtttcctgcttgatcatcctcgacgatgtttcaccatgctgttcccttccactgccacctggtggttgtttgcaacactggtgattctgaactctgtcgacctcgtcttcttcatcattctggacttcaacgcacctgcagtcaccgagatgaggcccggttacagggttgtatcaggcttgttccaggccttctctactcgaacagccggtttcacctctgtctctattgccgaactccatccgtccatccaggtatcgtacatgatcatgatgtacattgccattctgcccattgccatctcgattcgacgaactaacgtttacgaggaacagtctctgggtatttatggagggggagacgaagagagtgagtacgaccaggcccctacggctgatgaggaggcagagaacgaggagaacgaccccgagcatctctacaagggcaagaagaagaagcatccgtcgtatgtcacagcccacctgcgtgcccagcttggttacgatttgtggtacatcttcttagggctctttattatctgtatctgtgaaggcaccaagatcaaggacgttacggatctcggttttactggcttcactgtgcttttcgaggttgtctctgcatacggtacggtcggcatgtccatgggctacgatgatgtgaacacgtccttgtccggcaagtttagcaccatctcaaagctcattatcattgccatgatgatccgaggcagacatcgaggtctgccgtactcggtcgatcgtgccatcattcttccttccgacgagatgcatagaaaggacgatgcggtgactcgatcccacctacgacgaggcagaacgatgtctgctaactccaacgagctcacagagaccatgggcctgccctaccccatgcgttcacatacgatgatgagctctggaccaggcgctggaggtaatgagtcgtaccctcttcggggctcctctcattctcggcagacgtccaacgtgtctgacattggtcctcgggatctcgaccccattgtgccctcgtcgcccatgccttccgtggatgaggactacctcaagcggatggagaagagagagcaggagcaggaggataacaagctcaggggtgagttgtccgataacaaaaagaagctgcacaaggacgagcagggtatcgagatggactcgtatttcccggagctcaagggtcctggaggattggacctcgcggatgattag

SEQ ID NO: 65192 - protein, 970 aa, Yarrowia lipolytica CLIB122
MFIVDYAKRAYRKLRHFRITFIVVHYFIIIGSAIFGTFLFYPAKTTKYIDALFQCACAATQAGLNTVDLNSLKLWQQMVLYCISMWTNPIVIHSGVVFMRLHWFEKSFKDIKNQSKLQSKLRRTATTLARQDTLENGLFQRPPLRHQNPGVAGLNSNINNDSSDETPHKEGHNNDNPNLNKEITFGNLPQPKRTHSVEPEDMYRSINLLSHEHPEGQSDSDDDGPALVIRGPRDRPDRDDDEEDSPEIERAPRAISFSTQEHPRAQKSALEQFKEEMRESQRQLDAEHAIDEGESSDATQPTSIKREDMYYRQHPDSDSSEGDTVKKVRSNVTVHRPSPEDDDFAGTQPMNRRAFTLDGDNTEEKNHEGAFAHFKRSLTFDRFLSNRRRGSDAASSSGATSNADLNKTMSSNYLSWSPTVGRNSAFVDLTEEQKEELGGIEYRALKVLSKVLVAYFVGFHLMCAIMLLPWAIYMPKYRDYVYSCGVTPTWWAFFTAQSTFNDVGFTLTPDSMGSYQEAIYVLLTMSFFIVIGNTGFPVLLRFIIWIMFKLSPRDSSLKECTGFLLDHPRRCFTMLFPSTATWWLFATLVILNSVDLVFFIILDFNAPAVTEMRPGYRVVSGLFQAFSTRTAGFTSVSIAELHPSIQVSYMIMMYIAILPIAISIRRTNVYEEQSLGIYGGGDEESEYDQAPTADEEAENEENDPEHLYKGKKKKHPSYVTAHLRAQLGYDLWYIFLGLFIICICEGTKIKDVTDLGFTGFTVLFEVVSAYGTVGMSMGYDDVNTSLSGKFSTISKLIIIAMMIRGRHRGLPYSVDRAIILPSDEMHRKDDAVTRSHLRRGRTMSANSNELTETMGLPYPMRSHTMMSSGPGAGGNESYPLRGSSHSRQTSNVSDIGPRDLDPIVPSSPMPSVDEDYLKRMEKREQEQEDNKLRGELSDNKKKLHKDEQGIEMDSYFPELKGPGGLDLADD

SEQ ID NO: 65193 - DNA, 2490 bp, Aspergillus nidulans FGSC A4
  CDS (1)..(2490)
atgttttcttcgttcctgcgccagctggcgcaactcaaggcccgcatcccatggctgaaggacttgcacctgaatttcattctcatccactatatttatatcatttcgatggctttggtcacgtctatcatcatatatcctggtaatgatttaccttatatcgatgcgctgttcttctccgctggagctgctacccagagcgggttgaatacggtcgatttcaacctgcttcagacgtaccagcaggttatcctttattttgtctcgatgctcactacgccgatcttcatcaacaccgcgctcgtctttatccggctttactggtttgagaaacggttccagcacgtcgttcgagatgcccgcgcccttcgcacgaccagatcccgactacggacaatcagcgaagataaaaattcgcagtcgtacggcagggaggaagcagggataaatggccggccgatcgtggtcctgcgcaaccaggccgccaacccgccgcaggaagattccccgcggagtgcgcccagatctcctaacgaaagcgactccgagtctgtttcgcctacctccaacgccagcagcgcgaaaatggaaagtcagagtccgttagctacgataaatcgcgattttggcgaccttcgcgttcccgctcaactcagccctgagcaccacatcgcatttttggagaagcagcgtaaaaacaaaggcgctctgcgcattccaagtccgagggaatacgatcgcggcggagcgccggaggtgctggaggaagaagagaatgaggacaacgatctgagcaagacaaggaccgaccaatctgagcctcgaagccctaggaatcttgacggggacgacacaaacaacacgcccaacatggacggtccgcatatcacgatcaccgagccccagctgccacggacgagaacacggaactccacatttccccgtatggatacgcgccctacatttcgcgagacaaaagacgacgacgacccggcagcgttcagtcgggcgaaccgaaagtcaacgtttaacggtattttccgctctctgacacaggaacgggaccggcctacgctgccgtatctcagttgggatgccacagttggccgcaactcgaactttatcgacctaaccgaggagcaacgcgacgaactaggaggtatcgagtaccgggcactaaagacgctggccgtcgtgttaatttcgtactacgtattgtttcatatcctcggtgtgatctgcttgacgccgtggattatggagacgcattggggaaatgtcgtgacggcagcgggacaaggacgtccttggtgggccatcttcactgctgcctcggcatttaatgatgtcgggttcaccctgacgccagactccatgatgtcgtttcagggcgcggtctggcctttgctgttaatgtcatttctgatcattataggcaacacggggtttccctgtatgctgcgcttcattatctggacaatgtcgaaggtagtctcaaaggaaacgccgctctgggaagagctgaagttcttgttggatcacccccgccggtgtttcacgctgcttttcccgcgcaatgctacctggtggctgtttgcgattctggtcttgttgaatggcatcgacttgatattcttcattatcctggatcttaacgatgaaaccgtcacttcactgtccactggaatcaaaatcctggacggtcttttccaggccacctgtacccgcactgctggattcgctgtggtgtctattgccgacctccacccagctgtccaagtctcctacatgatcatgatgtacatctccgttttccccattgccatctcactccgacgcacaaacgtatacgaagaaaaaagtcttggtattttcgcagatgacgaagacgacgacgacgacagccagacagcacccagctatatcggcacccacttacgcaagcaactcggttttgatctctggtacgtttgcctgggcctcttcatcatcacgatagttgaaggcgaccgcctcgaaaataaaaaccagtactccttccagatctggtctgtcctcttcgaggttgtctccgcgtacggcaccgtcggtctttctctcggttatcccggcgtcaacgcctccttcgtcagccagttccgcgttctttcaacactcgtcattatagcgatgcagattcgcggccgtcatcgtgggctgccgtactctctcgaccgcgccattttgcttccctccgagtccctgcagcaaaaagaaatcttggacgcagagcgccgcatgcgcagacgcgcgtcgaaccttagccagattggttcattaggccggcagcagtcgcaggctgtatctgagaataatgccgctggtgtctcctccgcgctggacgcgagagagagagagcggaatactgaagccaacacgggcattaatgctgcggaaccaataaccatgagacgccatccgacgctgaggtcgcaacagtcgcagcgatga

SEQ ID NO: 65194 - protein, 829 aa, Aspergillus nidulans FGSC A4
MFSSFLRQLAQLKARIPWLKDLHLNFILIHYIYIISMALVTSIIIYPGNDLPYIDALFFSAGAATQSGLNTVDFNLLQTYQQVILYFVSMLTTPIFINTALVFIRLYWFEKRFQHVVRDARALRTTRSRLRTISEDKNSQSYGREEAGINGRPIVVLRNQAANPPQEDSPRSAPRSPNESDSESVSPTSNASSAKMESQSPLATINRDFGDLRVPAQLSPEHHIAFLEKQRKNKGALRIPSPREYDRGGAPEVLEEEENEDNDLSKTRTDQSEPRSPRNLDGDDTNNTPNMDGPHITITEPQLPRTRTRNSTFPRMDTRPTFRETKDDDDPAAFSRANRKSTFNGIFRSLTQERDRPTLPYLSWDATVGRNSNFIDLTEEQRDELGGIEYRALKTLAVVLISYYVLFHILGVICLTPWIMETHWGNVVTAAGQGRPWWAIFTAASAFNDVGFTLTPDSMMSFQGAVWPLLLMSFLIIIGNTGFPCMLRFIIWTMSKVVSKETPLWEELKFLLDHPRRCFTLLFPRNATWWLFAILVLLNGIDLIFFIILDLNDETVTSLSTGIKILDGLFQATCTRTAGFAVVSIADLHPAVQVSYMIMMYISVFPIAISLRRTNVYEEKSLGIFADDEDDDDDSQTAPSYIGTHLRKQLGFDLWYVCLGLFIITIVEGDRLENKNQYSFQIWSVLFEVVSAYGTVGLSLGYPGVNASFVSQFRVLSTLVIIAMQIRGRHRGLPYSLDRAILLPSESLQQKEILDAERRMRRRASNLSQIGSLGRQQSQAVSENNAAGVSSALDARERERNTEANTGINAAEPITMRRHPTLRSQQSQR

SEQ ID NO: 65195 - DNA, 2532 bp, Aspergillus niger
  CDS (1)..(2532)
  misc_feature (2419)..(2419): k is g or t
atgttttccgccgtgctgcggcgggcgacctcggtcacttcacgcttcacctcccacattccatggctaaagaacctgcgcatgaattttgtgctcatccactatgtctacattatcgccacctctttgctttcttcaatcatcatctatccaggggctaatctagactacaccgatgccctcttcctatctgccggcgccgccacccagagcggtctcaacaccgtcgacctcaataccttgcatacctaccagcagatcgttttgtacgtggtctccatgctgactactcccatcttcatccacactgtgctggtcttcgtgcgtctttactggtttgaaaagcgatttcagcatgtcgtcagcgatgcgcgcgcccttcgccatactcgctctcgcctccgtaccataagcgaagataaggatggacaatcctcttcccgggaagaggctggtgtcgccggtcggtctatcgtcgtcctgcgcgacacactaggtcatccgggaagccggcagcaggccaaggagaaatctggcgaggactcaccccccgcctctcccaccgcgcgggatccacccgaaaatttgggcgaagatgcgagcaatgcccttaaccaaaagttagggataggactagggaacagtctaggaaaccttcgtgttccggctcagctgagcccagaacatcatattgcattcctggagaatcaacggagaaacaaaggcgctctgcgaatccctagccctcgggagtatgacaacggtggcgcaccacaagtattggaggaagaagaggaggaggagttaaatcgacccgttcgcacatctagcaattcttcgagttccgagcgcagcccatgcgatatcagcaaagaggatgagaatgacaaggacgaggacgacgaggacgatgacaaagacgaggataggccgcgcagactcgatggcccccatattacgattaacgagccggatatgatccggacaaggacgcggaactctactttcccccgattagatacacgtcccactttccgtgaaacaaagaatgacactgatgcctcgcaactgggtcgcttgacgtcgcggcgaccaactctacacaatcttttccgcacccttacgcaggaacgtgaacggtcaacacagccgtatctcagctggaacgccacggtcggtcggaactccaactttgtcgatctgaccgaggaacaacgtgacgagctcggcgggattgagtatcgggcattgaagactctggcagtagtcctaatttcctactatgccttcttccacattctgggcattctgtgcctcgtgccctggatcatgaccacacattggggcaaagtggtcgaggaaatcggacagggtcgcccttggtgggccatcttcatggctcaatcagcttttaacgatgtcggtttcactctcacgccagactcgctatcttcattccagagagcgatattcccgctcctgcttatgacgtttttgattattatagggaatacgggattcccttgcatgctgcgcctgatcatctgggttctgtccaaagtgactcgtgccgaaaccccgctgtgggaggaactccgctttctgctggatcatccgcgtcgatgcttcactctactctttccgaggaatgccacgtggtggctctttgcaattttggtggccttgaacggtatcgacttgatatttttcattattctggacttgaatgattcggccgtcacatccctgcccactggtatccgtatcgtggacggtctgttccaggcagcctgtactcgaaccgccggcttagctgtcatctctgtatcagacttacacccagctgtgcaggtgtcctacttgatcatgatgtatatatccgtctttcccatcgccatttctttgcgacgcaccaacgtatatgaggagaagagtctgggtatctacgcttctaccgaggatgatgagtcggatgagaaccagacaccgcccagctatatcggagcgcatttgcggaagcaactcagttttgatctatggtacgtgttcctgggcctgttcatcatcactattgtggaaggcaagcgcctccagcagcaagatgagtattccttccaagtgtggtcggtgctgttcgaggtcgtatcagcgtacggcactgttggtctgtcgctcgggtatcccggagtcaatgcctccttctccagccagtttcaggttctctccaagctggtcatcattgcgatgcaaatccgaggccgtcatcgcggtctgccctatgccttggaccgcgccattctgctcccttcggaatctctgaatcagaacgagatcgcagacgcagaacggcgtatgcgtcgtcgcacctctagccttagccagatgtctatggaccgccagcaatctcagggtcgaccgkagcacggggcttctacgagtctcgatccaaaggaccgggcaagccagacatggaacaatggcgacatcatccgtcgtcagtcgacgatacggtcacagcgctcgcagcgctga

SEQ ID NO: 65196 - protein, 843 aa, Aspergillus niger
  misc_feature (807)..(807): The Xaa at location 807 stands for Stop, or Glu.
MFSAVLRRATSVTSRFTSHIPWLKNLRMNFVLIHYVYIIATSLLSSIIIYPGANLDYTDALFLSAGAATQSGLNTVDLNTLHTYQQIVLYVVSMLTTPIFIHTVLVFVRLYWFEKRFQHVVSDARALRHTRSRLRTISEDKDGQSSSREEAGVAGRSIVVLRDTLGHPGSRQQAKEKSGEDSPPASPTARDPPENLGEDASNALNQKLGIGLGNSLGNLRVPAQLSPEHHIAFLENQRRNKGALRIPSPREYDNGGAPQVLEEEEEEELNRPVRTSSNSSSSERSPCDISKEDENDKDEDDEDDDKDEDRPRRLDGPHITINEPDMIRTRTRNSTFPRLDTRPTFRETKNDTDASQLGRLTSRRPTLHNLFRTLTQERERSTQPYLSWNATVGRNSNFVDLTEEQRDELGGIEYRALKTLAVVLISYYAFFHILGILCLVPWIMTTHWGKVVEEIGQGRPWWAIFMAQSAFNDVGFTLTPDSLSSFQRAIFPLLLMTFLIIIGNTGFPCMLRLIIWVLSKVTRAETPLWEELRFLLDHPRRCFTLLFPRNATWWLFAILVALNGIDLIFFIILDLNDSAVTSLPTGIRIVDGLFQAACTRTAGLAVISVSDLHPAVQVSYLIMMYISVFPIAISLRRTNVYEEKSLGIYASTEDDESDENQTPPSYIGAHLRKQLSFDLWYVFLGLFIITIVEGKRLQQQDEYSFQVWSVLFEVVSAYGTVGLSLGYPGVNASFSSQFQVLSKLVIIAMQIRGRHRGLPYALDRAILLPSESLNQNEIADAERRMRRRTSSLSQMSMDRQQSQGRPXHGASTSLDPKDRASQTWNNGDIIRRQSTIRSQRSQR

SEQ ID NO: 65197 - DNA, 2337 bp, Aspergillus oryzae
  CDS (1)..(2337)
atgttctcctctttcattcgcggggtatcctcgctgaagtcgcaggtgccactattaaagaaccttcacctcaactacatcttgatacactatacttatatcattgcgatgagcataatcacctcgattatcatttacccaggaaacgacctcgcctacatcgatgctctcttcttcgcagcgggggccgccacgcagagtggactgaataccgtcgacttcaacctgctaaggacataccagcaggtgatcctctactgggtctccatgctgacaactcccattttcatcaataccgttctcgtctttgtccgactgtactggtttgagaagcggtttcagcacgtggtgcgtgatgctcgagctttgcgccagacccgatccagaatgcggaccattagcgaagacaaggataaccagactcatgaccgtgaggaggccggtgttgggggtcgcgccattgtggtgttgcgcaataaccagggagacgccccgggccgggagcaacaagacgctatctacaaaacaccctccgacagtgagtcggggcccagttcgtcagcggccagagatgagagtggcaatacctctgagcaagaaaccgacccgaacaacaacttgaagcgagggtttgggagtctccgggttccagcccagttgagccccgaacagcacattgccttcttggagaaccaaaggaagcccaagggtgcgttgagaattcccagtccaagggaatatgatcgtggtggcgttcccgaggccctggaagaaggggaaggtgaaggagcagaagccgctcgccagaccagcaatctatccgacgagccaccgagcccacgccatgtggaggaggatgaccaggtaggaccgatggagggtccgcatatcaccatcaatgagccggatatgatccggacacggacgaggaattccaccttcccccggctagatacccgtcctaccgtgcgcgagacgagggacttcggcgatccgtcgcctcttgctcgcaccaccacccggagacccacgttcaccggtgtgtttcggtccctgacgcaggagagagaccggaacacgcttccatatctgagctggaatgcaacggtcggtcgtaattcccagttcgttgatttgactgaggaacaacgtgatgagctaggaggcatcgaatatcgggcactcaaaacattggcggtcgtgttgatctcgtactatgtcttctttcacctgctgggggtcgtctgcctagtgccatggatcatgacgacccgttggggtgcggttgtcaccaatatcgggcaaggtcgaccttggtgggcgatcttcacggctgcgtcctctttcaacgacgtggggttctccatcacccctgactcgatgagctccttccaggaagccgtttttcccctgcttctgttggcattcctcatcattatcggcaacacaggcttcccctgtatgttgcgattgatcatttggctgttgtccaagtttgcgcgaaaagaatctcccttgtgggaggagttgaggtttctcttagatcaccctcgtcgctgtttcacccttctcttcccccgtaatgctacctggtggctgttcgcgatcctagtggcgttgaacgggattgatctgatctttttcattattctggacttgaaagattcggcggtcacctcattatctaccggtatcaaaatcctagacggcctttaccaggccgcgtgcacacgtactgcaggcttttctgttgtcagcatatccgaattacatcccgctgtccaggtgtcctacatgatcatgatgtatatttccgtttttccgattgccatctctctccggcgaaccaatgtctatgaagagcagagtcttggagtctaccctgcagaggaagatgacaacgaggacaaccagaccgcgccgagttatattggagctcacttgcggcggcagctaagtttcgacttgtggtacgtgttcttgggcttgttcatcatcactattgtagaaggagggcgcctgcagcgccaggacgattactcgtttcaaatctggtctgtgcttttcgaggtcgtctccgcctatggcactgtcggtttatccatggggtacccaggagtcaatgcatctttcgcgagtcagttccaaacactgtccaagttagttatcatcgccatgcaagtccgtggtcggcatcgtggtctcccctactcactggaccgtgccatcctgcttccatccgaggctttgaaccaccatgaaattgcggatgcagagcgtcgaatgcgccgccgtgcctccagtctcagccagataagctctcttgctttatcgtga

SEQ ID NO: 65198 - protein, 778 aa, Aspergillus oryzae
MFSSFIRGVSSLKSQVPLLKNLHLNYILIHYTYIIAMSIITSIIIYPGNDLAYIDALFFAAGAATQSGLNTVDFNLLRTYQQVILYWVSMLTTPIFINTVLVFVRLYWFEKRFQHVVRDARALRQTRSRMRTISEDKDNQTHDREEAGVGGRAIVVLRNNQGDAPGREQQDAIYKTPSDSESGPSSSAARDESGNTSEQETDPNNNLKRGFGSLRVPAQLSPEQHIAFLENQRKPKGALRIPSPREYDRGGVPEALEEGEGEGAEAARQTSNLSDEPPSPRHVEEDDQVGPMEGPHITINEPDMIRTRTRNSTFPRLDTRPTVRETRDFGDPSPLARTTTRRPTFTGVFRSLTQERDRNTLPYLSWNATVGRNSQFVDLTEEQRDELGGIEYRALKTLAVVLISYYVFFHLLGVVCLVPWIMTTRWGAVVTNIGQGRPWWAIFTAASSFNDVGFSITPDSMSSFQEAVFPLLLLAFLIIIGNTGFPCMLRLIIWLLSKFARKESPLWEELRFLLDHPRRCFTLLFPRNATWWLFAILVALNGIDLIFFIILDLKDSAVTSLSTGIKILDGLYQAACTRTAGFSVVSISELHPAVQVSYMIMMYISVFPIAISLRRTNVYEEQSLGVYPAEEDDNEDNQTAPSYIGAHLRRQLSFDLWYVFLGLFIITIVEGGRLQRQDDYSFQIWSVLFEVVSAYGTVGLSMGYPGVNASFASQFQTLSKLVIIAMQVRGRHRGLPYSLDRAILLPSEALNHHEIADAERRMRRRASSLSQISSLALS

SEQ ID NO: 65199 - DNA, 2820 bp, Podospora anserina
  CDS (1)..(2820)
  misc_feature (2023)..(2023): n is a, g, c or t
  misc_feature (2025)..(2025): n is a, g, c or t
atggagcggttcaagcaatggatcgccaccaagcctttcacggcccagcgctgcaagcaattcatctatactagaccccgctggctcttcgaatgcatctttccgcagaaccagggcttccccttcataagatatcactgtaggtggccgtgtctttcccctgtagccctcacggtgctgattgtgatggcagactatttgatcatatccctcgcgctgatcggcgcccttatcacttggggagctggcaaacacagtggtggtactgccgagattagatttatcgacgccctcttcttcacggccggcgcctccacccaggccggcctgaacacggtcgacatcaaccttttgaccacctttcagcaagccattttctacctgtggcccatgatggcaaatcccatcacggtaaactcgcttgttgtccaactccgtctctactggttcgaaaagaagttccaacacataacccaaaatgcccgactcgtcagggtccctctcgcgaaatcgtttaccaagtcgcggactaaggcgaagcagcaggacggcgacgtcgaaaagggtgtaaatggcagaaagattaccgttatgttaaacggaaaaaagtcacgcatcaacaacgacgggaccctgctgggcgatgctaagaataagggcaggcatggtctcggcctcacggcggcaaaccggactgccacagatgggggcttggacggcccattggataaggcagatcggcataccggcccagccgtcacatcatccatgacggaaccccggaggccagctctcaagttcgccgacacggtcacgaaaagcgacggtctgggcgaggatttcctcaaactcccacggatacgatcggacgaggagcatattgccatagtcgaacgacagaagaagggagacgacgaggtgctgcgaatcccgaatccgagagacgtagaacgcggtctgggccccaagcgtgttgaggctggagacaatgaggacgaattgctgtcacctcatgcggaagctttcaatctggatggagaacctcgagcccaagcagctgacggccgccatccggccatcactattgaggagcctgatcgtcgcaagttgcaggagacggattcagatgaattcatggacgatgttagagccgctgcccacacgtttggctttttgaagccgcattttcctcggcacaaaaagaagcaagacgacgtggaaaaggaacccgtcattcccggcccttcccagaacaggcgtcgccagtcgatgcagacgctgcgaaccgccttttccaacaacaaggccgaaggcacgccgtatctgagctgggagcccaccgtcggccgcaactctcttttcccggagcttactgaagagcagcgcgaagagctgggaggaattgagtacaggtctttgaagacgcttgcccgggtcctgacggtctacttctggggctatacggcgctgggtgtggttgggctcttgccgtggattctgcaggccactcagtacgggcaagttgtcgaggcggcaggccaaaacaaagtatggtgggctttctttacttcgcaatcggctttcatggatctgggttttactttgacgccagacagcatgaattcattcagcaccgcgacatggccacttctgtggatgagcttcctgatcgtcatcggcaacactggattccccatcatgctccgcttcatgatttgggtgctctcgctcattgtacccaagaattctggcatgtatgaggagttgcggtttttgctcgaccaccctcgccgctgcttcacacttttgttcccttccaaagccacctggtggctgctgggcttccttgtcctcctaaacggcctcgacgtgatgttttttatcgtcttggatggccctgtagcctcgatgtcggacggccaaaaagttcttaatggtattttcgaagccgcatccacgaggaccgctggtttctcctgtgtgaatctctcacttcttcaccccgccgtccaggtttcctacntnatcatgatgtacatttcggtctttcccatcgccatatcggttcgtaggacgaatgtgtatgaggagaatgcactgggaatctactcgcacggcgaagaagaggaacactccaaggcaaaccacaacgactggtcgcacgtcggcactcacgctcgccgccagctctcgtttgatttgccgtttattgccttgggcctcttcattttggccatctcggaagggccgcgtatcatgaaccccgaggacgccgccaatggcttcaccatgtttagcatgctcttcgagtccatcagcgcttacggcacagtcggcatgagcttggggtactcgacaatcaacgcatcactttcggccgagttttcggacgttggaaagctggttattatctgcttgatgatacgcggccgacaccgtggtctcccgtacggtctggacagggccattcttctgcccagcgatgcactcaatgcgaaggacgcaatggctgcagatacagaaggcagattggctaggcagatttctcgcatgtctgtggcgacacaccgcagcgacacgacgcacaaccagaggggcctgggacatgtcctggctgccattttgcatccaggtcctcccgtgccgcccgagcccccgatggaagctattcataggagatcgaccgaccctggctcggacgcggagccgcaacctatgcgggtcacctcgagacgtaccgagcccggtgttgtgcggagatcggttagtcacttgttttcgcccaggcctaggactgctggtgggcatgaggatgattag

SEQ ID NO: 65200 - protein, 939 aa, Podospora anserina
  misc_feature (675)..(675): The Xaa at location 675 stands for Ile, Leu, Met, Phe, or Val.
MERFKQWIATKPFTAQRCKQFIYTRPRWLFECIFPQNQGFPFIRYHCRWPCLSPVALTVLIVMADYLIISLALIGALITWGAGKHSGGTAEIRFIDALFFTAGASTQAGLNTVDINLLTTFQQAIFYLWPMMANPITVNSLVVQLRLYWFEKKFQHITQNARLVRVPLAKSFTKSRTKAKQQDGDVEKGVNGRKITVMLNGKKSRINNDGTLLGDAKNKGRHGLGLTAANRTATDGGLDGPLDKADRHTGPAVTSSMTEPRRPALKFADTVTKSDGLGEDFLKLPRIRSDEEHIAIVERQKKGDDEVLRIPNPRDVERGLGPKRVEAGDNEDELLSPHAEAFNLDGEPRAQAADGRHPAITIEEPDRRKLQETDSDEFMDDVRAAAHTFGFLKPHFPRHKKKQDDVEKEPVIPGPSQNRRRQSMQTLRTAFSNNKAEGTPYLSWEPTVGRNSLFPELTEEQREELGGIEYRSLKTLARVLTVYFWGYTALGVVGLLPWILQATQYGQVVEAAGQNKVWWAFFTSQSAFMDLGFTLTPDSMNSFSTATWPLLWMSFLIVIGNTGFPIMLRFMIWVLSLIVPKNSGMYEELRFLLDHPRRCFTLLFPSKATWWLLGFLVLLNGLDVMFFIVLDGPVASMSDGQKVLNGIFEAASTRTAGFSCVNLSLLHPAVQVSYXIMMYISVFPIAISVRRTNVYEENALGIYSHGEEEEHSKANHNDWSHVGTHARRQLSFDLPFIALGLFILAISEGPRIMNPEDAANGFTMFSMLFESISAYGTVGMSLGYSTINASLSAEFSDVGKLVIICLMIRGRHRGLPYGLDRAILLPSDALNAKDAMAADTEGRLARQISRMSVATHRSDTTHNQRGLGHVLAAILHPGPPVPPEPPMEAIHRRSTDPGSDAEPQPMRVTSRRTEPGVVRRSVSHLFSPRPRTAGGHEDD

SEQ ID NO: 65201 - DNA, 3057 bp, Debaryomyces occidentalis
  CDS (1)..(3057)
atgaataagaaaatgtttaagttgaataaattgtggttaaaatataagagaagactgaataacgatattgaactggagaatgaactaggcttaagaatcagaaatgggattcatatggttgcttcgactattggaccctatgcaaagattatattacccaatttcagagctgttcattatttttatattatatttatgtcgttcttgggatcgattttagtttatcctgttaaaaatatgagatatgtggatgcacttttcttaactggtggagcatcaacccaagctggccttaataccactgatatcaatacactatatttgtatcaacaaatcattgtttatataataacaactttaacaacaccaattttcattcatggttcattattatttgctagactttattggttcgaaagacattttgataatattaaagaacggtcaaaattgaacttcaaaatgagaaggtccgcaacattagctgggagaagacagtcttttgatgccactagaattaacacggtaaataaccaaggattaggtttcaatcaaaccaatcaaactccaagcttaaaaaatgaagaacttactgttcacaacacttctcctcaatcctcatcaactattcctaagctggttgaaaaggatcacaacaataatagtgatatcgatcatataagtgagccaagtgattcagaaaatgaacaaggtgttccgcaagatgcaaggatggtaaaggtttcatctgataaagaagggccaaagtttggtaatttaccgcacccgtcgaatatccgttcgaaagaaatcgaaccttcagatatgtatcgatcgattgcaatgttaagagacaattttaaatcaaatagtcctaagaataatgacgatgatgatgtattaattattaagtccccaaatgagattgagagtgattgccaaaagcccatctttaccaagagatcacagattcactttaatgttaacaaacaacctattaagaagtggaagcaaaggaaaagaaaattgacaagaggtaaccaacaatggtcaaaattgaaaaagtcgttttcaaatactactacaaactccaagaagcgggtggaaagtctatctcagtctactagtgacgaggaagatgatgcatcaattgattccgaaaatgctattgacccattatctgccgatgttaacgatgatctgaacgatgaagatgataatgatgcagatgatgaagaagcgatgttggatgatgaagatggagatgaagtaaatgataatgaggatgaaggatatctgcaagatgattacgtgcttgaaagagctcaatcaaatttagtcattccatctactgatgctactggaggagaaaagtttagtaagagatcaaatactttagatgttactccagggcgtaaaaattcatttataaaatcaccaaccttcgaaaagatgattaagaaaaaaaaaagaaagtccaagcgatcaacgaatagattgttcaagattagaactccttctttatatatgcagaagtcaactgcgtcgtcaggtaattcaatgaataatgatgacgaggaaggctataatggcgataatgatggccattcattgaacaaaagtaatgaagtacccactatttgttcatgggtgccaacggttggtagaaattcaacttttgttcatttaaatgaagaacaaaaagaggaattaggtggcgttgaatatagagcaattaaattgctaattaaaatattaatcttttattatgtcggatttcatattttagcatttatatttcttttgccttggattttaaaaatgccgaattattccaatattgttagagaacaaggagtctctccaacttggtgggctttctttactgctcaatcttcttttaatgatttgggattaactttaactgcagattcaatgcagagttttaatagatctatttatgttatggttgttatgtctttctttattgttattggtaatactgggtttcccgtttttttaaggtttataatttggatactatttaaatttgcgcgaccatcatcattattcaaagaatctctaggttttttgttagatcatccaaggcgttgttttacattattatttccatcaattccaacatggtggctattttcaatcttggttgtaatgaatgttgtggatttagtattattcataattttagatttaaataatacttatttggaggaaattcctgtgggttatagaattatggatggtctatttcaagcttttagtacgagaacagctggattcaccgttgttgatttatcacagttacatcctgctattcaagtgagttatatgttaatgatgtatatatcggttttaccattggcaatttcgattagaagaaccaatgtttatgaagaacaatctttaggagtttatttaaaggaagataataatgaacatgaagacgttgagaaaacaccaaagacttttgttggagcccatttaagaaatcagttatcctttgatctatggtttattttcttgggactatttataatatgtattgccgaaggatcaaaattgaataaaaaccattttagattctctgtgttcagtatattgtttgaaattattagtgcttatggtacagttggattatcattaggatttcctaatgtaaatgcttcattttcatatgaattaactaccttatcaaagttagttataattgctatgatgattaggggcagacatagaggtttaccgtattcattggatagaacaattatgttaccagatgatgatgtggaaagaagagatgaggttcaagaacatcatgcaattagaagaagtacaactatggatacatctggtggaaccgtcaataattctaatgatcataatgcattacgaagagcaattagtagaagagcatcaaattttggctttgatacaaatattttcagaggaagatcttcggcaaataataaagttaaaacccattttcccaattataaagtaattccagagaatcacgaaatgaataatttaggctaa

SEQ ID NO: 65202 - protein, 1018 aa, Debaryomyces occidentalis
MNKKMFKLNKLWLKYKRRLNNDIELENELGLRIRNGIHMVASTIGPYAKIILPNFRAVHYFYIIFMSFLGSILVYPVKNMRYVDALFLTGGASTQAGLNTTDINTLYLYQQIIVYIITTLTTPIFIHGSLLFARLYWFERHFDNIKERSKLNFKMRRSATLAGRRQSFDATRINTVNNQGLGFNQTNQTPSLKNEELTVHNTSPQSSSTIPKLVEKDHNNNSDIDHISEPSDSENEQGVPQDARMVKVSSDKEGPKFGNLPHPSNIRSKEIEPSDMYRSIAMLRDNFKSNSPKNNDDDDVLIIKSPNEIESDCQKPIFTKRSQIHFNVNKQPIKKWKQRKRKLTRGNQQWSKLKKSFSNTTTNSKKRVESLSQSTSDEEDDASIDSENAIDPLSADVNDDLNDEDDNDADDEEAMLDDEDGDEVNDNEDEGYLQDDYVLERAQSNLVIPSTDATGGEKFSKRSNTLDVTPGRKNSFIKSPTFEKMIKKKKRKSKRSTNRLFKIRTPSLYMQKSTASSGNSMNNDDEEGYNGDNDGHSLNKSNEVPTICSWVPTVGRNSTFVHLNEEQKEELGGVEYRAIKLLIKILIFYYVGFHILAFIFLLPWILKMPNYSNIVREQGVSPTWWAFFTAQSSFNDLGLTLTADSMQSFNRSIYVMVVMSFFIVIGNTGFPVFLRFIIWILFKFARPSSLFKESLGFLLDHPRRCFTLLFPSIPTWWLFSILVVMNVVDLVLFIILDLNNTYLEEIPVGYRIMDGLFQAFSTRTAGFTVVDLSQLHPAIQVSYMLMMYISVLPLAISIRRTNVYEEQSLGVYLKEDNNEHEDVEKTPKTFVGAHLRNQLSFDLWFIFLGLFIICIAEGSKLNKNHFRFSVFSILFEIISAYGTVGLSLGFPNVNASFSYELTTLSKLVIIAMMIRGRHRGLPYSLDRTIMLPDDDVERRDEVQEHHAIRRSTTMDTSGGTVNNSNDHNALRRAISRRASNFGFDTNIFRGRSSANNKVKTHFPNYKVIPENHEMNNLG

SEQ ID NO: 65203 - DNA, 3180 bp, Candida albicans
  CDS (1)..(3180): transl_table=12
atgttgtacagagtatctggattttacaaacgccacacccgaaatttcaccaatattgactatggttactacattagaaattttatccaccatatagcatcaaaaatatatccttatgccaaggttgtgctacccaattttcgggcagctcactatttctacattcttaccttggtcattttggggtcgatattggtgtatccagtaaagacatgtgcatatattgatgttttgtttttcacggcgggggcgtctacgcaagcaggtttgaataccgtcaatgtcaacgacctatccctataccaacaaattgtattgtatttgttggccactttggcgacgccgatatttattcatggctccttgctttttgttagactttactactttgagcgtcattttgataatatcaaagagcgttccttaatggattatagaatgagaaagtctgcaacacttgcaagattggggtcggcaccaacaatgagttcaacaagattaaacactttcaacaaccaagtattgggttttcaagaacgagaggcagagaagggttcgtcttcatctcctcagtcatcttcatcacaaacaagccagccggttctgacagcttacaatgatcaaggtgggaatgatatagagcaccatagtgagccttcagacagcgatgatgatgagagtggtaatgggcctgttactttccaggagaagattcattttgaagagccacagagaccaagatctcaacgtcgacacagccgtactgattctggtatcaagttcagtgctttgcctcatccaagaagaaggaagtcgattgaccctgaagatatgtaccgatcgataaacatgttgcaagagcataagaaaaaccaagaggctaaatccaagggaattcagtttttgaacatcggttctccggtccgtaggaaatcacgcagttcaaacattgaggcttttccagaagaggatactaatcctctgcgtgatgatgagatcactccagcaacaaatagtgtcggtactggcaataacgacgaggatgaagatgatattttgattatcaaaccaccaatagaaatagagaactcagatggagcaaacccgattttcaccaagaagaagaaactcgcatcacagattcaatttaaggagacccctgggaaagcaaagaaatggatcaccacgaaaaagcgcaaacattataacccttggacaagcaagttgaagaaaacattatcaaattcaagtaaaaaagggtctctaagtgttgtgccgacagataccgaggatgacagcgaagatgaagaatatgcatcgatagattctgaaaccagtgatatctcagacaacgaacatgctgccgacaacgctgaaggaagtgatgttgatagtgtagggtcatacgaggaagatgaagatgaagatgaacacaatagtgatgacgatgatgacgatgatgatggtgaaggtgaaaggagactaggaaatggcgcatctttaaccaaagctcaatcacatttggtgttgccatcaaaggatgagacgggtggaaagaaatacaccaagaggagcaacacactcgatactccacaacaaaacacaagcgatgggcgcaaaattcgaaagaaagcaccaaagcggaaaaccccaagaacacagagaaatgcatctttcaatcaacattcgaatgtctcaattggtgatggttctatagaaaatgtggacacgaacgattcctaccagagattgtcgcgaacaatgagtggcaattatctatcgtggacgcctactgttggtcggaattctacgtttattaagttgacggacgagcagaaagaggaattaggaggtattgagtatcgggcagttaagttgttgatcaaaattattgttgtctattatgtggggttcaatattatccctggtgtaatgttgctgatatggatatattgtatgcctcactataaaaacttgatgataagcagttccatctcacccgcctggtgggcgtttttcacactgcagtcgtcattcaacgatttggggctcactttaacgtccaattcgatgatgtctttcaaccagaatgcgtttgtacaaatcctttgttcatttttgattgttatcggtaacacggggttcccaatattattgagatttataatatgggtcatgttcaaaacagcaagaccattatctttgtacaaggagtccttggggttcttattagatcatccacgtcgctgttttacgttgttgtttccttctgtccctacttggtggttgttctttatattggtagtattgaatgggtttgacttggtcatattctgtatacttgatctccatgatgacactttcaaaggggttgatatggggtacagggttttgaatggtttgtttcaagcattctgtactagaacagtgggattttcagtaatggatttatcgcagttgcatgcagcgactcaggtgagttacttgatcatgatgtatatttctgttttgcccattgctatttccgtgagaagaaccaatgtttatgaagaacagtcgttgggggtatatgccaaggagaatgcagagggtgttgatgagagtgcgccatcaaactatgttgggtcgcatttgagaaaccaattgtcatatgatttgtggtatatttgtctagggctattcataatttgtattgccgagggtaagagattgaaggagcaggacctacgtttttcgatttttgcagttctttttgagatagtcagtgcatatggtacggtggggatgtctatgggatatccaggcgtggactgctctcttagtggtgaattcaatgtcatttcaaagttggtgattattgcgatgatgataagaggaagacatagagggttgccatacactatcgatcgtgctattatgctacctaacgcggctatgaaacgtcatgacagattgcaagaagagcacgcaatcaatagacacaatactatggaaagaacaaccacactaggtcgtgttgccacttttggaaatggtccaatcgacgggggcaataatttgttaactcgagcaatcaccaacatcgagcacagattgaggaacagaagagatgggcggtctgagagtctgactgtgagtgaagatcctcgttatgtagtaagaactgtgagtgaagtatga

SEQ ID NO: 65204 - protein, 1059 aa, Candida albicans
MLYRVSGFYKRHTRNFTNIDYGYYIRNFIHHIASKIYPYAKVVLPNFRAAHYFYILTLVILGSILVYPVKTCAYIDVLFFTAGASTQAGLNTVNVNDLSLYQQIVLYLLATLATPIFIHGSLLFVRLYYFERHFDNIKERSLMDYRMRKSATLARLGSAPTMSSTRLNTFNNQVLGFQEREAEKGSSSSPQSSSSQTSQPVSTAYNDQGGNDIEHHSEPSDSDDDESGNGPVTFQEKIHFEEPQRPRSQRRHSRTDSGIKFSALPHPRRRKSIDPEDMYRSINMLQEHKKNQEAKSKGIQFLNIGSPVRRKSRSSNIEAFPEEDTNPSRDDEITPATNSVGTGNNDEDEDDILIIKPPIEIENSDGANPIFTKKKKLASQIQFKETPGKAKKWITTKKRKHYNPWTSKLKKTLSNSSKKGSLSVVPTDTEDDSEDEEYASIDSETSDISDNEHAADNAEGSDVDSVGSYEEDEDEDEHNSDDDDDDDDGEGERRLGNGASLTKAQSHLVLPSKDETGGKKYTKRSNTLDTPQQNTSDGRKIRKKAPKRKTPRTQRNASFNQHSNVSIGDGSIENVDTNDSYQRLSRTMSGNYLSWTPTVGRNSTFIKLTDEQKEELGGIEYRAVKLLIKIIVVYYVGFNIIPGVMLSIWIYCMPHYKNLMISSSISPAWWAFFTSQSSFNDLGLTLTSNSMMSFNQNAFVQILCSFLIVIGNTGFPILLRFIIWVMFKTARPLSLYKESLGFLLDHPRRCFTLLFPSVPTWWLFFILVVLNGFDLVIFCILDLHDDTFKGVDMGYRVLNGLFQAFCTRTVGFSVMDLSQLHAATQVSYLIMMYISVLPIAISVRRTNVYEEQSLGVYAKENAEGVDESAPSNYVGSHLRNQLSYDLWYICLGLFIICIAEGKRLKEQDLRFSIFAVLFEIVSAYGTVGMSMGYPGVDCSLSGEFNVISKLVIIAMMIRGRHRGLPYTIDRAIMLPNAAMKRHDRLQEEHAINRHNTMERTTTLGRVATFGNGPIDGGNNLLTRAITNIEHRLRNRRDGRSESSTVSEDPRYVVRTVSEV

SEQ ID NO: 65205 - DNA, 3213 bp, Kluyveromyces lactis
  CDS (1)..(3213)
atgatcttccgcaaagtggtacgaaatcctactgttcaaaacatacaaatatacagaaagactttaggtcatcagattcgtgacattatcgaaaagttaacaaagaaaatcgatcctttcgtcaaatttatatttccaaacttcattgcattccattacttttacatcattgcatttgcattactatgttctattcttatttatcccgttaagaactttgcatacatcgatattttgtttctagccacgggggccgcaacccagggtggtttaaacacagtagacttaaatgagctgtcattgtaccaacaaattgttctgtatattactaccgcgctaactaccccaattttcattcatagtggcttggcatttgtgcggttttactggtttgaacgatattttgatggtattcgtgattggtccaagagagattttgagatgagaaggaccatgacactgcgccaaagggaactgaccaaaaataatacgatggaaaatgcttctaggagtactggtcaaggtcctctcaattttcttaccagaacttttactcacggagatagagatgctagtaattttcaaggtaggcttttcagaggagaagtggtcaaaagagacgaagacaataacgacgatagctcagtcgatacaaggccaccggaggcccatagcgatcatactgagaaattcatcggtaggcggaaatccagagatatcaatccagctgatatgtacagatcgattgccatgttacagaataggcatgaaagtaatgataacataaagggaccagcgcttgtcatcaaaagcccagcggaacgggaaaaagaaatagaagaacaacgtagattacaaaaagagcgtgaggaacagcaaggtcaatctattcagtttaaagtggaaccgcgcccgacaaagtcaacgaggtcaacttttgaaccctcgggaattaggaaatcatttacccgaagaaagaggcctagcttcttcaaaggttcccaatctgccagaataatacgagacaagttgagaagaagatccaaaggttctgatgtcaacaatgttgatgatgaggaagaagaacaggatgggcatgatgcagatatggaaggatcttctgaagacgatagtgttattgaatcttcagatggacagtcagagtctatatctgctcccaattttgaccatcactcatctgagccaacactacagagtggtggtacagtatctgcaccttcttctttagagagtaatgaaatcgaagaagaagatgaggaactaagcgatttacccactggtgtttcttattatgggctgcattcaggaggcgatcctcgaaataggttaaacagggtcatgagtacaaattatttatcatatgagcctaaaattggaagaaactcaacttttgttggattatcagaatcgcaaaaagttgaattaggaggggttgaatataggtccaccaaggttttatgtctacttttgtcgatatattatctcggttttagtattttagctatgatcatattcgctgcgtggatacaacctatgaacaattataaagaaattgttagatctcaaggtgtttcgccaacatggtgggggttttggactggaatgagtgcatttggtaatcttggattaacattgactccgaactccatgatatcatttcacaagtcaatatacacgttaatttggatgatgtggttcattgttattggtaacactggatttccaatttttctccgtttcgttatttggatacttttcaaactaagtccagatctgtccttgagaaaagatagtctagggtttttattagaccatcctcgtagatgtttcacaatgctatttcctaaagcggctacatggtggctttttctgattctcattggaatgaatgctattgatttgatattattcatcattttggatttgaatacagatgttgtaaaagatctaactgctggattcaaggtacttaacggtttatttcaagctgttagcacaagaaccgcagggtttgccgtgctagatctaagtcaattgcatccatctgtacaggtatcgtacatgttaatgatgtatgtttctgtgatgcccttagctatttcaattagaagaactaatgtctacgaagagcaatcgcttggtgtttacggggaatgggagaaaaatcaagaagatgatgggtcggaaaagaatacaaaaagtttcattggagcacatttacgtagacaattgtctttcgatctatggtatatgtttttgggtctctttattatctgtatctgcgaaggtgggaagatccaagatccaagcaaacccagtttcaccgtttttcaatgtctcttcgaagttgtaagtgcttatggtaccgttggattgtcccttggataccctggctccaatcaatcgttttcaggacaattcacaactatatcaaaactagtcatcattgcaatgttgataagaggaagacacagaggtttgccctatactttggatcgtgccatcatcttaccaagtgcgaaattgaaggaaaatgatttactccatgagttgactcactctaggagacccacaactttaggattgaatggatctacatctcatgataacagaaccacctctgtcgctgattcgacatcttcgattggtaacaaacatatagaccggttccgtgaccgttcacgttccgtatggcacggtttaacctctgcgtttagtatgggtcatcaaccacggccacatagaaccatgacgtctagatcgttagatgataccattacaacggaccgcatgatgtccacgcaaagtaaccaatcttttaacaatgaatcacaacaacaaacattttcggatggtaacaactatccaatgcacagcatgaactcaaaccaccattatgacaacagatctatgacccccaaccaatatcacgtgtttagagattcctttgatctgagatcgggtattactgagcacaaaggtttggatggtgtacatgcaaataccgtggaagcattcgaccattcgaactataattccaacagtaatagcaacagtaacagcaattcaaacagcaagaatacggaaacttcaagctcaggaccaatcttcaatcacatcaattcctctacctcattgcattcaccacattctacaggttcaatgcaatctctgaatagctcacccagatag

SEQ ID NO: 65206 - protein, 1070 aa, Kluyveromyces lactis
MIFRKVVRNPTVQNIQIYRKTLGHQIRDIIEKLTKKIDPFVKFIFPNFIAFHYFYIIAFALLCSILIYPVKNFAYIDILFLATGAATQGGLNTVDLNELSLYQQIVLYITTALTTPIFIHSGLAFVRFYWFERYFDGIRDWSKRDFEMRRTMTLRQRELTKNNTMENASRSTGQGPLNFLTRTFTHGDRDASNFQGRLFRGEVVKRDEDNNDDSSVDTRPPEAHSDHTEKFIGRRKSRDINPADMYRSIAMLQNRHESNDNIKGPALVIKSPAEREKEIEEQRRLQKEREEQQGQSIQFKVEPRPTKSTRSTFEPSGIRKSFTRRKRPSFFKGSQSARIIRDKLRRRSKGSDVNNVDDEEEEQDGHDADMEGSSEDDSVIESSDGQSESISAPNFDHHSSEPTLQSGGTVSAPSSLESNEIEEEDEELSDLPTGVSYYGLHSGGDPRNRLNRVMSTNYLSYEPKIGRNSTFVGLSESQKVELGGVEYRSTKVLCLLLSIYYLGFSILAMIIFAAWIQPMNNYKEIVRSQGVSPTWWGFWTGMSAFGNLGLTLTPNSMISFHKSIYTLIWMMWFIVIGNTGFPIFLRFVIWILFKLSPDLSLRKDSLGFLLDHPRRCFTMLFPKAATWWLFLILIGMNAIDLILFIILDLNTDVVKDLTAGFKVLNGLFQAVSTRTAGFAVLDLSQLHPSVQVSYMLMMYVSVMPLAISIRRTNVYEEQSLGVYGEWEKNQEDDGSEKNTKSFIGAHLRRQLSFDLWYMFLGLFIICICEGGKIQDPSKPSFTVFQCLFEVVSAYGTVGLSLGYPGSNQSFSGQFTTISKLVIIAMLIRGRHRGLPYTLDRAIILPSAKLKENDLLHELTHSRRPTTLGLNGSTSHDNRTTSVADSTSSIGNKHIDRFRDRSRSVWHGLTSAFSMGHQPRPHRTMTSRSLDDTITTDRMMSTQSNQSFNNESQQQTFSDGNNYPMHSMNSNHHYDNRSMTPNQYHVFRDSFDLRSGITEHKGLDGVHANTVEAFDHSNYNSNSNSNSNSNSNSKNTETSSSGPIFNHINSSTSLHSPHSTGSMQSLNSSPR

SEQ ID NO: 65207 - DNA, 2643 bp, Schizosaccharomyces pombe
  CDS (1)..(2643)
atgcagttatcgggtttttctacaaacggttccggttccttgaataccattgtatgtgaaaaacttcttttcaagcctaactttgttcaagattcttttataataggaatgactattttatgttcagtaatattgtatgggtcgggaaatttgcgctacatagatgctttgttgttggcttctggttcttgtactcagactggcttgcagcctgtggacctcacgcagatatccatttaccaacagttaactattctcctttttggagttttgagtacaccaattactgtgaacctgggcttgactttgtttaagctgtacttctataacaagcgatatgacatggtcataacaaataataaacttaggatgacatatacttatcacactgtaagaagaagggatactccagagccttccaaagttggcaatcgaaaaattcgggttttgttagaccagggtaatcaaatgcaccggccagttgccccagagactaaggctgaggaagctgaacaccaagagaatgaaaaacatcacaggcaccattttcgtctaaggaaatttgctaatgcaatcgatcgcccaagcttctttcgcgggaataccatgcccgctctccctagttatgcaggtgttagaaattctcaagaaaatgaagacagaactgaagcattaagtccagctcttgggaaacgaagaatggcatcaatcgacaatggatctttatccgttgtacaaaacaatgctagaaataatcctgtcgacttttacattcctagttcgtttgaagaatcatcttttcaaacaattcctgaggattttgagcctcaagtacatgaccacgagaatcaaacacaactgaaccatcatctggataacaacagttctatctcttcgcacaatccttccctagaaactgcaaatgatggtaatcaggaaactgtttcatcctcaaactcaaactacagcacaacaagagttgacaatgatccacatgtagcatcttattcacctcaaaattcgaattttgatcatcaggctgctgcaactactaacgatgcacatcaaaatgtagtacgcggctctgcaattaccattgcaccaacccctgttcccaggcataatcgcaggcctatatattttgctgatgacacgaatggagctgagcaggaaaaaggtgctcatcgacttgatggacgaggtagaaaacgtggtaaatcatttgctgttacacctacacttcacaggaatgagcgctcaatgtctgtcctaccatttcaattagccaaatcatttacatctgctcttcctcgaagactcacattcaaccgtactcacacgaaagctagcacaatgagtttaccttatttatcgtacaatgcaacagtgggcagaaattctgcattttatgccttaactccagtggagagagaagaattggcgggaattgaatatgaatctctcaggatattgactgtcatattagtggtttattttctgttttggcatattcttggtttggttgcgttcctaatattcatttatactgctaaaacatccggtcgtgtagttacggacggcggtataaatagaggctggtgggcagcgtttacttctagttcgctgtttgataatctaggctattcgttgaacagcgattctttaaattcctttcaaaaagccatatttcctcaggttcttggaactattctgatatttttagggaatactttctttccaattatgctccggtttataatttggattatgatacgaacaacgagattttcgcctaatttccagcaagctttgtactttcttttcgaacaccctcgacgaagttttactcttctgtttccttcaaaaactacttgggtgctttttttaaatttaactttattgaattttgcttcctttttcttttttatggttttagacttgggtaattcatatgttgacaaaattccagttggttatcgaattatgaatgctatatttcaaaacgcagctacacgttctgctggctttacggtggttgatttaagccaaattgctccggcagtaatggtgacctacatgtttatgatgtatatctctgcctatccaatcgcaatgagtattcgacaaactaatgtttacgaggaacgttctcttggaatatatgcagcagacaccgaaaatgatgatgataataatattaataataataataatgataataatacgccgaaaaggaaaaattttttgatggaccatatacaaaggcaactgagtcacgatttgtggtatttattcctaggctacttcataattactatagtcgaaggtcgtcgattagagtcggaagcggaaccgcaatttacgctttttgctattttattcgaggtgatttcaggctatggcactgtgggcctaagcttagggtacaaaaatgatccttcgcttacggctcagtttcggaaaattagcaaacttgttatggttgcactacagattcgtggacgacatagaggacttccaagtgcattagatagagcagtgctaatgccttcggataaaaactttgaccgggaagaagaggattatatgagacgtcacgggaaaaaaaatactaatagagcagacccggtacccagttcttaa

SEQ ID NO: 65208 - protein, 880 aa, Schizosaccharomyces pombe
MQLSGFSTNGSGSLNTIVCEKLLFKPNFVQDSFIIGMTILCSVILYGSGNLRYIDALLLASGSCTQTGLQPVDLTQISIYQQLTILLFGVLSTPITVNLGLTLFKLYFYNKRYDMVITNNKLRMTYTYHTVRRRDTPEPSKVGNRKIRVLLDQGNQMHRPVAPETKAEEAEHQENEKHHRHHFRLRKFANAIDRPSFFRGNTMPALPSYAGVRNSQENEDRTEALSPALGKRRMASIDNGSLSVVQNNARNNPVDFYIPSSFEESSFQTIPEDFEPQVHDHENQTQLNHHLDNNSSISSHNPSLETANDGNQETVSSSNSNYSTTRVDNDPHVASYSPQNSNFDHQAAATTNDAHQNVVRGSAITIAPTPVPRHNRRPIYFADDTNGAEQEKGAHRLDGRGRKRGKSFAVTPTLHRNERSMSVLPFQLAKSFTSALPRRLTFNRTHTKASTMSLPYLSYNATVGRNSAFYALTPVEREELAGIEYESLRILTVILVVYFLFWHILGLVAFLIFIYTAKTSGRVVTDGGINRGWWAAFTSSSLFDNLGYSLNSDSLNSFQKAIFPQVLGTILIFLGNTFFPIMLRFIIWIMIRTTRFSPNFQQALYFLFEHPRRSFTLLFPSKTTWVLFLNLTLLNFASFFFFMVLDLGNSYVDKIPVGYRIMNAIFQNAATRSAGFTVVDLSQIAPAVMVTYMFMMYISAYPIAMSIRQTNVYEERSLGIYAADTENDDDNNINNNNNDNNTPKRKNFLMDHIQRQLSHDLWYLFLGYFIITIVEGRRLESEAEPQFTLFAILFEVISGYGTVGLSLGYKNDPSLTAQFRKISKLVMVALQIRGRHRGLPSALDRAVLMPSDKNFDREEEDYMRRHGKKNTNRADPVPSS

SEQ ID NO: 65209 - DNA, 2670 bp, Saccharomyces cerevisiae
  CDS (1)..(2670)
atgccaacagctaagaggacgtcatccagggcttcgttggcactgcccttccagttacggttggtgcacaagaaatcatggggccatcggctaagagacttcatttccgggttcttaaaatcatgcagacccattgctaaatacgttttccccaacttcatcgtggtgcactatatctacctgatcacgctgtcgattatcgggtccattctgttatatccgtgcaagaacacggcgttcatcgatgtgctatttctggctgctggagcgtctacacagggcgggctggccaccaagagcactaacgatttcaacctgtaccagcagatagtggtgtacgtcattacattgctgtccacgcctatacttattcatgggtttttggcctttgtcaggctgtattggtttgaaaggtacttcgacaacattagggatatctccaaacagaattttaaactaagaaggaccatgacgttgcaacaaagggaactatcgggcagcagtggcaatgccgctcgaagtaggagtttcaaggacaacctgttccgtgggaagtttgtttccagagaagacccacgacaatccgcttcagatgtgccgatggactctcctgacacgtccgcattgtcctcaatctcaccgttgaatgtttcctcctctaaggaggaatccagtgacacgcaaagctcgcctccaaacttctcaagtaagcgccaaccctcagacgttgacccaagagacatttacaaatcgataatgatgctacaaaaacaacaagagaagagcaacgcaaactccacggattctttttcgagcgagaccaatggacccgctttcattgtgcaggaacgtcatgagagaagagccccccactgctcactgaaacgccattctgtcctgccatcttctcaggaattgaacaagctagcccagacgaaaagtttccagaaattgcttggcttgcggagagatgaaggtgaccatgactactttgacggtgctcctcacaaatatatggtcaccaagaagaaaaaaatatctagaacgcaatcatgtaacatcccaacgtatactgcttcaccgagtcctaaaacctcaggccaagtagttgaaaatcatagaaacttggccaagtcggcgccttcatcttttgttgatgaggagatgagcttttcaccgcaagagtctttgaatttacagttccaagcgcacccgcccaaaccaaaacgacgtgaaggtgatataggccaccccttcaccagaacaatgagcaccaactatctatcgtggcagccaacctttggcagaaactccgtcttcattggactcacaaagcaacaaaaggaggaactcggcggtgtcgaatatcgtgctttgagattgctgtgctgcattctcatggtatactacatcggattcaacattttggcgtttgtgaccatcgttccatgggcctgtacgaggcaccactactcagagattattagacgaaatggagtttctccaacctggtgggggtttttcactgcaatgagtgcattcagcaacttgggtctgtctttgaccgctgattcaatggtttcctttgatactgcgccgtatccgctgattttcatgatgttcttcatcatcataggcaatacaggcttcccaattatgttacgatttatcatttggatcatgttcaagacctcgagagacctatctcagtttaaggaaagtcttgggtttctcttggatcatccgcgcaggtgttttacgttgctgttccccagcggccccacatggtggctgtttacaactttagtcgtcttaaacgctacggattggattcttttcataattctggatttcaactccgctgtagtaaggcaggttgctaaaggttatcgagctctcatgggcctcttccagtctgtatgcacaagaactgctggattcaacgttgttgacttaagtaaattacacccgtccattcaggtgtcttatatgctaatgatgtacgtttcggtcctgccgctggcgatttccattagaagaacgaatgtttatgaggagcaatcgttgggactatacgatagtggacaagatgacgaaaatatcacccacgaagacgatataaaggaaacagaccatgatggcgaatccgaagagcgagacactgtatctacaaagtccaagccgaagaaacagtccccaaaatcgtttgttggtgctcatttgaggaggcaactctcttttgatttatggtacctattccttggattatttataatatgcatatgcgagggcagaaaaatcgaagacgttaataaacctgatttcaatgtctttgctatattgtttgaagttgttagcgcttatggtacagtgggtttgtcattgggttacccaaacaccaacacatcactatctgcccagttcaccgtattatcgaagctagtcataattgccatgctaataagaggaagaaatagaggtttaccatacactttggatcgtgccatcatgctgccaagtgacaaactggaacaaattgatcgtttacaagatatgaaagctaagggtaagttgttagccaaagttggtgaggatccaatgactacttacgtcaaaaagagatcccacaaactgaaaaaaatagcaacaaagttttgggggaagcattaa

SEQ ID NO: 65210 - protein, 889 aa, Saccharomyces cerevisiae
MPTAKRTSSRASLALPFQLRLVHKKSWGHRLRDFISGFLKSCRPIAKYVFPNFIVVHYIYLITLSIIGSILLYPCKNTAFIDVLFLAAGASTQGGLATKSTNDFNLYQQIVVYVITLLSTPILIHGFLAFVRLYWFERYFDNIRDISKQNFKLRRTMTLQQRELSGSSGNAARSRSFKDNLFRGKFVSREDPRQSASDVPMDSPDTSALSSISPLNVSSSKEESSDTQSSPPNFSSKRQPSDVDPRDIYKSIMMLQKQQEKSNANSTDSFSSETNGPAFIVQERHERRAPHCSLKRHSVLPSSQELNKLAQTKSFQKLLGLRRDEGDHDYFDGAPHKYMVTKKKKISRTQSCNIPTYTASPSPKTSGQVVENHRNLAKSAPSSFVDEEMSFSPQESLNLQFQAHPPKPKRREGDIGHPFTRTMSTNYLSWQPTFGRNSVFIGLTKQQKEELGGVEYRALRLLCCILMVYYIGFNILAFVTIVPWACTRHHYSEIIRRNGVSPTWWGFFTAMSAFSNLGLSLTADSMVSFDTAPYPLIFMMFFIIIGNTGFPIMLRFIIWIMFKTSRDLSQFKESLGFLLDHPRRCFTLLFPSGPTWWLFTTLVVLNATDWILFIILDFNSAVVRQVAKGYRALMGLFQSVCTRTAGFNVVDLSKLHPSIQVSYMLMMYVSVLPLAISIRRTNVYEEQSLGLYDSGQDDENITHEDDIKETDHDGESEERDTVSTKSKPKKQSPKSFVGAHLRRQLSFDLWYLFLGLFIICICEGRKIEDVNKPDFNVFAILFEVVSAYGTVGLSLGYPNTNTSLSAQFTVLSKLVIIAMLIRGRNRGLPYTLDRAIMLPSDKLEQIDRLQDMKAKGKLLAKVGEDPMTTYVKKRSHKLKKIATKFWGKH

SEQ ID NO: 65211 - DNA, 26 bp, Artificial sequence
  primer
atgcattttagaagaacgatgagtag

SEQ ID NO: 65212 - DNA, 24 bp, Artificial sequence
  primer
ttagagcgttgtgctgctcctttt

SEQ ID NO: 65213 - protein, 1278 aa, Artificial sequence
  consensus sequence
  Variant (2)..(5): Xaa in position 2 to 5 is any amino acid
  Variant (8)..(10): Xaa in position 8 to 10 is any amino acid
  Variant (13)..(14): Xaa in position 13 to 14 is any amino acid
  Variant (15)..(32): Xaa in position 15 to 32 is any or no amino acid
  Variant (35)..(39): Xaa in position 35 to 39 is any amino acid
  Variant (40)..(40): Xaa in position 40 is any or no amino acid
  Variant (42)..(44): Xaa in position 42 to 44 is any amino acid
  Variant (47)..(51): Xaa in position 47 to 51 is any amino acid
  Variant (52)..(58): Xaa in position 52 to 58 is any or no amino acid
  Variant (62)..(62): Xaa in position 62 is any amino acid
  Variant (65)..(67): Xaa in position 65 to 67 is any amino acid
  Variant (70)..(70): Xaa in position 70 is any amino acid
  Variant (73)..(73): Xaa in position 73 is any amino acid
  Variant (79)..(80): Xaa in position 79 to 80 is any amino acid
  Variant (82)..(82): Xaa in position 82 is any amino acid
  Variant (84)..(85): Xaa in position 84 to 85 is any amino acid
  Variant (89)..(91): Xaa in position 89 to 91 is any amino acid
  Variant (93)..(98): Xaa in position 93 to 98 is any amino acid
  Variant (102)..(106): Xaa in position 102 to 106 is any amino acid
  Variant (108)..(108): Xaa in position 108 is any amino acid
  Variant (110)..(110): Xaa in position 110 is any amino acid
  Variant (117)..(118): Xaa in position 117 to 118 is any amino acid
  Variant (120)..(132): Xaa in position 120 to 132 is any amino acid
  Variant (134)..(366): Xaa in position 134 to 366 is any amino acid
  Variant (367)..(811): Xaa in position 367 to 811 is any or no amino acid
  Variant (815)..(817): Xaa in position 815 to 817 is any amino acid
  Variant (819)..(819): Xaa in position 819 is any amino acid
  Variant (824)..(824): Xaa in position 824 is any amino acid
  Variant (826)..(827): Xaa in position 826 to 827 is any amino acid
  Variant (829)..(831): Xaa in position 829 to 831 is any amino acid
  Variant (833)..(834): Xaa in position 833 to 834 is any amino acid
  Variant (839)..(839): Xaa in position 839 is any amino acid
  Variant (843)..(844): Xaa in position 843 to 844 is any amino acid
  Variant (846)..(846): Xaa in position 846 is any amino acid
  Variant (848)..(850): Xaa in position 848 to 850 is any amino acid
  Variant (852)..(853): Xaa in position 852 to 853 is any amino acid
  Variant (855)..(857): Xaa in position 855 to 857 is any amino acid
  Variant (859)..(868): Xaa in position 859 to 868 is any amino acid
  Variant (871)..(878): Xaa in position 871 to 878 is any amino acid
  Variant (879)..(879): Xaa in position 879 is any or no amino acid
  Variant (881)..(883): Xaa in position 881 to 883 is any amino acid
  Variant (885)..(888): Xaa in position 885 to 888 is any amino acid
  Variant (891)..(893): Xaa in position 891 to 893 is any amino acid
  Variant (895)..(896): Xaa in position 895 to 896 is any amino acid
  Variant (898)..(898): Xaa in position 898 is any amino acid
  Variant (900)..(902): Xaa in position 900 to 902 is any amino acid
  Variant (904)..(904): Xaa in position 904 is any amino acid
  Variant (908)..(909): Xaa in position 908 to 909 is any amino acid
  Variant (912)..(912): Xaa in position 912 is any amino acid
  Variant (915)..(927): Xaa in position 915 to 927 is any amino acid
  Variant (929)..(929): Xaa in position 929 is any amino acid
  Variant (937)..(938): Xaa in position 937 to 938 is any amino acid
  Variant (942)..(942): Xaa in position 942 is any amino acid
  Variant (945)..(957): Xaa in position 945 to 957 is any amino acid
  Variant (959)..(959): Xaa in position 959 is any amino acid
  Variant (961)..(961): Xaa in position 961 is any amino acid
  Variant (977)..(979): Xaa in position 977 to 979 is any amino acid
  Variant (985)..(986): Xaa in position 985 to 986 is any amino acid
  Variant (988)..(989): Xaa in position 988 to 989 is any amino acid
  Variant (992)..(993): Xaa in position 992 to 993 is any amino acid
  Variant (995)..(997): Xaa in position 995 to 997 is any amino acid
  Variant (1000)..(1000): Xaa in position 1000 is any amino acid
  Variant (1003)..(1004): Xaa in position 1003 to 1004 is any amino acid
  Variant (1005)..(1007): Xaa in position 1005 to 1007 is any or no amino acid
  Variant (1009)..(1013): Xaa in position 1009 to 1013 is any amino acid
  Variant (1015)..(1019): Xaa in position 1015 to 1019 is any amino acid
  Variant (1025)..(1026): Xaa in position 1025 to 1026 is any amino acid
  Variant (1033)..(1033): Xaa in position 1033 is any amino acid
  Variant (1035)..(1037): Xaa in position 1035 to 1037 is any amino acid
  Variant (1039)..(1039): Xaa in position 1039 is any amino acid
  Variant (1043)..(1044): Xaa in position 1043 to 1044 is any amino acid
  Variant (1050)..(1050): Xaa in position 1050 is any amino acid
  Variant (1054)..(1054): Xaa in position 1054 is any amino acid
  Variant (1057)..(1057): Xaa in position 1057 is any amino acid
  Variant (1059)..(1059): Xaa in position 1059 is any amino acid
  Variant (1063)..(1063): Xaa in position 1063 is any amino acid
  Variant (1072)..(1072): Xaa in position 1072 is any amino acid
  Variant (1076)..(1076): Xaa in position 1076 is any amino acid
  Variant (1078)..(1094): Xaa in position 1078 to 1094 is any amino acid
  Variant (1095)..(1173): Xaa in position 1095 to 1173 is any or no amino acid
  Variant (1175)..(1175): Xaa in position 1175 is any amino acid
  Variant (1179)..(1179): Xaa in position 1179 is any amino acid
  Variant (1187)..(1188): Xaa in position 1187 to 1188 is any amino acid
  Variant (1196)..(1196): Xaa in position 1196 is any amino acid
  Variant (1198)..(1198): Xaa in position 1198 is any amino acid
  Variant (1201)..(1207): Xaa in position 1201 to 1207 is any amino acid
  Variant (1208)..(1212): Xaa in position 1208 to 1212 is any or no amino acid
  Variant (1214)..(1215): Xaa in position 1214 to 1215 is any amino acid
  Variant (1217)..(1218): Xaa in position 1217 to 1218 is any amino acid
  Variant (1222)..(1223): Xaa in position 1222 to 1223 is any amino acid
  Variant (1233)..(1233): Xaa in position 1233 is any amino acid
  Variant (1237)..(1239): Xaa in position 1237 to 1239 is any amino acid
  Variant (1240)..(1240): Xaa in position 1240 is any or no amino acid
  Variant (1242)..(1245): Xaa in position 1242 to 1245 is any amino acid
  Variant (1247)..(1249): Xaa in position 1247 to 1249 is any amino acid
  Variant (1258)..(1258): Xaa in position 1258 is any amino acid
  Variant (1269)..(1269): Xaa in position 1269 is any amino acid
  Variant (1275)..(1275): Xaa in position 1275 is any amino acid
KXXXXNFXXXHYXXXXXXXXXXXXXXXXXXXXIIXXXXXXSXXXYPXXXXXXXXXXXXYIDXLFXXXGAXTQXGLNTVXXNXLXXYQQXXXYXXXXXXTPIXXXXXLXFXRLYWFEXXFXXXXXXXXXXXXXRXXXXXXXXXXXXXXXXXXXXXXXXXXXXXXXXXXXXXXXXXXXXXXXXXXXXXXXXXXXXXXXXXXXXXXXXXXXXXXXXXXXXXXXXXXXXXXXXXXXXXXXXXXXXXXXXXXXXXXXXXXXXXXXXXXXXXXXXXXXXXXXXXXXXXXXXXXXXXXXXXXXXXXXXXXXXXXXXXXXXXXXXXXXXXXXXXXXXXXXXXXXXXXXXXXXXXXXXXXXXXXXXXXXXXXXXXXXXXXXXXXXXXXXXXXXXXXXXXXXXXXXXXXXXXXXXXXXXXXXXXXXXXXXXXXXXXXXXXXXXXXXXXXXXXXXXXXXXXXXXXXXXXXXXXXXXXXXXXXXXXXXXXXXXXXXXXXXXXXXXXXXXXXXXXXXXXXXXXXXXXXXXXXXXXXXXXXXXXXXXXXXXXXXXXXXXXXXXXXXXXXXXXXXXXXXXXXXXXXXXXXXXXXXXXXXXXXXXXXXXXXXXXXXXXXXXXXXXXXXXXXXXXXXXXXXXXXXXXXXXXXXXXXXXXXXXXXXXXXXXXXXXXXXXXXXXXXXXXXXXXXXXXXXXXXXXXXXXXXXXXXXXXXXXXXXXXXXXXXXXXXXXXXXXXXXXXXXXXXXXXXXXXXXXXXXXXXXXXXXXXXXXXXXXXXXXXXXXXXXXXXXXXXXXXXXXXXXXXXXXXXXXXXXXXXXXXXXXXXYLSXXXTXGRNSXFXXLXXXQXXELGGXEYRXXKXLXXXLXXYXXXFXXXXXXXXXXWIXXXXXXXXXVXXXGXXXXWWXXXTXXSXFXXXGXTLTXXSMXSFXXXXXXXXXXXXXIXIGNTGFPXXLRFXIWXXXXXXXXXXXXXEXLXFLLDHPRRCFTLLFPXXXTWWLFXXLXXLNXXDXXXFIXLDXXXXXVXXXXXGXXXXXGLFQAXXTRTAGFXVXXXSXLHPXXQVSYMXMMYXSVXPXAISXRRTNVYEEXSLGXYXXXXXXXXXXXXXXXXXXXXXXXXXXXXXXXXXXXXXXXXXXXXXXXXXXXXXXXXXXXXXXXXXXXXXXXXXXXXXXXXXXXXXXXXXXXXXXXXGXHLRXQLSFDLWXXFLGLFIIXIXEGXXXXXXXXXXXXFXXFXXLFEXXSAYGTVGLSXGYPXXXXSXXXXFXXXSKLVIIAMXIRGRHRGLPYXLDRAIXLPS

SEQ ID NO: 65214 - protein, 58 aa, Artificial sequence
  protein pattern
  Variant (2)..(3): Xaa in position 2 to 3 is any amino acid
  Variant (5)..(5): Xaa in position 5 is Ala or Ser
  Variant (6)..(6): Xaa in position 6 is any amino acid
  Variant (7)..(7): Xaa in position 7 is Cys or Ser
  Variant (13)..(13): Xaa in position 13 is Phe or Leu
  Variant (14)..(14): Xaa in position 14 is Ala, Asn, Ser or Thr
  Variant (15)..(15): Xaa in position 15 is Cys, Ser or Val
  Variant (16)..(16): Xaa in position 16 is Phe, Ile, Leu or Val
  Variant (17)..(17): Xaa in position 17 is Asp or Ser
  Variant (18)..(18): Xaa in position 18 is Ile, Leu or Val
  Variant (19)..(19): Xaa in position 19 is Ala or Ser
  Variant (20)..(20): Xaa in position 20 is any amino acid
  Variant (22)..(22): Xaa in position 22 is any amino acid
  Variant (23)..(23): Xaa in position 23 is Pro or Ser
  Variant (24)..(24): Xaa in position 24 is Ala or Ser
  Variant (25)..(25): Xaa in position 25 is Ile, Leu or Val
  Variant (26)..(26): Xaa in position 26 is Pro or Gln
  Variant (28)..(28): Xaa in position 28 is any amino acid
  Variant (30)..(30): Xaa in position 30 is Leu or Met
  Variant (31)..(31): Xaa in position 31 is Ile or Leu
  Variant (35)..(35): Xaa in position 35 is Ile or Val
  Variant (36)..(36): Xaa in position 36 is Ala or Ser
  Variant (37)..(37): Xaa in position 37 is Ile or Val
  Variant (38)..(38): Xaa in position 38 is Phe, Leu or Met
  Variant (40)..(40): Xaa in position 40 is Ile or Leu
  Variant (44)..(44): Xaa in position 44 is Ile or Leu
  Variant (53)..(53): Xaa in position 53 is any amino acid
  Variant (57)..(57): Xaa in position 57 is Ile, Leu or Val
  Variant (58)..(58): Xaa in position 58 is Phe or Tyr
GXXQXXXTRTAGXXXXXXXXLXXXXXVXYXXMMYXXXXPXAISXRRTNVYEEXSLGXX

SEQ ID NO: 65215 - protein, 59 aa, Artificial sequence
  protein pattern
  Variant (2)..(2): Xaa in position 2 is any amino acid
  Variant (3)..(4): Xaa in position 3 to 4 is any or no amino acid
  Variant (6)..(6): Xaa in position 6 is any or no amino acid
  Variant (13)..(13): Xaa in position 13 is any amino acid
  Variant (14)..(14): Xaa in position 14 is Phe, Leu or Met
  Variant (17)..(17): Xaa in position 17 is any amino acid
  Variant (18)..(18): Xaa in position 18 is Ile, Met or Val
  Variant (21)..(21): Xaa in position 21 is any amino acid
  Variant (22)..(22): Xaa in position 22 is Leu or Met
  Variant (23)..(25): Xaa in position 23 to 25 is any amino acid
  Variant (26)..(26): Xaa in position 26 is Ala, Ser, Thr or Val
  Variant (27)..(29): Xaa in position 27 to 29 is any amino acid
  Variant (30)..(30): Xaa in position 30 is Ser or Thr
  Variant (31)..(33): Xaa in position 31 to 33 is any amino acid
  Variant (34)..(34): Xaa in position 34 is Asp or Glu
  Variant (35)..(35): Xaa in position 35 is Glu or Ser
  Variant (37)..(37): Xaa in position 37 is any amino acid
  Variant (49)..(49): Xaa in position 49 is Leu or Met
  Variant (53)..(54): Xaa in position 53 to 54 is any amino acid
  Variant (55)..(55): Xaa in position 55 is Ala or Pro
IXXXIXGNTGFPXXLRXXIWXXXXXXXXXXXXXXXLXFLLDHPRRCFTXLFPXXXTWWL

SEQ ID NO: 65216 - protein, 41 aa, Artificial sequence
  protein pattern
  Variant (2)..(2): Xaa in position 2 is any amino acid
  Variant (3)..(4): Xaa in position 3 to 4 is any or no amino acid
  Variant (6)..(6): Xaa in position 6 is any amino acid
  Variant (7)..(7): Xaa in position 7 is any or no amino acid
  Variant (9)..(9): Xaa in position 9 is Asn, Gln, Ser or Thr
  Variant (10)..(10): Xaa in position 10 is Asp, Thr or Val
  Variant (11)..(11): Xaa in position 11 is Ile, Leu or Val
  Variant (12)..(12): Xaa in position 12 is Gly or Ser
  Variant (15)..(15): Xaa in position 15 is Ile or Val
  Variant (16)..(16): Xaa in position 16 is Ile or Met
  Variant (17)..(17): Xaa in position 17 is Ile or Val
  Variant (18)..(18): Xaa in position 18 is Ala or Cys
  Variant (19)..(19): Xaa in position 19 is Leu or Met
  Variant (20)..(20): Xaa in position 20 is any amino acid
  Variant (21)..(21): Xaa in position 21 is Ile or Val
  Variant (24)..(24): Xaa in position 24 is Lys or Arg
  Variant (25)..(25): Xaa in position 25 is any amino acid
  Variant (31)..(31): Xaa in position 31 is Ala, Gly, Ser or Thr
  Variant (32)..(32): Xaa in position 32 is Ile, Leu or Val
  Variant (36)..(36): Xaa in position 36 is Ile or Val
  Variant (37)..(37): Xaa in position 37 is Ile, Leu or Met
  Variant (40)..(40): Xaa in position 40 is Asp, Asn or Ser
  Variant (41)..(41): Xaa in position 41 is Ala, Asp or Glu
SXXXSXXFXXXXKLXXXXXXXRGXXRGLPYXXDRAXXLPXX

SEQ ID NO: 65217 - protein, 58 aa, Artificial sequence
  protein pattern
  Variant (3)..(3): Xaa in position 3 is Trp or Tyr
  Variant (4)..(4): Xaa in position 4 is any amino acid
  Variant (5)..(5): Xaa in position 5 is Ala or Pro
  Variant (7)..(7): Xaa in position 7 is Phe, Ile, Met or Val
  Variant (12)..(12): Xaa in position 12 is any amino acid
  Variant (14)..(15): Xaa in position 14 to 15 is any amino acid
  Variant (17)..(17): Xaa in position 17 is Ser or Thr
  Variant (18)..(19): Xaa in position 18 to 19 is any amino acid
  Variant (20)..(20): Xaa in position 20 is Glu or Gln
  Variant (21)..(21): Xaa in position 21 is Lys or Arg
  Variant (22)..(22): Xaa in position 22 is Asp or Glu
  Variant (25)..(25): Xaa in position 25 is Ala or Gly
  Variant (27)..(27): Xaa in position 27 is Ile or Val
  Variant (30)..(30): Xaa in position 30 is Glu or Arg
  Variant (31)..(31): Xaa in position 31 is Ala or Ser
  Variant (32)..(32): Xaa in position 32 is Ile, Leu or Val
  Variant (33)..(33): Xaa in position 33 is Lys or Arg
  Variant (34)..(34): Xaa in position 34 is any amino acid
  Variant (36)..(37): Xaa in position 36 to 37 is any amino acid
  Variant (38)..(38): Xaa in position 38 is Ile or Val
  Variant (39)..(39): Xaa in position 39 is Ile or Leu
  Variant (40)..(41): Xaa in position 40 to 41 is any amino acid
  Variant (43)..(43): Xaa in position 43 is Phe or Tyr
  Variant (44)..(45): Xaa in position 44 to 45 is any amino acid
  Variant (46)..(46): Xaa in position 46 is Phe, Trp or Tyr
  Variant (47)..(47): Xaa in position 47 is any amino acid
  Variant (48)..(48): Xaa in position 48 is Ala, Ile or Leu
  Variant (49)..(49): Xaa in position 49 is Ile, Leu, Met or Val
  Variant (50)..(53): Xaa in position 50 to 53 is any amino acid
  Variant (54)..(54): Xaa in position 54 is Phe, Ile or Leu
  Variant (55)..(55): Xaa in position 55 is any amino acid
  Variant (56)..(56): Xaa in position 56 is Ile or Pro
  Variant (57)..(57): Xaa in position 57 is Phe, Trp or Tyr
  Variant (58)..(58): Xaa in position 58 is Ala or Ile
LSXXXTXGRNSXFXXLXXXXXXELXGXEYXXXXXLXXXXXXYXXXXXXXXXXXXXXXX

SEQ ID NO: 65218 - protein, 27 aa, Artificial sequence
  protein pattern
  Variant (3)..(3): Xaa in position 3 is any amino acid
  Variant (6)..(6): Xaa in position 6 is Gly or Ser
  Variant (7)..(7): Xaa in position 7 is Phe or Tyr
  Variant (11)..(11): Xaa in position 11 is Phe or Tyr
  Variant (12)..(12): Xaa in position 12 is Ile, Leu, Met or Val
  Variant (13)..(13): Xaa in position 13 is any amino acid
  Variant (18)..(18): Xaa in position 18 is Ile or Val
  Variant (20)..(20): Xaa in position 20 is Cys or Thr
  Variant (22)..(22): Xaa in position 22 is Ala, Cys or Val
  Variant (24)..(24): Xaa in position 24 is Gly or Asn
  Variant (25)..(25): Xaa in position 25 is any amino acid
  Variant (26)..(26): Xaa in position 26 is Lys or Arg
  Variant (27)..(27): Xaa in position 27 is Ile or Leu
LRXQLXXDLWXXXLGLFXIXIXEXXXX

SEQ ID NO: 65219 - protein, 40 aa, Artificial sequence
  protein pattern
  Variant (2)..(2): Xaa in position 2 is any amino acid
  Variant (3)..(3): Xaa in position 3 is Ala, Asp, Glu, Asn or Ser
  Variant (4)..(4): Xaa in position 4 is any amino acid
  Variant (5)..(5): Xaa in position 5 is Ala or Gly
  Variant (6)..(6): Xaa in position 6 is any amino acid
  Variant (7)..(7): Xaa in position 7 is Gly, Asn, Ser or Thr
  Variant (8)..(8): Xaa in position 8 is any amino acid
  Variant (9)..(9): Xaa in position 9 is Gly, Pro, Thr or Val
  Variant (12)..(12): Xaa in position 12 is Ala or Gly
  Variant (13)..(13): Xaa in position 13 is any amino acid
  Variant (14)..(14): Xaa in position 14 is Phe or Trp
  Variant (16)..(16): Xaa in position 16 is Ala, Gly or Ser
  Variant (17)..(17): Xaa in position 17 is any amino acid
  Variant (19)..(19): Xaa in position 19 is any amino acid
  Variant (21)..(21): Xaa in position 21 is any amino acid
  Variant (22)..(22): Xaa in position 22 is Asp or Asn
  Variant (23)..(23): Xaa in position 23 is Leu or Val
  Variant (25)..(25): Xaa in position 25 is any amino acid
  Variant (26)..(26): Xaa in position 26 is Ser or Thr
  Variant (27)..(27): Xaa in position 27 is Ile or Leu
  Variant (28)..(28): Xaa in position 28 is Asn or Thr
  Variant (29)..(29): Xaa in position 29 is Ala, Pro or Ser
  Variant (30)..(30): Xaa in position 30 is Asp or Asn
  Variant (32)..(32): Xaa in position 32 is Leu or Met
  Variant (33)..(33): Xaa in position 33 is any amino acid
  Variant (35)..(35): Xaa in position 35 is Phe or Tyr
  Variant (36)..(37): Xaa in position 36 to 37 is any amino acid
  Variant (38)..(38): Xaa in position 38 is Ala or Ser
  Variant (39)..(39): Xaa in position 39 is any amino acid
  Variant (40)..(40): Xaa in position 40 is Phe, Trp or Tyr
VXXXXXXXXWWXXXTXXSXFXXXGXXXXXXSXXSXXXXXX

SEQ ID NO: 65220 - protein, 32 aa, Artificial sequence
  protein pattern
  Variant (3)..(3): Xaa in position 3 is Ile, Met or Val
  Variant (4)..(5): Xaa in position 4 to 5 is Ile, Leu or Val
  Variant (7)..(8): Xaa in position 7 to 8 is any amino acid
  Variant (9)..(9): Xaa in position 9 is Ala, Cys, Ser or Thr
  Variant (10)..(11): Xaa in position 10 to 11 is any amino acid
  Variant (12)..(12): Xaa in position 12 is Ala, Cys, Ser or Thr
  Variant (13)..(13): Xaa in position 13 is Asn or Thr
  Variant (16)..(16): Xaa in position 16 is any amino acid
  Variant (17)..(17): Xaa in position 17 is Ile, Leu or Val
  Variant (18)..(18): Xaa in position 18 is any amino acid
  Variant (19)..(19): Xaa in position 19 is Gly, Ser or Thr
  Variant (20)..(20): Xaa in position 20 is any amino acid
  Variant (21)..(21): Xaa in position 21 is Leu or Val
  Variant (22)..(22): Xaa in position 22 is Ala, Leu or Val
  Variant (24)..(24): Xaa in position 24 is Ala, Ile, Leu or Val
  Variant (26)..(26): Xaa in position 26 is Phe or Leu
  Variant (28)..(28): Xaa in position 28 is Trp or Tyr
  Variant (31)..(31): Xaa in position 31 is any or no amino acid
QQXXXYXXXXXXXPIXXXXXXXFXRXYXFEXR

SEQ ID NO: 65221 - protein, 27 aa, Artificial sequence
  protein pattern
  Variant (2)..(3): Xaa in position 2 to 3 is any amino acid
  Variant (4)..(4): Xaa in position 4 is Asp, Asn or Thr
  Variant (5)..(6): Xaa in position 5 to 6 is any amino acid
  Variant (7)..(7): Xaa in position 7 is Phe or Tyr
  Variant (8)..(8): Xaa in position 8 is any amino acid
  Variant (10)..(10): Xaa in position 10 is any amino acid
  Variant (13)..(13): Xaa in position 13 is any amino acid
  Variant (14)..(14): Xaa in position 14 is Ala, Cys, Ser or Thr
  Variant (15)..(15): Xaa in position 15 is Ala, Gly or Thr
  Variant (16)..(16): Xaa in position 16 is Cys or Gly
  Variant (18)..(18): Xaa in position 18 is Ala, Ser, Thr or Val
  Variant (21)..(21): Xaa in position 21 is Ala, Gly or Ser
  Variant (24)..(24): Xaa in position 24 is Ala or Asn
  Variant (26)..(26): Xaa in position 26 is any amino acid
  Variant (27)..(27): Xaa in position 27 is Asp, Asn or Ser
PXXXXXXXDXLFXXXXAXTQXGLXTXX

SEQ ID NO: 65222 - protein, 19 aa, Artificial sequence
  protein pattern
  Variant (2)..(3): Xaa in position 2 to 3 is any amino acid
  Variant (7)..(7): Xaa in position 7 is any amino acid
  Variant (8)..(8): Xaa in position 8 is Ile or Val
  Variant (10)..(10): Xaa in position 10 is Ala or Gly
  Variant (16)..(16): Xaa in position 16 is Leu or Met
  Variant (18)..(18): Xaa in position 18 is Leu or Met
FXXLFEXXSXYGTVGXSXG

SEQ ID NO: 65223 - protein, 30 aa, Artificial sequence
  protein pattern
  Variant (2)..(2): Xaa in position 2 is Ala, Ile or Val
  Variant (3)..(3): Xaa in position 3 is Ala, Gly, Ile, Leu or Val
  Variant (4)..(4): Xaa in position 4 is Leu or Met
  Variant (6)..(7): Xaa in position 6 to 7 is any amino acid
  Variant (9)..(10): Xaa in position 9 to 10 is any or no amino acid
  Variant (12)..(13): Xaa in position 12 to 13 is any or no amino acid
  Variant (15)..(15): Xaa in position 15 is any amino acid
  Variant (16)..(16): Xaa in position 16 is Ile or Val
  Variant (19)..(19): Xaa in position 19 is Phe or Leu
  Variant (20)..(20): Xaa in position 20 is any amino acid
  Variant (21)..(21): Xaa in position 21 is Ala, Asp, Asn, Ser or Thr
  Variant (22)..(23): Xaa in position 22 to 23 is any amino acid
  Variant (24)..(24): Xaa in position 24 is Phe, Leu or Val
  Variant (25)..(29): Xaa in position 25 to 29 is any amino acid
LXXXNXXDXXLXXFXXLDXXXXXXXXXXXG

SEQ ID NO: 65224 - DNA, 1188 bp, Saccharomyces cerevisiae
  CDS (1)..(1188)
atgtctgaaggtattactgatattgaagaatcccaaattcaaaccaactatgacaaggtcgtctacaagttcgatgatatggaattggacgaaaacttgttaagaggtgttttcggttacggtttcgaagaaccatctgccattcaacaacgtgccatcatgcctattattgaaggtcacgatgtcttggctcaagctcaatctggtactggtaagaccggtactttctccattgctgctttgcaaagaattgacacctctgtcaaggctcctcaagctttgatgttggctccaactagagaattggctttgcaaatccaaaaggttgtcatggctttggctttccacatggacatcaaggtccacgcttgtatcggtggtacttcctttgttgaagacgctgaaggtttgagagatgctcaaatcgtcgttggtactccaggtcgtgtttttgacaacatccaaagacgtagattcagaactgacaagatcaagatgttcatcttagatgaagctgatgaaatgttgtcttctggtttcaaggaacaaatctaccaaattttcaccttacttccaccaaccactcaagttgttctattgtccgccaccatgccaaatgacgtcttggaagttaccaccaaatttatgagaaacccagttagaattttggttaagaaggatgaattgactttggaaggtatcaaacaattctacgttaatgttgaagaagaagaatacaaatacgagtgtttgaccgatttatacgactctatctccgttactcaagctgtcatcttctgtaacaccagaagaaaggtcgaagaattgaccactaagttaagaaacgacaaatttaccgtttctgccatctattctgatttaccacaacaagaaagagacaccatcatgaaggaattcagaagtggttcttccagaattttgatctccactgatttgttggctagaggtatcgatgtccaacaagtttctttggttattaactacgacttaccagctaacaaagaaaactatattcacagaatcggtagaggtggtcgtttcggtagaaagggtgttgccatcaactttgttactaacgaagacgttggcgctatgagagaactagaaaagttctactccactcaaattgaagaattgccatccgacattgctaccttgttgaactaa

SEQ ID NO: 65225 - protein, 395 aa, Saccharomyces cerevisiae
MSEGITDIEESQIQTNYDKVVYKFDDMELDENLLRGVFGYGFEEPSAIQQRAIMPIIEGHDVLAQAQSGTGKTGTFSIAALQRIDTSVKAPQALMLAPTRELALQIQKVVMALAFHMDIKVHACIGGTSFVEDAEGLRDAQIVVGTPGRVFDNIQRRRFRTDKIKMFILDEADEMLSSGFKEQIYQIFTLLPPTTQVVLLSATMPNDVLEVTTKFMRNPVRILVKKDELTLEGIKQFYVNVEEEEYKYECLTDLYDSISVTQAVIFCNTRRKVEELTTKLRNDKFTVSAIYSDLPQQERDTIMKEFRSGSSRILISTDLLARGIDVQQVSLVINYDLPANKENYIHRIGRGGRFGRKGVAINFVTNEDVGAMRELEKFYSTQIEELPSDIATLLN

SEQ ID NO: 65226 - DNA, 2117 bp, Zea mays
  CDS (222)..(1466)
cattgggaccctcgaggccggccggggggattcgtccacacccaggcacataaaagccgcctctcgccgccgactgcaaaccctcgtttttctctctcctgcgctgcgccgtccttcacctccgccgccgaatccgagactctgatctcgggttcaccgcagcgcacagagcacccccgactcccgtcccgatccgcgctctcctctacgacgcttcagtcatggcaggaatggcacccgagggttctcagtttgatgctaagcactatgattctaaaatgcaggagctgctgagcactggtgagactgaggagttcttcacttcatatgatgaagtttttgaaagttttgatgacatgggccttcaagagaatcttttgagaggcatttatgcatatggttttgagaaaccatctgcaattcagcagagaggaattgttcccttctgcaaggggcttgatgtcattcagcaagcacaatctggtacaggaaagacagcaaccttctgttctgggatcttgcagcagcttgactatggtctggttgaatgccaggccctggttcttgctcccacccgtgagcttgcacagcaaattgagaaagttatgcgcgcacttggtgactaccttggtgttaaagtccatgcatgcgttggaggaacatctgttcgtgaggaccaaaggattctcgccagtggtgtgcatgttgttgttggtacacctggtcgtgtgtttgacatgctgcgtagacagtccctccgccctgataacatcaagatgtttgttcttgatgaagctgatgaaatgctttctcgtggtttcaaggatcagatttatgacatcttccagcttctgccatccaagattcaggttggagtcttctctgctaccatgccacctgaagcccttgagattacccgcaagttcatgaacaaaccagtgagaattcttgtgaagagagacgagctgacccttgagggtatcaagcagttctatgtgaatgtggacaaggaagactggaagctggacacactgtgtgacctgtatgagaccctggccattacccagagtgtcatctttgtcaacacccgccgcaaggtggactggctcactgacaagatgaggagcagggaccacaccgtttctgccactcatggtgacatggaccagaacactagagacatcatcatgagggagttccggtctggctcctcccgtgtgctcatcaccactgacctgcttgctcgtggtattgatgttcagcaggtgtccctggtcatcaactatgatcttcccacccagccagagaactacctgcatcgtattggtcgtagtggtcgttttggtaggaagggtgttgccatcaactttgtgacccgcgacgacgaacgtatgctgtttgacattcagaagttctacaacgtgttgattgaggagctgcctgccaatgttgctgaccttctgtgatcaatttgaagaaaaaacaaaacaaaaaagggtggtgagggaacctggtaaggcttggttttgtcgaaataccgtgggagagggggtgataaggacggtggggtttctatgttgaagtcgtggtcatggacaatttgtgattttttctcctttatgccatgttttggaatttttgtagctgcctaggccttgtggtaatgtgctgctgtgggggttcattagtatgaagaggaagacgctgctggcgctgagtctttttctctttattagtattttgtttaaaactatgtatgaccgaatggtggtatttatttgtgtcatccttgactcttattctgctgcaaccagatgtatcgtgccatgtctgcaccactggtctttgctatcctgagtaaaacctgtttactctgtcgagcttgtcgctgatgcaccgatcctagctgttttgagtaaaacctgtttactctgttgagcttgtcacctggtgatgcaaggtgcttattgactggtaatgtattttgaagtcgttatactatctgaaaccccttcctgagcaaaaaaaaaaaaaaaaaaaaaaaaaaaaaaaaaaaaaaaaaaaaaaaaaaaaaaaaaaaaaagtttaattggggaggcggcggggtcttacctttt

SEQ ID NO: 65227 - protein, 414 aa, Zea mays
MAGMAPEGSQFDAKHYDSKMQELLSTGETEEFFTSYDEVFESFDDMGLQENLLRGIYAYGFEKPSAIQQRGIVPFCKGLDVIQQAQSGTGKTATFCSGILQQLDYGLVECQALVLAPTRELAQQIEKVMRALGDYLGVKVHACVGGTSVREDQRILASGVHVVVGTPGRVFDMLRRQSLRPDNIKMFVLDEADEMLSRGFKDQIYDIFQLLPSKIQVGVFSATMPPEALEITRKFMNKPVRILVKRDELTLEGIKQFYVNVDKEDWKLDTLCDLYETLAITQSVIFVNTRRKVDWLTDKMRSRDHTVSATHGDMDQNTRDIIMREFRSGSSRVLITTDLLARGIDVQQVSLVINYDLPTQPENYLHRIGRSGRFGRKGVAINFVTRDDERMLFDIQKFYNVLIEELPANVADLL

SEQ ID NO: 65228 - DNA, 1627 bp, Linum usitatissimum
  CDS (56)..(1297)
ccaaaccctagctctttcaacttcctctgcacaaccgccgtcaaccagcttaatcatggcaggactagcacccgagggatcccagtttgatgctaagcagtacgatgccaagatgagtgaactgatttcagctgatggtcaggactacttcgcttcctatgacgaggttcatgaaaccttcgactctatgggtttgcaggagaatcttctcagaggaatttatgcatatggttttgagaagccgtctgcaatccagcagagggggattgttcccttttgcaagggactagatgttattcaacaggctcaatctggaactggaaagactgctactttctgttctggtatcctgcaacaacttaattatggtctagttgaatgccaagcactggtcttggcacccactagggagctggctcagcagattgaaaaggttatgcgagcccttggtgattatcttggagtcaaggtgcatgcatgtgttggtggaactagtgttcgtgaagaccaacgtatcctctcaagtggagtccatgttgttgttggtactcctggtcgtgtgttcgatatgctccgcagacagtcccttcgagctgattcgatcaagatgtttgtgttggatgaagctgatgagatgctctctcgtggatttaaggatcaaatctacgacatcttccagcttttgccaccaaacatccaagttggcgttttctctgcaacaatgccacctgaggctcttgatattacaaggaaattcatgaacaaaccagttaggattctggtgaagcgtgaggagctaaccttggagggtatcaaacagttccatgtgaatgtggacaaagaagaatggaagttggagacactgtgtgatctttatgagaccttagccattactcagagtgttatctttgtgaacaccaggcgcaaggtggactggctgactgacaagatgaggagcagagaccacacagtgtcagctactcatggtgacatggaccagaacactagggacatcatcatgagggagttcaggtctggctcatcccgtgtcctgatcactaccgacctattggcccgtggtattgatgtccagcaggtttcgcttgtgatcaactatgatctgccaacccaaccggagaactacctgcataggattggacgtggtggacgttttgggaggaaaggtgtggctatcaactttgtgaccaccgatgatgagaggatgcttttcgacatccagaagttctacaatgtggtgattgaggagctcccagccaatgttgctgatcttctgtgaggataaaaattgtttgcctgatggaatttgaaagagtgaagatgttttgtttaagaggagactcgatcaatcactcttgccctcccgttgtgatggtcgttaagtcttgtactcttttctttttcctttttatatttttatttttcatggactaagtagtattttgatattttcactatcagtatctggagatttagtatcgtatgttgtgacattgttccaattttgaatttagctgttggtagcatctttttcccccttgataactggtattgtggaatatttatgaatacagatttctgtatcgttcaactcaaaaaaaaaaaaaaa

SEQ ID NO: 65229 - protein, 413 aa, Linum usitatissimum
MAGLAPEGSQFDAKQYDAKMSELISADGQDYFASYDEVHETFDSMGLQENLLRGIYAYGFEKPSAIQQRGIVPFCKGLDVIQQAQSGTGKTATFCSGILQQLNYGLVECQALVLAPTRELAQQIEKVMRALGDYLGVKVHACVGGTSVREDQRILSSGVHVVVGTPGRVFDMLRRQSLRADSIKMFVLDEADEMLSRGFKDQIYDIFQLLPPNIQVGVFSATMPPEALDITRKFMNKPVRILVKREELTLEGIKQFHVNVDKEEWKLETLCDLYETLAITQSVIFVNTRRKVDWLTDKMRSRDHTVSATHGDMDQNTRDIIMREFRSGSSRVLITTDLLARGIDVQQVSLVINYDLPTQPENYLHRIGRGGRFGRKGVAINFVTTDDERMLFDIQKFYNVVIEELPANVADLL

SEQ ID NO: 65230 - DNA, 1932 bp, Klebsiella pneumoniae subsp. pneumoniae MGH 78578
  CDS (1)..(1932): transl_table=11
atggctgaattcgaaaccacttttgcagatctgggccttaaggctcctatccttgaagcgctcaccgatctgggttacgaaaaaccatctccgatccaggctgagtgcattccgcatctgctggacggccgcgacgttctgggtatggcccagaccggtagcggtaaaaccgcagcattctctttaccgctgctgaacaacatcgatcctgagctgagagcaccgcagattctggtgctggcgccgacccgcgagctggcggtacaggttgctgaagcaatgacggaattctctaaacatatgcgcggcgtgaacgtggttgccctgtacggcggccagcgttatgacgtgcagctgcgcgccctgcgtcagggtccgcagatcgtcgtcggtaccccgggtcgtctgctggaccacctgaagcgcggcaccctggacctctccaaactgagcggcctggtactggatgaagcagatgaaatgctgcgcatgggctttatcgaagatgtagaaaccattatggcgcagatcccggaagggcatcagaccgcgctgttctccgccaccatgccggaagctatccgtcgcattacccgtcgctttatgaaagagccgcaggaagtgcgcattcagtccagcgtgacgactcgcccggatatcagccagagctactggactgcctacggcatgcgtaaaaacgaagcgctggtgcgtttcctggaagcggaagactttgatgcggcgattatcttcgtccgtaccaaaaacgcgaccctggaagtagctgaagcgctggagcgtaatggctacaacagcgcggcgctgaacggcgacatgaaccaggcgctgcgtgagcagactctggaacgcctgaaagatggtcgtctggatatcctgattgcgactgacgttgcggcccgtggcctggacgttgagcgtatcagcctggtggtgaactacgacatcccaatggattctgaatcctacgttcaccgtatcggccgtactggtcgtgccggtcgtgctggccgcgcgctgctgttcgttgagaaccgcgagcgtcgtctgctgcgcaacatcgaacgcactatgaagctgaccattcctgaagtggaactgcctaacgcggagctgctgagcaagcgtcgtctggaaaaattcgccgcgaaagttcagcagcagctggaaagcagcgatctggatcagtaccgtgcactgctggcgaaaatccagccgacggcggaaggtgaagagctggacgtggaaacgctggctgctgcgctgctgaagatggctcagggcgaacgttcgctgatcgttccgccggacgcgccgatgcgtccacgtcgtgaattccgcgatcgtgacgatcgtttcgaccgtcgtggcgaccgtaatgatcgcggcccgcgcggcgatcgcgaagatcgtccgaagcgtgagcgtcgtgacgtgggtgacatggagctgtatcgcattgaagtgggtcgcgatgacggcgttgaagtgcgtcatatcgttggcgcgatcgccaatgaaggcgatatcagcagccgttacatcggtaacatcaagctgttcgcttctcactccaccattgagctgccgaaagggatgccgggcgaagtgctgcagcactttactcgtacccgtatcctgaacaagccgatgaacatgcagctgctgggcgatgcgcagccgcgcaccgaacgtcgtggcggcggtgagcgtcgcgaaggcggccgtggctttggcggcgagcgtcgtgaaggcggccgtggcttcggtggcgaacgtcgtgaaggcggtcgtggtgaaggacgtcgtttcagcggcgaacgtcgtgaaggccgtgcgccgcgtcgtgacgatgcatccgcgccgcgccgcgatgactcagccggtcgccgtcgcttcggtggcgatgcgtaa

SEQ ID NO: 65231 - protein, 643 aa, Klebsiella pneumoniae subsp. pneumoniae MGH 78578
MAEFETTFADLGLKAPILEALTDLGYEKPSPIQAECIPHLLDGRDVLGMAQTGSGKTAAFSLPLLNNIDPELRAPQILVLAPTRELAVQVAEAMTEFSKHMRGVNVVALYGGQRYDVQLRALRQGPQIVVGTPGRLLDHLKRGTLDLSKLSGLVLDEADEMLRMGFIEDVETIMAQIPEGHQTALFSATMPEAIRRITRRFMKEPQEVRIQSSVTTRPDISQSYWTAYGMRKNEALVRFLEAEDFDAAIIFVRTKNATLEVAEALERNGYNSAALNGDMNQALREQTLERLKDGRLDILIATDVAARGLDVERISLVVNYDIPMDSESYVHRIGRTGRAGRAGRALLFVENRERRLLRNIERTMKLTIPEVELPNAELLSKRRLEKFAAKVQQQLESSDLDQYRALLAKIQPTAEGEELDVETLAAALLKMAQGERSLIVPPDAPMRPRREFRDRDDRFDRRGDRNDRGPRGDREDRPKRERRDVGDMELYRIEVGRDDGVEVRHIVGAIANEGDISSRYIGNIKLFASHSTIELPKGMPGEVLQHFTRTRILNKPMNMQLLGDAQPRTERRGGGERREGGRGFGGERREGGRGFGGERREGGRGEGRRFSGERREGRAPRRDDASAPRRDDSAGRRRFGGDA

SEQ ID NO: 65232 - DNA, 1248 bp, Arabidopsis thaliana
  CDS (1)..(1248)
atggcaggatctgcaccagaaggcacacagtttgatgcacgtcagtttgaccagaaactcaatgaagtacttgagggacaagatgagttcttcacatcctatgatgatgttcatgagagctttgatgccatgggtcttcaagagaaccttctcaggggtatttatgcttatggttttgagaagccttctgctattcagcaaagaggaatcgtccccttctgtaagggtcttgatgtgattcaacaggctcagtctggtactgggaaaacagcaactttctgctctggtgtcttgcagcagctggacttctcccttatccagtgtcaggctttggttctagctccaactagagagcttgctcagcaaattgagaaggtcatgagggcccttggtgattaccttggtgtcaaggttcacgcctgtgttggtggaaccagtgtccgtgaggatcagcgcatcctccaagctggtgtccatgttgttgttggaactccagggcgtgtctttgacatgttgaagaggcagtctcttcgtgctgacaacatcaagatgtttgttctcgatgaagctgatgaaatgctctcccgtggtttcaaggaccagatctatgacatattccagcttcttccaccaaagatccaagttggtgtgttctccgcaacaatgccaccagaagctcttgagatcacaaggaagttcatgagcaagccagtgagaatcttggtgaagcgtgatgagcttacccttgaaggtatcaagcagttctacgtcaacgttgagaaagaagagtggaagctcgagacactctgtgatctctacgagactcttgccatcactcagagtgtcatcttcgtgaacaccaggcgtaaggttgattggctcacagacaaaatgagaagccgtgaccacacagtctctgcaactcacggagacatggaccagaacaccagggacatcatcatgagagagttcaggtctggttcctcccgtgttctcatcaccactgacctcttagctcgtggtattgatgtccaacaagtctccctggttatcaacttcgatctcccaactcagccagagaactaccttcaccgtatcggaagaagtggaaggttcgggagaaagggtgttgcgatcaatttcgtgacccgtgatgatgagaggatgctctgccttcgaacgtggccgatctgctgtgaagggagaaaagaagtcggttctgttgctgtgtttgctctgccgtactag

SEQ ID NO: 65233 - protein, 415 aa, Arabidopsis thaliana
MAGSAPEGTQFDARQFDQKLNEVLEGQDEFFTSYDDVHESFDAMGLQENLLRGIYAYGFEKPSAIQQRGIVPFCKGLDVIQQAQSGTGKTATFCSGVLQQLDFSLIQCQALVLAPTRELAQQIEKVMRALGDYLGVKVHACVGGTSVREDQRILQAGVHVVVGTPGRVFDMLKRQSLRADNIKMFVLDEADEMLSRGFKDQIYDIFQLLPPKIQVGVFSATMPPEALEITRKFMSKPVRILVKRDELTLEGIKQFYVNVEKEEWKLETLCDLYETLAITQSVIFVNTRRKVDWLTDKMRSRDHTVSATHGDMDQNTRDIIMREFRSGSSRVLITTDLLARGIDVQQVSLVINFDLPTQPENYLHRIGRSGRFGRKGVAINFVTRDDERMLCLRTWPICCEGRKEVGSVAVFALPY

SEQ ID NO: 65234 - DNA, 1263 bp, Bombyx mori
  CDS (1)..(1263)
atgtcttattcgtctgaaagaaggtcagaagatgggccagaggattccaaaaatgggccatcgaaggatcaaggtagttacgatggacctccgggaatggaccctgggacacttgacaccgactgggatcaagttgtcgaaaccttcgatgacatgaacctcaaagaagaattgttgagaggcatatacgcctatggttttgaaaaaccttctgcaatccagcaacgcgcaataatgccttgcatccaaggacgcgatgttatcgctcaagcccagtcaggaactggaaaaactgctactttctctatatcgattctacaacaaatcgatacaagcattcgtgaatgtcaagctttgatcctggctcccacaagagagctggcccaacaaattcagaaggtggtgatagctcttggtgatcacttgaatgctaaatgccatgcttgcattggtggcaccaatgtccgtgaagatattcgccaactggagagtggtgttcatgtggtggtgggcactccaggtcgtgtatatgatatgataactcgtcgtgcgcttcatgccaacaccatcaaactttttgttcttgatgaagctgatgaaatgttgtccagaggtttcaaggaccagatccatgatgtcttcaagatgttgtcagctgatgttcaagtcatattactctctgctaccatgcctgatgatgtattggaagtatctcgatgctttatgagagatcctgtacgcatacttgtacagaaggaagagcttaccctggaaggtattaaacaattttacattgcaattgaattagaagaatggaagctggaaactctgtgtgacctgtatgatacactgtctattgcacaagctgtaattttctgcaacacccgtcgcaaggtggattggctcactgaatctatgcatctgcgtgactttactgtatctgctatgcatggagacatggatcaacgtgagcgtgaagtgatcatgaggcagtttcgtactggctcttctcgtgtcttgatcaccactgatttattggcacgtggtattgatgtacagcaagtttcctgcgtcatcaactatgatctgccatccaaccgtgaaaattatattcacaggattggacgaggtggacgttttggtcgtaagggaattgctatcaactttgtgactgaagctgacaggagagcactgaaggatattgaggacttctaccacactagtatcgttgaaatgcccagtgatgtggccaacctcatctaa

SEQ ID NO: 65235 - protein, 420 aa, Bombyx mori
MSYSSERRSEDGPEDSKNGPSKDQGSYDGPPGMDPGTLDTDWDQVVETFDDMNLKEELLRGIYAYGFEKPSAIQQRAIMPCIQGRDVIAQAQSGTGKTATFSISILQQIDTSIRECQALILAPTRELAQQIQKVVIALGDHLNAKCHACIGGTNVREDIRQLESGVHVVVGTPGRVYDMITRRALHANTIKLFVLDEADEMLSRGFKDQIHDVFKMLSADVQVILLSATMPDDVLEVSRCFMRDPVRILVQKEELTLEGIKQFYIAIELEEWKLETLCDLYDTLSIAQAVIFCNTRRKVDWLTESMHLRDFTVSAMHGDMDQREREVIMRQFRTGSSRVLITTDLLARGIDVQQVSCVINYDLPSNRENYIHRIGRGGRFGRKGIAINFVTEADRRALKDIEDFYHTSIVEMPSDVANLI

SEQ ID NO: 65236 - DNA, 2487 bp, Arabidopsis thaliana
  CDS (1)..(2487)
atggatgttgatgaagagactaaacctgaaaatgatggagatgctaagatggtagacttggagaatgagacagctgctactgtctctgagagtggaggtgatggagctgtagatgaagaggaaattgatcctttagatgcttttatgaatactatggtattacctgaggttgagaagttttgcaatggtgctcctcccccagcagtgaacgatggtactttggattctaaaatgaatgggaaggaaagtggtgaccggccaaagaaaggttttaataaggcccttggtaggataattcaaggtgaagattctgattctgattattcagaaccaaagaatgatgatgatccaagtttagacgaagacgatgaggagttcatgaagagagtaaagaagacaaaagctgagaagttgtcccttgttgaccactcaaaaatagagtatgaacctttccggaagaacttctatatcgaagtgaaggatatctctaggatgacacaagaagaagttaacacttacagaaaggaattggagctgaaagttcatggaaaggatgttccaagacccataaagttttggcaccagactgggctaaccagcaaaattttggatactatgaagaagcttaattatgaaaagccaatgcctattcaaacacaagcactccctatcatcatgagcggtcgagactgcattggggttgcaaaaaccggttcaggtaaaacccttggttttgttttgccaatgctgaggcatattaaagatcagcctcccgttgaagctggtgatgggccaattggtcttgtaatggcacctactagggagcttgttcagcagattcacagcgatatcagaaagttttctaagccattgggtataagatgcgtccctgtgtatggaggatcaggagttgcccagcaaattagtgaacttaagcgaggtactgagattgttgtgtgcactcctgggagaatgattgatatcctttgcacaagcagtgggaaaatcactaatctgcgaagagtcacatttttggtaatggatgaagctgatcgtatgtttgacatgggttttgagcctcaaattactcgtattattcagaacattcgaccggaacgccaaactgtgcttttttctgccacttttccacgccaagttgaaactttggcacgtaaagtcttgaacaagcctgtagaaatacaggtcggtggaaggagtgttgtgaataaggatataactcagttagttgaagtcagaccggagagtgataggttccttagacttctggaacttcttggggaatggtctgagaaagggaaaattctggtctttgttcagtcgcaggaaaaatgtgatgccttgtatagggatatgattaaatctagttacccttgtctgtctcttcacgggggtaaggatcagaccgatcgtgaatcaactatatctgattttaagaacgatgtctgcaatttgttgattgccacaagtgttgctgctaggggtctagatgtgaaagagcttgagttggttgtaaactttgatgcgccgaaccactatgaagattatgtgcatcgcgttggcaggacaggcagggcagggcgtaagggctgtgctgtgacatttatctccgaggatgatgcaaaatatgcaccagatttagtcaaggccctggagctttctgagcagccagttcctgatgatctgaaagcacttgctgatggtttcatggtgaaagtgaaacagggtattgagcaagctcatggaactggctatggtggtagtggctttaaattcaacgaagaggaggaagaagttagaaaagcagcaaagaaagcacaagcaaaggagtatggctttgaggaagacaagtctgactcagaagatgagaatgatgtagtaagaaaggcaggtggtggtgagatctcacagcagcaggctacttttgctcagatagccgccattgctgctgctgccaaagctgctgctgctgctccagtgagtgctcctgtgacagctaaccaattactggcaaatggtggcgggcttgctgccatgccaggtgtccttccggttactgttcctacccttcctagtgaaggggcaggccgtgctgcagccatggttgctgccatgaatctgcaacataatctggcaaagattcaagctgatgcaatgcctgagcactatgaagcagaacttgaaatcaatgacttcccacaaaatgctcgttggaaggtcacccataaagaaactttgggtccaatatcagagtggactggagctgctattaccaccaggggtcagttttatcctacaggacgtataccgggacctggggaacggaagctgtacttattcattgaagggcctagcgaaaaatcagttaagcacgcaaaagctgaactcaagcgtgttcttgaagacattacgaatcaggccatgtcctcacttcctggaggagcatccgggagatactcagtcctttaa

SEQ ID NO: 65237 - protein, 828 aa, Arabidopsis thaliana
MDVDEETKPENDGDAKMVDLENETAATVSESGGDGAVDEEEIDPLDAFMNTMVLPEVEKFCNGAPPPAVNDGTLDSKMNGKESGDRPKKGFNKALGRIIQGEDSDSDYSEPKNDDDPSLDEDDEEFMKRVKKTKAEKLSLVDHSKIEYEPFRKNFYIEVKDISRMTQEEVNTYRKELELKVHGKDVPRPIKFWHQTGLTSKILDTMKKLNYEKPMPIQTQALPIIMSGRDCIGVAKTGSGKTLGFVLPMLRHIKDQPPVEAGDGPIGLVMAPTRELVQQIHSDIRKFSKPLGIRCVPVYGGSGVAQQISELKRGTEIVVCTPGRMIDILCTSSGKITNLRRVTFLVMDEADRMFDMGFEPQITRIIQNIRPERQTVLFSATFPRQVETLARKVLNKPVEIQVGGRSVVNKDITQLVEVRPESDRFLRLLELLGEWSEKGKILVFVQSQEKCDALYRDMIKSSYPCLSLHGGKDQTDRESTISDFKNDVCNLLIATSVAARGLDVKELELVVNFDAPNHYEDYVHRVGRTGRAGRKGCAVTFISEDDAKYAPDLVKALELSEQPVPDDLKALADGFMVKVKQGIEQAHGTGYGGSGFKFNEEEEEVRKAAKKAQAKEYGFEEDKSDSEDENDVVRKAGGGEISQQQATFAQIAAIAAAAKAAAAAPVSAPVTANQLLANGGGLAAMPGVLPVTVPTLPSEGAGRAAAMVAAMNLQHNLAKIQADAMPEHYEAELEINDFPQNARWKVTHKETLGPISEWTGAAITTRGQFYPTGRIPGPGERKLYLFIEGPSEKSVKHAKAELKRVLEDITNQAMSSLPGGASGRYSVL

SEQ ID NO: 65238 - DNA, 1209 bp, Arabidopsis thaliana
  CDS (1)..(1209)
atgcacgtcagtttgaccagaaactcaatgaagtgtgaacttgagggacaagatgagttcttcacatcctatgatgatgttcatgagagctttgatgccatgggtcttcaagagaaccttctcaggggtatttatgcttatggttttgagaagccttctgctattcagcaaagaggaatcgtccccttctgtaagggtcttgatgtgattcaacaggctcagtctggtactgggaaaacagcaactttctgctctggtgtcttgcagcagctggacttctcccttatccagtgtcaggctttggttctagctccaactagagagcttgctcagcaaattgagaaggtcatgagggcccttggtgattaccttggtgtcaaggttcacgcctgtgttggtggaaccagtgtccgtgaggatcagcgcatcctccaagctggtgtccatgttgttgttggaactccagggcgtgtctttgacatgttgaagaggcagtctcttcgtgctgacaacatcaagatgtttgttctcgatgaagctgatgaaatgctctcccgtggtttcaaggaccagatctatgacatattccagcttcttccaccaaagatccaagttggtgtgttctccgcaacaatgccaccagaagctcttgagatcacaaggaagttcatgagcaagccagtgagaatcttggtgaagcgtgatgagcttacccttgaaggtatcaagcagttctacgtcaacgttgagaaagaagagtggaagctcgagacactctgtgatctctacgagactcttgccatcactcagagtgtcatcttcgtgaacaccaggcgtaaggttgattggctcacagacaaaatgagaagccgtgaccacacagtctctgcaactcacggagacatggaccagaacaccagggacatcatcatgagagagttcaggtctggttcctcccgtgttctcatcaccactgacctcttagctcgtggtattgatgtccaacaagtctccctggttatcaacttcgatctcccaactcagccagagaactaccttcaccgtatcggaagaagtggaaggttcgggagaaagggtgttgcgatcaatttcgtgacccgtgatgatgagaggatgctgtttgatattcagaaattctacaatgtggttgtcgaagagctgccttcgaacgtggccgatctgctgtga

SEQ ID NO: 65239 - protein, 402 aa, Arabidopsis thaliana
MHVSLTRNSMKCELEGQDEFFTSYDDVHESFDAMGLQENLLRGIYAYGFEKPSAIQQRGIVPFCKGLDVIQQAQSGTGKTATFCSGVLQQLDFSLIQCQALVLAPTRELAQQIEKVMRALGDYLGVKVHACVGGTSVREDQRILQAGVHVVVGTPGRVFDMLKRQSLRADNIKMFVLDEADEMLSRGFKDQIYDIFQLLPPKIQVGVFSATMPPEALEITRKFMSKPVRILVKRDELTLEGIKQFYVNVEKEEWKLETLCDLYETLAITQSVIFVNTRRKVDWLTDKMRSRDHTVSATHGDMDQNTRDIIMREFRSGSSRVLITTDLLARGIDVQQVSLVINFDLPTQPENYLHRIGRSGRFGRKGVAINFVTRDDERMLFDIQKFYNVVVEELPSNVADLL

SEQ ID NO: 65240 - DNA, 1281 bp, Strongylocentrotus purpuratus
  CDS (1)..(1281)
atgtcttacatagatgacgaacaagcgaattcccaggttacaaaacccggacctggacctggagcagggcctgatgaaaatgggagacaagccgaggaccagggtattgtcaccgtggaggatggaatcattgataccaactgggatcaagtggtagaaaactttgatgacatggggctgagagaatcgctcctcaggggtatctatgcctatggttttgagaaaccatctgcaatccaacagagggcgatattgccctgctgtgaaggaaaggatgttattgcccaagcccagtccggaactggtaagacggcaacctttgctatctccatcctccaacagctcaatgttgaggagaagcagtgccaagccctcgtcttggccccaaccagggagttggcccaacagattcacaaggtaattgtagccctcggcgactacctagaagtgaagtgccacccctgcatcggaggcaccaatgtccgtgatgacatgaacctcctgtccgagggtgtgcaggtcatcgtaggcaccccaggcagggtgtttgacatgctcaaaaggaaggtcctctcgcccttcaagatctgcatgtttgtcctggatgaagccgatgagatgttgtccagggggttcaaggaccagatctacgatgtcttcagctggctcccatcagaagtacaggttgtactgctgtctgccaccatgccggttgacgtgctggaggtcaccaagaagttcatgagagatcctatcaggatcctggtgaagaaggaagaactgagtttggacggtatcaagcagttctacatcgccgtcgagaaggaggagtggaagctcgacaccctgtgtgacttgtacgagacattgaccatcacacaagccgtcatcttctgcaacaccaggaggaaagtcgattggctttgccagaagatgcacgaaagagacttcactgtttctatcatgcacagagacatggaccagaaggagagagacaagatcatgaaggagttccgcactggctctagccgagtgctcatttgcactgacctgctggctcgaggaatcgacgtccagcaagtctcactggtcatcaactatgacctccctaccaacagggaaaactacatccacaggattggccgtggaggccgtttcggtcgcaaaggagtggccatcaactttgttccagatgaagataagcgcaacctacgggatattcaacagttctacaatactcaagtagacgagatgcccagtaatgttgccgatctggtgtag

SEQ ID NO: 65241 - protein, 426 aa, Strongylocentrotus purpuratus
MSYIDDEQANSQVTKPGPGPGAGPDENGRQAEDQGIVTVEDGIIDTNWDQVVENFDDMGLRESLLRGIYAYGFEKPSAIQQRAILPCCEGKDVIAQAQSGTGKTATFAISILQQLNVEEKQCQALVLAPTRELAQQIHKVIVALGDYLEVKCHPCIGGTNVRDDMNLLSEGVQVIVGTPGRVFDMLKRKVLSPFKICMFVLDEADEMLSRGFKDQIYDVFSWLPSEVQVVLLSATMPVDVLEVTKKFMRDPIRILVKKEELSLDGIKQFYIAVEKEEWKLDTLCDLYETLTITQAVIFCNTRRKVDWLCQKMHERDFTVSIMHRDMDQKERDKIMKEFRTGSSRVLICTDLLARGIDVQQVSLVINYDLPTNRENYIHRIGRGGRFGRKGVAINFVPDEDKRNLRDIQQFYNTQVDEMPSNVADLV

SEQ ID NO: 65242 - DNA, 1584 bp, Mesorhizobium loti MAFF303099
  CDS (1)..(1584): transl_table=11
ttgtcctcagacaccacgatcgctccagaagcgttgaccttttcagacctcggcctgtcgccgaaggtcctttccgcagtcaccgatgccggctataccgtgccgacgccgatccaggcgggcgccatcccacacgccttgctcggcaaggatattttgggcatagcccagaccggcaccggcaagacagcctccttcgtgctgccgatgctgacccgactggaaaagggccgcgcccgcgcccgtatgccgcgcaccctgattctcgaaccgacgcgtgagcttgccgcgcaggtcgaggaaaacttcgtcaaatacggcaagaaccacaagctcaacatcgcgctgttaattggcggtgtttccttcgacgagcaggacaagaagctggagcgcggcgccgacgtgctgatcgccacgcctggccgtctgctcgaccatcgcgagcgcggcaagcttttgctcaacggcgttgagatcctcgtcatcgacgaggccgaccggatgctcgacatgggcttcattcccgatatcgagcgcatctgcgagatgatcccgttcacccggcagacgctgttcttctcggcgaccatgccgccggaaatcaccaagctgacggagaagtttctgcacgcgccggtgcgtgtcgaagtttcgaaggccgcgtcggctgccaccaacatcacccaacggctggtcaaatccggctcgaagccctgggacaagcgcgagacgttgcgcaacctcatcaaagctgaagacgcggagttgaagaacgccatcatcttctgcaaccgcaaggtcgaggtgtcggagctgttccgctcgctgctgaaatatgatttcgatgccggcgctctgcatggcgacatggaccagcgcgcccgcatgcagatgctggccaatttccgtgacggcaagcttcgctacctcgtggcttctgacgttgccgcgcgcggcctcgacatccccgatgtcagccacgtcttcaactatgacgtgccgatccatgccgaggactatgtccaccgcatcggccgcaccggccgcgccgggcgctccggcaagtccttcactatcgcgaccaagtccgacaccaaatatatcgacgccatcgaacggctgatcggcaacaagatcgaatggcatgacggtgacctgtcgaccgtggtcgccagcgaaggcgaggacgatgctccgcgccggggcaaaggcgcaccgcgtcgcgccggccgcaaggacgacgatcgcaaggacaggggcgagcgcaagaagggcggcgaacgccgtgccagacacagcgaggaagatgccgcggtcgcacagcaagaacagcccgatgtggctgagacggccgtcgccgatatcagcgagcggcgcgcgcgcaaggaggcgatccgttcggaaaacaccgaacgcaaatcctccgatcgcaacgaaccgcgcgcaccggaacggggtgacacccggccgcagcgcgacaacagccgccctgcccgccatcgccaccaggaagacaacgacaccaccgttggcttcggcgacgacatgccggccttcatgcgcatcgtcgccaaggtctga

SEQ ID NO: 65243 - protein, 527 aa, Mesorhizobium loti MAFF303099
MSSDTTIAPEALTFSDLGLSPKVLSAVTDAGYTVPTPIQAGAIPHALLGKDILGIAQTGTGKTASFVLPMLTRLEKGRARARMPRTLILEPTRELAAQVEENFVKYGKNHKLNIALLIGGVSFDEQDKKLERGADVLIATPGRLLDHRERGKLLLNGVEILVIDEADRMLDMGFIPDIERICEMIPFTRQTLFFSATMPPEITKLTEKFLHAPVRVEVSKAASAATNITQRLVKSGSKPWDKRETLRNLIKAEDAELKNAIIFCNRKVEVSELFRSLLKYDFDAGALHGDMDQRARMQMLANFRDGKLRYLVASDVAARGLDIPDVSHVFNYDVPIHAEDYVHRIGRTGRAGRSGKSFTIATKSDTKYIDAIERLIGNKIEWHDGDLSTVVASEGEDDAPRRGKGAPRRAGRKDDDRKDRGERKKGGERRARHSEEDAAVAQQEQPDVAETAVADISERRARKEAIRSENTERKSSDRNEPRAPERGDTRPQRDNSRPARHRHQEDNDTTVGFGDDMPAFMRIVAKV

SEQ ID NO: 65244 - DNA, 1479 bp, Helicobacter pylori 26695
  CDS (1)..(1479): transl_table=11
atggaattgaatcaaccaccactccctacagaaattgatggtgacgcttatcataagccgagttttaatgatttgggcttaaaagaatcggttttaaaatccgtttatgaagccggcttcacttccccaagccccattcaagaaaaggccattccggctgttttgcaaggccgagatgtcatcgcacaagcccaaacaggcacaggaaaaaccgccgctttcgctctgcccattatcaacaaccttaaaaacaaccacaccatagaagccctagtgatcacgcccaccagagaattagccatgcaaattagcgatgagattttcaaattgggcaaacacaccaggactaaaaccgtgtgcgtgtatggaggccagagcgttaaaaagcaatgcgaattcattaagaaaaatccccaagtgatgatcgctacaccaggaaggctgctcgatcacttaaaaaacgaacgcatccataaatttgtgcctaaagtggtcgttttagatgaaagcgatgaaatgctggatatggggtttttagacgatattgaagagatttttgactacctccctagcgaagcgcagattttgcttttttcagccacgatgccagagccgattaaaagactagcggataagattttagaaaaccctattaaaatccatatcgctccttctaatatcactaacaccgacatcacccaacgcttttatgtgatcaatgagcatgagagggccgaagcgatcatgcgccttttagacacccaagcacccaaaaagagcattgttttcacgcgcactaaaaaagaagccgatgaattgcaccaattccttgcttctaaaaattacaaaagcaccgccttgcatggggatatggatcaaagggatcggcgctcttctatcatggcgtttaaaaaaaatgacgctgatgtgttggtggctacagatgtggcgagtcgtgggctagatattagcggtgtaagccatgtgtttaattaccacttgcccctaaacactgagagctatatccatcgcatcgggagaaccgggcgagcgggcaaaaaaggcatggcgatcactttagtaacccctttagaatacaaagagcttttacgcatgcaaaaagaaattgattcagagattgaactttttgaaatccccaccattaacgaaaatcagatcatcaaaaccttgcatgacgctaaagtgtctgaagggatcatcagcctttatgaacagcttaccgaaatttttgagccgtctcaattggttttaaaacttttgagtttgcagtttgaaaccagcaaaattggcttaaaccagcaagaaattgacgcgattcaaaaccctaaagaaaaaacgccaaaaccctctaacaaaaaaacgccccaacatgagcgagcgcgttctttcaaaaagggtcagcacagagacagacaccctaaaacaaaccattattctaaaaaacccaaacgccgttaa

SEQ ID NO: 65245 - protein, 492 aa, Helicobacter pylori 26695
MELNQPPLPTEIDGDAYHKPSFNDLGLKESVLKSVYEAGFTSPSPIQEKAIPAVLQGRDVIAQAQTGTGKTAAFALPIINNLKNNHTIEALVITPTRELAMQISDEIFKLGKHTRTKTVCVYGGQSVKKQCEFIKKNPQVMIATPGRLLDHLKNERIHKFVPKVVVLDESDEMLDMGFLDDIEEIFDYLPSEAQILLFSATMPEPIKRLADKILENPIKIHIAPSNITNTDITQRFYVINEHERAEAIMRLLDTQAPKKSIVFTRTKKEADELHQFLASKNYKSTALHGDMDQRDRRSSIMAFKKNDADVLVATDVASRGLDISGVSHVFNYHLPLNTESYIHRIGRTGRAGKKGMAITLVTPLEYKELLRMQKEIDSEIELFEIPTINENQIIKTLHDAKVSEGIISLYEQLTEIFEPSQLVLKLLSLQFETSKIGLNQQEIDAIQNPKEKTPKPSNKKTPQHERARSFKKGQHRDRHPKTNHYSKKPKRR

SEQ ID NO: 65246 - DNA, 1620 bp, Bacillus halodurans C-125
  CDS (1)..(1620): transl_table=11
atgaacgaagcaatgataaagtttaatgagttacaaattggagaagaaattaaaaaggcgattattgagatgggatttgaagagccatctcctatccaagcaaaggcgattcctgcaatccttgcaggtggtgatgtcattggccaagcccaaacaggaacaggaaaaacagctgcatttggcataccagtagtggaaaaagtgtcgacgggccgccatgtacaggctcttatcttaacacctacacgagagctagcaatccaagtgtcaggagaaattcaaaagctttccaagcacaaaaaaattcgtacccttccgatttatgggggacaatcgattgttcatcaaatcaaagctttaaaacaaggagttcaagtcgtcattgggacaccgggtcgtattatcgatcatctgcgtcggaaaacgttaattttagaccacgttaatacagtgattttagacgaagctgatgaaatgcttgatatgggctttatcgatgatatcgagtccattctgcgccaggtgaaaaatgagcgccaaaccttgcttttctctgcgacgatgccgccagcgattaaaaagctatctcgcaaatatatgaacgatccacaaaccgtatccatcaatcgacgagaagtgacagcaccttctatcgatcaattttattataaagtgttagagcggaataaattagattctctttgccggattattgacagcgagcagattgatcttggaattttgttttgccggacgaaaaaaggtgtggcagagctaacggaagcattgcaagctcgcggttacattgccgatggattacacggtgatttaacacaatctcagcgtgatgcagttatgcggaaattccgtgactcatcgattgaattcttgattgccaccgatgtggcggcgagagggattgacgtggggaacgtctctcacgtgatcaattatgatattccccaagatccagaaagctatgttcaccggatcggtcgtacaggccgtgcaggacgtaaagggcttgcacttacgcttgtcacgccaagggaaatgaaacatctccgttcgatcgaacaagaaattaaaatgtcaatcccgtctcaagaagtgccgacgattgaagatgtggtggaaaaacaaaaagaatcatggaagaagcaaatcgcccatcgaattgagaaaggctctaaccaaaagcacctcttcgagcaaatgactgaagagttgatggcagagtacgattcaaaagaggtgatctctgctctccttcaattaaactacgcgatggacacagctcctgaggatgcgggatatagctttggggaaaccggtggtgccaaaggcatggtccgtttctttatcaatgttggtagaaatgtgaatatgagtccaaagattcttgtcgaggagattgcagagcttgttggcattcctggtaaggcgatcggccgaatcgacatctttgaaaaattcacgtttgttgaagtgcctgaagaagtggctccgtttgtttatgaagcgcttcgttactcaaggatcaacggtgctcgtgtgaaccttgagccagcaaaacctcgtccaaagcgggaatcacagcgaagaacatttcaaaaatag

SEQ ID NO: 65247 - protein, 539 aa, Bacillus halodurans C-125
MNEAMIKFNELQIGEEIKKAIIEMGFEEPSPIQAKAIPAILAGGDVIGQAQTGTGKTAAFGIPVVEKVSTGRHVQALILTPTRELAIQVSGEIQKLSKHKKIRTLPIYGGQSIVHQIKALKQGVQVVIGTPGRIIDHLRRKTLILDHVNTVILDEADEMLDMGFIDDIESILRQVKNERQTLLFSATMPPAIKKLSRKYMNDPQTVSINRREVTAPSIDQFYYKVLERNKLDSLCRIIDSEQIDLGILFCRTKKGVAELTEALQARGYIADGLHGDLTQSQRDAVMRKFRDSSIEFLIATDVAARGIDVGNVSHVINYDIPQDPESYVHRIGRTGRAGRKGLALTLVTPREMKHLRSIEQEIKMSIPSQEVPTIEDVVEKQKESWKKQIAHRIEKGSNQKHLFEQMTEELMAEYDSKEVISALLQLNYAMDTAPEDAGYSFGETGGAKGMVRFFINVGRNVNMSPKILVEEIAELVGIPGKAIGRIDIFEKFTFVEVPEEVAPFVYEALRYSRINGARVNLEPAKPRPKRESQRRTFQK

SEQ ID NO: 65248 - DNA, 1833 bp, Pasteurella multocida subsp. multocida str. Pm70
  CDS (1)..(1833): transl_table=11
atgactgaaacaacaatgactttcaatgatttaggcttgcctgaatttcttcttaacgccgtctctgacttaggctttgaaaccccttctccaattcaacaaagttgtatcccaaacctgttaaatgggcatgatgtgctaggtatggcacaaactggaagtggtaaaaccgccgccttttcactccctttattagcacaaattgatttagataaaaaatatccacaaatgttagtgatggcaccgacacgtgagttagccatccaagtagcagatgcctgtgagcacttttgcaaatatgcgaaaaataccaatattgttaccctttatggtggtcaacgctatgacattcaattgcgtgctttacgccaaggtgctcaggttgtagtggggacacctggtcgtattttagatcacattcgtcgtggcactttagatttgtctaatttacgttttatggtgttagatgaagcggacgaaatgttacgtatgggctttattgatgatgttgaaacggtgatggcagaattaccagaacaacatcagactgcacttttctcagccaccatgccagatccaattcgtcgtattactaagcgttttatgaaagatccgaaagagattaaaattaaatcgacgcaaacgacgaatccagatattacacagagttgttggtatgtgcatggtttccgtaaaaatgatgccttattacgtttcttagaagtagaaaaatttgatgccgcgattatctttactcgtactaaaacggggacattagatgtaacggaattgttggaaaaacatggtttccgtgccgcagcattaaatggcgatatgacacaacaattacgtgaacaaacgcttgatcgtttaagaaatggtagtttagatatccttgtggcaaccgatgtggcggcgcgtggtttagatgtggagcgcattagcctcgtagtgaactatgatattccattagatgctgagtcttatgttcaccgtattggtcgtacagggcgtgcaggacgtacagggcgtgcattgttatttgttgaaccaagagaacgtcgtttattacgtaatattgaacaattaactaaaaaaccgattacggaagtcgaagtgccaaatcatgaggtactacaagcttgtcgccgtgagaaatttaaagccaaaattacagtccaattagagcatcatgatttaggactttatcgtagcttactagaagatatgttcaccgcggatcaagatcaggaagatattgcggcggcgatgttgatgttgttgcaaggtaaacaaaagcttattttaccagccgatccaattattgatcgtaaaacttcacgtggtgatcgtggcgagcgtcgtgaacgtggtggacgtgaaaatccacgttcagcagagcgtcgtggttacggtacaccgcaggcgatggatttatatcgtattgaagtaggacgtttagatggcgcggaagtccgtcatattgttggggcgattgccaatgaaggtgatatcaatagtcgttatattggtcatattaaattatatgatgattacaccacgattgaattaccacaaggtatgccgaaagaattattaggtgtatttgcgaaaacacgcgtgatgaacaaacaaatgcagatgtcatttgtgggagcgtctaatgcaggttcaagccgtgatcgcgatgatttcgctgaccgccgtggtggaaaacgtaaaggacgcggcgatgaaccacgttttgggcgtgaagatcgtaaatttaaagaaaaaagtcagcgcacttttaatgatcgcccacgcagagaaagacgtgaacgccaaaagtaa

SEQ ID NO: 65249 - protein, 610 aa, Pasteurella multocida subsp. multocida str. Pm70
MTETTMTFNDLGLPEFLLNAVSDLGFETPSPIQQSCIPNLLNGHDVLGMAQTGSGKTAAFSLPLLAQIDLDKKYPQMLVMAPTRELAIQVADACEHFCKYAKNTNIVTLYGGQRYDIQLRALRQGAQVVVGTPGRILDHIRRGTLDLSNLRFMVLDEADEMLRMGFIDDVETVMAELPEQHQTALFSATMPDPIRRITKRFMKDPKEIKIKSTQTTNPDITQSCWYVHGFRKNDALLRFLEVEKFDAAIIFTRTKTGTLDVTELLEKHGFRAAALNGDMTQQLREQTLDRLRNGSLDILVATDVAARGLDVERISLVVNYDIPLDAESYVHRIGRTGRAGRTGRALLFVEPRERRLLRNIEQLTKKPITEVEVPNHEVLQACRREKFKAKITVQLEHHDLGLYRSLLEDMFTADQDQEDIAAAMLMLLQGKQKLILPADPIIDRKTSRGDRGERRERGGRENPRSAERRGYGTPQAMDLYRIEVGRLDGAEVRHIVGAIANEGDINSRYIGHIKLYDDYTTIELPQGMPKELLGVFAKTRVMNKQMQMSFVGASNAGSSRDRDDFADRRGGKRKGRGDEPRFGREDRKFKEKSQRTFNDRPRRERRERQK

SEQ ID NO: 65250 - DNA, 1644 bp, Lactococcus lactis subsp. lactis Il1403
  CDS (1)..(1644): transl_table=11
atgaaatttagtgaactcggcctgtcagaaggaatcgtaaatacacttacagagattggttatgaacaaccaacaccaatccaagaacaaacaattaaacttgcacttgaagggcgtgacgttctaggtcaagcgcaaacaggaactggtaaaacagcagcatttggtcttccaacaattgaaaaaattgatgcttctaatccagctattcaagcactcgttattgctccaacccgcgaacttgcggttcaaggacaagaagaacttttccgttttggtaaatcaaaagggcttaaagttcgtactgtttttggtggttcaagtattgaaaaacaaattaaaggccttaaagctggtgcacatattgttgtgggaacaccaggacgtttggttgacttgattaaacgtaaagcaattaaattggatcaacttgaaactttgattcttgatgaagctgatgaaatgttgaacatgggattcttggaagacattcatttcatcattgaaaaaacaccagaagctcgtcaaacattgcttttctcagcaacaatgccaaatgacatcaaaaaaattggtgtgaaattcatgaagaatcctgaacacatcaaaattgcagccaaagaaatgactgctgaccgtattgatcaatattttgtaaaaacaaaagaatttgaaaaatttgatgttttgactcgtttgcttgatgttgaacgtccagaacttgcaattgtttttggtcgtacaaaacgtcgtgttgatgaattgattcgtggtcttaaattgcgcggttaccgtgctgaaggaatgcacggagatttggaccaaaataaacgtttggctgttttgcgtgatttcaaagcaggacatattgacgttttggttgcaactgacgttgctgctcgtggactcgacgtgtcaggagttactcacgtttataactacgacattactcaagaccaagaaagctatgttcaccgtatcggtcgtaccggccgtgctggtaaatcaggacgttcagtaacatttgtttcatacaatgaaatgggttatcttcgtgccattgaaaatatgactaaaaagccaatgaaaggcttgaaaccacctacaaaagaagaagcttaccaagcgtcactctcagtagctatggatgatgtccttcgtgatttgtctgatgattcagctaaagcaaaattggctaaatttgacaaacaagcagcgagcctacttgaaaaatttgatgctaaagaattggttgctttacttcttcaaggtcgcgtaaaagaccctgataatcaagaagaagttaagattacagctgaacgtccattgccatataatggtgaaggaaaaggcttcaagaaaaaaggtaaaggtggcggcggacgctacaaaggtcgtggaaatggcgaccgtgatggcaaccgtggcggttaccgtggaaatcgtgatggtaaagatggcgaccgcggtggagatcgcaaacgcaactggaaagaccgtgatgataaccgtggcggttaccgtggaaaacgtgatgaccgtcgttttgacgatcgtaaacaaggagaaaaaactcctcgtaaacgtaccacaggaactgaaaaatcagctggcttcgtaatgcgtagccgtggtgacaaataa

SEQ ID NO: 65251 - protein, 547 aa, Lactococcus lactis subsp. lactis Il1403
MKFSELGLSEGIVNTLTEIGYEQPTPIQEQTIKLALEGRDVLGQAQTGTGKTAAFGLPTIEKIDASNPAIQALVIAPTRELAVQGQEELFRFGKSKGLKVRTVFGGSSIEKQIKGLKAGAHIVVGTPGRLVDLIKRKAIKLDQLETLILDEADEMLNMGFLEDIHFIIEKTPEARQTLLFSATMPNDIKKIGVKFMKNPEHIKIAAKEMTADRIDQYFVKTKEFEKFDVLTRLLDVERPELAIVFGRTKRRVDELIRGLKLRGYRAEGMHGDLDQNKRLAVLRDFKAGHIDVLVATDVAARGLDVSGVTHVYNYDITQDQESYVHRIGRTGRAGKSGRSVTFVSYNEMGYLRAIENMTKKPMKGLKPPTKEEAYQASLSVAMDDVLRDLSDDSAKAKLAKFDKQAASLLEKFDAKELVALLLQGRVKDPDNQEEVKITAERPLPYNGEGKGFKKKGKGGGGRYKGRGNGDRDGNRGGYRGNRDGKDGDRGGDRKRNWKDRDDNRGGYRGKRDDRRFDDRKQGEKTPRKRTTGTEKSAGFVMRSRGDK

SEQ ID NO: 65252 - DNA, 1845 bp, Xylella fastidiosa 9a5c
  CDS (1)..(1845): transl_table=11
gtgctctccggagttctcatgtcaaatccatcctctacgccgctgctgtttgcagatctcggcctctccgatgctgtgatgcaagccgtcacaaaaatcggttatgaaactccgtcgcccatccaggcggcgaccatcccagccttgctcgctgggcgcgatgtgctgggccaagcccagaccggcactgggaagactgccgcattcgcgctaccgttgctcacacgcaccgttctgaaccaggtcaagccgcaagtgctcgtactggcacccacccgcgaactggctatccaagttgccgaagcattccagcgctatgctgcctcgatctctggcttccgtgtcctacccgtgtacggcggccaatcctatggccaacaactggccgcactgaaacgcggtgttcatgtgatcgtcggtactccgggccgggtgattgatcacctagagcgcggcaccctggacctatcggaattaaaaacgctggtcctcgacgaagccgacgaaatgctgcgtatgggtttcattgaggacgttgaagaagtgctacggaagttgcccgcttcacgccaggtcgctctgttctcggcaaccatgccaccacagatccgccgtatcgcacaaacatatctacaagatccgattgaagtcaccatcgccaccaaaaccacgaccgcggccaacatccgccagcgttactggtgggtcagcggcctccacaagcttgatgcactcacacgcattcttgaggtggaaaccttcgacgcaatgattatcttcgtgcgcaccaaagctgccaccgaagaattggccgagaagttgcaggcacgtggcctgaccgccgcagcgatcaatggcgatatgcaacaagcgcaacgcgaacgcaccattcaccaactcaaagatggcaagctggatatcctcgttgccaccgacgtcgccgcacgtggtttggacgtagaacgtatcagccacgtactgaactacgacatcccttacgacgttgagagctacgtccaccgtatcggacgcactgggcgtgccggtcgcagcggcgaagcaatcctctttgtgactccacgcgaaaaaggcatgctgcgccagattgaacgtgccactcaccaaccgatcgaagccatgcaactgcccagtgtggatgcagtcaacgacacgcgcgtcgccaaatttttcggacgcatcagcaatgctttggtggtcggcgctgaaatcgacttctaccgcaaactgcttcaacgtttcgagagcgagcacaatgtccctgccattgagatcgctgctgccctggcacgactccttcagggggatagccccttcctgctgagtgtcccaacgcgcgcccaacgcgaacgcagcgagccaccatcggagcatgtcaaacgctcctcatccttcaagcagacagagcgcccaaaccacactgaacaccccaagcgcccccaacgtaacgcaccagcacgcaataccccggaattcggtatggagtcttaccgcatcgaagtcggccgcatacacggtgtgaagccagctaatatcgtcggtgccatcgccaacgaagctggattagagagccgctacattggccggatcgacatccgtgacgatcactcggttctagatctccccgcagagatgccacacgaaatcctgcaacacctaaaaaaggtctgggtatcaggacagcaactacaaatgcgtcggatcgacacaaccgaaacaaccgcaactgcacgggaatttaagtcaaaaccgggtggcgctggcaaattcccgccgaaaccgcatcacaacaaatcaaccaaaccaaaaccaccatacagcggttga

SEQ ID NO: 65253 - protein, 614 aa, Xylella fastidiosa 9a5c
MLSGVLMSNPSSTPLLFADLGLSDAVMQAVTKIGYETPSPIQAATIPALLAGRDVLGQAQTGTGKTAAFALPLLTRTVLNQVKPQVLVLAPTRELAIQVAEAFQRYAASISGFRVLPVYGGQSYGQQLAALKRGVHVIVGTPGRVIDHLERGTLDLSELKTLVLDEADEMLRMGFIEDVEEVLRKLPASRQVALFSATMPPQIRRIAQTYLQDPIEVTIATKTTTAANIRQRYWWVSGLHKLDALTRILEVETFDAMIIFVRTKAATEELAEKLQARGLTAAAINGDMQQAQRERTIHQLKDGKLDILVATDVAARGLDVERISHVLNYDIPYDVESYVHRIGRTGRAGRSGEAILFVTPREKGMLRQIERATHQPIEAMQLPSVDAVNDTRVAKFFGRISNALVVGAEIDFYRKLLQRFESEHNVPAIEIAAALARLLQGDSPFLLSVPTRAQRERSEPPSEHVKRSSSFKQTERPNHTEHPKRPQRNAPARNTPEFGMESYRIEVGRIHGVKPANIVGAIANEAGLESRYIGRIDIRDDHSVLDLPAEMPHEILQHLKKVWVSGQQLQMRRIDTTETTATAREFKSKPGGAGKFPPKPHHNKSTKPKPPYSG

SEQ ID NO: 65254 - DNA, 1443 bp, Mycoplasma pulmonis UAB CTIP
  CDS (1)..(1443): transl_table=4
atgagattcacacaaatgaacataaaaagtgaaatacttaaatcacttgatgaaataggatttgaaaaaccaacaaaaattcaagaagctgttttaccctttgcttttgaaggaaaagatataataggacaagctcaaacaggaacaggaaaaacagcggcttttgccattccaattcttagtaatttagattgctctattaatagaattcaacatttagtaattgctccaacaagagagcttgctaatcaaatatatgatcaacttaatattttaggaaaatacacatgctctaaaatagctcttattttaggtggagtttcctatgaaaaacaaaaagcagctttaaatagtggagttaacattgtagtggctactccaggaagacttgaggatcttcttgctcaaaacaaaattgacctttcacatatcaaaacttttaccctagatgaagcagatgagcttttaaaaattggtttttataatgaaattattaagatcatgaataagctgcctaaaaaaagacaaaactttttcttcacagcaacctttgatgaaaaaaccaaaaaactaagtcaagaaattacaaatgaagcaaaaatgataagtatgtcttcaggacttgaaacaactgaaaaaattgaccaaaactttgttgttgtctctgaagaagaaaagttaattacacttgttaagttcttagactttaaaaaaccaactgctagtgttatttttggtagaaccaaaagaagagttgatgaacttgcaagcgctcttcaagagttaggtttttcggcagtgggaattcaaggtgatatggttcaaaaagatagaactagtgttttaaatagattcaaagaccaaaaagttaatattattgttgcaactgatgttatggctagaggtattgatgtttctcatgttgatttagtttttaactttgatttacctgaagaaattgaatactatacacatcgaatcggaagaacaggaagaggcacaagaatagggcaggcaatttcatttgtaaaaaaaccagaagttggttatatttacaaaataatgactgaaacaaaaagcattattaaagaaatttcaattccttcaaaagagcatttacaaaccgtttgagaagatcatcttattaataagctaagttcaattttagaagatgcacaaaacaaacactgaagagaagatgttgtgcaaaaagatattctagaaagatatagtcctagagaactttcaattttactttgatcttatataattcaagaaaaaggactaagaaaaaatcttaaattaactcctgaaccacctgtaagatacaaaaaaaacaatgattctaataaagggcgttttcaatcaagaacaagctctcatttagaaaaaagaaatagaagaaatttcaattcaaaaaaaagagaaggctttagacactaa

SEQ ID NO: 65255 - protein, 480 aa, Mycoplasma pulmonis UAB CTIP
MRFTQMNIKSEILKSLDEIGFEKPTKIQEAVLPFAFEGKDIIGQAQTGTGKTAAFAIPILSNLDCSINRIQHLVIAPTRELANQIYDQLNILGKYTCSKIALILGGVSYEKQKAALNSGVNIVVATPGRLEDLLAQNKIDLSHIKTFTLDEADELLKIGFYNEIIKIMNKLPKKRQNFFFTATFDEKTKKLSQEITNEAKMISMSSGLETTEKIDQNFVVVSEEEKLITLVKFLDFKKPTASVIFGRTKRRVDELASALQELGFSAVGIQGDMVQKDRTSVLNRFKDQKVNIIVATDVMARGIDVSHVDLVFNFDLPEEIEYYTHRIGRTGRGTRIGQAISFVKKPEVGYIYKIMTETKSIIKEISIPSKEHLQTVWEDHLINKLSSILEDAQNKHWREDVVQKDILERYSPRELSILLWSYIIQEKGLRKNLKLTPEPPVRYKKNNDSNKGRFQSRTSSHLEKRNRRNFNSKKREGFRH

SEQ ID NO: 65256 - DNA, 1125 bp, Clostridium acetobutylicum ATCC 824
  CDS (1)..(1125): transl_table=11
atgaattttaaaaaattaggaattagtgaagcactagttgaggtgctaaaaaagagtggtattactgagccaactccagttcaagctgagagtataagccacattaaaggtggaagagatgtcattggagaagcccaaacaggtaccggaaaaacccttgcatttctactccctatttttgaaaatatatcaccaacattaagcgcagttcaagccttgattgtaacacctacaagagagcttgccctccaaataacagaacaagctttaaagcttaaagaagctaaggatataaatatattagctgcctatggtggtaaggatatagcctcccaacaaaaaaaacttagaggaagcactcatcttattattgcaacaccaggtagacttttagatcttatccagagaaaaactgtagatctaagaaagttaaaaagttttgtacttgacgaagcagatcaaatgcttttaatgggctttaaaaatgatgtagaagaaatccttaaaaatgctcctaaaaaaaggcaaatgctttgtttctctgcaactataagccctgctgtaaaaaaattagcctatagatacatgactaaccctcttacaatatctacaaagaaaaaagaggttactttagaaaacattgaacaatttgtagtagaaaccactgacagaaaaaaattagaagatttgtgtaccgcattaaagcaagataatccctttatggctatcatatttggaagaaccaaaagaagagtagatgaacttgaagtagagctttatagaagaggttttgactgtcaaaaacttcacagtgatttaactcaaacaaaacgtgaaagaattatgaagtcctttagaaatggtgattttcaataccttctagctacagatgtagcatcaagaggtctagatataagtggagtaagtcatatatataattatgatgttccagataatcctgaaagctacatacatcgtataggtagaactggaagagctggagaagaaggctacacttgcttgttcgctgctgaaagagataaaagaaaattagaagatatagaagctgccattaaatttaagatacctagaagagatttaactggaggtaaaaatgaacgctaa

SEQ ID NO: 65257 - protein, 374 aa, Clostridium acetobutylicum ATCC 824
MNFKKLGISEALVEVLKKSGITEPTPVQAESISHIKGGRDVIGEAQTGTGKTLAFLLPIFENISPTLSAVQALIVTPTRELALQITEQALKLKEAKDINILAAYGGKDIASQQKKLRGSTHLIIATPGRLLDLIQRKTVDLRKLKSFVLDEADQMLLMGFKNDVEEILKNAPKKRQMLCFSATISPAVKKLAYRYMTNPLTISTKKKEVTLENIEQFVVETTDRKKLEDLCTALKQDNPFMAIIFGRTKRRVDELEVELYRRGFDCQKLHSDLTQTKRERIMKSFRNGDFQYLLATDVASRGLDISGVSHIYNYDVPDNPESYIHRIGRTGRAGEEGYTCLFAAERDKRKLEDIEAAIKFKIPRRDLTGGKNER

SEQ ID NO: 65258 - DNA, 1446 bp, Clostridium acetobutylicum ATCC 824
  CDS (1)..(1446): transl_table=11
atgagtgaattaagttttagagatttaggattaagtgaagaaattttaaagtcaatagaaaagcttgggtataaaaaaccatcaagtattcaagaaaaggttattcctgtaattcttaatggtaaggatataattgcaaaggccaaaacaggaagtggaaagacagcggcttttgcaattcctgtttgtgaaaaaatagaactcgaagaaagagagcctcaggttctggttttagctccaacaagagaactagcctatcaaataaaagaggactttttaaatataggaagatttaaaagattaaggtgcataagtattttcggaaaagagccaatttcaaatcaaattagagagcttaagcaaagagtacatattgtagttggtacacctggaagagttctagatcatattgaaagaggaaccttgaatctagaaaaagtgaaatactttattatagatgaagcagatgaaatgctcaatatgggctttatagagcaggttgaaagcatacttataaaaatgcctaaaaataaaaatacttttcttttctcagcaacactgccggaggaaatagtaatgctttctaaaaagtatatgaagaactttgagaacatagaggttcaaaatgaaggaaagaccaaaggaggaattcatcaggtttactacgaggttgaaagtcgtgaaaagtttgatttgctaaagaaagtaatatataaagaggtacctggaagctctataatattttgcaggactaaaaacaacgtagaggatgttttggttaagatgaaaaatatgaagttttcctgtatggcaatacatggaggaatgcttcaagagaatagaatagcagttatgaatgcttttaaaagaggagaatttacatttttaatagcaacagatgtggcggctagaggcatcgatgttgaaaatgtgacacatgttataaattatgatatacctatggagaaggaaagctacattcatagaattggaagaacgggacgtatgggaaataagggtatcgcaataacctttgtgacatcaaaggaagaaagatttcttaaggaaattgaagaacagttctctttagaaataataaaagaagagcctccaacaagggaagaggttaaaaaagggcaagaagtatttaaaaccgcttctaaacagttaaataaaacaaaggcaaataaatctgaaaaactaaataaggatattacaaaaatttatttaagtgcaggaaagaaaaagaagataagaccaggagatatagcaggaactatatcaagtatagatggggtaagcccagaagatataggaattattgatatacatgataacttttcatatgttgaaatattatcaggaaaaggtgatatagtacttaatgcaattgaggataagacaataaagggaaaaaaagtaagagcggagaaagcacagaaataa

SEQ ID NO: 65259 - protein, 481 aa, Clostridium acetobutylicum ATCC 824
MSELSFRDLGLSEEILKSIEKLGYKKPSSIQEKVIPVILNGKDIIAKAKTGSGKTAAFAIPVCEKIELEEREPQVLVLAPTRELAYQIKEDFLNIGRFKRLRCISIFGKEPISNQIRELKQRVHIVVGTPGRVLDHIERGTLNLEKVKYFIIDEADEMLNMGFIEQVESILIKMPKNKNTFLFSATLPEEIVMLSKKYMKNFENIEVQNEGKTKGGIHQVYYEVESREKFDLLKKVIYKEVPGSSIIFCRTKNNVEDVLVKMKNMKFSCMAIHGGMLQENRIAVMNAFKRGEFTFLIATDVAARGIDVENVTHVINYDIPMEKESYIHRIGRTGRMGNKGIAITFVTSKEERFLKEIEEQFSLEIIKEEPPTREEVKKGQEVFKTASKQLNKTKANKSEKLNKDITKIYLSAGKKKKIRPGDIAGTISSIDGVSPEDIGIIDIHDNFSYVEILSGKGDIVLNAIEDKTIKGKKVRAEKAQK

SEQ ID NO: 65260 - DNA, 1587 bp, Clostridium acetobutylicum ATCC 824
  CDS (1)..(1587): transl_table=11
atggaaaacaaaaaatttagtgatttaaaattgaacagtagtgttctaaaagcaatagatgacatggggtttgaggagccatcgaaaatacaagcagaagctattccagttgttatagatggatatgatatgataggtcaggctcaaacaggaacgggaaagactgttgcattcggagcaccaataataagtaaaataaaagacattgatgaaaaagagggcgtacaggcaattatattaactcctacaagagaacttgccattcaaataactgatgaattaacaagattgtctaaatatgcaagagtaagggtactaccaatatacggtggacagtcaatagaaagacaaatgagagccattaaaagaggagtagatgttatagttgcaactcctggaagaataatggatcatataaaaagaaaaacagtaaaattagataaagttaagtttttggttttagatgaagcggacgaaatgcttgatatgggatttatagatgatatagaaggcataataaagaatataagcggtgataggcaaacaatgcttttctcagctacaatgccagcacctataaagaagttagcatctaattatatgaaaaaagaagttaaacatatagcgataataaaaaattctttaacagtagaaagaatacaacaattttattttgaagtaaagaataaagataaatttgaagctctatgtaggataatagatgtagaagaacctgaaacaaccattatattctgtagaactaagagaggtgtagatgaactagttgaatctatgcaatttagaggatacaatgttgagggtatgcatggagatatgagccaaaatcaaagaataaatacacttaaaaagtttaaagaaaataatattgactttttagttgcgacagatgtagcagctagaggaatagatgttcataatgtatctcatgtaataaactatgatatacctcaagatatggaatcatacgttcatagaataggaagaactggaagagcaaatgcagaaggtatagcttattcattagtaactccaagagagtatgtaatgattaaacaaattgaaaaatttacaaagagcaaaataagaagaaaagaaatacctacaatagatgatatttttgaaactaaatacaatactttgacagataaaataacaaaaaatatcgaaaaagatgattttaaaaagtatatcccatttgtacaaaagcttgatgatgaatttaatttagtagatgtatcagcagctttagtaaaaatgatttttgataaggaaatgggctttgattattctgatgacgataagcttaagagtgatgaaagtgttagattattctttagtgcaggaagaaaagataaactaacagttaaaaaacttcttgagtttatagataatgcatcaggtgttgaaggaaatgagataggagatattgatatccttgataaatttacatttgttgatgttccagagagactaagagatgttataataagaacctgtgatggtaagaaattaaatggaagaaaagtaaatatagaagtagcaaagtctaaaaagaaatctaaataa

SEQ ID NO: 65261 - protein, 528 aa, Clostridium acetobutylicum ATCC 824
MENKKFSDLKLNSSVLKAIDDMGFEEPSKIQAEAIPVVIDGYDMIGQAQTGTGKTVAFGAPIISKIKDIDEKEGVQAIILTPTRELAIQITDELTRLSKYARVRVLPIYGGQSIERQMRAIKRGVDVIVATPGRIMDHIKRKTVKLDKVKFLVLDEADEMLDMGFIDDIEGIIKNISGDRQTMLFSATMPAPIKKLASNYMKKEVKHIAIIKNSLTVERIQQFYFEVKNKDKFEALCRIIDVEEPETTIIFCRTKRGVDELVESMQFRGYNVEGMHGDMSQNQRINTLKKFKENNIDFLVATDVAARGIDVHNVSHVINYDIPQDMESYVHRIGRTGRANAEGIAYSLVTPREYVMIKQIEKFTKSKIRRKEIPTIDDIFETKYNTLTDKITKNIEKDDFKKYIPFVQKLDDEFNLVDVSAALVKMIFDKEMGFDYSDDDKLKSDESVRLFFSAGRKDKLTVKKLLEFIDNASGVEGNEIGDIDILDKFTFVDVPERLRDVIIRTCDGKKLNGRKVNIEVAKSKKKSK

SEQ ID NO: 65262 - DNA, 1848 bp, Agrobacterium tumefaciens str. C58
  CDS (1)..(1848): transl_table=11
atgacagacacccagggtatcgccccggcgatcgcgcaggcgttggaaaaacgcggctacaaagacttgacccccgtacagcaagccatgcttgcgcccgaacttgccaacaaggacgcgctggtttccgcgcagaccggctccggcaagacggttgccttcggcatagcgcttgcgaccacgctgctgtcggaaaatacacgcttcggtcaggcttccgcaccgctggcgctggcaatcgcacccacccgcgaactggccatgcaggtcaagcgcgagctggaatggctttatgaattcgccggtgtctccatcgcatcctgcgtcggcggcatggatatccgcaacgagcgccgggcgctggagcgcggcgcccatatcgtcgtcggcacgcctggtcgcctgtgcgaccatatcaagcgcaatgcactcgatctgtcgtcgatccgcgccgtggtgcttgacgaggccgacgagatgctcgatctcggcttccgcgaagatctggaattcattctggaagaatcgcccgacgatcgccgcacgctgatgttctcggccaccgtgccgcgcagcatcgccaagctggccgaaagctaccagaagaacgccgtgcgcattgccaccgcttccgaacagaagcagcatgtcgatatcgaatatcgcgcgcttctggtgtcgccttccgatcgcgagaacgccatcatcaacgcgctgcgcttttacgaagcccgcaacgccattgtgttctgctccacccgcgccgcggtgaaccacctgacggcccgcctgaacaatcgaggcttctccgtcgtggctctctccggcgaactgacccagaacgagcgcacacatgccctgcaggccatgcgtgacggccgcgcccgcgtttgcgtggccaccgacgtagccgcccgcggtatcgacctgcccggcctggaactcgttatccatgccgacctgccgaccaattccgaaacgcttctgcaccgttcaggccgtaccggtcgtgccggccaaaagggcgtcagcgccatcgtggtaccggtcagtcagcgccgcaaggccgagcgcctgcttgagggcgccaaggtcagcgccgcatgggtgcgcccgccttcggttgaagagatcgtggagcgcgatggcgcacgccttctggccgacccgacgctcagcgaagcggtaacagatgacgaacgcgatttcgtcaacaagctgcttgaacagcacggcgcggaaaaagtcgccgccgcctttgtgcgcctttatcattcgggacgttcggcaccggaagacattttcgaagtcgcgctcgacaacactcgcaagccccgccgcgacagcttcgaaacaaccgaaaacaacgcgccgcgccgcgaccgctccgatttctccgacagcgcatggttctcgctgtccgttggccgaaagcaaagcgccgagccgcgctggcttatcccgatgctgtgccgcttcggcaagatcacccgccaggatatcggcgcgatccgcatgcagcagacggaaaccttcgtggaacttgcggccgacgccgtcgaccgttttacctccgccatcggcaaggacatgatgctcgaaaagggcattcgcctgaagcagatggaaggcaagccggaaatgaccggcaacgcccgtgaagacacaaggcccgccacagcgcagcgcaaattcacgaaatccgacaatgcgggcgctccccgagacgaccgcaaggctgacgacaagccctggaaaaagaaaaaagccttcggcgacaagccgaaatacgaaggcaagaaggacaagcctttcgagaagcgtgggccgaagccgacgaaaggctga

SEQ ID NO: 65263 - protein, 615 aa, Agrobacterium tumefaciens str. C58
MTDTQGIAPAIAQALEKRGYKDLTPVQQAMLAPELANKDALVSAQTGSGKTVAFGIALATTLLSENTRFGQASAPLALAIAPTRELAMQVKRELEWLYEFAGVSIASCVGGMDIRNERRALERGAHIVVGTPGRLCDHIKRNALDLSSIRAVVLDEADEMLDLGFREDLEFILEESPDDRRTLMFSATVPRSIAKLAESYQKNAVRIATASEQKQHVDIEYRALLVSPSDRENAIINALRFYEARNAIVFCSTRAAVNHLTARLNNRGFSVVALSGELTQNERTHALQAMRDGRARVCVATDVAARGIDLPGLELVIHADLPTNSETLLHRSGRTGRAGQKGVSAIVVPVSQRRKAERLLEGAKVSAAWVRPPSVEEIVERDGARLLADPTLSEAVTDDERDFVNKLLEQHGAEKVAAAFVRLYHSGRSAPEDIFEVALDNTRKPRRDSFETTENNAPRRDRSDFSDSAWFSLSVGRKQSAEPRWLIPMLCRFGKITRQDIGAIRMQQTETFVELAADAVDRFTSAIGKDMMLEKGIRLKQMEGKPEMTGNAREDTRPATAQRKFTKSDNAGAPRDDRKADDKPWKKKKAFGDKPKYEGKKDKPFEKRGPKPTKG

SEQ ID NO: 65264 - DNA, 1245 bp, Rickettsia conorii str. Malish 7
  CDS (1)..(1245): transl_table=11
ttggattatataatgaaaaattttaatttatctgaagaattaattattgctctcgagacaatgaatataactgagccgactgaaatacaaaagcaatcgattccggttgcaatggcgggatcggacatactcgcttctagccaaacaggttcaggcaaaactcttgcttatttattgccgttaattgattcatttattaaaaataaaactactgctttaattcttgttccgactagagaattagcaacgcaaatacacagtactttaaataaagtaactacatcgtataaaattaatagtgcagttttgataggcggtgaaccgatgcctaaacaatttatacaattaaaaaagaatccaaaagtgattatcggtacgccggggcgtattatcgatcacttaaataggggaagtctaaaaattgatcgtataggcataaccgtacttgacgaaatggatagaatgcttgatatggggatgaaagaacaattagaagaaatcaataaatttttaccggaaaaaagacaagttttaatgttttccgctactatgccaaaacatattattgctgtttctcaaaaatatctaaacaatccggtacgtattacggtaggtgctactaataaagcagctgcagaaataaaacaggaatcgatgcatgtttctgataaagaaaaatttagtgcattaactaaacaacttggtaatagggaaggatcggtcattatttttgtgaagactaaacgctctgccgatcaattagctaaaatgttgaaatatgaaaatcatacagcagaagctatacacggtgatttaagtcagcgtcaacgtgaaagagtaattttatcatttcgtaagtcaaaccatagaataatggtagcaactgatgtagcggctcgtgggcttgatattcctcatacacagcatgttattaattatgatttacctatgtgtcctgaagattatttacataggataggtagaacgggtagagcaggggctaccggacatgcgttgtcttttatttctcctgatgatgttattagatggcgtgcaatcgatcgtttagtaaataaaggagaatctacgccacgtagtgagtttagaagtgataaaaataatcgtaaaagatcattcggtaaaagagccggcggtgacggtaaaaagtttaatgcttttgatagtagccgtaaaagaacctttgatggtaacagctacggtaataaaagaaagaaagtatcgtag

SEQ ID NO: 65265 - protein, 414 aa, Rickettsia conorii str. Malish 7
MDYIMKNFNLSEELIIALETMNITEPTEIQKQSIPVAMAGSDILASSQTGSGKTLAYLLPLIDSFIKNKTTALILVPTRELATQIHSTLNKVTTSYKINSAVLIGGEPMPKQFIQLKKNPKVIIGTPGRIIDHLNRGSLKIDRIGITVLDEMDRMLDMGMKEQLEEINKFLPEKRQVLMFSATMPKHIIAVSQKYLNNPVRITVGATNKAAAEIKQESMHVSDKEKFSALTKQLGNREGSVIIFVKTKRSADQLAKMLKYENHTAEAIHGDLSQRQRERVILSFRKSNHRIMVATDVAARGLDIPHTQHVINYDLPMCPEDYLHRIGRTGRAGATGHALSFISPDDVIRWRAIDRLVNKGESTPRSEFRSDKNNRKRSFGKRAGGDGKKFNAFDSSRKRTFDGNSYGNKRKKVS

SEQ ID NO: 65266 - DNA, 1500 bp, Sinorhizobium meliloti 1021
  CDS (1)..(1500): transl_table=11
ttgaccaatttcgctgaccttggcctgagccagaaagttctctccgcagttaccgatgcgggctacacgataccgacaccgatccaggttggtgccatcccgccggcgcttcagcgccgcgacattctcggcatcgcccagaccggaaccggcaagaccgcatccttcgtgttgccgatgctgacccttctggaaaagggacgcgcacgcgcacgcatgccgcgtacgctgatcctcgagccgacgcgcgaactcgctgcgcaggttgccgagaacttcgacaaatacggcaagaatcataagctcaacatcgcgcttctgatcggtggcgtttccttcgacgagcaggaccgcaagctcgagcgcggcgccgatgtgctgatctgcacgcccggccgcctgctcgaccattgcgagcgcggcaagctcctgatgacgggggtcgagatcctcgttatcgacgaggccgaccgcatgctcgacatgggcttcattcccgacatcgagcgcatcgcgaagctcattcccttcacgcggcagaccttgttcttctccgcgacgatgccgcccgaaatccagaagcttgcggatcgcttcctgcagaatccggagcggctcgaggtggcacgccggtcctcgacggccataaccgttacgcagcgttttgtcgccgcacacggcaaggattacgagaagcgcgccgtgcttcgtgaactcattcggtcccaggaggacctgaagaacgcgatcatcttctgcaatcgcaagaaggatgtcgccgagctcttccgctcgctcgatcgccatggcttttcggtcggcgcgctgcacggcgacatggatcagcgttcacgcatggccatgcttgccaacttcaaggacggcaacatcaagctgctggtcgcctccgacgtcgcggcgcgaggactcgacattcccgacgtcagccatgtcttcaatttcgacgtgccgatccacgctgaagactatgtccaccgcatcggccgaaccggccgtgctgggcgttccggcgccgctttcacgatcgtcacaaagcgcgagacgaagttttccgatgccatcgagaagctgatcggccagaaggtcgaatggttcaacggcgacctttcggagcttcccgagccgatggagagccacgacagccgtcgcgaccgcggcagcgacgggcgcaaggaccggaagagggagcgtcccggcaaggttcacgccgatcgcaaacctgtcacagcctcaggcaataatacagaagaactcgaaacagtcccggaaagggtcgacgcggtgaagatcgaacgcaatgccgacagcaaggatcgtcataacggccgcagcgaccgtcccggccgcgcgcagaatgcagccaatgacgacaatcgcgaccgtcgccagcgcaaccgccgcgatcatgacgacggcccgacgccggttggtttcggcgacgacattccggccttcatgctgatcgtcggcaaggcctga

SEQ ID NO: 65267 - protein, 499 aa, Sinorhizobium meliloti 1021
MTNFADLGLSQKVLSAVTDAGYTIPTPIQVGAIPPALQRRDILGIAQTGTGKTASFVLPMLTLLEKGRARARMPRTLILEPTRELAAQVAENFDKYGKNHKLNIALLIGGVSFDEQDRKLERGADVLICTPGRLLDHCERGKLLMTGVEILVIDEADRMLDMGFIPDIERIAKLIPFTRQTLFFSATMPPEIQKLADRFLQNPERLEVARRSSTAITVTQRFVAAHGKDYEKRAVLRELIRSQEDLKNAIIFCNRKKDVAELFRSLDRHGFSVGALHGDMDQRSRMAMLANFKDGNIKLLVASDVAARGLDIPDVSHVFNFDVPIHAEDYVHRIGRTGRAGRSGAAFTIVTKRETKFSDAIEKLIGQKVEWFNGDLSELPEPMESHDSRRDRGSDGRKDRKRERPGKVHADRKPVTASGNNTEELETVPERVDAVKIERNADSKDRHNGRSDRPGRAQNAANDDNRDRRQRNRRDHDDGPTPVGFGDDIPAFMLIVGKA

SEQ ID NO: 65268 - DNA, 1554 bp, Caulobacter crescentus CB15
  CDS (1)..(1554): transl_table=11
atgactgaattcaccgacctagggctatcgcccacgaccctgcaggcggtcgccgacaccggctataccactgcgacccccatccaggcccaggccattcccgtcgccctcgcgggccaggacgtcctcggcatcgcccagacgggcaccggcaagaccgccgccttcaccctcccgctgatcgaccgcttgcagtcgggtcgcgccaaggcccgcatgccgcgcgccctggtcatcgccccgacccgcgaactggccgaccaggtggccgccagcttcgagaagtacgccaagggcaccaagctctcctgggccctgctgatcggcggcgtgtcgttcggcgaccaggaaaagaagctcgatcgcggcgtcgacgtgctgatcgccacgccgggccgcctgctcgaccacttcgagcgcggcaagctcctgatgaccggcgtgcagttcctcgtcgtcgacgaggccgaccgcatgctggacatgggcttcatcccggacatcgagcgcatcttcaagatgacgccgcccaagaagcagaccctgttcttctcggcgacgatgccgccggaaatcacccgcctgaccaagcagtttctgcgcgatccggtgcggatcgaggtggcgcgtcctgcgaccaccaacgccaacatcacccagctgttggtcaaggttccctcttctgatccgaaggccaagcgcttggcgctgcgggccctgatcgaaaaggccggcatcgagacgggcatcgtgttctgcaaccgcaagaccgaggtcgacatcgtcgccaagtcgctgaaggtgcacggctatgacgccgcccccatccacggcgacctcgaccagacccagcggatgaagaccctggcggacttccgctcgggcgcgctgaagatcctggtggcctcggacgtcgccgcgcgtggcctcgacatcccggccgtcagccacgtcttcaactatgacgtgccgcaccatgccgacgactatgtccaccgcatcggccgcaccggccgcgcgggccggacgggtatcacctacatgctggtcacgccggccgacgacaagggcttcgacaaggtcatcaagctgatcggttcgacgccggacgaagaaaagctggacctcgactactccaacgccgtcaccgtcaagcgcgagggcgaccgcaagcgcgggggccgcgaccgtgatcgtggcgagcgtggtgaacgcagcgagcgccccgcgcgcggacgcggtcgtggccgcgagcgcgccgaagaaacggtcgaagcgccggcggaggctgtcgccgaaatcgtcgacacccccgctatggccgaggagcgccctgcgcgcgaacgccggccgcgccgtgagcgcgagcccaaggcggccgcgcctgcgccgaccgcggtcgaagccgagcgcccggcccgcgccgagcgtcctgaacgcccggtgcgcggggttcagccggtccgtgaccgcgacgacgatgatcgtcgcgtggtcggcttcggctcggacgtgcccgccttcctcgcgcgcccgccgcgcggcgcgaagtag

SEQ ID NO: 65269 - protein, 517 aa, Caulobacter crescentus CB15
MTEFTDLGLSPTTLQAVADTGYTTATPIQAQAIPVALAGQDVLGIAQTGTGKTAAFTLPLIDRLQSGRAKARMPRALVIAPTRELADQVAASFEKYAKGTKLSWALLIGGVSFGDQEKKLDRGVDVLIATPGRLLDHFERGKLLMTGVQFLVVDEADRMLDMGFIPDIERIFKMTPPKKQTLFFSATMPPEITRLTKQFLRDPVRIEVARPATTNANITQLLVKVPSSDPKAKRLALRALIEKAGIETGIVFCNRKTEVDIVAKSLKVHGYDAAPIHGDLDQTQRMKTLADFRSGALKILVASDVAARGLDIPAVSHVFNYDVPHHADDYVHRIGRTGRAGRTGITYMLVTPADDKGFDKVIKLIGSTPDEEKLDLDYSNAVTVKREGDRKRGGRDRDRGERGERSERPARGRGRGRERAEETVEAPAEAVAEIVDTPAMAEERPARERRPRREREPKAAAPAPTAVEAERPARAERPERPVRGVQPVRDRDDDDRRVVGFGSDVPAFLARPPRGAK

SEQ ID NO: 65270 - DNA, 1941 bp, Salmonella typhimurium LT2
  CDS (52)..(1941): transl_table=11
atgatgagttatgtagactggccgccattaattttgaggcacacgtactacatggctgaattcgaaaccacttttgcagatctggggctgaaggctcctatccttgaagcccttaccgatctgggttacgaaaaaccatctccaatccaggcagagtgcattccgcatctgctgggcggtcgcgacgtgctgggcatggcccagaccggtagcggcaaaaccgcagcgttctctttaccgctgctcaacaatcttgatcctgagctgaaggcacctcagattctggtgctggcgccaacccgcgaactggcggtacaggttgccgaagccatgacggatttctctaaacacatgcgcggcgtaaacgtggttgccttgtacggcggtcagcgttatgacgtgcagttacgcgccctgcgtcaggggccgcagatcgttgtcggtacgccgggacgtctgcttgatcacttaaaacgcggcaccctcgacctctctaaactgagtggtctggtgctggatgaagccgacgaaatgctgcgtatgggcttcatcgaagacgttgaaactattatggcgcagatcccggaaggtcatcagaccgctctgttctccgccaccatgccggaagcgattcgtcgcattacccgccgctttatgaaagagccgcaggaagtgcgcattcagtccagcgtgactacccgtcctgacatcagccagagctactggactgtctggggcatgcgtaaaaacgaagcgctggtgcgtttcctggaagcggaagactttgatgcggcgattatcttcgtgcgtaccaaaaacgcgaccctggaagtagcagaagcgctggaacgtagcggctacaacagcgccgcgttgaatggcgatatgaaccaggcgctgcgtgagcagactctggaacgcctgaaagatggtcgtctggacatcctgatcgctaccgacgttgcggcacgtggtctggacgttgaacgtatcagcctggtggtgaactacgatattccgatggactccgagtcctacgttcaccgtatcggtcgtaccggccgtgcgggtcgcgccggtcgcgcgctgctgttcgttgagaaccgcgagcgtcgtctgctgcgcaacatcgaacgcaccatgaagctgaccattccggaagtggaactgccgaacgcagaactgctgggtaaacgccgtctggaaaaattcgccgcgaaagttcagcagcaactggaaagcagcgatctggatcagtaccgtgcgctgctggcgaaaatccagccgtctgccgaaggtgaagagctggatctcgaaacgctggccgccgcactgctgaaaatggcgcagggcgagcgtccgctgatcctgccgccggatgcgccgatgcgtcctaagcgtgaattccgtgaccgtgacgaccgtggtccgcgcgatcgtaatgaccgtggcccgcgtggcgatcgtgaagaacgtccgcgtcgtgaacgtcgtgacgttggcgatatgcagttataccgcattgaagtgggccgtgatgacggcgttgaagttcgtcatatcgtgggcgctatcgctaacgaaggcgacatcagcagccgttacattggcaacattaagctgttcgcgtctcactccaccatcgagctgccgaaaggtatgccgggcgaagtgctccagcacttcacgcgtacccgcattctgaacaagccgatgaatatgcagctgttgggtgatgcggttccgcacgcgggcggcgaacgtcgcggcggtggtcgtagcttcagtggcgaacgtcgtgaaggcggtcgtaatttcagcggcgaacgtcgtgaaggtggtcgtggtgatggtcgtcgcttcagcggcgaacgtcgtgaaagccgtggtccgcgtcgtgatgactctaccggtcgccgtcgtttcggcggtgatgcgtaa

SEQ ID NO: 65271 - protein, 629 aa, Salmonella typhimurium LT2
MAEFETTFADLGLKAPILEALTDLGYEKPSPIQAECIPHLLGGRDVLGMAQTGSGKTAAFSLPLLNNLDPELKAPQILVLAPTRELAVQVAEAMTDFSKHMRGVNVVALYGGQRYDVQLRALRQGPQIVVGTPGRLLDHLKRGTLDLSKLSGLVLDEADEMLRMGFIEDVETIMAQIPEGHQTALFSATMPEAIRRITRRFMKEPQEVRIQSSVTTRPDISQSYWTVWGMRKNEALVRFLEAEDFDAAIIFVRTKNATLEVAEALERSGYNSAALNGDMNQALREQTLERLKDGRLDILIATDVAARGLDVERISLVVNYDIPMDSESYVHRIGRTGRAGRAGRALLFVENRERRLLRNIERTMKLTIPEVELPNAELLGKRRLEKFAAKVQQQLESSDLDQYRALLAKIQPSAEGEELDLETLAAALLKMAQGERPLILPPDAPMRPKREFRDRDDRGPRDRNDRGPRGDREERPRRERRDVGDMQLYRIEVGRDDGVEVRHIVGAIANEGDISSRYIGNIKLFASHSTIELPKGMPGEVLQHFTRTRILNKPMNMQLLGDAVPHAGGERRGGGRSFSGERREGGRNFSGERREGGRGDGRRFSGERRESRGPRRDDSTGRRRFGGDA

SEQ ID NO: 65272 - DNA, 1542 bp, Nostoc sp. PCC 7120
  CDS (1)..(1542): transl_table=11
atgaacttatcgtttcccgaactaggaatttcccaagaacgcgtagaacacttagaaaaacttggttttactgcaccaacaaacattcaagcccaagctatcccccaactgttgtcaggacgggatgtagttggtcaatcacaaacaggtacaggtaaaacagcagcattttcactgccaattttagagcgattagatcctcaacaaaaagcagtacaagccatagttttaaccccaacccgcgaattagcaatccaagtccacgatgcaatggcgcaattcgttggtaacagtggattacggactttagcaatttacggtggtcaatcaattgaccgtcaaatgctacaactcaaacgcggcgtgcatatcgtcgtcggtacaccagggcgagtaattgacctactagaacggggtaacctgaagctagatcaagtcaagtggtttgttttggatgaagccgatgaaatgttaagcatgggctttatcgacgatgtggagaaaattctttctcaagcaccccaagaccgtcagacagctttattctcagctaccatgccaccatcaattcggatgttggtcaacaagtttttgcgatcgcccgtcacagtcaccgtcgagcagccaaaagccacccccaataaaatcaatcaggtagcttatctcatcccccgtcactggacaaaagccagagccttacagccaattctggaaatggaagatccagaaacagctttaatctttgtccgcaccagacgtacagccgccgaactcaccagccaactgcaagcagccggtcacagtgtagacgaatatcatggtgacctgtcccaacaagcacgggaacggttattaactcggttccgcagccgtcaagttcgctgggtagtagcaactgacattgctgcacggggtttagatgtcgatcaactatctcatgtgatcaactacgacctacccgatagcgtcgaaacctacgtccaccggatcggtcgtactggtcgtgctggtaaagaaggtacagcaattaccttagtacaaccctttgagcgtcgcaaacagcaaattttcgagcgtcatgtccgccaaaattggcaattgctttccattcccacacgggcgcaaatcgaagcacgccacatcctgaaattgcaagagcaagtcagagaagccttagctggtgagcgtttagcttccttcttacccattgtcagcgaattgatcgaaaaatatgatgctcaagcgatcgccgcagcagcgctacaaatcgcttacgatcaaactcgtcctgcttggttaagtacagatgccgagattcccgaagaagtcgcatctactcctaaacccaaactaggcggtaagcgtcgtgagttttccggtgacagaggtcgttccaattggaacaaatctgacaataacaacagcgacgacgaaagacgcggtactcccaaaccaaaattacggactggccgtcgtgaaacttccgctacacctagcaatcctaagttgggttcacctgctgctagagaatcagcttcttag

SEQ ID NO: 65273 - protein, 513 aa, Nostoc sp. PCC 7120
MNLSFPELGISQERVEHLEKLGFTAPTNIQAQAIPQLLSGRDVVGQSQTGTGKTAAFSLPILERLDPQQKAVQAIVLTPTRELAIQVHDAMAQFVGNSGLRTLAIYGGQSIDRQMLQLKRGVHIVVGTPGRVIDLLERGNLKLDQVKWFVLDEADEMLSMGFIDDVEKILSQAPQDRQTALFSATMPPSIRMLVNKFLRSPVTVTVEQPKATPNKINQVAYLIPRHWTKARALQPILEMEDPETALIFVRTRRTAAELTSQLQAAGHSVDEYHGDLSQQARERLLTRFRSRQVRWVVATDIAARGLDVDQLSHVINYDLPDSVETYVHRIGRTGRAGKEGTAITLVQPFERRKQQIFERHVRQNWQLLSIPTRAQIEARHILKLQEQVREALAGERLASFLPIVSELIEKYDAQAIAAAALQIAYDQTRPAWLSTDAEIPEEVASTPKPKLGGKRREFSGDRGRSNWNKSDNNNSDDERRGTPKPKLRTGRRETSATPSNPKLGSPAARESAS

SEQ ID NO: 65274 - DNA, 1623 bp, Ralstonia solanacearum GMI1000
  CDS (1)..(1623): transl_table=11
atgtcgttttccgaactcggcttgtcagacaagctggtacgtgccgttgccgaactcggctacgcagaacccaccccgattcaacgccaggccatccccgcgatcctcaagggcggtgacctgcttgccggtgcacagaccggcaccggcaagaccgccggcttcacattgccgctgctgcatcgcctgtccgctgtgcagcccaacaaggtgcagacgccccacggcatgcgctatcccatccgtgcgctggtgctcacacccacgcgcgagctcgccgcgcaggtggaagagagcgtgcgcgcctacggcaagtacctgccgctgaagtcgatggtgatgttcggcggcgtcggcatcaatccgcagatcgatgcgctcaagcgcggcgtcgatatcgtcgtggccacgccgggccgtctgctggaccacgtcggccagcgcaccatcgatctgtcgcacatcgaactgctggtgctggacgaagccgaccgcatgctggacatgggcttcatccacgacatccgcaagatcctcaacatcctgccgcccaagcgccagaacctgctgttctcggcgacgttctcggatgatattcgcgcgctggccgaccgcctgctggatcagcccgcgctgatcgaagtcgcgcgccgcaacaccactgccgagacggtcgaacagcgcatctacccggtcgaccgcgaacgcaagcgcgaactgctcgccaagctcgtgagcgacaacgactggcaccaggtgctggtcttcacgcgcaccaagcacggcgccaaccgcctggccgagcagctcacgcgcgacggcatcccggcgctggccatccacggcaacaagagccagtcggcgcgcacgcgggcgctgtcggagttcaaggccgggacgctgcgcgtgctggtcgccaccgacatcgccgcacgcggcatcgatatcgaccaactgccgcacgtggtcaacttcgacctgcccaacgtgccggaagactatgtgcaccgcatcggccgcaccggccgcgcgggcgcgcagggcgaggcgatctcgctggtgtgcgtggacgagcatggcctgctgcgcgacatcgagcgcctgatcaagcgcgaactgccgcgcaccgtcctggcgggcttcgagccggacccgaccatcgcgccggagccgattccgaacggccgcaacagtgcccgtgcgccgcgccagggtggcggtcgcagtcagccgccgcgccaggccgcgggcaacgccgcgccgcgcgagcctcgtgcgccgcgtgagccgcgccgcgagtcgggcgccagcggtcagggtcaagggcagggtcagggccaaggccgcaatggcggcggccgccagcgtcaggcacaaggccagcgcgatggccaagccgcgccgaagccgcgcggcggtcagggcagcggtaacggcaacggccaatcgcatgcgcgcggccagcgccagggcaacggccaaggcaacgggcagggcggccagcgccgtgcgtccaacacgcaagccgcgcagccgaccaaggtggcgcagcccgcacccaagcagccgttcaacggcctgtttgccaaggcagcggcactgctcggcggccgcaaggcctga

SEQ ID NO: 65275 - protein, 540 aa, Ralstonia solanacearum GMI1000
MSFSELGLSDKLVRAVAELGYAEPTPIQRQAIPAILKGGDLLAGAQTGTGKTAGFTLPLLHRLSAVQPNKVQTPHGMRYPIRALVLTPTRELAAQVEESVRAYGKYLPLKSMVMFGGVGINPQIDALKRGVDIVVATPGRLLDHVGQRTIDLSHIELLVLDEADRMLDMGFIHDIRKILNILPPKRQNLLFSATFSDDIRALADRLLDQPALIEVARRNTTAETVEQRIYPVDRERKRELLAKLVSDNDWHQVLVFTRTKHGANRLAEQLTRDGIPALAIHGNKSQSARTRALSEFKAGTLRVLVATDIAARGIDIDQLPHVVNFDLPNVPEDYVHRIGRTGRAGAQGEAISLVCVDEHGLLRDIERLIKRELPRTVLAGFEPDPTIAPEPIPNGRNSARAPRQGGGRSQPPRQAAGNAAPREPRAPREPRRESGASGQGQGQGQGQGRNGGGRQRQAQGQRDGQAAPKPRGGQGSGNGNGQSHARGQRQGNGQGNGQGGQRRASNTQAAQPTKVAQPAPKQPFNGLFAKAAALLGGRKA

SEQ ID NO: 65276 - DNA, 1512 bp, Agrobacterium tumefaciens str. C58
  CDS (1)..(1512): transl_table=11
ttgacaacattctctgatcttggcctgagccaaaaagttctttccgctattgcagatgccggctacacgacgccgacacccattcaggccggcgccattccgcccgcgctggaaaagcgtgatatctgcggtatcgcacagaccggcaccggcaaaaccgcgtccttcgttctgccgatgctgacgctgctcgaaaagggccgcgcacgcgccagaatgccgcgcacgctgatcctggagccgacccgcgagcttgcagcgcaggtggcggagaacttcgaaaaatacggcaagaatcacaagctgaacgttgccctgctcatcggtggtgtttccttcgaagaccaggatcgcaagctcgagcgtggcgccgatgtgctgatctgcacccccggccgccttctcgaccattgcgagcgtggcaagctgctgatgaccggcgtggaaattctcgtcatcgacgaagccgaccgcatgctcgacatgggcttcatccccgatatcgagcgtatcgccaaaatgatccccttcacccggcagacgctgttcttctcggccaccatgccgccggaaatccagaagctggctgaccggttcctgcagaacccgacgcggatcgaggtcgccaagccatcctctaccgcaaagacggtaacgcagcgtatcgtcgccgcgcataataaggactatgaaaagcgcgccgtgctgcgcgatctggtccgtgccgaagaagcggaactcaagaacgccatcatcttctgcaatcgcaagaaggatgtcgccgatctgttccgttcgctggatcgtcacggcttttccgttggcgcactgcatggtgacatggatcagcgctcgcgcacgacgatgctgcagaacttccgggatggacagctgacgctgctggtcgcttccgacgttgcagcccgcgggcttgatatccctgatgtcagccacgtcttcaacttcgatgttcccatccatgccgaagactatgtccaccgcatcggccgcaccggtcgtgccggccgttcgggcaaggccttcactctcgtcaccaagagcgacgcgaaatatctcgacgcgattgaaaagctgattgccgaaaagatcgaatggctgagcggcgatctgtcctccctccccgcgcccatggaaagctttgaaagcaattccggccgccggggcaccaaggaacgtagcggcagaggccgcgacagaaaccgtcgcgatgcacctgcatcgccggtggaaaacatcaatcaggacgcacaatccgtagtggatacggacatcgcggctcacggagaagacaaggtgaaggcagaacgcagaccggaaaagaccccgcgcaattccgagcgcaacagccgcaacctgaactcgctgcacgccaatgacgacaaccgcgaccgtcgccgtcattatcgtgaccacgacgatggcccgacaccggttggtttcggcgacgacattcccgccttcatgctgatcgtggctaacgccaaggcctga

SEQ ID NO: 65277 - protein, 503 aa, Agrobacterium tumefaciens str. C58
MTTFSDLGLSQKVLSAIADAGYTTPTPIQAGAIPPALEKRDICGIAQTGTGKTASFVLPMLTLLEKGRARARMPRTLILEPTRELAAQVAENFEKYGKNHKLNVALLIGGVSFEDQDRKLERGADVLICTPGRLLDHCERGKLLMTGVEILVIDEADRMLDMGFIPDIERIAKMIPFTRQTLFFSATMPPEIQKLADRFLQNPTRIEVAKPSSTAKTVTQRIVAAHNKDYEKRAVLRDLVRAEEAELKNAIIFCNRKKDVADLFRSLDRHGFSVGALHGDMDQRSRTTMLQNFRDGQLTLLVASDVAARGLDIPDVSHVFNFDVPIHAEDYVHRIGRTGRAGRSGKAFTLVTKSDAKYLDAIEKLIAEKIEWLSGDLSSLPAPMESFESNSGRRGTKERSGRGRDRNRRDAPASPVENINQDAQSVVDTDIAAHGEDKVKAERRPEKTPRNSERNSRNLNSLHANDDNRDRRRHYRDHDDGPTPVGFGDDIPAFMLIVANAKA

SEQ ID NO: 65278 - DNA, 1509 bp, Agrobacterium tumefaciens str. C58
  CDS (1)..(1509): transl_table=11
atgagtttgttttggcgccccgaaaggcaatatatattgaccagttttaacgaactcggcctctccgaaaagattgtggccagtgttacccagcttggctatacgacccctacccccattcaggcgaaagccattccgctgctgctcgaaggccgtgacctgatcggcctcgcacagaccggcaccggcaagacggccgctttcgggctgccgatcatcgaaatgctgatgaagcaggcggatcgtccggcaaatcgcaccacccgcacgctgatccttgcaccgacccgcgaactggtgaaccagatcggcgacaacctgcgttccttcgtgaagaagacgccgttgcgcatcaaccaggttgttggcggcgcgtcgatcaacaagcagcagcttcagctcgaaaagggcactgacatcctcgtggcgacccccggccgcctgctggacctcatcgcccgcaacgccatctcgctctcgaaggtgacgtatctcgttctcgacgaagccgaccagatgctcgatctcggcttcatccatgatctgcgcaagatttcccgcatggttccgcccaagcgccagacgctgctgttttcggccaccatgccgaaggccatttccgagcttgccagcaacttcctgaccgacccgatcaaggtcgaggtgacacctccgggcaaggctgccgacaaggtcgagcagtacgtgcatttcgtcgccggcaagaacgacaagaccgatcttttgaagaagtcgctcaacgagaacccggatggccgctccatcgtgttcctgcgcaccaagcacggcgcggagaagctttacaagcatctcgaacatatcggcttcaaggtcgcctccattcacggcaacaagagccagggccagcgcgagcgggcactgaagggcttcaaggacggtgagatcaaggttctggtcgcgaccgacgtcgctgcccgcggcatcgatatcccggccgtaacgcacgtcttcaattacgacctcccggaagtgccggatgcttacgttcaccgcatcggccgtaccgcccgcgccggccgcgacggcatcgccatcgctttctgcgcaccggacgaaacccgcctgctgcacgacatcgaaaagctgatgaagatcgatatcccggttgcgtctggcgaacgtccggctggtcttgcaagccccacacgccccaataacaaccgtggcggtcgcaacaacaatggcggccagccgcgcggcccgcgtgaaggtggacgtcacaacggcgaatcccgcccgtcccgcaaccacgcgccgcgtgatgcggacaacgatctggaagtaacctccgacttcaagcgcgttaagcaggctgaaggcgacgcaggccgcccggccggcccgcgcaagcagcgccgccccgcccgcaagcccggcggcagcggcgccaaccgccacgcacctgctggcggcaacggccaggaaaagcgtgcttccggcaacggcaatcgcggccgtaaccgctaa

SEQ ID NO: 65279 - protein, 502 aa, Agrobacterium tumefaciens str. C58
MSLFWRPERQYILTSFNELGLSEKIVASVTQLGYTTPTPIQAKAIPLLLEGRDLIGLAQTGTGKTAAFGLPIIEMLMKQADRPANRTTRTLILAPTRELVNQIGDNLRSFVKKTPLRINQVVGGASINKQQLQLEKGTDILVATPGRLLDLIARNAISLSKVTYLVLDEADQMLDLGFIHDLRKISRMVPPKRQTLLFSATMPKAISELASNFLTDPIKVEVTPPGKAADKVEQYVHFVAGKNDKTDLLKKSLNENPDGRSIVFLRTKHGAEKLYKHLEHIGFKVASIHGNKSQGQRERALKGFKDGEIKVLVATDVAARGIDIPAVTHVFNYDLPEVPDAYVHRIGRTARAGRDGIAIAFCAPDETRLLHDIEKLMKIDIPVASGERPAGLASPTRPNNNRGGRNNNGGQPRGPREGGRHNGESRPSRNHAPRDADNDLEVTSDFKRVKQAEGDAGRPAGPRKQRRPARKPGGSGANRHAPAGGNGQEKRASGNGNRGRNR

SEQ ID NO: 65280 - DNA, 1587 bp, Clostridium perfringens str. 13
  CDS (1)..(1587): transl_table=11
atgaacaatataaaatttgatgacttaggtcttaaggaaagcttacttaaagctataaaagatatgggatttgaagagccatctcaaatacaagctgaaagtattcctgtagccctagaaggacacgatataatcggtcaagctcaaactggtactggtaaaacagctgcttttggatgcgctataataaataatgctgatttttcaggaaagaagaaatctccaaaagcacttattttagcaccaactagagagcttgctatacaagttaatgaagaacttgtaagacttggaaaacatgaaaaactttctgttttaccaatatacggtggtcaaccaatagatagacaaattagagctttaaaaaatggtgttgatatagttgttggaacacctggtagagtattagatttaataagaagaaagagtttacctcttaacgatataggattcctagtgttagatgaagctgacgaaatgttaaacatgggattcattgatgatttagaagaaattgttaaatcattaaaaactgatagacaaacacttttattctctgctactatgcctccgcaaataaagaaattagctagaaattacatgaaagaagatactaagcacatcgcaataaagaaaagttctttaacagtttcaaaaatagaacaattttattttgaaataaaacatagagatagatttgaaacactttgtagagttttagattttgatgaaccaaatgctgcaataattttctgcaaaacaaaaaaaggtgttgacgaagttgtagaaaaaatgcaagctagaggatatatggttgaaggtatgcacggagatatgagccaaaaccatagacttcaaactttaagaaaattcaaagaaggaagcttagacttcttagttgctactgatgttgcagctagaggaatagacgttgaaagcgtaactcacgttataaactacgatctaccacaagacaatgaaagttatgtacatagaatcggaagaacaggtagagctaacagagagggagttgcttattctttagttactccaaaagaatatatgatgcttaagcaaatacaaaagcatactaagagtaaaataataagaaaagctgtacctacagttgatgaaatattccaaaataaacataataacataataaataatgtaaaatctactatagaagaagcttcagaagatttccaaaagtttattccaatagctactcaattagatgaagattatagcttagtagatgttgcagctgctcttttaaaaatagtatttgataaagaatcttcttttgattacacttcaaattctatagaagctcctgtaatggacgaaactagattatttatgtctgttggaagaagagatggtataactcctaaatctcttgttaacttcttaaaagagactgctagaataagccctaagcaagttggagatatagacataaaagaaaacttctgctttgctaacgttgatgctgatgcagtaaataatataatgaaaaaatcaatgggtaaaaaacttaacaaaagaactgttaatatagaagttgctaaaaaaagaaaataa

SEQ ID NO: 65281 - protein, 528 aa, Clostridium perfringens str. 13
MNNIKFDDLGLKESLLKAIKDMGFEEPSQIQAESIPVALEGHDIIGQAQTGTGKTAAFGCAIINNADFSGKKKSPKALILAPTRELAIQVNEELVRLGKHEKLSVLPIYGGQPIDRQIRALKNGVDIVVGTPGRVLDLIRRKSLPLNDIGFLVLDEADEMLNMGFIDDLEEIVKSLKTDRQTLLFSATMPPQIKKLARNYMKEDTKHIAIKKSSLTVSKIEQFYFEIKHRDRFETLCRVLDFDEPNAAIIFCKTKKGVDEVVEKMQARGYMVEGMHGDMSQNHRLQTLRKFKEGSLDFLVATDVAARGIDVESVTHVINYDLPQDNESYVHRIGRTGRANREGVAYSLVTPKEYMMLKQIQKHTKSKIIRKAVPTVDEIFQNKHNNIINNVKSTIEEASEDFQKFIPIATQLDEDYSLVDVAAALLKIVFDKESSFDYTSNSIEAPVMDETRLFMSVGRRDGITPKSLVNFLKETARISPKQVGDIDIKENFCFANVDADAVNNIMKKSMGKKLNKRTVNIEVAKKRK

SEQ ID NO: 65282 - DNA, 1857 bp, Arabidopsis thaliana
  CDS (1)..(1857)
atggctgctaccgctgctgcttctgttgtccgttacgcacctgaggatcatactcttcccaagccctggaaaggccttatcgatgatagaactggttacttgtacttttggaatcctgagaccaatgttactcagtacgagaaaccaaccccctctctacctcctaagttttctcccgccgtttctgttagctcttccgttcaggttcaacaaactgatgcctatgctcctcccaaggatgacgataagtactccagaggctctgaacgtgtgtccaggttttctgagggtggcaggagtggaccgccttattcgaacggtgctgctaatggagttggggattctgcttatggtgcagcatctaccagagttcctcttccttcatcagctccagcaagtgaactatcccctgaggcctattcccgccgtcatgaaattactgtcagtgggggccaagtaccaccacctctaatgtcctttgaagctactggttttccacctgagcttctgcgggaggtactcagtgcaggtttctctgctccaactccaattcaagctcagtcatggcccattgctatgcaaggtagggacatagtagccattgctaaaactggctcgggaaaaactttgggttacttgattcctggatttttgcatcttcaacgtatccgaaatgattcgcgaatgggcccaacaatcttggtattgtctccaacgagagagctggccacacaaatccaagaagaagctgttaaatttgggaggtcatcaagaatttcgtgtacgtgtttgtatggtggtgcaccaaagggccctcagttgagggatttagaaagaggagcagatatcgtggttgcaactcctgggagattgaatgatatccttgaaatgaggaggattagtctgcgtcagatatcttatcttgtgctagatgaggcagatagaatgttggacatgggttttgaacctcagataaggaagattgtgaaagaaattcccactaagcgtcaaacccttatgtacacagctacatggccaaagggagttaggaaaattgcagctgacttgcttgttaaccctgctcaagtcaacattggcaatgttgacgagcttgtggctaacaagtcaatcacacagcatattgaagtggtagcaccaatggagaaacagaggaggttagagcagatcttgcggtctcaggaaccaggctcaaaggtgataatattctgctcaaccaaaaggatgtgtgatcaactaacacgcaatctaacccgccaatttggagctgctgctatacatggagacaagtcccagcctgagagagacaatgttcttaatcaattccgcagtggcagaactccggttcttgtagcaaccgatgttgctgctcgtggtctggacgttaaggacatcagggcggtcgtaaactatgatttccccaatggagtggaagactatgttcatagaatcggaagaacaggaagagctggagcgactggtcaggcattcacattctttggtgatcaagattcgaaacatgcttcggatctgatcaagattttggaaggagcaaaccagcgagttcctcctcagatccgcgaaatggctacacgtggtggtgggggaatgaacaaattcagtcgttggggacctccttccggcggccgtggtcgtggtggcgactctggttatggtggcagaggtagctttgcttcccgtgacagaagcagcaatggatggggaagagagcgagaaaggagccgtagccctgagagattcaacagagctccaccaccgtcttccaccggatctcctcctcgcagcttccacgagacgatgatgatgaaacacagatga

SEQ ID NO: 65283 - protein, 618 aa, Arabidopsis thaliana
MAATAAASVVRYAPEDHTLPKPWKGLIDDRTGYLYFWNPETNVTQYEKPTPSLPPKFSPAVSVSSSVQVQQTDAYAPPKDDDKYSRGSERVSRFSEGGRSGPPYSNGAANGVGDSAYGAASTRVPLPSSAPASELSPEAYSRRHEITVSGGQVPPPLMSFEATGFPPELLREVLSAGFSAPTPIQAQSWPIAMQGRDIVAIAKTGSGKTLGYLIPGFLHLQRIRNDSRMGPTILVLSPTRELATQIQEEAVKFGRSSRISCTCLYGGAPKGPQLRDLERGADIVVATPGRLNDILEMRRISLRQISYLVLDEADRMLDMGFEPQIRKIVKEIPTKRQTLMYTATWPKGVRKIAADLLVNPAQVNIGNVDELVANKSITQHIEVVAPMEKQRRLEQILRSQEPGSKVIIFCSTKRMCDQLTRNLTRQFGAAAIHGDKSQPERDNVLNQFRSGRTPVLVATDVAARGLDVKDIRAVVNYDFPNGVEDYVHRIGRTGRAGATGQAFTFFGDQDSKHASDLIKILEGANQRVPPQIREMATRGGGGMNKFSRWGPPSGGRGRGGDSGYGGRGSFASRDRSSNGWGRERERSRSPERFNRAPPPSSTGSPPRSFHETMMMKHR

SEQ ID NO: 65284 - DNA, 2838 bp, Drosophila melanogaster
  CDS (1)..(2838)
atgttcgctggagcatatgcacccaacgctgggggcgttcagcagcacactggcggcggttactatggcaatggtgccgcagcaggcgctggcggtagcggcaacggggccccacgccacgagcgtcaatactatccgcgcggcaatttcggcggtgccgccgggggagctggcatcaatggagcagccactgcggctggaagcatgcactttggtcagccctatggcgtgatgacctatggcatccagaatggtctgggaatgggagccgccggttctggtggcggcaatccgtatcgccagcaaaacggtgttgcattcgccggtaatggacttggaggaggcgccggtggcggatccggaggatctggcggatatggaggacagcgtggcaaaaatccaacctacgcacagcgttatcagaagccgaacaacggcgccggagttgctggtggctaccaaagcaataactacaatgctgccgccttaggcatgctttccaaagaggagcgcgccgagatccaacgtgaaaaggccaaaaatcccggccgaaatttagtgaaacccaagtgggagaacctcgagcccttcctcaaagatttctacaacattcatccgaatacactggccaaatcagagcagcaggtggccgagatccggcgcgaactggaaatcaccgtgtctggcaatgaactaccacacccggtggtcagtttcgaggagagctcgctgcccgctcacgtcattgaagagatgaagcgccagggattcaccaagcccactgctatccaatcgcagggttggcccattgccttaagtggccgcgatttggtgggcattgcccagaccggttcaggcaagacgctggcatacatgctgcctgccatcgtgcacattggcaatcagccgccaataattcgcggcgaaggacccattgctctagtgttggcccccacccgggagctggcccagcagatccaatctgtcgtgcgagactatggacatctgtgcaagccagagattcgtcacacttgcatctttggcggctcatcgaaggtgccgcaggcacgcgatcttgaccgcggcgtcgaggtgatcatcgccacaccaggacgtctgattgatttccttgagaatcgcaacactaacttgcagagatgcacttatctggtgctggacgaagccgaccgcatgctggacatgggtttcgagccgcagatccgtaagatcattgaacagattcgtcccgaccgtcaggtggtcatgtggtccgcaacctggccaaaggaggtgcaggccctagccggagactttttaaacgattatatccaaatcaacattggttcgatgaacctatcggctaaccacaacattcgccagattgtcgagatctgtacagaaatagagaagccgcagcgcttagtatgcttgctcaatgagatttctcccatcaagaattcgggaaacaatgggaacaaaattatcgtctttgtggagaccaagatcaaggtggaggacatcttgcagatcattcgagccgagggttacaacgccacctcaattcacggcgacaagacccagaatgagcgtgattcagtgctaaaggatttccgtaacggcaagtccaacattctgattgccaccgatgtggcttcgcgcggcctcgatgtcgaggatctgcagtacgtaattaactatgattacccgaactcctcggagaactacgtgcaccgtatcgggcgcactggtcgctgccagcagctgggaactgcctacacatttttcacgcctgacaatgccaagcaggcccgtgaactgatctctgtgctcgaggaggctggccagacgccgtcgcaggctcttttggatcttgctcgttcgatgcccagctcgggcggctatcgcggcaacaagcgctggaacaacaacagcggcggggatcgcaacactggcggtaacaacggcatctatcagcagcgcaacaacaatccgctgaattaccaggccggtaacaactataacaacaatcgcagcggccccccaactggcagtagctaccagcagtatgccgctggcggcaatacctatctgcagaatggtgctggtggtggcgttaattggaatcgcatgaaccagatgggacaggatggaggagccggacaacagcagcgaaacggcaacacctatcgcccgagggctccgttcaacaatggcggaccacgcgccattatgggccatcagggtggcggcgtcggagctggtggagcagccggcgtaggcggtggcccacagcagctcatggcaccccagcagggcggacagtatatgccacaagcataccgcggacgtagccagtttgtgccgcagggagctggtgccggtggcatgccgccacgattccagcagtatcccaagcgggagtaccagcaacaaggagtaacccactacggtcagcaggctttgcagcatcagcaacaacagcagcaggctggccaacagaccaagccgcccaaggacgaaagcaacaagtatgttccgtcggctgcggtgaccagctcgctggtccaatacacgccagccaattcgccaacgattgcggccgtagctgctgccgctgcagcagccgccggacgagctgcagctgcagctgtggctccggctcccggtgccgcctatatgtacgatgcggccggtgttctcactaccgccgctgcgccgggcaccaatccatatgccaaccagttcagcatgccggccacctactatgccgcccaacatcaccagttcgcccaagccgtggcaggacccggaccagcacccggccaggccatcgagtag

SEQ ID NO: 65285 - protein, 945 aa, Drosophila melanogaster
MFAGAYAPNAGGVQQHTGGGYYGNGAAAGAGGSGNGAPRHERQYYPRGNFGGAAGGAGINGAATAAGSMHFGQPYGVMTYGIQNGLGMGAAGSGGGNPYRQQNGVAFAGNGLGGGAGGGSGGSGGYGGQRGKNPTYAQRYQKPNNGAGVAGGYQSNNYNAAALGMLSKEERAEIQREKAKNPGRNLVKPKWENLEPFLKDFYNIHPNTLAKSEQQVAEIRRELEITVSGNELPHPVVSFEESSLPAHVIEEMKRQGFTKPTAIQSQGWPIALSGRDLVGIAQTGSGKTLAYMLPAIVHIGNQPPIIRGEGPIALVLAPTRELAQQIQSVVRDYGHLCKPEIRHTCIFGGSSKVPQARDLDRGVEVIIATPGRLIDFLENRNTNLQRCTYLVLDEADRMLDMGFEPQIRKIIEQIRPDRQVVMWSATWPKEVQALAGDFLNDYIQINIGSMNLSANHNIRQIVEICTEIEKPQRLVCLLNEISPIKNSGNNGNKIIVFVETKIKVEDILQIIRAEGYNATSIHGDKTQNERDSVLKDFRNGKSNILIATDVASRGLDVEDLQYVINYDYPNSSENYVHRIGRTGRCQQLGTAYTFFTPDNAKQARELISVLEEAGQTPSQALLDLARSMPSSGGYRGNKRWNNNSGGDRNTGGNNGIYQQRNNNPLNYQAGNNYNNNRSGPPTGSSYQQYAAGGNTYLQNGAGGGVNWNRMNQMGQDGGAGQQQRNGNTYRPRAPFNNGGPRAIMGHQGGGVGAGGAAGVGGGPQQLMAPQQGGQYMPQAYRGRSQFVPQGAGAGGMPPRFQQYPKREYQQQGVTHYGQQALQHQQQQQQAGQQTKPPKDESNKYVPSAAVTSSLVQYTPANSPTIAAVAAAAAAAAGRAAAAAVAPAPGAAYMYDAAGVLTTAAAPGTNPYANQFSMPATYYAAQHHQFAQAVAGPGPAPGQAIE

SEQ ID NO: 65286 - DNA, 1512 bp, Encephalitozoon cuniculi GB-M1
  CDS (1)..(1512)
atgaattcggaactatccgcagcaggtgaaagcggcagaaatagatcaattggggtggacagaggaaggccatcgaaaagactactgtgggccaacaatgattctgggggacagagaagctctggatccaaaaattcgaaggacagaaatgggccgcccaagagctcgagctcgaacgacaagtctcagggagacaggaagcccttggcagggcagaaggttaaggaccccgattctgtggcggcagcagatggagacatcaaagtcgtgacgagcgagaaggtgaagacgttgagctccttcaaggacctctgttctcctttgttgataaaggcacttgggaaagaatattcggccccaacaatcatccagaagtactgcataccgtcgctggttgacgggcggaacctcatctgcagagcgccgacagggatgggaaagacgatgtgcttcctgatccccattatagaaaggcatcggcagatgaaaaagccgcaggcatgcattatctccccgacgagagagctgtgtgagcagatccgcgttgaggcctcaaaacttgtggccgggagcaggatcagggttgtgtcgatctatggcaagaagcaggatctgcccagctactctggagtcgacattgtggttgcaacgcctggaaggctgatagatctattgcacagaaaaaaggtggatctttctgagataagaatgtttgtcctcgacgaggcggacaagctgctggatatggggtttgagatacccatacgggagatccatgggtttgtccccaaaaacacacagacatgcctcttcagcgctacatactcgccaaagctgacgcggatgataaactactttcttcccgaagacaaggtctcgatcgagatatcctctgagactcttaagaacatcagacaggagattgtggaggtgcgaaacaagaagaagatgctcctgaacatcctgaaaggcccggacattaatctcaagggatcgtggaggatggaggtgcagcccgacaaggttcttgtgtttgttgagagaaagagcgagtgtggagaggtcgagaaagttctgaagaagagcgggattctgtgtgttagtctgcacggggacaaggagcaggcggacagagacgaagcactgaaggggtttcgcaacggaagattccctgtgatggttgcgacttctgtggcagcacgtggaatagacatcaaggatgtgaagctggtgataaactacgacatcccgaaggacataaaggagtatatccatcggattggacgtactgggcgcgaggggaagtctgggaagtcgatttcgttctacgacggaggcatgactgcagacctcaagaaagcactggtggaggttctaagggagtctaagaatgctgtccctccctttctaacgggtgctagtgacgaggacttcaatgctagatttgaaaggctgaaagtgactgctgacaaggagatgtcggacgatgaggaggttgggctatggggatga

SEQ ID NO: 65287 - protein, 503 aa, Encephalitozoon cuniculi GB-M1
MNSELSAAGESGRNRSIGVDRGRPSKRLLWANNDSGGQRSSGSKNSKDRNGPPKSSSSNDKSQGDRKPLAGQKVKDPDSVAAADGDIKVVTSEKVKTLSSFKDLCSPLLIKALGKEYSAPTIIQKYCIPSLVDGRNLICRAPTGMGKTMCFLIPIIERHRQMKKPQACIISPTRELCEQIRVEASKLVAGSRIRVVSIYGKKQDLPSYSGVDIVVATPGRLIDLLHRKKVDLSEIRMFVLDEADKLLDMGFEIPIREIHGFVPKNTQTCLFSATYSPKLTRMINYFLPEDKVSIEISSETLKNIRQEIVEVRNKKKMLLNILKGPDINLKGSWRMEVQPDKVLVFVERKSECGEVEKVLKKSGILCVSLHGDKEQADRDEALKGFRNGRFPVMVATSVAARGIDIKDVKLVINYDIPKDIKEYIHRIGRTGREGKSGKSISFYDGGMTADLKKALVEVLRESKNAVPPFLTGASDEDFNARFERLKVTADKEMSDDEEVGLWG

SEQ ID NO: 65288 - DNA, 1278 bp, Encephalitozoon cuniculi GB-M1
  CDS (1)..(1278)
atggcagagaaaactctaattcaggacgataaggaggttgcaagagagctgttcacgatgattaagcacgataccactgcgatagagacgggtcttgacggaagcattagtggtgtgggaacagacagaggccaaaagttgctggtggcggagcacttttctgatatgggattgtcagatgagcttttaaaagccatttataaccaagggtttgaaaagccaagcctgatccaaaagtcagcaattccccacattcttagaggacacaatgttgtggtgcaaagcaagagcggaactggaaaaacaatagcctacacatgtggtgttcttggaaacacaaaaatcggagagagaacgcaggtgatggtagtaacacctaccagagagctaagcactcaggtcacggaggtcatttccgggctggccgggcctcttggaataaaggtcttttcagcattgaagaacaagatcacagactccattggagaggaagttgtggttggaagccctggaacgattctgaagcttatggagcttggaaagctaaactataaaggagtaaagatgatagttcttgacgaggcggacatcctgcttgacaaagacatgatgggaacacagacatttagaatacttaagcttatttccggtgcacagatgattttcttctctgcaacattttccgagcaggtaaagcagacgatcgagttctatgctcccgatgcagtcaagatgtatgaggagcgcaacggaaagcctgacgagattaagttattctatatagaggcagaaggagaaaacaagagaagggccctgaaatcactgtatgaatatctttcgatcagccaaatgatcatatttgtaagcacaaaggcaacagttaactatctaagaaaaaagctcgaggacgatctgcattctgtatcatgtctgcatggagatctggagattgaagaaagagaaaaggcggttggtgacttcagaagctctaaaagtaagattcttctcacaacagatgttttttcaaggggaatggacatcccgcaggtcaatctgattgtgaattatgatctcccaatatataggggtgtcgcgtctacacaaacgtacatccacaggataggacggtctgggagatttggaaggacggggtttgtggtggactttgttcgagatgaggaactggaggcatatctgagcttccaaaaggagctgaagtttgcatcaaagaaatttacgatcagggcactggaagaggttgcagaggagcttggttag

SEQ ID NO: 65289 - protein, 425 aa, Encephalitozoon cuniculi GB-M1
MAEKTLIQDDKEVARELFTMIKHDTTAIETGLDGSISGVGTDRGQKLLVAEHFSDMGLSDELLKAIYNQGFEKPSLIQKSAIPHILRGHNVVVQSKSGTGKTIAYTCGVLGNTKIGERTQVMVVTPTRELSTQVTEVISGLAGPLGIKVFSALKNKITDSIGEEVVVGSPGTILKLMELGKLNYKGVKMIVLDEADILLDKDMMGTQTFRILKLISGAQMIFFSATFSEQVKQTIEFYAPDAVKMYEERNGKPDEIKLFYIEAEGENKRRALKSLYEYLSISQMIIFVSTKATVNYLRKKLEDDLHSVSCLHGDLEIEEREKAVGDFRSSKSKILLTTDVFSRGMDIPQVNLIVNYDLPIYRGVASTQTYIHRIGRSGRFGRTGFVVDFVRDEELEAYLSFQKELKFASKKFTIRALEEVAEELG

SEQ ID NO: 65290 - DNA, 1275 bp, Corynebacterium glutamicum ATCC 13032
  CDS (1)..(1275): transl_table=11
gtgtcttctgaaagccccagacctacgttcacagagctcggcgttgcggtggaaatcaccgacgcactcgaagccctcggcatcaaccgaactttcgcgatccaggagtacacacttcccatcgcgctcgacggccacgacttcatcggccaagcccgcaccggcatgggcaaaacctacggattcggtgtcccactcctcgatagagtcttcgactcagccgacgtcgcagaaaccgacggtaccccccgagccctcgtcatcgtgcccacccgagaactcgcagtccaagtcggcgacgacctccaacgcgcagcaaccaacctgccgctaaagatcttcaccttctacggcggcaccccctacgaagaacagatcgacgcactcaaagtcggcgtcgacgttgtcgtaggcacacccggacgattactcgacctgcacaaacgaggcgcgctatcgctcgacaaagtagcgatcttagtcctcgatgaagccgacgaaatgctcgatctgggctttctgcccgacatcgaaaaaatcctccgtgccctcacccaccagcatcaaaccatgctgttctctgccacgatgcccggcgcgatcctcacactcgcacgcagcttcctgaacaaaccagtgcacatccgagccgagacatcggacgcctcagcaacacacaaaaccaccagacaagtggtttttcaggcacacaaaatggacaaggaagccatcaccgcgaaaattctgcagtcgaaagatcgcggcaaaacgatcatcttcgcccgcacgaaacgcaccgcagcgcaagttgccgaagacctagcctccagaggattctccgtcggatcagtgcacggcgacatgggccaaccagcccgcgagaaatcactcaacgcattccgcacaggaaaaattgacatccttgtagccacagacgtagccgcccgaggcatcgatgttgatgacgtcacccacgtcatcaactaccaaacccccgacgatcctatgacctacgtccatcgtatcggacgcacgggacgcgcagggcacaacggaacagccgtcactcttgtcggctacgacgaaaccctcaaatggactgtcatcgacaacgaactcgaactcggccaaccaaacccaccacaatggttctccacctcaccagagctgcttgaaacactcgacatcccagaaggtgtcaccgaacgagtcggaccaccaaccaaagttctaggcggaacagccccacgaccaccacgccgcacccggaaataa

SEQ ID NO: 65291 - protein, 424 aa, Corynebacterium glutamicum ATCC 13032
MSSESPRPTFTELGVAVEITDALEALGINRTFAIQEYTLPIALDGHDFIGQARTGMGKTYGFGVPLLDRVFDSADVAETDGTPRALVIVPTRELAVQVGDDLQRAATNLPLKIFTFYGGTPYEEQIDALKVGVDVVVGTPGRLLDLHKRGALSLDKVAILVLDEADEMLDLGFLPDIEKILRALTHQHQTMLFSATMPGAILTLARSFLNKPVHIRAETSDASATHKTTRQVVFQAHKMDKEAITAKILQSKDRGKTIIFARTKRTAAQVAEDLASRGFSVGSVHGDMGQPAREKSLNAFRTGKIDILVATDVAARGIDVDDVTHVINYQTPDDPMTYVHRIGRTGRAGHNGTAVTLVGYDETLKWTVIDNELELGQPNPPQWFSTSPELLETLDIPEGVTERVGPPTKVLGGTAPRPPRRTRK

SEQ ID NO: 65292 - DNA, 2199 bp, Corynebacterium glutamicum ATCC 13032
  CDS (1)..(2199): transl_table=11
atgagtaataccgagaacgtcaacggcgacgtagaacagccgaataacgtcatttcgtcggaatctcaggaaaccccgcagggtgactcagcatcagctgacttcgctctcgaaaccccaaccaacactgttgaagatgcaccagcatctgagggtagcgaagagatcaccagggttgcggatacttctgaggacgccgactctgcagatgcagacaacgcgagcaatgtaatcaatgagaatgaggactcctcggaaggtgctaaccagccttcaaacgagtcatcctctacggaagccaaatccggcttcgatgcactcggactgccagagcgtgttcttgacgctgtgcgcaaggtgggttacgaaactccttccccaattcaggcacaaaccatcccaatcctcatggagggccaggatgttgttggtctagcacagaccggtaccggtaagactgcagctttcgcgctgccaatccttgcccgtattgacaagtccgtgcgcagcccacaggcacttgtgcttgcccctacccgtgagctggcacttcaggttgctgactccttccaatccttcgctgaccacgtcggtggcctgaacgttctgccaatctatggtggacaggcttacggcattcagctctctggcctgcgtcgtggcgctcacatcgtcgtgggtaccccaggccgaatcatcgatcacctcgaaaagggctccctggatatctccggactgcgcttcctcgtgctcgatgaagcagacgagatgctgaacatgggcttccaggaagatgtcgagcgcatcctcgaggacaccccagacgagaagcaggttgcactattctccgcaacgatgccaaacggcattcgtcgcctgtccaagcagtacctgaacaaccctgctgaaatcaccgttaagtccgagaccaggactaacaccaacatcacccagcgcttcctcaacgttgcacaccgcaacaagatggatgcactgacccgtattctcgaggtcaccgagtttgaagcaatgatcatgttcgtgcgcaccaagcacgaaactgaagaagttgctgaaaagctccgtgcacgcggattctccgcagcagccatcaacggcgacattgctcaggcacagcgtgagcgcaccgtcgaccagctgaaggacggccgcctggacatcctcgttgcaaccgacgttgcagcccgtggtcttgacgttgagcgcatctcccacgtgcttaacttcgacattccaaacgacaccgagtcctacgttcaccgcatcggccgcaccggccgtgcaggacgtaccggcgaggcaatcctgttcgtgaccccacgtgagcgtcgtatgcttcgctccatcgagcgcgcaaccaacgcaccactgcacgaaatggaactgccaaccgtcgatcaggtcaacgacttccgcaaggtcaagttcgctgactccatcaccaagtccctcgaggacaagcagatggacctgttccgcaccctggtcaaggaatactcccaggccaacgacgttcctctagaggacatcgcagcggcactggcaacccaggcacagtccggcgacttcctgctcaaggagctcccaccagagcgccgtgagcgcaacgaccgccgtcgtgaccgtgacttcgacgaccgtggtggacgtggacgcgaccgtgaccgtggcgaccgcggagatcgtggctcacgcttcgaccgcgacgacgagaacctggcaacctaccgcctcgcagtgggcaagcgccagcacatccgcccaggcgcaatcgttggtgcacttgccaacgaaggtggcctgaactccaaggacttcggccgcatcaccatcgcagccgaccacaccctggttgaactgccaaaggatctcccacagagcgttcttgacaacctgcgcgacacccgcatctccggccagctcatcaacatagaacgcgactccggtggacgcccaccacgccgcttcgagcgcgatgaccgtggcggacgcggcggattccgcggcgaccgtgatgaccgcggtggacgtggacgtgaccgtgacgatcgtggaagccgtggaggtttccgcggtggacgtgaccgtgatgatcgtggcggacgcggtggattccgcggacgcgacgaccgcggagaccgtggtggccgtggcggttaccgtggcggacgcgactaa

SEQ ID NO: 65293 - protein, 732 aa, Corynebacterium glutamicum ATCC 13032
MSNTENVNGDVEQPNNVISSESQETPQGDSASADFALETPTNTVEDAPASEGSEEITRVADTSEDADSADADNASNVINENEDSSEGANQPSNESSSTEAKSGFDALGLPERVLDAVRKVGYETPSPIQAQTIPILMEGQDVVGLAQTGTGKTAAFALPILARIDKSVRSPQALVLAPTRELALQVADSFQSFADHVGGLNVLPIYGGQAYGIQLSGLRRGAHIVVGTPGRIIDHLEKGSLDISGLRFLVLDEADEMLNMGFQEDVERILEDTPDEKQVALFSATMPNGIRRLSKQYLNNPAEITVKSETRTNTNITQRFLNVAHRNKMDALTRILEVTEFEAMIMFVRTKHETEEVAEKLRARGFSAAAINGDIAQAQRERTVDQLKDGRLDILVATDVAARGLDVERISHVLNFDIPNDTESYVHRIGRTGRAGRTGEAILFVTPRERRMLRSIERATNAPLHEMELPTVDQVNDFRKVKFADSITKSLEDKQMDLFRTLVKEYSQANDVPLEDIAAALATQAQSGDFLLKELPPERRERNDRRRDRDFDDRGGRGRDRDRGDRGDRGSRFDRDDENLATYRLAVGKRQHIRPGAIVGALANEGGLNSKDFGRITIAADHTLVELPKDLPQSVLDNLRDTRISGQLINIERDSGGRPPRRFERDDRGGRGGFRGDRDDRGGRGRDRDDRGSRGGFRGGRDRDDRGGRGGFRGRDDRGDRGGRGGYRGGRD

SEQ ID NO: 65294 - DNA, 1347 bp, Corynebacterium glutamicum ATCC 13032
  CDS (1)..(1347): transl_table=11
atgactacctttctagaactcaagcttcccgacgagattgtgcgcgaacttcgcagtcagggaatcaccgaggcattccccatccaagaagcagccatccccgatgcgctcgctggcaaagatgtcctcggccgtggacccaccggctctggtaaaaccttcacctttgggcttcccatgatcacccgactcgcgcgctcgggcgcctccaaaccaggtcgcccccgcgggcttgtcctggttcccacccgtgaactagcagctcaggtgcgtgaacgcctcgacgatcccgcccgcgttatgggtctgcgcgtcctcgaggtggtcggtggcgtcaacatcaaccgcaacatcaccgcacttgccacaccagtggatatcttggttgccacccctggccgcgcccaagatttgatcaaccagaagaagctctccctcgctgatgtttccgtgacagcgttggatgaagccgatcagatggccgacatgggctttttgccacaggtaaaaaagctcatggacctaacccctaaaaatggtcaacgtctgctgttttcggcaacgttggacggcgatgtgagcaaattggtcgatcgctacctccacaaccccatcacacactccaccgctcctgttcaggcagcagtggacaccatggaacactaccgacttctggttggcggacgcgatcctcgcaattccgttgtcttgagcatcgctgcacgtgaaggcaaaaccatcatgttcatgcgcaccaagcacggtgtggatcgacaggtgaagaaactgcgccgcgtgggtgtcaacgcagtgggtattcacggcgataaaggtcagtccacccgcaccaacgctttggctggtttcgccgatggatcaatccccgtcttggtggccaccgatatcgccgcccgtggcattgacgtggatgacgtctcgcttgttgtgcacgttgatcccccagcagaacacaaagcgtatttgcaccgcgctggtcgtactgcacgagccggaacttccggtacagttgtgactctagtaatggacgaacaaatcaaggaagtccgtgaacttttccaaaaagcaggcgtgacagccgctgaggtaaaagtcaacgaaaactcacctgaattggctaaaattactggtgcacgacgcccgtcaggcgttgctcttccagcacctggacagcagcagccaaagcgggaacaaaaaaatacccataatcgttctgattccagaggttccagccggaatccacgcaggcgcggacaaagcggatccagatcaacgggccgctccaacccgaggcgtcagacttcaaggaaagacggtcccaagagctaa

SEQ ID NO: 65295 - protein, 448 aa, Corynebacterium glutamicum ATCC 13032
MTTFLELKLPDEIVRELRSQGITEAFPIQEAAIPDALAGKDVLGRGPTGSGKTFTFGLPMITRLARSGASKPGRPRGLVLVPTRELAAQVRERLDDPARVMGLRVLEVVGGVNINRNITALATPVDILVATPGRAQDLINQKKLSLADVSVTALDEADQMADMGFLPQVKKLMDLTPKNGQRLLFSATLDGDVSKLVDRYLHNPITHSTAPVQAAVDTMEHYRLLVGGRDPRNSVVLSIAAREGKTIMFMRTKHGVDRQVKKLRRVGVNAVGIHGDKGQSTRTNALAGFADGSIPVLVATDIAARGIDVDDVSLVVHVDPPAEHKAYLHRAGRTARAGTSGTVVTLVMDEQIKEVRELFQKAGVTAAEVKVNENSPELAKITGARRPSGVALPAPGQQQPKREQKNTHNRSDSRGSSRNPRRRGQSGSRSTGRSNPRRQTSRKDGPKS

SEQ ID NO: 65296 - DNA, 1320 bp, Streptomyces coelicolor A3(2)
  CDS (1)..(1320): transl_table=11
atgaacgcgaagccgaccgcatccttcgacggcctcggactgccgcccgtgctggtggagacgatgacctccctcggggtgacacgtccgttcccgatccaggcggcgaccctgcccgaggcgctggccggtcgcgacgtcctcggccgggcgcggaccggctccggcaagacgctggccttcggtctcgccctgctcgccgggaccgccggccggcgcgcggagccgaagcggccgctggccctcgtcctggtgtcgacccgggaactggcccagcaggtgagcgacgcgctggcgccgtacgcgcgggcgctgggcgtgcgcctgaccacggtcgtcggcgggctgtcgatcaaccggcagacccaggcgctgcgcgacggcgccgaagtggtcgtcgccacgccgggccgcctgaccgacctggtctcccgccgggactgccacctgaaccaggtgcggatcacggtgctggacgaggcggaccagatgtgcgacctgggcttcctgccgcaggtctccggcatcctggaccaggtcccctccgacgggcagcggctcctgttctcggccaccctcgacggcgacgtcgaccaactggtgcgggaccacctccacgacccggtccccgtgtcggtcgacccggcgtcggcctcggtgagcacgatggagcaccacgtactgaccgtccacccggccgacaagtacgcgaccgcgaccgagatcgccgcccgcgacggccgggtgctgatgttcctcgacaccaaggccggggtcgaccggttcacccgggagctgcgggccgccggggtgtccgcgggcgccctgcacagcgggaagtcgcagccgcagcgcacccacaccctcgcccggttcgtcgagggcggggtcaccgtgctggtggccaccaacgtcgccgcgcggggcatccacgtcgacgacctcgacctcgtcgtcaacgtcgacccgccggccgacgccaaggactacctgcaccgcggcgggcgtacggcgcgggccggccgggcggggagcgtggtcacgctcgtcaccccggaccagcggcgcgaggtgaaccggatgatgtccgaggccgggatccggccgacggtgaccccggtgcggtcgggcgagcagaagctgacggacctcaccggcgcgaagcgcccgccggccgggcggggcaaggagagcggcaacgcccccttccgcgggatgggcacccgtcccgccggtgccgccaaggggtcccgcaaggccgtcgaggcgcgcagggccgcggaggcgcgcgcggcggcccgggtgcgcaagggccgctga

SEQ ID NO: 65297 - protein, 439 aa, Streptomyces coelicolor A3(2)
MNAKPTASFDGLGLPPVLVETMTSLGVTRPFPIQAATLPEALAGRDVLGRARTGSGKTLAFGLALLAGTAGRRAEPKRPLALVLVSTRELAQQVSDALAPYARALGVRLTTVVGGLSINRQTQALRDGAEVVVATPGRLTDLVSRRDCHLNQVRITVLDEADQMCDLGFLPQVSGILDQVPSDGQRLLFSATLDGDVDQLVRDHLHDPVPVSVDPASASVSTMEHHVLTVHPADKYATATEIAARDGRVLMFLDTKAGVDRFTRELRAAGVSAGALHSGKSQPQRTHTLARFVEGGVTVLVATNVAARGIHVDDLDLVVNVDPPADAKDYLHRGGRTARAGRAGSVVTLVTPDQRREVNRMMSEAGIRPTVTPVRSGEQKLTDLTGAKRPPAGRGKESGNAPFRGMGTRPAGAAKGSRKAVEARRAAEARAAARVRKGR

SEQ ID NO: 65298 - DNA, 1587 bp, Streptomyces coelicolor A3(2)
  CDS (1)..(1587): transl_table=11
atgaaccgcgcacgcaccaacgaccgccggcgcgccggcgacggcccccgtcgctcccgttcggccggccgcccccagaactccggccgccgcccggccgccgcgccccagggcggcgagttcgccctgcccaagaccatcaccccggcgctgcccgccgtcgagaccttcgccgaactggacctgccggcccgcatgctggccgcgctcggcgaccagggcgtgaccgagccgttcccgatccaggcggcgaccctgccgaactccctggccggacgcgacgtgctcggccgcggccgcaccggttccggcaagacgctcgccttcggcctggccctgctggcccgcacggcgggcaagcgcgccgagccgcggcgtccgctcgccctcgtcctcgtccccacccgtgagctggcccagcaggtcaccgacgcgctcaccccgtacgcccgcgccgtgggcctcaggtcggccaccgtggtcggcggcatgtccatcggccggcaggccggcgcgctgcgctccggcgcggaggtcgtcgtggcgacgcccggacggctcaaggacctcatcgaccgcggcgactgcgccctcggcgacgtcaccatcacggtcctggacgaggccgaccagatgaccgacatgggcttcatgccgcaggtcaccgccctgctcgaccaggtcgcggcggacgggcagcggatgctgttctcggccaccctggaccgcaacgtcgacaagctggtccgccgctacctgaccgacccggtggtccactccgtcgacccgtcggccggtgccgtcaccacgatggagcaccacgtcctgcacgtgcaggacgaggacaagcagcgcgcgaccatcgagatcgcggcgcgcgacggccgggtcatcatgttcctggacaccaagcaccgggtggaccggctggtgaagcacctgctgaagagcggggtgcgcgccgccggcctgcacggcggcaagtcccagccgcagcgcacccgcaccctcgcccagttcaaggacgggcaggtgacggcactggtggcgaccaacgtcgcggcccgcggcatccacgtcgacaacctcgacctggtcgtcaacgtggacccgcccggcgaccacaaggactacctgcaccggggcggccgcacggcccgggccggcgagtccggcagcgtcgtcaccctggtgacgccggaccagcggcgcgagatgacccggctgatgtccctggccgggatcaccccgcaggtcaccccggtccgctcgggcgaggcggagctggcgcgcatcaccggtgcgcagaccccctcgggcgttcccgtcgtcatcaccgcaccggtcgtggagcgcccccggcgcgccgccgccggcgcggggtccccgtcccgcggccgccgcggccgttccgcgcagggccgcagcggcgggcagggcaccggtacccaggcccgcaccggcgccgcgcagtcccgcaccgcgggccagtcccgcaccgccgcccaggggcggcccaccggcgagtccccgcgccgcaggccgcgccgccagtccaccggcggttcgaccggctcggcggcctga

SEQ ID NO: 65299 - protein, 528 aa, Streptomyces coelicolor A3(2)
MNRARTNDRRRAGDGPRRSRSAGRPQNSGRRPAAAPQGGEFALPKTITPALPAVETFAELDLPARMLAALGDQGVTEPFPIQAATLPNSLAGRDVLGRGRTGSGKTLAFGLALLARTAGKRAEPRRPLALVLVPTRELAQQVTDALTPYARAVGLRSATVVGGMSIGRQAGALRSGAEVVVATPGRLKDLIDRGDCALGDVTITVLDEADQMTDMGFMPQVTALLDQVAADGQRMLFSATLDRNVDKLVRRYLTDPVVHSVDPSAGAVTTMEHHVLHVQDEDKQRATIEIAARDGRVIMFLDTKHRVDRLVKHLLKSGVRAAGLHGGKSQPQRTRTLAQFKDGQVTALVATNVAARGIHVDNLDLVVNVDPPGDHKDYLHRGGRTARAGESGSVVTLVTPDQRREMTRLMSLAGITPQVTPVRSGEAELARITGAQTPSGVPVVITAPVVERPRRAAAGAGSPSRGRRGRSAQGRSGGQGTGTQARTGAAQSRTAGQSRTAAQGRPTGESPRRRPRRQSTGGSTGSAA

SEQ ID NO: 65300 - DNA, 1497 bp, Streptomyces coelicolor A3(2)
  CDS (1)..(1497): transl_table=11
atgaaccgcacacgcacgaacgaccgcttcgctcgcacccgtcatggcggtgccgactccggaaagggcggcagccgcttcggttcgccggcgccgcgccggccggccggacccagccgctccggcggttacggccgccggcccggcgccgttcagggggagttcgccctcccccggacgatcacccccgcgcttcccgctgcggagggcttcgccgatctcgacatgcccggggaactgctggccgcgctcggccaacaaggggtgaccgtgccgttcccgatccaggccgcgaccctgccgaactccctcgccggccgcgacatcatgggccgcgggcgcaccggttccggaaagaccctcgccttcggcctggctctgctggcccgtacggccggccggcgggccgagcctcggcagccgctggggctggtcctcgtaccgacacgtgagctggcgcagcaggtcaccgacgcgctcaccccgtacgcccgctctgtgaagctgcggctggccacggtggtgggcgggatgtcgatcggcaggcaggcgtcggcgctgcgtggtggcgccgaggtcgtcgtcgccactccgggacgtctcaaggacctcatcgaccgcggcgactgccggttgaaccaggtctccgtcaccgtcctcgacgaggccgaccagatggccgatatgggcttcatgccgcaggtcaccgcactgctcgaccaggtgcgtcccgaaggccagcgcatgctgttctccgccaccctcgaccgcaacgtcgacctgctcgtacgccgctacctcagcgaccccgtcgtgcactccgtcgacccctcggccggcgccgtcaccacgatggagcaccacgtactccatgtccacggcgccgacaagcacgcggccaccaccgagatcgccgcacgcgacggccgcgtgatcatgttcctcgacaccaagcacgccgtcgacagactgacccgggacctgctcaacagcggggtacgggccgccgccctgcacggcggcaagtcccagccgcagcgcacccgcactctggcgcagttcaagaccgggcacgtcaccgtgctggtggcgaccaacgtcgcggcacgcggaatccacgtcgacaacctcgacctcgtcgtcaacgtcgacccgccgaccgaccacaaggactacctccaccggggcggccgcacggcccgcgccggcgagtccggcagcgtcgtcacgctcgtcaccccgaaccagcgccgcggcatggtccgtctcatgtcggaagccgggatccggccgcagaccacccaggtcagcccgggcgacgaggccctcagccggatcaccggagcccaggccccgaccggcatcccggtcgtcatcaccgccccggcgactgaacgccccaagaagcgcggcgccacctcacgcggccgacgccgccccgcctcggcgacgcggcgtacccccgcactcaagtccacggctggcgcggccgcctag

SEQ ID NO: 65301 - protein, 498 aa, Streptomyces coelicolor A3(2)
MNRTRTNDRFARTRHGGADSGKGGSRFGSPAPRRPAGPSRSGGYGRRPGAVQGEFALPRTITPALPAAEGFADLDMPGELLAALGQQGVTVPFPIQAATLPNSLAGRDIMGRGRTGSGKTLAFGLALLARTAGRRAEPRQPLGLVLVPTRELAQQVTDALTPYARSVKLRLATVVGGMSIGRQASALRGGAEVVVATPGRLKDLIDRGDCRLNQVSVTVLDEADQMADMGFMPQVTALLDQVRPEGQRMLFSATLDRNVDLLVRRYLSDPVVHSVDPSAGAVTTMEHHVLHVHGADKHAATTEIAARDGRVIMFLDTKHAVDRLTRDLLNSGVRAAALHGGKSQPQRTRTLAQFKTGHVTVLVATNVAARGIHVDNLDLVVNVDPPTDHKDYLHRGGRTARAGESGSVVTLVTPNQRRGMVRLMSEAGIRPQTTQVSPGDEALSRITGAQAPTGIPVVITAPATERPKKRGATSRGRRRPASATRRTPALKSTAGAAA

SEQ ID NO: 65302 - DNA, 1899 bp, Xanthomonas axonopodis pv. citri str. 306
  CDS (1)..(1899): transl_table=11
atgacccaagaatcttccgcgccgctgctgtttgcagatctcggcctctcggacgctgtgatgaaggccgttgccaatgtgggctacgagtcgccgtcgccgatccaggccgccaccatccccgcgctactggccggccgcgacgtgctcggccaggcccagaccggcaccggcaagaccgccgcgttcgcgctgccggtgctgtccaacgccgatctcaaccaggtcaagccgcaggcattggtactggccccgacccgcgagctggccatccaggtcgccgaggcgttccagaaatatgccgaagccattcccggcttccgcgtgctgccggtctatggcggccagccctatgcccagcagctgagcgcgctcaagcgcggcgtgcatgtggtggtcggtaccccgggccgggtgatcgatcacctggaccgcggcaccctggatctgtcccagctcaagacgctggtgctggacgaagccgacgaaatgctgcgcatgggcttcatcgacgatgtcgaagcggtgttgaagaaactgccggagcagcgccaggtggcgttgttctcggccaccatgccgccggccatccgccgcatcgcgcagacctatctgaaggacccggccgaagtcaccatcgcggccaagaccaccacctcggccaacatccgccagcgctactggtgggtgagcgggctgcacaagctggatgcgttgacccgcattctcgaggtcgagccgttcgacggcatgatcatcttcgcgcgcaccaaggcggccaccgaagagctggcgcagaagctgcaggcgcgcggcatggcggcagcggccatcaacggcgacatgcagcaggccgcacgcgagaagaccatcgcccagctcaaggacggcaagctggacatcctggtcgccaccgacgtggccgcacgcggtctggacgtggagcgcatcagccacgtgctgaactacgacattccctacgacaccgaaagctacgtgcaccgcatcggtcgcaccggccgtgccgggcgtaacggcgacgcgatcctgttcgtgacgccgcgcgagaagggcatgctgcgctccatcgaacgcgccacccgtcagccgatcgaagagatgcagctgccgagcgtggacgcggtcaacgacacccgcgtcgcgcgcttcatgacccgcatcaccgagaccctggccggtggtcagatcgacatgtatcgcgatctgctgcagcgctacgaggccgaaaacaacgtgccggcgatcgatatcgctgccgcgctggccaagctgctgcagggcgatgccccgttcctgctgaccccgccggtgcgcggtgtgcgcgaagagtccgctccgcgccagcgcaacgagcgagccgaccggggcgagcgcccgcgtttcgaacccacgttcgaacgtggcccgcgtgccgacggcgaacgcgctgcgcgtccgccgcgcggcgacgataccggcgagcgtccgcgccgcgagccggccccacgcggagagcccgagttcggcatggagagctaccgcatcgaagtgggccacagccacggcgtgaagccggccaacatcgttggcgcgatcgccaacgaagccgggctggaaagccgttatatcggtcgtatcgacatccaggacgattattcgatcctggatctgccggccgacatgccgcgcgaactgctcgcccacctgaagaaggtctgggtgtccggtcagcagctcaacatgcgcaagctggaagacggcgaagcggccgctgcggcgtccaagccgcgcttcccgcgtggcggcaagccgtccggtcgtccgaacggcccgggccgtccgatggaccgcgccggcgcaccgcaccgcaagggtccgccaaagccgcgcggcgagtag

SEQ ID NO: 65303 - protein, 632 aa, Xanthomonas axonopodis pv. citri str. 306
MTQESSAPLLFADLGLSDAVMKAVANVGYESPSPIQAATIPALLAGRDVLGQAQTGTGKTAAFALPVLSNADLNQVKPQALVLAPTRELAIQVAEAFQKYAEAIPGFRVLPVYGGQPYAQQLSALKRGVHVVVGTPGRVIDHLDRGTLDLSQLKTLVLDEADEMLRMGFIDDVEAVLKKLPEQRQVALFSATMPPAIRRIAQTYLKDPAEVTIAAKTTTSANIRQRYWWVSGLHKLDALTRILEVEPFDGMIIFARTKAATEELAQKLQARGMAAAAINGDMQQAAREKTIAQLKDGKLDILVATDVAARGLDVERISHVLNYDIPYDTESYVHRIGRTGRAGRNGDAILFVTPREKGMLRSIERATRQPIEEMQLPSVDAVNDTRVARFMTRITETLAGGQIDMYRDLLQRYEAENNVPAIDIAAALAKLLQGDAPFLLTPPVRGVREESAPRQRNERADRGERPRFEPTFERGPRADGERAARPPRGDDTGERPRREPAPRGEPEFGMESYRIEVGHSHGVKPANIVGAIANEAGLESRYIGRIDIQDDYSILDLPADMPRELLAHLKKVWVSGQQLNMRKLEDGEAAAAASKPRFPRGGKPSGRPNGPGRPMDRAGAPHRKGPPKPRGE

SEQ ID NO: 65304 - DNA, 1785 bp, Drosophila melanogaster
  CDS (1)..(1785)
atggatgagcacgatatatttaaattgattacggcgggcgttcgcttcaccaagaagtcaaagaaggaaccttcatcaaaacaacaactgcagccactgccggaggtttctaaacatgaggagccggtgaaaagcgaagagtcagataaagatgatgaagatatcacagagttccgtctcttggacggggattccagcaatcaaccgaaacgcaagaagccgaagaaagagaagacactatcccccaaggaattagagattcaaaaggcagccgaagaggcaaacgagacgcggaagcagtatggcattagggtgttgggcaagaatgttcctccaccggtggacagtttcggaacattgaccagggactttaagatgctgcctcgcctgcagcagaacctactgtctcgcaactttgaccaccccacgccgatccagatgcaggccctgcccgtactcctccagcgacgggcgctaatggcctgtgcacccactggatccggcaaaacgctggccttcctcacacccatcataaatggcctgagggcgcacaagacaactggactgagagctctggtccttgctcccactcgcgagttggcccagcaaatctaccgcgagtgtgcggaactcacccgtgaaacgggtttgcgcacccacttcataagcaaggtgagcgaggccaagcagaaacatggtgcggagtgcaagcaacggtacgacatcctggtctccacgccaaaccgcgtgaggttcctcctgcagcaggagccaccactgctggatttgtcccacgtcgagtggttcgtgctggacgaagcagatcgcctgatggaggaagggcaaaacaacttcaaagagcagttagacgacatatatgccgcgtgctcaaatccaaccaagtgcgtggccttctttagtgcgacctacactgtgccagtggctaaatgggctctacgtcacctcaaaaacctagtgcgcataaccattggagtgcaaaatagcgccacggaaacggttcaacaggagctgctgttcgtcggatccgagggcggtaagctggtggccatacgagaccttgtgcgccagggtctccagccgccggtgcttgttttcgttcaaagcaaggaacgtgccaagcagctgttcgaggagctgctctacgacggcatcaacgtggacgtgatccatgccgaaaggagtcaacatcagcgcgacaactgcgtgaaagctttccgagagggcagcatttgggtgctcatctgtacggagctcatgggccgcggcattgacttcaagggtgtcaatctggtgatcaactacgactttccgcccactaccatttcgtacattcatcggatcggcagaacgggacgtgctggacgaccgggacgcgcaattacgtttttcacacaagaggacacgtccaatttgagaggcatcgcgcttataataaaaaactctgggggaaccgttccggaatatatgttgcaaatgaaaaaggttcgcaaatcggaggccaagatgcgagccaagaaaccgttggatcgcgaggacatttcgaccaagatacgaccggagacgaaaggcgacgagaagcacaaatccaccaaattgaaaaaagttgaaagaaccgaaaaaatcttaaaaaatcgaaagggttatgaaaaggacttaaattcaaagcagaagaagctaggcaatattaaaacagaacttaagccagccggcaaaaggaaaggaaatgtagagaaaaaaacaaaaaataaaaataatcaaacttga

SEQ ID NO: 65305 - protein, 594 aa, Drosophila melanogaster
MDEHDIFKLITAGVRFTKKSKKEPSSKQQLQPLPEVSKHEEPVKSEESDKDDEDITEFRLLDGDSSNQPKRKKPKKEKTLSPKELEIQKAAEEANETRKQYGIRVLGKNVPPPVDSFGTLTRDFKMLPRLQQNLLSRNFDHPTPIQMQALPVLLQRRALMACAPTGSGKTLAFLTPIINGLRAHKTTGLRALVLAPTRELAQQIYRECAELTRETGLRTHFISKVSEAKQKHGAECKQRYDILVSTPNRVRFLLQQEPPLLDLSHVEWFVLDEADRLMEEGQNNFKEQLDDIYAACSNPTKCVAFFSATYTVPVAKWALRHLKNLVRITIGVQNSATETVQQELLFVGSEGGKLVAIRDLVRQGLQPPVLVFVQSKERAKQLFEELLYDGINVDVIHAERSQHQRDNCVKAFREGSIWVLICTELMGRGIDFKGVNLVINYDFPPTTISYIHRIGRTGRAGRPGRAITFFTQEDTSNLRGIALIIKNSGGTVPEYMLQMKKVRKSEAKMRAKKPLDREDISTKIRPETKGDEKHKSTKLKKVERTEKILKNRKGYEKDLNSKQKKLGNIKTELKPAGKRKGNVEKKTKNKNNQT

SEQ ID NO: 65306 - DNA, 1200 bp, Drosophila melanogaster
  CDS (1)..(1200)
atggcgcgcaagaatgcccaggcggaggacctctccaacgtggagttcgagacgagcgaggatgtggaggtgatacccacattcaacgccatgaatctaaaggaggagctgctacgcggcatctacgcgtacggcttcgagaaaccctcggccattcagcaaaggagcattacgcctatcgtcaagggacgggatgtgattgcccaggcacaatcaggcacgggcaaaaccgccaccttctccatctccatcctgcagagcctggacaccacgctgcgggagacgcaggttctgtgcctgtcgcccactcgcgagttggctgtgcaaatccagaaagtcattcttgccctcggcgacatgatgaatgtccagtgccatgtgtgcatcggtggcaccaacctgggcgaggatatccgcaaattggactacggtcaacacattgtgagcggcactccaggacgagtcttcgacatgatcaagcgacgagtgctgcgaacaagagccatcaagatgctagtgctggacgaagctgacgagatgcttaataagggtttcaaggaacagatatacgatgtgtatcgctacttgccaccagccacccaggtggtgctcatctcagctaccttgccccacgagatactcgagatgacctccaaatttatgacagatccgattcgcatcttggtcaagcgtgacgaattgacactggaaggcatcaagcagttcttcgtcgccgtggagcgcgaggaatggaaattcgataccctgtgcgatctgtacgatactctgaccattacccaggccgtcatcttctgcaacacgaaacgcaaggtggactggctgacggagaagatgcgcgaggctaactttacagtcagctcgatgcacggcgatatgccgcaaaaggagcgtgacgagatcatgaaggagttccgagccggccagtcgcgagtgctcatcaccaccgatgtgtgggctcggggtatcgatgtacagcaggtgtcgctggtcatcaactacgatttgcccaacaaccgtgagctgtacatccatcgcatcggtcgttctggtcgtttcggacgcaaaggtgttgcaattaactttgtcaaatcggacgatatccgcatcctgcgcgacattgagcagtactactccacacaaatcgacgagatgcccatgaacgtggctgacttgatctaa

SEQ ID NO: 65307 - protein, 399 aa, Drosophila melanogaster
MARKNAQAEDLSNVEFETSEDVEVIPTFNAMNLKEELLRGIYAYGFEKPSAIQQRSITPIVKGRDVIAQAQSGTGKTATFSISILQSLDTTLRETQVLCLSPTRELAVQIQKVILALGDMMNVQCHVCIGGTNLGEDIRKLDYGQHIVSGTPGRVFDMIKRRVLRTRAIKMLVLDEADEMLNKGFKEQIYDVYRYLPPATQVVLISATLPHEILEMTSKFMTDPIRILVKRDELTLEGIKQFFVAVEREEWKFDTLCDLYDTLTITQAVIFCNTKRKVDWLTEKMREANFTVSSMHGDMPQKERDEIMKEFRAGQSRVLITTDVWARGIDVQQVSLVINYDLPNNRELYIHRIGRSGRFGRKGVAINFVKSDDIRILRDIEQYYSTQIDEMPMNVADLI

SEQ ID NO: 65308 - DNA, 2244 bp, Arabidopsis thaliana
  CDS (1)..(2244)
atggcgtcgacggtaggagttccatcactataccaagttcctcaccttgaaatctccaaacccaattccaaaaagaggtctaattgtttatctttatctctcgataagcctttcttcactcccttatctcttgttcgtagaactcgtcgtatccattcctcttctcttcttgttccttctgctgttgctactcctaattctgttctcagtgaagaagctttcaaaagtcttggtctttctgaccatgacgaatatgaccttgacggcgacaacaacaacgttgaagctgatgatggtgaagaactcgctatctctaaacttagtttgcctcaacgtcttgaagagtctcttgagaaacgtggtatcactcatctcttccccattcagagagctgtgttggtacctgcactgcaaggaagagatattatagctcgtgcaaagacaggaactggaaagactttggcttttggtattcctatcattaaacgtctcactgaagaagctggagactacactgctttcaggaggtctggtcgtcttcctaagttccttgtccttgcgccgacccgagagctggctaagcaagtggagaaggagattaaggagtctgcaccttatttgagcactgtttgtgtgtatgggggagtttcttataccattcagcagagtgctttaactcgtggtgttgatgttgttgttggaactcctggaagaatcattgatttgattgaaggaaggagtcttaaattgggagaagttgagtatttggtacttgatgaagctgatcagatgcttgctgttgggtttgaggaggccgtggaatcgattcttgagaatcttccaactaagcgacaaagtatgcttttctcagcaactatgcctacttgggttaagaagttggcgaggaagtaccttgacaatcccttgaatattgatctggttggagaccaagatgagaagctcgcagagggtatcaaactttatgcaatcgcaaccacatcgacatcaaaacgcactattctaagcgaccttattacagtgtatgcgaagggtggcaagaccattgtttttacccaaactaaaagagatgcagacgaagtttctcttgcattgtcaaacagtatagctaccgaagcacttcatggagatatatctcagcatcaaagagagagaacactcaatgctttccgtcaagggaaattcaccgtattagttgccactgatgttgcatctcgtggacttgacatcccgaacgtagatctagttatccactatgaacttcctaatgacccagaaacttttgtgcaccgttctggtcgtactgggcgtgcagggaaagaaggctctgccattctcatgcacaccagcagccaaaagagaacagtgaggtctctggagcgtgacgtaggctgccattttgaattcattagcccaccaactgttggagacttgttggaatcgtcagcagaccaagtggtggccactctaaatggtgttcaccctgactccataaagtttttctcagcaactgctcaaaaactatatgaggagaaaggaacagatgctttagctgcagctctagctcacctgagtggtttctctcagccgccttcatcaagatctctcctcagccatgagaagggatgggtgactttgcaattgatccgagatccaacgaacgctagaggctttctgtctgcgaggtctgttactggttttctttccgatctttaccgtacagctgcagatgaagttggaaaaatcttcttgatcgccgatgacaggatccaaggagctgtatttgatctaccagaggagatcgcgaaagagctcctagagaaagatgtccccgaaggcaacagtttatccatgataacaaagttacctccacttcaagatgacggaccatctagtgataactacggacggttctctagcagagacaggatgcctagaggaggaggaggttctagagggtcaagaggcggtagaggaggatcatcacgaggccgtgatagttggggaggtgatgatgacagaggtagtagaaggagcagtggtggaggaagcagctggtcccgaggtggtagtagttccagaggaagttctgatgattggttgatcggtggcagaagttcatcaagcagcagagctccttcgcgggagagttttggaggttcatgcttcatttgtgggaaatctggacacagggcaacagattgtcctgataagagaggattttag

SEQ ID NO: 65309 - protein, 747 aa, Arabidopsis thaliana
MASTVGVPSLYQVPHLEISKPNSKKRSNCLSLSLDKPFFTPLSLVRRTRRIHSSSLLVPSAVATPNSVLSEEAFKSLGLSDHDEYDLDGDNNNVEADDGEELAISKLSLPQRLEESLEKRGITHLFPIQRAVLVPALQGRDIIARAKTGTGKTLAFGIPIIKRLTEEAGDYTAFRRSGRLPKFLVLAPTRELAKQVEKEIKESAPYLSTVCVYGGVSYTIQQSALTRGVDVVVGTPGRIIDLIEGRSLKLGEVEYLVLDEADQMLAVGFEEAVESILENLPTKRQSMLFSATMPTWVKKLARKYLDNPLNIDLVGDQDEKLAEGIKLYAIATTSTSKRTILSDLITVYAKGGKTIVFTQTKRDADEVSLALSNSIATEALHGDISQHQRERTLNAFRQGKFTVLVATDVASRGLDIPNVDLVIHYELPNDPETFVHRSGRTGRAGKEGSAILMHTSSQKRTVRSLERDVGCHFEFISPPTVGDLLESSADQVVATLNGVHPDSIKFFSATAQKLYEEKGTDALAAALAHLSGFSQPPSSRSLLSHEKGWVTLQLIRDPTNARGFLSARSVTGFLSDLYRTAADEVGKIFLIADDRIQGAVFDLPEEIAKELLEKDVPEGNSLSMITKLPPLQDDGPSSDNYGRFSSRDRMPRGGGGSRGSRGGRGGSSRGRDSWGGDDDRGSRRSSGGGSSWSRGGSSSRGSSDDWLIGGRSSSSSRAPSRESFGGSCFICGKSGHRATDCPDKRGF

SEQ ID NO: 65310 - DNA, 1488 bp, Oceanobacillus iheyensis HTE831
  CDS (1)..(1488): transl_table=11
gtgacaaaatttaacgaactaggtgtttccgccccaataatgaaagctttagaaaaaatggggtttgaggaagctacaccaattcaagcggaaactattccacatgcactagaaggccatgatgttattggccaagcacagacaggaacaggtaaaacagcagcattcggtattccgttaatcaataaaattaatgcaaaactaagaaaggtgcaaggtttaattgttgcaccaacacgtgaacttgctattcaagttgcagaagaaataaatcgtttagcgaaattcaagagtgttagagctcttgcaatatatggtggccaaccaatggaccgacagatccgagcactgaaagatggtccacagatcgtagtggctaccccgggtagattattagatcatatgcgcagaaaaacgattcgtattgatcaagtgcatacggccgttctagatgaagctgatgaaatgctaaacatgggctttattgatgatatacgtgagattctaaaagggattccagaagaaagacaaactctacttttctctgcgacaatgccaaaagaaatccgtaatatcgctactacgcttatgaaggaaccaaaagaagttaaagttaaagcgaaagaaatgaccgtagagaatattgatcagtatttcattgaaattcctgagaagtataaatttgatacactaaacaatcatttggatattaattcaccagaacttgcgattatttttgctcgtacgaagaagcgtgtggatgaagtagctgaaggattacaagcgagaggatatcgctcagaaggaatccacggtgatttaacacaaggaaaacgtatgtctgtactgaagaaatttaagcaaggtcgtgtagatgtattagtcgctacagatgtggcagcacgtggattagatatttctggtgtaactcatgtttataactttgatataccacaagatccagaaagttatgtacatcgtattggacgtacaggacgtgctggaaaaatgggtgaagcaatttctttcattaccccgagagaaatggctcatttaaatctaattgaacaaacgacaaagagtaaaatgaagcgtatggcaccaccgacaaatcaagatgctcgtcgtggccaacagcaagtaactattgaaaagctaaagaatgcaattaatgagaaagacttaaaagtatacgaagatgcagcgaaagaattattggatgagtatgattcaattactgttgtttcagctgctatcagcatgatgacaaaagagcgtcgtgatactccagttcgtatttcttctgtcgcaccaatcagcgtgaagaaagcgaaaaaccaaaaagataataaaactaaaggacgttctaataacaaacgtttctatggtggtcgtggacaaggtggacgaaaccaaggaggacgcggtcaaggcggtcgcaaccgaaaaggaaaaggtaactaccaacgacgtaatagagataattaa

SEQ ID NO: 65311 - protein, 495 aa, Oceanobacillus iheyensis HTE831
MTKFNELGVSAPIMKALEKMGFEEATPIQAETIPHALEGHDVIGQAQTGTGKTAAFGIPLINKINAKLRKVQGLIVAPTRELAIQVAEEINRLAKFKSVRALAIYGGQPMDRQIRALKDGPQIVVATPGRLLDHMRRKTIRIDQVHTAVLDEADEMLNMGFIDDIREILKGIPEERQTLLFSATMPKEIRNIATTLMKEPKEVKVKAKEMTVENIDQYFIEIPEKYKFDTLNNHLDINSPELAIIFARTKKRVDEVAEGLQARGYRSEGIHGDLTQGKRMSVLKKFKQGRVDVLVATDVAARGLDISGVTHVYNFDIPQDPESYVHRIGRTGRAGKMGEAISFITPREMAHLNLIEQTTKSKMKRMAPPTNQDARRGQQQVTIEKLKNAINEKDLKVYEDAAKELLDEYDSITVVSAAISMMTKERRDTPVRISSVAPISVKKAKNQKDNKTKGRSNNKRFYGGRGQGGRNQGGRGQGGRNRKGKGNYQRRNRDN

SEQ ID NO: 65312 - DNA, 1449 bp, Brucella suis 1330
  CDS (1)..(1449): transl_table=11
ttgacgacatttgccgaactcggtctttccccgaaagtgatcgctgctgtagaagcagcgggatacactgcgcccactccaattcaggctggggccattccgcccgcgcttgagcgcaaggatgtgcttggaattgcacagaccggaacgggcaagacggcttcgttcgttctgccgatgctgacgcttctggaaaagggccgggcgcgggcgcgtatgccgcgcacgctcatccttgagccaacgcgcgaactggcagcgcaggttgaagaaaatttcgtcaaatatggtatcaatcaccgcctcaacgtggccctgcttatcggcggcgtatcgtttgaggagcaggagcgcaagcttgagcgcggcgcggatgttctcatcgcaacgccgggccgtatgctcgatcattttgaacgcggcaagcttctgcttaccggcgtcgagattctcgtcattgatgaagccgaccgtatgctcgatatgggtttcatcccggacatcgaacgtatctgcaagctgatcccctttacccgccagactttgtttttctcggccaccatgccgccggaaatcaccaagctgacggaacagtttttgcattcgcccgtgcgcatcgaagtcgccaaggcttcctccacggccaagaccgtgacccaacgtctggtgaaatcgggcaagaaggattgggacaagcgcgccgtgctgcgcgacctgatccagtccgaaggtgattcactcaagaatgcgatcatcttttgcaaccgcaagaaggacgtctcggagcttttccgctcgctgacgcgccatgaattcgatgccggcgccttgcatggcgacatggaccagcgggctcgcatggccatgctgtccagtttcaaggatggcaagctgcgccttctggtagcatccgatgttgccgcacgtggcctcgatattcccgatgtaagccatgtgttcaacttcgatgtccctatccatgcggaagattatgtccatcgcatcggccgcacgggccgtgcgggccgttccggcaaggcgttcactattgtgacctcgtctgacaccaaatatctcgcggcgatcgaaagcatgatcggcgaaaagatcgagtggcacgatggcgatctgtccacgctggccgtatccgaggaggctgatgagcagccacgcaagggacgcaacgcgcgcggcaagggcaaggaaaagccgaaggaaaaggccagcaagcctgttgcggctgaaaccgttgatccggccggacaaccgcagccggttattgaaaatcaacaccgtcgcgaagcgattcgttcatcaaatgaagaacgccgcggcaagccgcagaccgaacagcacaagcgccgccgtgatcgcgatgatgacggtccggctccggttggttttggaaacgatattccggccttcatgctgattccaaccggcgtgtga

SEQ ID NO: 65313 - protein, 482 aa, Brucella suis 1330
MTTFAELGLSPKVIAAVEAAGYTAPTPIQAGAIPPALERKDVLGIAQTGTGKTASFVLPMLTLLEKGRARARMPRTLILEPTRELAAQVEENFVKYGINHRLNVALLIGGVSFEEQERKLERGADVLIATPGRMLDHFERGKLLLTGVEILVIDEADRMLDMGFIPDIERICKLIPFTRQTLFFSATMPPEITKLTEQFLHSPVRIEVAKASSTAKTVTQRLVKSGKKDWDKRAVLRDLIQSEGDSLKNAIIFCNRKKDVSELFRSLTRHEFDAGALHGDMDQRARMAMLSSFKDGKLRLLVASDVAARGLDIPDVSHVFNFDVPIHAEDYVHRIGRTGRAGRSGKAFTIVTSSDTKYLAAIESMIGEKIEWHDGDLSTLAVSEEADEQPRKGRNARGKGKEKPKEKASKPVAAETVDPAGQPQPVIENQHRREAIRSSNEERRGKPQTEQHKRRRDRDDDGPAPVGFGNDIPAFMLIPTGV

SEQ ID NO: 65314 - DNA, 1872 bp, Shewanella oneidensis MR-1
  CDS (1)..(1872): transl_table=11
atgtcatccgatgaaagaactttccgtgaactcggcctatccgagaatttgttgcgtgctcttgacgagctaggttacgaaaaaccaacgccaatccaatcagccagtattgatccacttatggctggcaaagatattttaggtcaagcgcaaacaggtacaggtaaaactggcgccttcgcgctgccgctactaaacaaagtcaccagccaaacaacaccgcaaattttagtactcgcaccaacgcgtgaactagcggttcaggttgctgaagcattcagtagctatgccaaatttatgaagaatttccatgtactgccaatttacggcggtcaaagcatgcaacaacagttgaatgcccttaagcgtggcccgcaagtgatcgtgggtacaccgggtcgtgttatggaccatatgcgccgtggcactctgaaactggaaaccttgcaagccctcgttctcgatgaagccgacgaaatgttaaaaatgggctttatcgatgatatcgaatggattctggaacacactccaccacaacgccaacttgccttgttctcggcaaccatgccagagcaaattaagcgggttgctaacaagcatttaaaaaatgcgactaatatcagcatcgctgcaagtcacaccacagttgactcaatcgagcaacgttttgtgcaggtgtcacagcacaataaattagaagccttagtacgcgtattagaagttgaaaatactgaaggtattatcatcttcgttcgtacccgtaactcatgcgttgaattagctgaaaaacttgaagcccgtggctatgcctcatcaccactacacggtgatatgaaccagcaagcccgtgagcgcgcggttgagcagcttaaaaacggcaagctagacattctgatcgcaactgacgttgcggcccgaggtctggacgttgagcgtatcggccacgtagttaactacgatatcccttacgatactgaagcttacgtacaccgtattggtcgtactggccgtgcgggtcgtaccggtatggcgattctgttcgtcaccagccgtgaaatgcgtatgctgcgcaccatcgagcgcgcaaccaacagccgtatttcgccaatgaaagtgccaagcccagagacggttgcagaacgtcgtctgtctcgcttaggtgagcagctcgctcaaaccatgaataacgatctcgaatttatgcgtgaagcggttgcccagttatgccagcaacttgaagtagatacggatctgctcgcggctgccctgctgcaccaagttcagcaggaacgtccattgcaattacctgcgattcaagagcgtgttcgcgatgaacgcagtgagcgcagcgaacgtggttcagaccgtggcgctgagcgtggtgaacgccgtagccgtgaatcacgtccaatgccagcaagcttaggcagcgctgaagcgttaaaagacaatccagacctgaaaatgtgccgttatgtgatcgacgtaggtcgtgaaaatggcgtaggtgtaggcaatatcgttggcgccatcgcaaacgaagccaatatcgacagccgttatatcggtgcaatccaactttatgattcagtgacaactgttgacctgccagacggcatgccaaaagatgtactacaacacctcaagaaagtgcgtgtgtgtggtaagccattgaatatccgtgaagctggcgaccaagtctttgttgactctggccgtggcgcccgtagcgaccgtcgtccacgtagcgaccgcccagcgggtgatcgcaagccacgtgcagcgtctggtgacaaaccgtttgcagaccgcaaaccacgttcagacaagccagcaggcgagcgtagaccacgtaaaccacgcgaagagtaa

SEQ ID NO: 65315 - protein, 623 aa, Shewanella oneidensis MR-1
MSSDERTFRELGLSENLLRALDELGYEKPTPIQSASIDPLMAGKDILGQAQTGTGKTGAFALPLLNKVTSQTTPQILVLAPTRELAVQVAEAFSSYAKFMKNFHVLPIYGGQSMQQQLNALKRGPQVIVGTPGRVMDHMRRGTLKLETLQALVLDEADEMLKMGFIDDIEWILEHTPPQRQLALFSATMPEQIKRVANKHLKNATNISIAASHTTVDSIEQRFVQVSQHNKLEALVRVLEVENTEGIIIFVRTRNSCVELAEKLEARGYASSPLHGDMNQQARERAVEQLKNGKLDILIATDVAARGLDVERIGHVVNYDIPYDTEAYVHRIGRTGRAGRTGMAILFVTSREMRMLRTIERATNSRISPMKVPSPETVAERRLSRLGEQLAQTMNNDLEFMREAVAQLCQQLEVDTDLLAAALLHQVQQERPLQLPAIQERVRDERSERSERGSDRGAERGERRSRESRPMPASLGSAEALKDNPDLKMCRYVIDVGRENGVGVGNIVGAIANEANIDSRYIGAIQLYDSVTTVDLPDGMPKDVLQHLKKVRVCGKPLNIREAGDQVFVDSGRGARSDRRPRSDRPAGDRKPRAASGDKPFADRKPRSDKPAGERRPRKPREE

SEQ ID NO: 65316 - DNA, 1554 bp, Streptococcus mutans UA159
  CDS (1)..(1554): transl_table=11
ttgaaatttacagaattacatttggcggaagacattctttctgctgttgcaaaagtcggctttgttgagccatcacctatccaagaattgactattcctcttgcccttgaaggaaaagatgttattggtcaagcacaaactgggacaggaaaaacagcagcctttggtctgccaaccctgaataagattgacgtgactaataacgttgttcaagcccttgttattgcgccaacgcgagaattggctgttcaaagtcaagaggagctctttcgttttgggcgtgaaaagaaagttaaagttcgttcggtttatggtggttcaagcattgaaaaacaaattaaggctcttaaatcaggagcccatattgttgttgggacaccgggacgtctgcttgatttgattaaacgcaaggcgcttaaattaaatcatgtggaaacccttattttggatgaagcagatgaaatgctcaacatgggctttttagaagatattgaagccattatttcacgtgtaccagaaacacgccaaaccttgctcttttcagcaaccatgccagatgccatcaaacgtattggcgtaaagttcatgaaagaaccagaacatgttaagattgctgccaaagaattaacaacagatttggtggatcaatattatatccgtgtcaaggaaaatgaaaaatttgatacgatgacccgtcttatggatgtggaacagccagaactttctatcgtttttggccgtactaagcgccgtgttgatgagttaacaagaggattaaaactgcgtggctatcgtgcggaagggattcatggggatctcgatcaagggaaacgtctgcgtgttcttcgggattttaaaaatgataaccttgacattttggtcgcgacagatgtggcggctcgtggtctcgatatttcgggcgtcactcatgtttataactatgatattccgcaagaccctgaaagttatgttcatcgcattggtcgtacaggtcgtgctggtaagcacggtcagtcaatcacttttgtggctcccaatgaaatgggctatcttcaaattattgaaaagctcactaaaaaacgcatgaaaggcatgaaacccgctacagcgcaagaagcctttcaagcaagcaaaaaagtggccctcaaaaagattgagcgtgactttgctgatgaaaagattcgttctaattttgataagtttaccaaagatgctgaaaaattggctgctgaattttcaccagaagaattagcacaatatatcttgactctaactgttcaagatccagaaatgctgcctaaggttgaaattgctcgcgaaaaacccttgccatttaaatttgctggtaaaggaaagggcggcaatcgtcgtcgtgaggatcgtcggggaggtcgcgacagtcgccgtaatcatcgtgacggtggccgtcgtgaatttaaacggacttctaacaaaaatcgcaaagattttgaaaataagagcaataaacgtcctcaccgtacttccagcgaaaagaaaagcggctttaccattcgcaataaaggtgacagataa

SEQ ID NO: 65317 - protein, 517 aa, Streptococcus mutans UA159
MKFTELHLAEDILSAVAKVGFVEPSPIQELTIPLALEGKDVIGQAQTGTGKTAAFGLPTLNKIDVTNNVVQALVIAPTRELAVQSQEELFRFGREKKVKVRSVYGGSSIEKQIKALKSGAHIVVGTPGRLLDLIKRKALKLNHVETLILDEADEMLNMGFLEDIEAIISRVPETRQTLLFSATMPDAIKRIGVKFMKEPEHVKIAAKELTTDLVDQYYIRVKENEKFDTMTRLMDVEQPELSIVFGRTKRRVDELTRGLKLRGYRAEGIHGDLDQGKRLRVLRDFKNDNLDILVATDVAARGLDISGVTHVYNYDIPQDPESYVHRIGRTGRAGKHGQSITFVAPNEMGYLQIIEKLTKKRMKGMKPATAQEAFQASKKVALKKIERDFADEKIRSNFDKFTKDAEKLAAEFSPEELAQYILTLTVQDPEMLPKVEIAREKPLPFKFAGKGKGGNRRREDRRGGRDSRRNHRDGGRREFKRTSNKNRKDFENKSNKRPHRTSSEKKSGFTIRNKGDR

SEQ ID NO: 65318 - DNA, 1287 bp, Drosophila melanogaster
  CDS (1)..(1287)
atgggctggaaatcaaagctgaagctgccgccaaaggacaaccgattcaaaacaactgatgtgaccgatacgcgaggcaatgaattcgaggagttttgccttaaaagagaactgcttatgggtatattcgagaagggatgggagcgcccttcgccaattcaggaagcagctattcctatagcattaagtggaaaagatgtgctggctcgggccaagaacggcacaggcaagacaggagcctactgcatcccagttttagaacaaatcgacccaaccaaggactacattcaggcacttgtgatggtccccacccgagagttggcgctacaaacctcacagatatgtattgagctggcgaaacatcttgatatccgggtaatggtcacaacgggaggtaccattctaaaggatgacattcttcgtatttatcaaaaagtacaattaattattgccactcccggacgaatattagatctgatggataagaaagttgccgatatgtcgcattgcagaatattagttttggatgaggccgataagctattgtcgcttgattttcaaggcatgctggatcatgttatactaaagttaccaaaggatccacagatcttgctattttccgcaacatttccactaacagtcaagaatttcatggagaagcatttacgcgagccttacgagatcaacctgatggaggagctaacactgaagggtgtcactcagtactatgcattcgtacaggagcgccagaaagtacactgcttgaatacgctcttttcgaagctgcagatcaatcagtctatcatattctgcaattccacgcaacgtgtcgagctattggccaaaaagatcacagagcttggatattgctgttactatatacacgctaagatggcccaggcacacagaaatcgagtattccacgatttccgccaaggactctgtcgcaatctggtgtgctccgacctgttcacccgtggtatcgacgtgcaggccgtgaatgtagtaatcaatttcgatttcccacgaatggcagagacatacttgcatcgaattggtcgctcaggacgtttcggtcatttgggtattgctattaatctgataacctacgaggatcggtttgatctgcatcggattgaaaaagaacttggaaccgaaataaagcctattccgaaggtcatagaccccgccctttatgtcgcaaacgttggcgcatccgttggcgatacttgcaacaacagtgatctgaataattctgcgaacgaggagggcaacgttagcaaataa

SEQ ID NO: 65319 - protein, 428 aa, Drosophila melanogaster
MGWKSKLKLPPKDNRFKTTDVTDTRGNEFEEFCLKRELLMGIFEKGWERPSPIQEAAIPIALSGKDVLARAKNGTGKTGAYCIPVLEQIDPTKDYIQALVMVPTRELALQTSQICIELAKHLDIRVMVTTGGTILKDDILRIYQKVQLIIATPGRILDLMDKKVADMSHCRILVLDEADKLLSLDFQGMLDHVILKLPKDPQILLFSATFPLTVKNFMEKHLREPYEINLMEELTLKGVTQYYAFVQERQKVHCLNTLFSKLQINQSIIFCNSTQRVELLAKKITELGYCCYYIHAKMAQAHRNRVFHDFRQGLCRNLVCSDLFTRGIDVQAVNVVINFDFPRMAETYLHRIGRSGRFGHLGIAINLITYEDRFDLHRIEKELGTEIKPIPKVIDPALYVANVGASVGDTCNNSDLNNSANEEGNVSK

SEQ ID NO: 65320 - DNA, 1737 bp, Drosophila melanogaster
  CDS (1)..(1737)
atgcgagcaaaggcaccacacgatcgcgactttggtcacagtggacgtggcggtcgcggaggcgatcgaggcggcgatgatcggcgaggaggcggcggcggaggcaatcgcttcggtggcggcggtggcggtggcgattaccacggcataaggaatggacgcgtcgagaagcgacgcgatgaccgcggaggcggcaaccgatttggaggtggtggtggattcggggatcgccgaggaggaggtggcggcggcagccaagacctccccatgcgtccggtcgacttctccaacctggctcccttcaagaagaacttttaccaggagcaccctaacgtagcaaaccgatcgccctacgaagttcagaggtatcgcgaagagcaggagatcaccgtgcgcggacaggtgccgaaccccatccaggacttctccgaggtccatctgcccgactacgtcatgaaggagatccgccgacagggctacaaggcccccaccgctatccaagcgcagggctggcctatcgccatgagtggctcgaacttcgtcggcattgccaagacgggatccggaaagaccctgggctacatcctgcccgctattgtccacatcaacaaccagcagccgctgcagaggggcgacggacctatcgccctcgtgctggcccccactcgggagctggcccaacagatccagcaggtggccaccgaattcggttcctcgtcgtatgttcgcaacacctgcgtcttcggcggcgccccgaagggcggccaaatgcgggatctgcagcgcggctgcgagatcgtcattgccacacccggacgtcttattgatttcctctccgccggctctactaacctgaagcgttgcacctacttggtgctggacgaggccgatcgcatgttagacatgggcttcgagccccagatcagaaagatcgtctcacagatccggcccgaccgacagacgctcatgtggagcgctacctggcccaaggaggtcaagcagcttgccgaggactttttgggcaactacatccagatcaacattggatcgctggagctgtccgccaatcacaacatccgccaggtggtggacgtttgtgacgagttcagcaaggaggagaaattgaagaccctcctgtcagacatctacgacaccagcgagagccccggcaagattatcatattcgtggagacaaagcgacgcgtggacaacctggtgcgcttcatccgcagcttcggagtccgttgtggagctattcacggtgacaagtcgcaatcagaacgagactttgtgctccgtgagttccgctcgggcaagtccaacattctggtggccaccgatgtggcggcccgtggactagacgtggacggcatcaagtatgtcatcaactttgactacccgcaaaacagcgaggactacatccatcgcatcggtcgcacaggacgatccaacacaaagggcacctctttcgccttcttcaccaagaacaatgccaagcaagccaaggcgctggtcgacgtactccgagaagctaatcaggaaatcaatcctgccctggaaaatctggcccgcaactcgcgctacgacggtggcggcggacgctcccgttatggaggcggtggcggcggcggtcgcttcggcggcggcggcttcaagaagggcagcctgagcaacggacgaggcttcggaggaggcggcggcggcggcggcgaaggcagacactcgcgcttcgactag

SEQ ID NO: 65321 - protein, 578 aa, Drosophila melanogaster
MRAKAPHDRDFGHSGRGGRGGDRGGDDRRGGGGGGNRFGGGGGGGDYHGIRNGRVEKRRDDRGGGNRFGGGGGFGDRRGGGGGGSQDLPMRPVDFSNLAPFKKNFYQEHPNVANRSPYEVQRYREEQEITVRGQVPNPIQDFSEVHLPDYVMKEIRRQGYKAPTAIQAQGWPIAMSGSNFVGIAKTGSGKTLGYILPAIVHINNQQPLQRGDGPIALVLAPTRELAQQIQQVATEFGSSSYVRNTCVFGGAPKGGQMRDLQRGCEIVIATPGRLIDFLSAGSTNLKRCTYLVLDEADRMLDMGFEPQIRKIVSQIRPDRQTLMWSATWPKEVKQLAEDFLGNYIQINIGSLELSANHNIRQVVDVCDEFSKEEKLKTLLSDIYDTSESPGKIIIFVETKRRVDNLVRFIRSFGVRCGAIHGDKSQSERDFVLREFRSGKSNILVATDVAARGLDVDGIKYVINFDYPQNSEDYIHRIGRTGRSNTKGTSFAFFTKNNAKQAKALVDVLREANQEINPALENLARNSRYDGGGGRSRYGGGGGGGRFGGGGFKKGSLSNGRGFGGGGGGGGEGRHSRFD

SEQ ID NO: 65322 - DNA, 1737 bp, Drosophila melanogaster
  CDS (1)..(1737)
atgatgatgatggcaccacacgatcgcgactttggtcacagtggacgtggcggtcgcggaggcgatcgaggcggcgatgatcggcgaggaggcggcggcggaggcaatcgcttcggtggcggcggtggcggtggcgattaccacggcataaggaatggacgcgtcgagaagcgacgcgatgaccgcggaggcggcaaccgatttggaggtggtggtggattcggggatcgccgaggaggaggtggcggcggcagccaagacctccccatgcgtccggtcgacttctccaacctggctcccttcaagaagaacttttaccaggagcaccctaacgtagcaaaccgatcgccctacgaagttcagaggtatcgcgaagagcaggagatcaccgtgcgcggacaggtgccgaaccccatccaggacttctccgaggtccatctgcccgactacgtcatgaaggagatccgccgacagggctacaaggcccccaccgctatccaagcgcagggctggcctatcgccatgagtggctcgaacttcgtcggcattgccaagacgggatccggaaagaccctgggctacatcctgcccgctattgtccacatcaacaaccagcagccgctgcagaggggcgacggacctatcgccctcgtgctggcccccactcgggagctggcccaacagatccagcaggtggccaccgaattcggttcctcgtcgtatgttcgcaacacctgcgtcttcggcggcgccccgaagggcggccaaatgcgggatctgcagcgcggctgcgagatcgtcattgccacacccggacgtcttattgatttcctctccgccggctctactaacctgaagcgttgcacctacttggtgctggacgaggccgatcgcatgttagacatgggcttcgagccccagatcagaaagatcgtctcacagatccggcccgaccgacagacgctcatgtggagcgctacctggcccaaggaggtcaagcagcttgccgaggactttttgggcaactacatccagatcaacattggatcgctggagctgtccgccaatcacaacatccgccaggtggtggacgtttgtgacgagttcagcaaggaggagaaattgaagaccctcctgtcagacatctacgacaccagcgagagccccggcaagattatcatattcgtggagacaaagcgacgcgtggacaacctggtgcgcttcatccgcagcttcggagtccgttgtggagctattcacggtgacaagtcgcaatcagaacgagactttgtgctccgtgagttccgctcgggcaagtccaacattctggtggccaccgatgtggcggcccgtggactagacgtggacggcatcaagtatgtcatcaactttgactacccgcaaaacagcgaggactacatccatcgcatcggtcgcacaggacgatccaacacaaagggcacctctttcgccttcttcaccaagaacaatgccaagcaagccaaggcgctggtcgacgtactccgagaagctaatcaggaaatcaatcctgccctggaaaatctggcccgcaactcgcgctacgacggtggcggcggacgctcccgttatggaggcggtggcggcggcggtcgcttcggcggcggcggcttcaagaagggcagcctgagcaacggacgaggcttcggaggaggcggcggcggcggcggcgaaggcagacactcgcgcttcgactag

SEQ ID NO: 65323 - protein, 578 aa, Drosophila melanogaster
MMMMAPHDRDFGHSGRGGRGGDRGGDDRRGGGGGGNRFGGGGGGGDYHGIRNGRVEKRRDDRGGGNRFGGGGGFGDRRGGGGGGSQDLPMRPVDFSNLAPFKKNFYQEHPNVANRSPYEVQRYREEQEITVRGQVPNPIQDFSEVHLPDYVMKEIRRQGYKAPTAIQAQGWPIAMSGSNFVGIAKTGSGKTLGYILPAIVHINNQQPLQRGDGPIALVLAPTRELAQQIQQVATEFGSSSYVRNTCVFGGAPKGGQMRDLQRGCEIVIATPGRLIDFLSAGSTNLKRCTYLVLDEADRMLDMGFEPQIRKIVSQIRPDRQTLMWSATWPKEVKQLAEDFLGNYIQINIGSLELSANHNIRQVVDVCDEFSKEEKLKTLLSDIYDTSESPGKIIIFVETKRRVDNLVRFIRSFGVRCGAIHGDKSQSERDFVLREFRSGKSNILVATDVAARGLDVDGIKYVINFDYPQNSEDYIHRIGRTGRSNTKGTSFAFFTKNNAKQAKALVDVLREANQEINPALENLARNSRYDGGGGRSRYGGGGGGGRFGGGGFKKGSLSNGRGFGGGGGGGGEGRHSRFD

SEQ ID NO: 65324 - DNA, 2211 bp, Corynebacterium efficiens YS-314
  CDS (1)..(2211): transl_table=11
atgagaaataccgataacgtcaacggcgacgtagaacagccggataacgtcatttcgtcggaatctcaggaaaccccgcagggtgactcagcagcagctgacttcgctctcgacacccccaccaacactgttgaaggcaccgctgtgtctgagggtagcgaagagatcaccagggttgcggaaatttctgaggacgccgactccgccgaagcagcggacagcgcgagcaatgtaatcaatgagaatgtgaatgaggactcctcggaagacgtaacccagtcttcacacgagtcatcctctacggaagcctccaccggcttcgatgcactcggactgccacagcaggttcttgacgctgtgcgcaaggttggtttcgaaactccttcccccatccaggcacagaccatccccgtcctcatggacggacacgatgtggtcggcctcgcacagaccggtaccggtaagaccgcagccttcgcgctgccggttctctcccgcatcgacaagtccgtgcgcagcccccaggctctcgtgcttgcccccacccgtgagctggcgctccaggtcgctgactccttccagtccttcgccgaccacctcggtggtctcaacgtcctgccgatctacggtggacaggcctacggcatccagctgtccggtctgcgtcgcggtgcccacatcgtcgtcggcaccccgggtcgtatcatcgaccacctggagaagggctcactggatatctccggtctgcgcttcctcgtcctcgatgaggccgatgagatgctcaacatgggcttccaggaggatgtcgagcgcatcctcgccgacacccctgatgacaagcaggtggcactgttctccgcgaccatgccgaacggcatccgtcgcctgagcaagcagtacctgaacaacccgcaggagatctcggtcaagtccgagacccgcaccgccaccaacatcacccagcgcttcctgtctgttgcccaccgcaacaagatggacgcactgacccgcatcctcgaggtcaccgagttcgaggcgatgatcatgttcgtgcgcaccaagcacgagaccgaagaggtcgccgagaagctgcgtgcccgtggtttctctgcagctgccatcaacggtgacatcgcccaggcccagcgtgagcgcaccgtcgaccagctcaaggatggccgcctggacatcctggtggccaccgatgtcgccgcccgtggtctcgacgtcgagcgcatctcccatgtgctcaactacgacatcccgaacgacaccgagtcctacgtccaccgcatcggccgcaccggccgtgcaggacgtaccggcgaggccatcctgttcgtcaccccacgtgagcgccgtatgctccgctccatcgagcgggccaccaacgccccactggtggagatggaactgccgaccgtggacgaggtcaacgagtaccgcaaggtcaagttcgccgactccatcaccgaggcactcgagaacccccaggtcgctctcttccgcaccctgatcaaggagtatgccgagaagaacgacgtacccctcgaggatgtcgccgccgcactggccacccaggcacaggccggcaatgacttcttcctcaccgagcaggccgctgaccgcgaccgtggccgtggcgaccgccgccgtgaccgcgacttcgacgaccgtggtggccgtggccgtgaccgtggcgaccgtccgtcccgcttcgaccgtgacgacgcgaacctggccacctaccgcatcgcggtgggcaagcgccagcacgtccgcccgggtgccatcgtcggtgccctggccaacgagggtggtctgaactccaaggacttcggacgcatcaccatcgcagccgaccacaccctggtcgaactgccgaaggatctgccacagagtgtcctggacaacctccgtgacacccgtatctccggccagctcatcaacatcgaacgcgactccggtggacgtccaccacgtcgcttcgagcgcgatgaccgtggcggcgaccgcggtggacgcggtggattccgtggtgaccgtgacgatcgtggtggccgtggtggtttccgcggcggccgtgaccgtgatgatcgcggtggacgcggtggattccgtggtgaccgtgacgatcgtggtggccgtggtggtttccgcggcggccgtgaccgtgatgatcgcggtggacgcggcggctggagggactag

SEQ ID NO: 65325 - protein, 736 aa, Corynebacterium efficiens YS-314
MRNTDNVNGDVEQPDNVISSESQETPQGDSAAADFALDTPTNTVEGTAVSEGSEEITRVAEISEDADSAEAADSASNVINENVNEDSSEDVTQSSHESSSTEASTGFDALGLPQQVLDAVRKVGFETPSPIQAQTIPVLMDGHDVVGLAQTGTGKTAAFALPVLSRIDKSVRSPQALVLAPTRELALQVADSFQSFADHLGGLNVLPIYGGQAYGIQLSGLRRGAHIVVGTPGRIIDHLEKGSLDISGLRFLVLDEADEMLNMGFQEDVERILADTPDDKQVALFSATMPNGIRRLSKQYLNNPQEISVKSETRTATNITQRFLSVAHRNKMDALTRILEVTEFEAMIMFVRTKHETEEVAEKLRARGFSAAAINGDIAQAQRERTVDQLKDGRLDILVATDVAARGLDVERISHVLNYDIPNDTESYVHRIGRTGRAGRTGEAILFVTPRERRMLRSIERATNAPLVEMELPTVDEVNEYRKVKFADSITEALENPQVALFRTLIKEYAEKNDVPLEDVAAALATQAQAGNDFFLTEQAADRDRGRGDRRRDRDFDDRGGRGRDRGDRPSRFDRDDANLATYRIAVGKRQHVRPGAIVGALANEGGLNSKDFGRITIAADHTLVELPKDLPQSVLDNLRDTRISGQLINIERDSGGRPPRRFERDDRGGDRGGRGGFRGDRDDRGGRGGFRGGRDRDDRGGRGGFRGDRDDRGGRGGFRGGRDRDDRGGRGGWRD

SEQ ID NO: 65326 - DNA, 1680 bp, Pseudomonas putida KT2440
  CDS (1)..(1680): transl_table=11
atgacccaggaaaccggcggcttcgccgctctcgatcttaacccgaacattgttgctgccgttgtggctaccggctacgaagagccgtccgccattcagcaacaatcgatcccgatcatcctcgccggtcacgacatgatcggccaggcgcagactggcaccggcaaaaccgctgccttcgccctgccgatcctgaacaagatcgatgtgagcaagcgcgaaccgcaagccctgatcctggcgccaacccgtgagttggcgctgcaagttgctaccgctttcgaaacctacgccaagcagatgccgggcgtgaacgttgtcgccgtctacggtggtgccccgatgggcccacagctgcgtgcgatccgcaacggcgcgcaaatcgtcgtggccaccccgggccgtctgtgcgaccacctgcgtcgtgacgaaaaagtcttgtcgaccgtacagtacctggtactggacgaagccgacgagatgctgaagctgggcttcatggacgacctcgaagtgatcttcgacgcaatcccggctacccgtcagaccgtactgttctccgcaaccctgccgtcgtcgatccgttcgatcgccgagcgtcacctgcgtgaacccaagcacgtcaagatccagaccaagacccagaccgttaccgcgatcgagcaggcccacctgatggtccacgcggaccagaagatcccggctgtgctgcgtctgctggaagtggaagagttcgacgcgctgatcgccttcgtgcgtaccaagcaagccaccctggacctggccgccgcgctggaagccaaaggctacaaggctgctgcactgaacggcgatatcgctcagaaccagcgtgagcgcgtgattgactcgctcaaggatggccgcctggacatcgtcgtcgccaccgacgtcgctgcccgaggcctggacgtaccgcgcatcactcacgtgttcaacgttgacatgccgtacgacccggagtcctacgtacaccgtatcggccgtactggccgtgccggtcgcgatggccgtgcactgttgctggttaccccgcgtgagcgccgcatgctgcaggtgatcgagcgtgttaccgggcagaaggttgccgaagcgcgcctgccgaatgcccaggccgtgctggatgcccgcatcaagaagctgacctcgagcctggcgccgctggtagccgaagcagaagccacccacggcgagctgttcgaccgcctgaccaccgacctgggttgcagcgcgcgtgccctggcttcggccctgctgcgcaaggccaccaatggccaggcgctggacctggcggcggtagagcgtgagcagccgctggtgccgagcttcgccccgcgtggtgagcgtaccgagcgcggtgagcgtggcgagcgtcctgatcgtggtgaccgtgagcgccgtgcaccgttgccgttggccgaaggccgcgtgcgttgccgtaccgccttgggtgcccgtgatggcatcgctgccaagaatctgctgggggcgatcctcaacgaaggtggcctggcgcgtgacgctatcggccgcatccaggtgcgcgacagcttcagcttggtcgagctgccggaagacggcctcgagaagctgctgtccaagctcaaggacactcgcgtggctggcaagcagctgaagctgcgtcgctaccgcgaggattga

SEQ ID NO: 65327 - protein, 559 aa, Pseudomonas putida KT2440
MTQETGGFAALDLNPNIVAAVVATGYEEPSAIQQQSIPIILAGHDMIGQAQTGTGKTAAFALPILNKIDVSKREPQALILAPTRELALQVATAFETYAKQMPGVNVVAVYGGAPMGPQLRAIRNGAQIVVATPGRLCDHLRRDEKVLSTVQYLVLDEADEMLKLGFMDDLEVIFDAIPATRQTVLFSATLPSSIRSIAERHLREPKHVKIQTKTQTVTAIEQAHLMVHADQKIPAVLRLLEVEEFDALIAFVRTKQATLDLAAALEAKGYKAAALNGDIAQNQRERVIDSLKDGRLDIVVATDVAARGLDVPRITHVFNVDMPYDPESYVHRIGRTGRAGRDGRALLLVTPRERRMLQVIERVTGQKVAEARLPNAQAVLDARIKKLTSSLAPLVAEAEATHGELFDRLTTDLGCSARALASALLRKATNGQALDLAAVEREQPLVPSFAPRGERTERGERGERPDRGDRERRAPLPLAEGRVRCRTALGARDGIAAKNLLGAILNEGGLARDAIGRIQVRDSFSLVELPEDGLEKLLSKLKDTRVAGKQLKLRRYRED

SEQ ID NO: 65328 - DNA, 1323 bp, Pseudomonas putida KT2440
  CDS (1)..(1323): transl_table=11
gtgttctcccaattcgccctgcatgaacgcctgcttaaagccgtggccgagcttaaatttgtcgagccaaccccggtgcaggccgcggccatccccctggccctgcaagggcgggatctgcgtgtgactgcgcagaccggcagcggcaagacggcggccttcgtactgccactgctcaaccgtctggtcgacctcagcggtccgcgtgtcgagattcgcgcgttgatcctgctgccgacccgtgaactggcccagcagaccctcaagcaggtgcagctgttctcgcagttcacctacatcaagtcgggcctggtgactggcggcgaagacttcaaggaacaggccgccatgctgcgcaaggtgcctgacgtgctgatcggcaccccgggtcgcctgctcgagcagctcaatgccggcaacctcgacctgtcccacgtgcaggtcctgatcctggacgaagccgaccgcatgctcgacatgggctttgccgaagacatggagcgcctgtgcaaagagtgcgaaaaccgcgagcagaccttgctgttctcggctaccaccggtggcgcggccctgcgcgacatcatcggcaaggtgctgaaagaccctgaacacctgatgctcaacagtgtctcgcaactggctgaaggcacccgccagcagatcattaccgccgaccacgaccagcataaagagcagatcgcgcagtggttgctggccaacgaaaccttcgacaaggcgatcatcttcaccaacacccgcgccatggccgaccgcatctacggtcacctggtggccaaggacgtgaaggctttcgtgctgcatggcgaaaaggaccagaaggaccgcaagctggccatcgagcgcttcaagcagggcagctccaaagtgctggtggcgaccgacgtggcagcccgtggcctggatatcgacggcctggacctggtgatcaacttcgacatgccacgtagcggtgacgagtacgtacaccgtgtgggccgtaccggccgtgccggtggcgaaggcctggcgatctcgttgatcacccacaacgactggaacctgatgtcgagcatcgagcgctacctcaagcagcagttcgagcgccgggtcatcaaggaagtgaagggcacctacaacgggccgaagaaggtcaaggcctcgggcaaggcggccggtagcaagaagaaaaaggtcgagaagaagaccggcgacaagaaagctgccgccaagcgcaagcctactgccaagccgaaagccaatgcgcctctggccagtgcagatggcctggcaccgctgaagaagcgcaagcctgctgctgaataa

SEQ ID NO: 65329 - protein, 440 aa, Pseudomonas putida KT2440
MFSQFALHERLLKAVAELKFVEPTPVQAAAIPLALQGRDLRVTAQTGSGKTAAFVLPLLNRLVDLSGPRVEIRALILLPTRELAQQTLKQVQLFSQFTYIKSGLVTGGEDFKEQAAMLRKVPDVLIGTPGRLLEQLNAGNLDLSHVQVLILDEADRMLDMGFAEDMERLCKECENREQTLLFSATTGGAALRDIIGKVLKDPEHLMLNSVSQLAEGTRQQIITADHDQHKEQIAQWLLANETFDKAIIFTNTRAMADRIYGHLVAKDVKAFVLHGEKDQKDRKLAIERFKQGSSKVLVATDVAARGLDIDGLDLVINFDMPRSGDEYVHRVGRTGRAGGEGLAISLITHNDWNLMSSIERYLKQQFERRVIKEVKGTYNGPKKVKASGKAAGSKKKKVEKKTGDKKAAAKRKPTAKPKANAPLASADGLAPLKKRKPAAE

SEQ ID NO: 65330 - DNA, 1332 bp, Pseudomonas putida KT2440
  CDS (1)..(1332): transl_table=11
atgaatttcgccaaactcggcctgatcgaaccgctgctgcgcacgctgcagcaactggactacaccaccccgaccccggtgcaggccaaagccatccccgccgtgctggccggccgcgacctgatggccgcagcccagaccggtaccggcaagaccgcaggctttgccctgcctgtgctgcagcgcctggcgctggagggcgagaaggtggccagcaactcgatccgcgccttggtgctggtacccactcgcgagctggccgagcaggtgcacaacaacgtgcgcgaatacgccgagaacctgccgctgactacttacgcggtgtatggcggggtcagtatcaatccacagatgatgcgcctgcgccggggtgtcgacctgctggtggctacccctggccgcttgctcgacctgttccggcagaacgccgtgaagttcaaccaggtgcagaccctggtgctggatgaagccgaccgcatgcttgacctgggctttgccgaagagctgcagtcggtgtacgcggcactgccgcgcaagcgccagacgctgctgttttccgccaccttctccgatcagattcgcatgctggcggggctggcgctgaatgaccccctcagtatcgaagtgagcccgcgcaacgccacggccgccagcgtcaagcagtggctggtgcctgtggacaagaagcgcaaggctgacctgttctgccacctgctgcgcaagcagcgctggaagcaggtgctggtgttcgccaagacccgcaatggcgtcgatcagctggtggagcgcttgctggccgaaggcgtgaatgccgacggcatccacggtgaccgcccacaggcaacccgccagcgtgcgctggacagcttcaaggcccgtgaggtgcaagtgctggtggcgaccgatgtggcggcccgtggcctggatatcgatgacttgccgctggtcgtcaacctcgacctgccgatcgttgccgaagactacgtgcaccgcatcgggcgtaccgggcgggcgggcaacaagggcgaggcgatttcgctggtgtgtgcggatgaagtgcaactgctggcggccattgaagtgctgacccggcagaccctgccgcgccatgaagagccggatttcatccccgagcaccgggtgccgatgaccgatgccagtgggcaggttatcaagaaaccgaagaagcccaagaagccgaaagaaaacagcgccaagcgcgggctggggcgttggatggacagcactgaagcggccagtgcggaaccggcggtgaaggctgtacgcaaggtgccgagcttcaatggtgggccgcgcaagcgtaagccgtga

SEQ ID NO: 65331 - protein, 443 aa, Pseudomonas putida KT2440
MNFAKLGLIEPLLRTLQQLDYTTPTPVQAKAIPAVLAGRDLMAAAQTGTGKTAGFALPVLQRLALEGEKVASNSIRALVLVPTRELAEQVHNNVREYAENLPLTTYAVYGGVSINPQMMRLRRGVDLLVATPGRLLDLFRQNAVKFNQVQTLVLDEADRMLDLGFAEELQSVYAALPRKRQTLLFSATFSDQIRMLAGLALNDPLSIEVSPRNATAASVKQWLVPVDKKRKADLFCHLLRKQRWKQVLVFAKTRNGVDQLVERLLAEGVNADGIHGDRPQATRQRALDSFKAREVQVLVATDVAARGLDIDDLPLVVNLDLPIVAEDYVHRIGRTGRAGNKGEAISLVCADEVQLLAAIEVLTRQTLPRHEEPDFIPEHRVPMTDASGQVIKKPKKPKKPKENSAKRGLGRWMDSTEAASAEPAVKAVRKVPSFNGGPRKRKP

SEQ ID NO: 65332 - DNA, 1386 bp, Pseudomonas putida KT2440
  CDS (1)..(1386): transl_table=11
gtgaccaccgaatccaccgcctttgccaccttgccgctgtccactgccatgctggccaacctggaggcccttggctatgcctcgatgacgccgatccaggcccagagcctgcctgtcatcctcaaaggccaggacctgatcgcccaggccaagaccggtagcggcaagactgccgccttcggcatcggcctgctcaacccgatcaacccgcgctacttcggctgccaggcgttggtgctctgccctacccgcgaactcgccgaccaggtggccaaggagctgcgccgcctggcccgtgccgaggacaacatcaagatcctgaccctgtgcggcggcgtttcgctgggcccacagatcgcttcgctggagcacggcgcgcacatcatcgtcggcaccccagggcgcatccagcagcacctggacaaaggcaccctggtcctggacgggttgaacaccctggtgctggacgaagccgaccgcatgctcgacatgggcttcttcgacgccatcgccagcatcatcggcaagaccccgtcgcgccgccagaccctgctgttctcggccacctacccggccggcatcaagcaactggccgccgacttcatgcgcaaccctcagcaggtcaaggtcgaaagcctgcacaccgacaaccagatcgagcagcgtttcatcgagattgacccgcagcaacgcctggaagccgtcacccgcgtgctcggccattaccgcccgcagtcgtgcgtagcgttctgcttcaccaagcagcaatgcgaggacgtggttgcccacctgaccgccaagggcatcgtcgcccaggccctgcacggcgacctggagcagcgcgaccgtgaccaggtgctgaccatgttcgccaaccgcagcagctcggtgctggtggctaccgacgtggccgcgcgcggcctggacatcgatggcctggacatggtcatcaacgtggagctggcgcgtgatgccgaaatccacgtgcaccgcgtgggccgtaccggccgcgccggcgagaaaggcgttgcggtcagcctggtggcaccggccgaaggccaccgcgcccaggccatcgaagcgctgcagaatagcccgctgcgctgggaccagctggacagcctgaaaaacaagggcggcgagcccctgctgccggtgatgaccacactgtgcattgccgctggccgcaaggacaagctgcgccctggcgacatcctgggggccttgaccggtgatgccggcatcccgggcaagcaagtgggcaagatcgccatcttcgacttccaggcgtttgtggccgtggagcgggcgctggccaagcaggccatgcagcggctgaacagcggcaagatcaagggtcgcgccctgaaagtccgcattatctaa

SEQ ID NO: 65333 - protein, 461 aa, Pseudomonas putida KT2440
MTTESTAFATLPLSTAMLANLEALGYASMTPIQAQSLPVILKGQDLIAQAKTGSGKTAAFGIGLLNPINPRYFGCQALVLCPTRELADQVAKELRRLARAEDNIKILTLCGGVSLGPQIASLEHGAHIIVGTPGRIQQHLDKGTLVLDGLNTLVLDEADRMLDMGFFDAIASIIGKTPSRRQTLLFSATYPAGIKQLAADFMRNPQQVKVESLHTDNQIEQRFIEIDPQQRLEAVTRVLGHYRPQSCVAFCFTKQQCEDVVAHLTAKGIVAQALHGDLEQRDRDQVLTMFANRSSSVLVATDVAARGLDIDGLDMVINVELARDAEIHVHRVGRTGRAGEKGVAVSLVAPAEGHRAQAIEALQNSPLRWDQLDSLKNKGGEPLLPVMTTLCIAAGRKDKLRPGDILGALTGDAGIPGKQVGKIAIFDFQAFVAVERALAKQAMQRLNSGKIKGRALKVRII

SEQ ID NO: 65334 - DNA, 1881 bp, Pseudomonas putida KT2440
  CDS (1)..(1881): transl_table=11
atgtcctttgcttccctcggtctctccgaggctcttgtccgcgctatcgaggctgcgggctacacccagccgacccccgtgcaacagcgggctattcccgccgtgttgcaaggccgcgacctgatggttgccgcacagacaggtacgggtaaaaccggcggctttgccctgccgattctcgagcgcctgttcccggccggccatcccgacaaatcacagcgccacggcccgcgccagcctcgcgtgctggtcctgacgccgacccgcgaactggcagcccaggtgcatgacagtttcaaggtctatgcccgtgacctgccactggtcagcgcctgcatcttcggcggcgttggcatgaacccgcagatccaggccattgccaaaggcgttgatgtgctggtcgcctgcccaggccgcctgctcgacctcgccggccaaggcaaggtcgacctggcccacgtggaaatcctggtacttgatgaagccgatcgcatgctcgacatgggcttcatccacgacgtcaagaaggtcctcgcccgcctgccggccaaacgccagaacctgctcttctcggccaccttctccaaggacatcaccgacctcgccgacaagctcctgcacaacccggagcgtatcgaggtcaccccgccgaacaccaccgtcgagcgtatcgagcagcgggtatatcgcctgcctgccagccacaagcgtgccttgctggcgcacctgatcaccctgggcgcctgggaacaggtgttggtgttcacccgaaccaagcatggcgccaaccgcctggccgagtacctggaaaagcaaggcctgaccgccgccgcgatccacggcaacaagagccagaacgcccgcaccaaggcgctggccgacttcaaggccaacagcgtgcgcgtactggtcgccaccgacatcgctgcccgcggcctggacatcgaccagttgccccatgttgtcaacttcgagctgccgaatgtcgaggaagactacgtccaccgcatcggccgtaccggccgtgccggtcgttcgggcgaagctatttccctggtcgcgccagatgaagagaagctgctcaagagcatcgagcgggtgaccaagcagcgcatcgcggatggcgacctgatgggcttcgacgccagccaggtagaagccgagaagcccgaagcacgcgagcgcccgcagaataacggccgcggtggccgcaaccagcaggcccgtggcgaaggtggtaaagacaccaacggcggccgcaaggacaaaggcaaggacaaaggcaaagccaggcagcaagctgcggccaagccggacgacaaggaaaagagcggcgacaagcagcaaccgcgcaagccgcgtgacaagaagtcacgcccgcagcaggccagcaataacagcgtgccgaagccgccggcagaccgcgacccggaagagttcctggacgacgaactcgataacttcggtaaccgcgcggactatgtcagcccttaccagggcaagaaccagggccgcaaccgccgcccgggtggtgctggccaaggtcaggggcaaggcaatggccaacgcagcaacgctggcggccagggccaagcccgcaatggcggccagccacgcagtggtggcggagaaaaacgcccgccccgcgccaacaacggtggcggtgcccgtcgtgatggcggcggtggccgtggtcgccctgcgcgtgacgatgctgcccggcaagagccggccgtgcgcaacccgcgtcagccggaaaaacagccagtgatcattcgcaaggagtccaagctggaccgtttcccgacgcctgagcaactggatgacctgccaagccgcccacgcggtgagcgcccagcgctgctgacccgcaagggctga

SEQ ID NO: 65335 - protein, 626 aa, Pseudomonas putida KT2440
MSFASLGLSEALVRAIEAAGYTQPTPVQQRAIPAVLQGRDLMVAAQTGTGKTGGFALPILERLFPAGHPDKSQRHGPRQPRVLVLTPTRELAAQVHDSFKVYARDLPLVSACIFGGVGMNPQIQAIAKGVDVLVACPGRLLDLAGQGKVDLAHVEILVLDEADRMLDMGFIHDVKKVLARLPAKRQNLLFSATFSKDITDLADKLLHNPERIEVTPPNTTVERIEQRVYRLPASHKRALLAHLITLGAWEQVLVFTRTKHGANRLAEYLEKQGLTAAAIHGNKSQNARTKALADFKANSVRVLVATDIAARGLDIDQLPHVVNFELPNVEEDYVHRIGRTGRAGRSGEAISLVAPDEEKLLKSIERVTKQRIADGDLMGFDASQVEAEKPEARERPQNNGRGGRNQQARGEGGKDTNGGRKDKGKDKGKARQQAAAKPDDKEKSGDKQQPRKPRDKKSRPQQASNNSVPKPPADRDPEEFLDDELDNFGNRADYVSPYQGKNQGRNRRPGGAGQGQGQGNGQRSNAGGQGQARNGGQPRSGGGEKRPPRANNGGGARRDGGGGRGRPARDDAARQEPAVRNPRQPEKQPVIIRKESKLDRFPTPEQLDDLPSRPRGERPALLTRKG

SEQ ID NO: 65336 - DNA, 1689 bp, Pseudomonas syringae pv. tomato str. DC3000
  CDS (1)..(1689): transl_table=11
atgacccaggaaatcggcggcttcgccgctctcgaacttcatccaaatatcgttgcagctgtcgtcgccactggctacgaagagccttcggccattcagcagcaatcgatcccgatcattcttgccggtcacgacatgattggtcaggcgcagaccggtacgggtaaaaccgccgcgttcgcactgcctatcctgcatcgcatcgatccgaccaagcgtgagccgcaagcactgattctggccccgacccgcgagctggcccttcaggttgccaccgcgttcgagacctacgccaaacaaatgccgggcgtgactgtcgttgcagtctacggcggcgcgccgatgggccctcagctcaaggccatccgcaacggcgcacagatcgttgtcgccacaccgggccgtctctgcgaccacctgcgtcgtgacgagaaagtcctggcgaccgtgaaccacctggttctcgacgaagcggacgaaatgctcaagctgggcttcatggacgacctcgaagtcatcttcaaggccatgcctgaaacccgccagaccgtactgttctcggccactctgccacagtcgatccgtgccatcgccgaacgccatctgcgcgatccgaagcacgtgaaaatccagaccaagacccagaccgttaccgcgatcgagcaggctcacctgctggttcacgctgaccagaaaacctcggctgtattgagcctgctggaagttgaagacttcgacgccctgatcatgttcgtccgcaccaagcaggcgaccctggacctggcaagcgcccttgaagccaaaggctacaaggccgctgcactgaacggcgacatcgcccagaaccagcgcgagcgcgttatcgaatccctcaaggatggccgtctggacatcgttgtggcgaccgacgttgctgcccgtggtcttgacgttccacgtatcacccacgttttcaacgtggacatgccttacgatccagagtcctacgttcaccgtatcggccgtaccggccgtgcaggtcgcgaaggccgtgcgttgctgctggtcactcctcgcgagcgtcgcatgctgcaagtgatcgagcgtgtgaccggtcagaaggttgcggaagtccgcctgccggatgcccaggccgttctggatgcccgcatcaagaaactgaccaacagcctggcgccgctggttgctgatgccgaatcgactcatggcgatctgctggatcgtctgactgccgacatcggttgcagcccgcgtgccctcgctgctgcactgctgcgcaaggctaccaacggtcaggctctgacccttgcagccatcgagcgtgaccgtccgctggttccgaacaacgcccctcgcggtgatcgtccagagcgtagcggtagcagcgatcgtggtgaccgtggcgatcgtcctgagcgtgagcgtcgtgcgccggttccattggccgaaggtcgtgctcgttgccgtaccgcgctgggtgcgcgtgacggtatcgctgccaagaacctgctgggtgcaatccttaacgaaggcggcctggcccgcgaagcgatcggccgtatccaggtccgtgacagcttcagcctggtcgagctgccggaagatggccttgagcgtctgctgaccaaactcaaggacacccgtgttgcgggcaagcagctcaagctgcgtcgctatcgcgaagactga

SEQ ID NO: 65337 - protein, 562 aa, Pseudomonas syringae pv. tomato str. DC3000
MTQEIGGFAALELHPNIVAAVVATGYEEPSAIQQQSIPIILAGHDMIGQAQTGTGKTAAFALPILHRIDPTKREPQALILAPTRELALQVATAFETYAKQMPGVTVVAVYGGAPMGPQLKAIRNGAQIVVATPGRLCDHLRRDEKVLATVNHLVLDEADEMLKLGFMDDLEVIFKAMPETRQTVLFSATLPQSIRAIAERHLRDPKHVKIQTKTQTVTAIEQAHLLVHADQKTSAVLSLLEVEDFDALIMFVRTKQATLDLASALEAKGYKAAALNGDIAQNQRERVIESLKDGRLDIVVATDVAARGLDVPRITHVFNVDMPYDPESYVHRIGRTGRAGREGRALLLVTPRERRMLQVIERVTGQKVAEVRLPDAQAVLDARIKKLTNSLAPLVADAESTHGDLLDRLTADIGCSPRALAAALLRKATNGQALTLAAIERDRPLVPNNAPRGDRPERSGSSDRGDRGDRPERERRAPVPLAEGRARCRTALGARDGIAAKNLLGAILNEGGLAREAIGRIQVRDSFSLVELPEDGLERLLTKLKDTRVAGKQLKLRRYRED

SEQ ID NO: 65338 - DNA, 1932 bp, Vibrio parahaemolyticus RIMD 2210633
  CDS (1)..(1932): transl_table=11
atgcaagattctgttattcaattcagcgatttatctctgaatgattctatcctttctgctctagacggaatgggtttcgtgtcaccaactccaattcaggctgcggcaatcccacacctattggaaggtgctgacgcgctgggtaaagcacagacgggtacaggtaaaacggcagcattctctctgcctcttctaaacaagctagatcttgatcaacgtaaaccacaagcaatcgttcttgctccaactcgtgagctagcgatccaggttgcggctgaaatgaaaaaccttggtaaaaacatcaagggtcttaaagttctagaaatctacggtggtgcatctatcgtagatcaaatgcgtgctcttaaaaacggtgcacacgttgttgttggtactcctggccgtgttcaagaccttatcaaccgtgaacgtctacatcttgacgaagtgaatactttcgtacttgatgaagcggacgaaatgctaaacatgggtttcgtggacgacgtaactgcaatcatggagcacgctcctgaatcagcacaacgcgttctattttctgcaactatgccaccaatgctgaaaaacattgttgagcgcttcctacgtgatcctgtaactgttgacgttgctggtaaaaaccacactgtagacaaagttcaacagcagttctgggtagtgaaaggtgtagagaaagatgaagctatgtctcgtcttcttgaaactgaagaaactgacgcgtcaatcgtattcgtacgtactcgtcaagacaccgagcgtctagctgactggctatctgcacgtggcttcaaagctgctgcactgcacggtgacattcctcagtctctacgtgagcgtactgttgatcacatcaaacaaggtgttatcgacatcctagtggcaactgacgttgttgcacgtggtcttgatgttccacgtatcactcacgtatttaactacgacatcccattcgatgttgagtcttacatccaccgtatcggtcgtactggccgtgcaggacgtaaaggcaaagcgatccttctagttcgcactaaccaaatccgcatgcttcgcactatcgagcgcgtgactaagtcatctatggaagaaatccaacttcctctacgtgaccaagttgcagaagctcgtctaaacaagctagcggctgaactggaagctgagaaagagcacaaagcactagacaagttcgcagagctagtagagaaactacaaacttctctagaaatcgaccctgcgatgcttgctgcaatgcttcttaagcgtcaacaaggtaaacgtcctctgttctacattggtgaagacccaatggttgaagcgattgagcgtgacaagcagcgtcgtaaagaacgccgtgaaggtggccgtgaaggcggtcgtagcttcaacaaccaagactgggatacttaccagcttcaagttggtcgcgagcaaggcgttcaagttaaagatatcgttggtgctctagcaaacgaactaggcctaggtaaaggttctatcggtgcgatcaagctagcgcaaggtcacacattcgttcagctaccaaaagcaatgacttctgaagctgcgagcaaactaagcaaactgcgtatccgtcaacaagatgttggtgctgtagtatgtgatttcgatgatttccgcgagtctcgtggtggtcgccgtgacggtggtcgtcgcgatggcggccgtcgtgaaggtggtttccgtggtaaccgcgaaggtggcaaccgtggtggtgagcgtcgtgaaggcggtcgtcgtgaaggtggcttccgtggtaaccgtgacggcaaccgcgaaggtaaccgtgaaggtggcgaacgtcgtttcgatcgtaaccgtggtggtgatcaccgtggtaactaccgtggcgaacgtggtcacggccgtggccgtcgtactcaagacgcataa

SEQ ID NO: 65339 - protein, 643 aa, Vibrio parahaemolyticus RIMD 2210633
MQDSVIQFSDLSLNDSILSALDGMGFVSPTPIQAAAIPHLLEGADALGKAQTGTGKTAAFSLPLLNKLDLDQRKPQAIVLAPTRELAIQVAAEMKNLGKNIKGLKVLEIYGGASIVDQMRALKNGAHVVVGTPGRVQDLINRERLHLDEVNTFVLDEADEMLNMGFVDDVTAIMEHAPESAQRVLFSATMPPMLKNIVERFLRDPVTVDVAGKNHTVDKVQQQFWVVKGVEKDEAMSRLLETEETDASIVFVRTRQDTERLADWLSARGFKAAALHGDIPQSLRERTVDHIKQGVIDILVATDVVARGLDVPRITHVFNYDIPFDVESYIHRIGRTGRAGRKGKAILLVRTNQIRMLRTIERVTKSSMEEIQLPLRDQVAEARLNKLAAELEAEKEHKALDKFAELVEKLQTSLEIDPAMLAAMLLKRQQGKRPLFYIGEDPMVEAIERDKQRRKERREGGREGGRSFNNQDWDTYQLQVGREQGVQVKDIVGALANELGLGKGSIGAIKLAQGHTFVQLPKAMTSEAASKLSKLRIRQQDVGAVVCDFDDFRESRGGRRDGGRRDGGRREGGFRGNREGGNRGGERREGGRREGGFRGNRDGNREGNREGGERRFDRNRGGDHRGNYRGERGHGRGRRTQDA

SEQ ID NO: 65340 - DNA, 1593 bp, Helicobacter hepaticus ATCC 51449
  CDS (1)..(1593): transl_table=11
atgaataatttgggatacttattaaatgttaaggtaaaacgaatggataatgcttctctcatacaacaatcagaagagtctccgagtgtgacaataaaacaaggattgaaatcaaaacataaacaagatacgcaaggttttgatgtatttggacttaaagattttgtattaaagggcattagagaagcaggctttagcacacctagtccagtgcaatctcaaagtataccaattattttacagggcaaagaccttattgcgcaggctcagacaggcacaggaaagactgctgcatttgctatacctattcttaacacccttaatcgcaataaagatattgaagcgcttattatcactcctacacgggagcttgctatgcaaattagtgaggagattctaaaattagggcggtttggacgaattaaaacaatttgtatgtatggaggacagagcattaaacgacaatgtgatttgcttgagaaaaaacctaaagcaatgatagctacacccggaaggttacttgaccatttacaaaatggtagaattgcacatttttcgcctcaaattgttgtgcttgatgagagtgatgaaatgcttgatatgggctttttagatgatattgaagagatttttaaatttttgcccaatacgcgccagacattacttttttcagctacgatgccagaaccaattaaagctttagcaatgaaaatacttaatgaacctgcttttgtaaaaattacccccacagatgttacaaatcaagatattgaacagcaatattatattatcaatgaaggtgagcgcgatgaagcgattgtgcgcttaattgagacacaaaatcctacaaaaagcattatttttacgcgtatgaaaaaagaagctgatgctttagctataagacttgcaaatcgtggatttaaagctatagcattacacggagatatggaacagagggatagaagagaggcgattaaggcatttagggaaaataaaattgaaattcttgttgctactgatgttgcatctcgcggattagatataagtgatgtaagccacgtatttaattatcatataccactcaatcctgagagttatgtgcatcgtatagggcgcacaggacgtgcaggaaaaaaaggtgttgcagttacacttgctacaccacttgagtataaagatttaagtaagattaaacaaattaccaaagccaaacttaaactctgcgagataaagcaagaatatagtgatgacgcattttcacaggaactttcgcatacaaagattagtgataaatcggtggccatttatgaaaaactcaaagacaaaatagatactacacagctttgtcttaagcttatttcattacatttagaaaaaaatagcagtcttaaaattggtttaagcaaggaacaaatagccaaacttgaagaaaactatgaaagtgaacaacctaaaaaatctaataaaaaatttgtaggaaatacacgtagtgctactaaaggtaatctacgtggtggtaaagggagtaaaaataataagcgatatgataatattgatagaagtcagccttacacaaatagcatttgggggtaa

SEQ ID NO: 65341 - protein, 530 aa, Helicobacter hepaticus ATCC 51449
MNNLGYLLNVKVKRMDNASLIQQSEESPSVTIKQGLKSKHKQDTQGFDVFGLKDFVLKGIREAGFSTPSPVQSQSIPIILQGKDLIAQAQTGTGKTAAFAIPILNTLNRNKDIEALIITPTRELAMQISEEILKLGRFGRIKTICMYGGQSIKRQCDLLEKKPKAMIATPGRLLDHLQNGRIAHFSPQIVVLDESDEMLDMGFLDDIEEIFKFLPNTRQTLLFSATMPEPIKALAMKILNEPAFVKITPTDVTNQDIEQQYYIINEGERDEAIVRLIETQNPTKSIIFTRMKKEADALAIRLANRGFKAIALHGDMEQRDRREAIKAFRENKIEILVATDVASRGLDISDVSHVFNYHIPLNPESYVHRIGRTGRAGKKGVAVTLATPLEYKDLSKIKQITKAKLKLCEIKQEYSDDAFSQELSHTKISDKSVAIYEKLKDKIDTTQLCLKLISLHLEKNSSLKIGLSKEQIAKLEENYESEQPKKSNKKFVGNTRSATKGNLRGGKGSKNNKRYDNIDRSQPYTNSIWG

SEQ ID NO: 65342 - DNA, 1752 bp, Wigglesworthia glossinidia endosymbiont of Glossina brevipalpis
  CDS (1)..(1752): transl_table=11
atgaataaaaaagaattatctttttctgaattaggtttgaaagattttattttactagcgttaaatgatttaggttataaaaaaccatcgccaattcaagaaaaatgcattccttttttgctaaaaggatatgatgttctaggaatagctcaaactggaagtggaaaaactgctgctttttttttgccattattgaataatattgatttaaaattaaaacttccccaaataataattttgactccaacaagagagcttgctttacaaataaaatttgcttgttgcagtttgtcaaaatatataaaagaaattaatataattgctttatatggaggccaaaattattcaatacaaataaaatctttaaaaagaaatccacaaatagttgtgggaactccaggacgaatattggatttattaaataaaaaatatttaaatttatcagaaattactagttttgtgttagatgaagcagatgaaatgttaagaatgggttttatagaagacgttgaaaatatatttctaaaatcatcaaagcaacatcaaactatattattttccgctactatgcctgcagctattcatagaataactaaacgttttatgaaaaaacctaaagaaataagaattaaagcaagcgaaaatactagacctaatattaaacaaaattattggatagtttatggattatgtaaaattgaagcattattaagatttttagaagtagaaatttttgatgcagtgattatttttgtacgcactaaaaatgctactttagaagtttctgatgtgttagaaaaaaatgggtataacagctcatctctaaatggagatatgaatcaaattttaagagaaaaaacattaaatagattcaaaacaggtttattggatattttagtagctaccgacgtagctgcaagaggtttggatgtagaccgtatcagtttagttataaattatgacataccattagacgtagagtcttatattcatagaattggaagaacaggcagagctggaagaacaggaaaagctttaatgtttgtagaaaatagagaaagaaaaatattgtacaatattgaacgtaatattaaagaaaaattatctcaaataaaattacctagcgtagaactattatgtaaaaaacgtttaaataatttttctgaaaaaattaaaaatcaaataaatagtttagatttgaataaatatcaaaatttattatctaaaattatttcttttataggaatatctgatgttaaaattatttccgctgccttattaaaggtagctcaaaaaaacaagcctttaataatatctccagataatttttttaacaaaaacaaaaaaattaatttgttaataaacaaaaataataagcgcaaaaaattaaatattataaaaaataaaaaaaaatcaataagtttatataaagctgaaattggaaaaaaagacggaatagaatcaaaacatatagttaggacaatgataaatttaggaaaaataaaatccaatgatattggtagtataaaaatattttttaattattctactattgaaatatacaaaaaaatacctttaaatttattatcaatattatcaaaatctacaattttcaaaaaatctttaaatttaaaattattaaatcacaataaaatttcaaaaaagcctattttaaaaaaaataggatctagattatctaatagaatttcaaaaaatacatcaaataaaatctcatataatagacaaatttaa

SEQ ID NO: 65343 - protein, 583 aa, Wigglesworthia glossinidia endosymbiont of Glossina brevipalpis
MNKKELSFSELGLKDFILLALNDLGYKKPSPIQEKCIPFLLKGYDVLGIAQTGSGKTAAFFLPLLNNIDLKLKLPQIIILTPTRELALQIKFACCSLSKYIKEINIIALYGGQNYSIQIKSLKRNPQIVVGTPGRILDLLNKKYLNLSEITSFVLDEADEMLRMGFIEDVENIFLKSSKQHQTILFSATMPAAIHRITKRFMKKPKEIRIKASENTRPNIKQNYWIVYGLCKIEALLRFLEVEIFDAVIIFVRTKNATLEVSDVLEKNGYNSSSLNGDMNQILREKTLNRFKTGLLDILVATDVAARGLDVDRISLVINYDIPLDVESYIHRIGRTGRAGRTGKALMFVENRERKILYNIERNIKEKLSQIKLPSVELLCKKRLNNFSEKIKNQINSLDLNKYQNLLSKIISFIGISDVKIISAALLKVAQKNKPLIISPDNFFNKNKKINLLINKNNKRKKLNIIKNKKKSISLYKAEIGKKDGIESKHIVRTMINLGKIKSNDIGSIKIFFNYSTIEIYKKIPLNLLSILSKSTIFKKSLNLKLLNHNKISKKPILKKIGSRLSNRISKNTSNKISYNRQI

SEQ ID NO: 65344 - DNA, 1812 bp, Prochlorococcus marinus subsp. marinus str. CCMP1375
  CDS (1)..(1812): transl_table=11
atggcaaaaacgaagtccaacgaagacataagtacttctaatgtttcttcaaattcagatccatctatctctattgaaagtgaaactgaagaacatatttccataacagaagttgatgcttctcagcttgaaaatgtagagaaggcaagtaatggtttcgaaggtttcggttttagtgaagccttactaaaaacccttaagaacaaagggtatgaagagcctacaccaattcaaaaagcttctatcccagaattaatgctggggagagatctgcttggacaagctcaaactggtacaggtaaaacagcagcatttgctctacctttacttgaaagaataaatagcaaagagcgtaacccacaagtacttgtcttaacacctactcgtgaacttgcaatgcaagttgcagagtcctttaaagcatactcagaaggtcatgcaaatataaatattttagctgtatatggaggatctgattttcgatcacaaatatattccttaaaaagaggtgttgaaatcatagttggaactccaggacgagtaatggaccatatacgccaagggacattaaatcaagattctctccagtgcctagtcctggatgaagctgatgagatgttgcgtatgggctttatagatgatatcgaatggatacttgagcaattaccgaatgagcgtcaaatggtcctcttctctgccacaatgcctccggagataagaaaactttcaaaaagataccttagagatcccgctgaaataaccattaaggcgaaaaagaaagaagctcaactaattagacagcattatataactgttcagaatagctataagctagaagtattgagacgtgttcttgaacttaactatggtgaaggagttataatatttgcaagaacaaaagctattacactaaagctggcagaaagcctggaagcatcaaaccacaatgtggctgtgctaaatggagatgttcctcaaaatctaagagagagaactgtcgaaagattacgccaaggcggcataaatattcttgttgcaactgacgttgccgctaggggattagatgtagagcgcataggactagtgattaattacgatatgccctttgattctgaagcatatgttcatcggataggtagaactggtagagctgggcgcagcggtgaagcaatcctttttatcagtccaagagaaaggtcctacctaaacaatctagaaagagctgttggacaaagtattgagcggatggaaatacctaataatgaaagtataaataaccatagaatacaaaaaatcaagagagatcttctaacaaccgcttctcaaaagcgaaaagatcaagaggaaacaaacctgatcaaagaagttataaatgaaatagagagtgaactggaaatcactcctaaagaaattgctttagctgcaataaacctgtctataggtgaatcaccgttattaattaatactgatgaaagctggatcaaccaagcagaaaggtttcgtaaaagcaatgatcgacgtgataatcgtggaagaagtcgtcgtagaaatgatttagatatagggactacagaaaaagacaaagagcgttttagagtagatgttggtcatcgagacagagtaaagccagggaacatagttggtgcaatagctaacgaatcaggtttaaatggtcgaatgatcggaaggatacagatttttgaaagttatagcttggtcgatctacccaaagggatgccaactaaaatttttcaaagtctcaaaagagtaaaagttatgaataaagagttaaatatcaaccgttatacataa

SEQ ID NO: 65345 - protein, 603 aa, Prochlorococcus marinus subsp. marinus str. CCMP1375
MAKTKSNEDISTSNVSSNSDPSISIESETEEHISITEVDASQLENVEKASNGFEGFGFSEALLKTLKNKGYEEPTPIQKASIPELMLGRDLLGQAQTGTGKTAAFALPLLERINSKERNPQVLVLTPTRELAMQVAESFKAYSEGHANINILAVYGGSDFRSQIYSLKRGVEIIVGTPGRVMDHIRQGTLNQDSLQCLVLDEADEMLRMGFIDDIEWILEQLPNERQMVLFSATMPPEIRKLSKRYLRDPAEITIKAKKKEAQLIRQHYITVQNSYKLEVLRRVLELNYGEGVIIFARTKAITLKLAESLEASNHNVAVLNGDVPQNLRERTVERLRQGGINILVATDVAARGLDVERIGLVINYDMPFDSEAYVHRIGRTGRAGRSGEAILFISPRERSYLNNLERAVGQSIERMEIPNNESINNHRIQKIKRDLLTTASQKRKDQEETNLIKEVINEIESELEITPKEIALAAINLSIGESPLLINTDESWINQAERFRKSNDRRDNRGRSRRRNDLDIGTTEKDKERFRVDVGHRDRVKPGNIVGAIANESGLNGRMIGRIQIFESYSLVDLPKGMPTKIFQSLKRVKVMNKELNINRYT

SEQ ID NO: 65346 - DNA, 1389 bp, Bordetella bronchiseptica RB50
  CDS (1)..(1389): transl_table=11
gtgaccaacacgtctttttcctccctgcctcttctgcccgccttgctcgacaacctgcaaggcctgggcttcgaacagatgacgccgatccaggcgcaaagcctgccgctcatcctggaaggccgcgacctgatcgcgcaagccaagaccggcagcggcaagaccgccgcattcggcctgggcgtgctgcagaacctggacgtcaaccgcctggcgccgcaggcgctggtgctctgtcccacccgcgaactggccgaccaggtggcccaggagctgcgccggctggcccgcctgattcccaacgtcaaggtgctgacgctgtgcggcggcgccgccgcgcgtccccaggccgaatcgctggcgcgcggcacgcatctggtggtgggtacgcccggccgcatccaggaccacctggcgcgcggcagcctggacttgtccacgctgaacacgctggtgctggacgaggccgatcgcatggtggacatggggttctacgacgacatcgccgccattgcctcgcattgcccggccaggcggcagaccctgctgttctcggccacctaccccgacaacatccgcaagctgagcgcccgcttcctgcgcaatccggccgaaatcaaggtggaggcccagcacgacgccagccgcatcgagcagctcttcttcgagatcgacgaaggccagaggctggatgccgtggcggcgctgctggcccacttccgcccggcgtccacgctggcgttctgcaacaccaagatccgcagccacgacctggtcgaacgcctgcgcgcccagggcatcagcgcccaggcgctcaacggcgacctggagcagcgcgagcgcgatgaaatcctgatccagttcgccaaccagagctgcgccgtgctggtcgccaccgacgtggccgcccgcgggctggacatccagaatctgggcgcggtcatcaacgtggacgtgaccaaggacaccgaagtccacgtgcaccgcatcggccgcagcggccgcggcgaccagaaagggctggcgctgagcctgtgttcgcccgaggaaatgcgctgggccaacctcatcgagcaataccagggcgccccgctgaaatgggccgacctcggctcgctgcggcccaagtccgaccgccccttgcgcgcgcccatgatcaccctgtgcatccagggcggcaagaaggacaagctgcgtcccggcgacctgctgggcgccctgaccggtgacggcgggctggcgttcgagcaggtcggcaagatcaacatcaccgaattcaacgcctatgtggcgctggaccgccaggtcgccaagcaggccttcgcgcgcctgtccaacagcaatatcaagggacggcggttccgcatgcgcttcctggaagagttctga

SEQ ID NO: 65347 - protein, 462 aa, Bordetella bronchiseptica RB50
MTNTSFSSLPLLPALLDNLQGLGFEQMTPIQAQSLPLILEGRDLIAQAKTGSGKTAAFGLGVLQNLDVNRLAPQALVLCPTRELADQVAQELRRLARLIPNVKVLTLCGGAAARPQAESLARGTHLVVGTPGRIQDHLARGSLDLSTLNTLVLDEADRMVDMGFYDDIAAIASHCPARRQTLLFSATYPDNIRKLSARFLRNPAEIKVEAQHDASRIEQLFFEIDEGQRLDAVAALLAHFRPASTLAFCNTKIRSHDLVERLRAQGISAQALNGDLEQRERDEILIQFANQSCAVLVATDVAARGLDIQNLGAVINVDVTKDTEVHVHRIGRSGRGDQKGLALSLCSPEEMRWANLIEQYQGAPLKWADLGSLRPKSDRPLRAPMITLCIQGGKKDKLRPGDLLGALTGDGGLAFEQVGKINITEFNAYVALDRQVAKQAFARLSNSNIKGRRFRMRFLEEF

SEQ ID NO: 65348 - DNA, 1797 bp, Synechococcus sp. WH 8102
  CDS (1)..(1797): transl_table=11
atgaatgaccaacagctcggggagaccccgtgcgccgtcgatctgtccgcatcttcgctgcctgagcaggccacttcagagcagggttctgcagacgtcttcaccacaacgatcgacgcccagcaaccggaatcgggtttcgatggtttcggattcagtgaggcattgctgaagacgctggcggataaggggtacagcgagccttcaccgattcagaaggcggccttccctgaattgatgctggggcgtgacctggtgggccaggcccagaccggtaccggaaaaacggcggccttcgcgttgccattgctcgaacggctcgccagtggccagaaaactccgcaggccctcgtgctggcacccacccgcgaactggccatgcaggtggctgattcgttcaaggcctattccgctgggcatccgcatctgaaggtgctggcggtttacgggggcaccgacttccgttctcagatcaacaccctgcgccgtggcgtggacgttgtggtggggacaccgggccgggtgatggatcacatgcggcagggcaccttggacacctccggcctacgcagcctggtgctggatgaggccgacgaaatgctgcggatgggcttcatcgacgatgtcgagtggatcctggagcaactgccgcaggaacggcaggtggtgctgttctccgcgaccatgccaccggagatccgtcgcctgtcgaagcgctatctgaaggatccagccgaggtcacgatccgcaccaaggatcaggaaggcaaacggattcgccagcgttcgatcaccgtgccgatgccccacaagctggaggctctgcagcgggtgctcgatgcctgcggtggtgaaggagtcattatttttgcccgcaccaaggccatcaccctcaccgtggccgagacgcttgaggcgggcgggcatcaggtggccgtgctcaacggtgatgtgccgcagaaccagcgggagcggacggtggaacggctgcgcagtggttccgtcgacatccttgtggccaccgatgtggccgctcggggcctggatgttgatcgcatcgggttggtgatcaactacgacatgccgttcgacagcgaggcctacgtccaccgcatcggtcgtaccggccgggccggtcgcacgggggaggccgtgctgtttgtcaccccgcgcgagcgtcgcttcatcaacaaccttgagcgggcaacaggccagccgatcgaggcgatggaggtgccaggcaactccgcgattaaccagggtcgactcgatcgtttgcacaaacgcctcagcgaagcagcccacaacgagcggtcctatgaggaagaagcggcgctgctgaaagagctgttgcaacgcatcggcacggaactggagctcagccctgagcaactggcctacgccgccctcagcatggccatcggcccagaccctttgctgcgccagaagggcgacgacgagtggattcacaacaaccagcgccgcgatcgtgatcgtgaccgtgatcggggcggcgaacggagagagcgccgctccgatcgtccggcccgtgccccggaggagaacatgcagcgctaccgcgtcgaggttgggcaccgtgatcgggtcaagcccggaaaccttgtcggggccatcgccggagaaaccggtctgcagggccgtgcgatcggccggattcagattttcgacaaccacagctttgtggatctgcctaaaggcatgccggaggatgtctttaacagcttgcggcggcttcgggtgatgaaccgggagctacagatcactcaggcgtcgtga

SEQ ID NO: 65349 - protein, 598 aa, Synechococcus sp. WH 8102
MNDQQLGETPCAVDLSASSLPEQATSEQGSADVFTTTIDAQQPESGFDGFGFSEALLKTLADKGYSEPSPIQKAAFPELMLGRDLVGQAQTGTGKTAAFALPLLERLASGQKTPQALVLAPTRELAMQVADSFKAYSAGHPHLKVLAVYGGTDFRSQINTLRRGVDVVVGTPGRVMDHMRQGTLDTSGLRSLVLDEADEMLRMGFIDDVEWILEQLPQERQVVLFSATMPPEIRRLSKRYLKDPAEVTIRTKDQEGKRIRQRSITVPMPHKLEALQRVLDACGGEGVIIFARTKAITLTVAETLEAGGHQVAVLNGDVPQNQRERTVERLRSGSVDILVATDVAARGLDVDRIGLVINYDMPFDSEAYVHRIGRTGRAGRTGEAVLFVTPRERRFINNLERATGQPIEAMEVPGNSAINQGRLDRLHKRLSEAAHNERSYEEEAALLKELLQRIGTELELSPEQLAYAALSMAIGPDPLLRQKGDDEWIHNNQRRDRDRDRDRGGERRERRSDRPARAPEENMQRYRVEVGHRDRVKPGNLVGAIAGETGLQGRAIGRIQIFDNHSFVDLPKGMPEDVFNSLRRLRVMNRELQITQAS

SEQ ID NO: 65350 - DNA, 1419 bp, Chromobacterium violaceum ATCC 12472
  CDS (1)..(1419): transl_table=11
atgtccgatcttaccttcgccgacctcggcctggccgacccgctgctgcgcgcggtcgccgacaccggttataccacgccgacccctatccaggcccaggccatcccgcaagtgctgcaaggcggcgatctgctggccgccgcccagaccggcaccggcaagaccgccggcttcacgctgcccttgctgcagctgctgatgtgctcgcccagccatcacgccggccgtccgcgcgcgctggtgctgacccccacccgagaactggccgcccaggtggaagagtcggtgcgcacttacagcaaatacctgccgttgaagtcgctggtgatgttcggcggcgtcaacatcaatccccagatcaaggcgctgcgcgcgccggtggatatcctggtggcgacgccgggccgcctgctggaccatgtcggccaaaagaccgtcgacctgtccggcgtggaaatcctggtgctggacgaggccgaccgcatgctggacatgggcttcatccacgacatcaagaaggtgctggccaagctgccggcccagcgtcagaacctgctgttctccgccaccttctccgacgagatcaaggcgttggccgacaagctgctggacaaccccaagctggtggaggtggcgcgccgcaacaccaccaacgaactggtgagccaaaaggtacacctagttgaccgcgacaagaagaccgagctgttgatccatctcatccgcgagcagaattggttccaggtgctggtgttcacccgcaccaagcacggcgccaaccgcctggcggagaagctggacaagatcggcatcccggccgcggccatccacggcaacaagagccagaacgcgcgcacccgcgcgctggccgacttcaagagcggcgaattgcaggtactggtggccaccgacatcgccgcgcgcggcctggacatcgaccagctgccgcacgtggtcaatttcgagctgcccaacgtgccggaagactacgtgcaccgcatcggccgcaccggccgcgccggcagcccgggcgaagcgttgtcgctggtgtgcgtcgacgagttcagcttcctgcgcgacatcgagaagctgatcaagatgtcgatcgagcgcttcaccgtgccgggcttcgaggccgacctcaacgtcaagccggagccgattccgatgggcggcggcgcgcgcggccgcggacaaggccagggacgcggcggccagggacaaggccagcgccacggccaggggcagggccagccgcgcaacgcgccggccaagccgcgccaccagaccgaaagcaagccggccggccatggccgcaacggcggtccgcgccaggggcagggcgccggccagggcggccgcgccgccaagccggcggcggccaagtccgcgctgttcagtccgccgaaaaaccgctga

SEQ ID NO: 65351 - protein, 472 aa, Chromobacterium violaceum ATCC 12472
MSDLTFADLGLADPLLRAVADTGYTTPTPIQAQAIPQVLQGGDLLAAAQTGTGKTAGFTLPLLQLLMCSPSHHAGRPRALVLTPTRELAAQVEESVRTYSKYLPLKSLVMFGGVNINPQIKALRAPVDILVATPGRLLDHVGQKTVDLSGVEILVLDEADRMLDMGFIHDIKKVLAKLPAQRQNLLFSATFSDEIKALADKLLDNPKLVEVARRNTTNELVSQKVHLVDRDKKTELLIHLIREQNWFQVLVFTRTKHGANRLAEKLDKIGIPAAAIHGNKSQNARTRALADFKSGELQVLVATDIAARGLDIDQLPHVVNFELPNVPEDYVHRIGRTGRAGSPGEALSLVCVDEFSFLRDIEKLIKMSIERFTVPGFEADLNVKPEPIPMGGGARGRGQGQGRGGQGQGQRHGQGQGQPRNAPAKPRHQTESKPAGHGRNGGPRQGQGAGQGGRAAKPAAAKSALFSPPKNR

SEQ ID NO: 65352 - DNA, 1326 bp, Chromobacterium violaceum ATCC 12472
  CDS (1)..(1326): transl_table=11
atgttgttttccgaactcggcttgtcgccggaaatcctgcgcgccatcgacgagcagggctatagccagccgacgccgatccaggagaaggcgattccgctggtgttgtccggtcgcgacctgctggccgccgcccagaccggcaccggcaagaccgccgccttcatgctgccgatactggagcggctgaagaagttcgccaataccagcgtgtcgccggcgatgcatccgatccgcgcgctggtgctgtcgccgacccgcgagctggccgaccagatcggcgtcaacgtgcagacttacaccaagtacctgccgctgcgcgccaccaccgtcttcggcggcgtcaacatggacccgcagacccaggagttgcgccgcggcgtggaaatcctgatcgcgacgccgggccgcctgctggaccacatccagcagaaaacggtgcagctgaacaaggtggaagtgctggtgctggacgaaggcgaccgcatgctggacatgggcttcatccaggatatccgcaagatcatgggcatgctgcccaaggagcgccagacgctgctgttctcggccaccttcgcgccggagatcaagcgcctggcggccgacttcatgcatgcgccgcagaccgtcgaggtcgcccgccagaacgccaccaacgaccaggtcgagcaactggtgttccaggtggacaacttcaagaagcgccagctgctggcccatttgatccgctcgcgcgagatgagccaggtgatcgtgttctgcaagaccaagatcagcgccgaccagctggcgcgcgatttgaagcgcgatggcctggacgccgaggccatccacggcgacaagacccagggcgcgcggctggagacgctggctggcttcaaggaaggcaagctgcgcgtgctggtggccaccgacgtcgccgcgcgcggcctggacatttccgagctgccttatgtggtgaacttcgagctgcccacctctccggaagactatgtgcaccgcatcggccgaaccggccgcgccggcgccaagggcatcgcgatctcgctgatgtgcccggacgagtccaggcagcacgaggcgatcgaaaagctgaccaagcagacgctgacgccgcagagcgtcgacggtttctggccgtcctggctgccgcgtcccaagccggcgcgcgagccctcgtccgcgtcgccgtccatgccggccctgtcggccggcaagagcgaaggactgaaacaggcccgccctggccgccgcagccgcaaggccaagcgcgaaattccggcgctgctgctgccgccgcgctacaaggtggaaatcatccgctga

SEQ ID NO: 65353 - protein, 441 aa, Chromobacterium violaceum ATCC 12472
MLFSELGLSPEILRAIDEQGYSQPTPIQEKAIPLVLSGRDLLAAAQTGTGKTAAFMLPILERLKKFANTSVSPAMHPIRALVLSPTRELADQIGVNVQTYTKYLPLRATTVFGGVNMDPQTQELRRGVEILIATPGRLLDHIQQKTVQLNKVEVLVLDEGDRMLDMGFIQDIRKIMGMLPKERQTLLFSATFAPEIKRLAADFMHAPQTVEVARQNATNDQVEQLVFQVDNFKKRQLLAHLIRSREMSQVIVFCKTKISADQLARDLKRDGLDAEAIHGDKTQGARLETLAGFKEGKLRVLVATDVAARGLDISELPYVVNFELPTSPEDYVHRIGRTGRAGAKGIAISLMCPDESRQHEAIEKLTKQTLTPQSVDGFWPSWLPRPKPAREPSSASPSMPALSAGKSEGLKQARPGRRSRKAKREIPALLLPPRYKVEIIR

SEQ ID NO: 65354 - DNA, 1263 bp, Chromobacterium violaceum ATCC 12472
  CDS (1)..(1263): transl_table=11
atgccattcgcttccctgggcctgcagcccgacctggtccagtcagccctggaacaagactatgtccggcccaccgccatccaaagcgccgccattcccgccattctgcaaggcggcgacgtgctggccaccgcgcagaccggctccggcaagaccgcggccttctgtctgccgctgctgcaacaatggctggacagcccgcgcgccatcctgcgacagccgcgcgcgctgattctgctgccgacccgcgaactggcggcccaagtcggcgacatcctgcgagacctcgcccagtccctgccgcgcaagctgaaagtggccgtggtctacggcggcgtatcgatcaatccgcagatgatggcgctgcgcggcggcgccgacatcgtggtggccacgcccggccggctgctggatttgctcgaccacaacgcgctgcgtctttccgccgtcaaaaccctggtgctggacgaggccgaccgcctgctggacctgggcttcgccgacgagctgggcagcgtgctggaccggttgccgccggcgcggcagaacctgctgttttccgccaccttcccgcccgcggtgcgcgcgctggcggaaaaactgctgaagcagccgctgcggatagacatcgaacacgccgccgccaccgcgccagacatccgccagcgcgcgatcgaggtggacgccggcaagcgcaccctgctgctgcgccacctgctggcgacgcgcgattgggacaaggcgctggtattcgtcgccagccgccaggccgccgaccgggtggcggacaagctgcggcgcaacggcgtgcccgccgccgccttgcacggcgactgcagccagggccagcgcggccaggcgctggccgatctcaaatcgggacgtttgcgggtgctggtggccaccgacgtggcggcgcgcggcatcgacatcgcccggctgccgctggtggtgaactacgacctgccgcgctcgccggtggactatacccaccgcatcggccgcaccggccgcgccggcgcccgcggcgaagccatcagcttcgtcagcgcagactgcgccgcccatttccggctgatagaaaaacgccagcagctgcggctgccgcgcgaacggatcgccggcttcgagccgaccgagacggccatcgcggccgcctcgctgaccgacccggacggcaatggcggcatcaagggcaaacgcaagagcaagaaggacaagctgcgcgaagccgccgccatgcaggaggccggcggcaactaa

SEQ ID NO: 65355 - protein, 420 aa, Chromobacterium violaceum ATCC 12472
MPFASLGLQPDLVQSALEQDYVRPTAIQSAAIPAILQGGDVLATAQTGSGKTAAFCLPLLQQWLDSPRAILRQPRALILLPTRELAAQVGDILRDLAQSLPRKLKVAVVYGGVSINPQMMALRGGADIVVATPGRLLDLLDHNALRLSAVKTLVLDEADRLLDLGFADELGSVLDRLPPARQNLLFSATFPPAVRALAEKLLKQPLRIDIEHAAATAPDIRQRAIEVDAGKRTLLLRHLLATRDWDKALVFVASRQAADRVADKLRRNGVPAAALHGDCSQGQRGQALADLKSGRLRVLVATDVAARGIDIARLPLVVNYDLPRSPVDYTHRIGRTGRAGARGEAISFVSADCAAHFRLIEKRQQLRLPRERIAGFEPTETAIAAASLTDPDGNGGIKGKRKSKKDKLREAAAMQEAGGN

SEQ ID NO: 65356 - DNA, 1383 bp, Chromobacterium violaceum ATCC 12472
  CDS (1)..(1383): transl_table=11
gtgaaaccagccgctttttccaccctgcccctgcccgctcccttgctgtccaacctggacagcctgggctaccaccagatgaccgccatccaggccgccagcctgcccgccattctggaaggccgcgacctgatcgcccaggccaagaccggcagcggcaagacggctgcgttcggcctgggcctgttgtccagcatcaatccgcgctggttcggcgtgcaggcgctggtgatgtgcccgacgcgcgagctggccgatcaggtggcgcaggaaatccgccgcctggcgcgcgccatcgacaatatcaaggtggtgacgctgaccggcggcacgccgatgggaccgcagatcggctcgctggagcacggcgcccatatcgtcgtcggcacgccgggccggctgcaggaccacctgttccgcgaaacgctgaacctgaccggcgtgaagacgctggtgctggacgaggcggaccgcatgatagacatgggcttcatcgaggaaatcgtcggcatcgtccgcgcctgcccgagaacccgccagaccctgctgttctcggccacctatccggaagacatccgcaaggccagcgcgcagttcctgaaaaatccggtggaagtgaaggtggagtcgctgcacaaggccgaccacatcgagcagtggttctacaaggtgaagccggaaacccggctggagacggtcagccgcatcctgcgccacctacgccccacttcggcgctggccttctgcaacacccgcgagcgctgcaaagagctggtgcgcgagctgcaggaacagggcttccacgcgctgacgctgcacggcgacctggagcagcgcgagcgcgaccagatcctgctgcgcttcgccaacaagagcgccaccgtgctggtggccaccgacgtggcggcgcgcggcctggacatcaaggagctggacgtggtgatcaatgtcgacgtcacccacgatccggaagtgcacatccaccgcatcggccgcaccggccgcggcgagcagcacggcctggcgctgaccctggccaccgacagcgaagccaagcgcctggtgcagatcgaaaactaccagcaggccgagctgacctgggccgacgtcgaagagctgaccccggcgccgggcggcccgctgctgccgccgatggtgacgctggagatcgccggcggcaaacgcgagaagctgcgcccgggcgacctgttgggcgcgctgaccggcgaggccggcttcgccggcagccagatcggcaagatcaacatcttcgagttcaacagcttcgtcgcgctggaccgcgccatcgccgaagacgcgctggccaagctatcccgcggcaagatcaagggcaagcagttcaagatgcgcttggtcggctga

SEQ ID NO: 65357 - protein, 460 aa, Chromobacterium violaceum ATCC 12472
MKPAAFSTLPLPAPLLSNLDSLGYHQMTAIQAASLPAILEGRDLIAQAKTGSGKTAAFGLGLLSSINPRWFGVQALVMCPTRELADQVAQEIRRLARAIDNIKVVTLTGGTPMGPQIGSLEHGAHIVVGTPGRLQDHLFRETLNLTGVKTLVLDEADRMIDMGFIEEIVGIVRACPRTRQTLLFSATYPEDIRKASAQFLKNPVEVKVESLHKADHIEQWFYKVKPETRLETVSRILRHLRPTSALAFCNTRERCKELVRELQEQGFHALTLHGDLEQRERDQILLRFANKSATVLVATDVAARGLDIKELDVVINVDVTHDPEVHIHRIGRTGRGEQHGLALTLATDSEAKRLVQIENYQQAELTWADVEELTPAPGGPLLPPMVTLEIAGGKREKLRPGDLLGALTGEAGFAGSQIGKINIFEFNSFVALDRAIAEDALAKLSRGKIKGKQFKMRLVG

SEQ ID NO: 65358 - DNA, 1320 bp, Chromobacterium violaceum ATCC 12472
  CDS (1)..(1320): transl_table=11
atgacgttctccgatctgggcatcgccccgaccatcctgcgcgcgctgcaagccgccggctacgaaaacccgaccgcggtgcaggctgaagccgtgccggcggccatcgccggccgcgacctgctggtatccgcccagaccggcagcggcaagaccgcggccttcctgctgccggcgctgaccaagctgtccgagcgctccaccgccaagggccagggcccgcgcgtgctggtgctgacgccgacccgcgaactggcccagcaggtggagaagaacgcgctggaatacggcaaggacctgcgctggatgcgcaccgcctgcctggtgggcggctcctccttcggctaccagatccgcgcgctgtcgcgcccgatcgacctgatcgtggccaccccgggccgcctgatggaccacatgcgctccggccgcatcgacttctcccgcctggaaatgctggtgctggacgaagccgaccgcatgctggacatgggcttcatcgacgatatcgaagccatcgtcaaggccaccccggaaacccgccagaccgtgctgttctccgccacgctggacggcatcgtcggccgcatggctgaaaagatgacccgcgatccgcagcgcatcgagatcgcccgcaccgaaacctccggcggcaccatcgaagaacacctgctgtacgcggacgacctgaaccacaagcaccgtctgctggactacatcctgaaagaatccggcttcgaccagtgcgtgatcttctccgccaccaaggcttactcggaagaactggccgacaagctgtccgaccagggctactccgccgcctgcctgcacggcgacatgccgcaaagctggcgcaaccgcacgctgaacgacctgcgccgcggccgcatcaaggtgctggtggccaccgacgtggccgctcgcggcatcgacgtgccgaccatcacccacgtggtgaacttcgacctgccgaagcaggctgaagactacgtgcaccgcatcggccgcaccggccgcgccggccgcgacggcaccgcgatcaccctggcggaatccaaggaattccacaaggtgcgccgcatcgagcaatacctgaagcgccagatcaccgaaggcgtgatcgacggcctggaaccgacccgtcgcccgcccaagggcccgcgccgcaacaacaacggcaagggcggctacggcgaccgccgccatggcagcggcaacggccgcggcggctacggcaacaaccgtcgcgaaggcggctaccagggccagcgccgcgaaggcggctatcaaggcaaccgcggtccgcgcagcagcgcgcagtaa

SEQ ID NO: 65359 - protein, 439 aa, Chromobacterium violaceum ATCC 12472
MTFSDLGIAPTILRALQAAGYENPTAVQAEAVPAAIAGRDLLVSAQTGSGKTAAFLLPALTKLSERSTAKGQGPRVLVLTPTRELAQQVEKNALEYGKDLRWMRTACLVGGSSFGYQIRALSRPIDLIVATPGRLMDHMRSGRIDFSRLEMLVLDEADRMLDMGFIDDIEAIVKATPETRQTVLFSATLDGIVGRMAEKMTRDPQRIEIARTETSGGTIEEHLLYADDLNHKHRLLDYILKESGFDQCVIFSATKAYSEELADKLSDQGYSAACLHGDMPQSWRNRTLNDLRRGRIKVLVATDVAARGIDVPTITHVVNFDLPKQAEDYVHRIGRTGRAGRDGTAITLAESKEFHKVRRIEQYLKRQITEGVIDGLEPTRRPPKGPRRNNNGKGGYGDRRHGSGNGRGGYGNNRREGGYQGQRREGGYQGNRGPRSSAQ

SEQ ID NO: 65360 - DNA, 1518 bp, Wolinella succinogenes DSM 1740
  CDS (1)..(1518): transl_table=11
atggataaccacgtaaacgcacacgaagagcaagagcaagcaggatttgagcagtttggcttcaaagagaatcttcttagagggattcacgaagcaggcttcaaagttcctagccccatccaagtcgaagccattcccttggttcttggaggccacgacctcatcgctcaagctcaaacagggacaggcaaaacggctgccttcggactccctatcatccaaaacctcaaaaatgatggctccattgaagcccttatcatcactcctacgcgagagctcgctgtccaaatcagtgatgaaattttcaaactcggccgcaactgccgcaccaaaaccgtctccgtctatggcggtcaagcgattcgacgccaggttgagctcctagagaaagctccccaagtcatcatcgctacccccggacgacttcttgatcacttaagaaatgatcgactcaaaaatttcaaccccaccactatcgtcttagacgaatccgatgagatgcttgatatgggattcctcgatgatatcgaagagattttcacctacctgcccgctagtcgccaaacccttctcttctctgcgaccatgcccgcccccatcaagaacctcgctcaaaagattctccacaaccccaaaatggtgaaggtgaccaccaacgaaaccaccaacagtgacatctcccaacgctactacatcatcaatgaatatgagcgcgaagatgcgattgtgcggctcatcgatagcgaagcgcccagcaaaaccatcatcttcacccgaatgaaaaaagaggccgatgacctctccaatcgacttatcgctaagggctaccaagcaggagcgcttcatggtgatatggaacaacgagagcgccaagctgcggtgaacgccttcaaacaaggggcgattgatattcttgtggccaccgatgtagcggcacgaggactcgatatcagcaatgtaagccatgtctttaactaccacatccccctcaatcccgagagttatgtccaccgaatcgggcgaacaggccgcgcaggtaaaaaagggatcgctatcacgctcgccactcctttggaatttaaagagattcgacgaatctctgaaaccaccaaagccacgattgagctctatgaaattcccaccatcgctgagaccctcaagcagaccgattctaagctcattcaaaatcttctcaaccactccatcaccgatgatgccctccgaatctatgagcagattcgaggagagattgacaccacgcagcttgcgtgcaaactcctctccatgctcatgaaaaagagttctatcatggggcccaacaagattggtctctccaaagaggatcttatgcagctcaaaaaccgcctaagtggcgatgataggcgcgatcgaaactctagaggaggcaaagggggctctagaggaggctctagaaactccggcggctaccgaagagatagccgtgatgggaatcgctcctctgagggcaactactctagacgcaaaagacgcgactaa

SEQ ID NO: 65361 - protein, 505 aa, Wolinella succinogenes DSM 1740
MDNHVNAHEEQEQAGFEQFGFKENLLRGIHEAGFKVPSPIQVEAIPLVLGGHDLIAQAQTGTGKTAAFGLPIIQNLKNDGSIEALIITPTRELAVQISDEIFKLGRNCRTKTVSVYGGQAIRRQVELLEKAPQVIIATPGRLLDHLRNDRLKNFNPTTIVLDESDEMLDMGFLDDIEEIFTYLPASRQTLLFSATMPAPIKNLAQKILHNPKMVKVTTNETTNSDISQRYYIINEYEREDAIVRLIDSEAPSKTIIFTRMKKEADDLSNRLIAKGYQAGALHGDMEQRERQAAVNAFKQGAIDILVATDVAARGLDISNVSHVFNYHIPLNPESYVHRIGRTGRAGKKGIAITLATPLEFKEIRRISETTKATIELYEIPTIAETLKQTDSKLIQNLLNHSITDDALRIYEQIRGEIDTTQLACKLLSMLMKKSSIMGPNKIGLSKEDLMQLKNRLSGDDRRDRNSRGGKGGSRGGSRNSGGYRRDSRDGNRSSEGNYSRRKRRD

SEQ ID NO: 65362 - DNA, 1314 bp, Gloeobacter violaceus PCC 7421
  CDS (1)..(1314): transl_table=11
atggccactgcattttcggcactcgggctcagcgagtccgtggtgaaggcgctcgacgaactcggtttcgagcagccgactccgattcaactgaagagcatcccctttttgctggacggccgcgacctgctcgcccaggcccagaccggcaccggcaagacggcggctttcggcctgccgctggtcgaccgttcagacccgcaggacgcccgggtgcaggcgttggtgcttgcccccacgcgcgaactggccgtgcaggtgtgtgaggccattcatacctacagcaagcattcgggcgtgcgggtgctgcccatctacggcggccagcccatcgatcgccagatgcgtcgtctgcgcgccggtgcacagatcgtggtgggcacccccgggcgggtgctcgatctgatgcggcgcggcagtctcgatctgagcgcattgcgcacgctggtgctcgacgaagccgaccagatgctggatatgggctttatcgaggaagtccagaccattcttgatgcggctcccccagagcggcaactggtcttcttctcagccacactgcctgcgagtatccgcaaacttgccgcccgccacctgcgcacgccgatgacgctcaccatgcccgccgaggagcgcgacaccccggccatcgcccagcgggtctacttcgtcaacttcaaaaaccgcgcccaggctctaacccgcgtgctcgcggccgaagatccggcctcggccttgatttttacccgcaccaaacaggcggcggacgaactggccgaacaactgcaggacgacggtcaccgcgccgaggccctgcacggggatctcaatcagagtgcgcgcgaggcggtgctggggcgctttcgccgccagcagctcaacgtggtggtggcgaccgacgttgccgcccgcggcctcgatatcgccgatctcagccacgtcatcaactacgacatgccccaggacggcgaatcgtacatccaccgcatcggccgcaccggccgggcggggcgcaccggggtggcgatcagcttcgctctgcccaccgaccgctatcggttgcggctgattgaacgggcgaccggctcgacgctcgttccagccaagattccctcagcgggagaaatccaggtgcggcgcaccgaacgcctcgtcgagcagttgcgcaggcagttgcaggcggacgagagtgatccgagcctcgtactttaccgcgaggtcgtgggacagttgcgcgaggaattcgacttgggcgatattgccgccacgttcctcaagctcgctcagcagcggcccggcagtaccgggagcggctga

SEQ ID NO: 65363 - protein, 437 aa, Gloeobacter violaceus PCC 7421
MATAFSALGLSESVVKALDELGFEQPTPIQLKSIPFLLDGRDLLAQAQTGTGKTAAFGLPLVDRSDPQDARVQALVLAPTRELAVQVCEAIHTYSKHSGVRVLPIYGGQPIDRQMRRLRAGAQIVVGTPGRVLDLMRRGSLDLSALRTLVLDEADQMLDMGFIEEVQTILDAAPPERQLVFFSATLPASIRKLAARHLRTPMTLTMPAEERDTPAIAQRVYFVNFKNRAQALTRVLAAEDPASALIFTRTKQAADELAEQLQDDGHRAEALHGDLNQSAREAVLGRFRRQQLNVVVATDVAARGLDIADLSHVINYDMPQDGESYIHRIGRTGRAGRTGVAISFALPTDRYRLRLIERATGSTLVPAKIPSAGEIQVRRTERLVEQLRRQLQADESDPSLVLYREVVGQLREEFDLGDIAATFLKLAQQRPGSTGSG

SEQ ID NO: 65364 - DNA, 1305 bp, Photorhabdus luminescens subsp. laumondii TTO1
  CDS (1)..(1305): transl_table=11
ctggagcatttcttatttatgaatttcaaatcacttggcttaagtgctgatattttgcgtgccgttgaagaacagggttattcagcgccgacaccaatccaacaacaggcaattcctgttgtattagcaggtaaagatttattagcgagtgctcaaacaggcacaggtaaaaccgcaggttttaccttacccatgctgcaacggttaaatgattcccctattcagatgaaagggcgccggccagtcagagcattaatcctgactccaactcgtgaattggctgctcaagtgggtgaaaatgtccgcgactacagtaaatacctcagactgcgctctctggttgtttttggcggtgtcagtattaaccctcagatgatgaaattgcgtgggggtgtggatattttagtcgcaacaccggggcggttactggatcttgaacatcaaaatgcggttgatttatcccgggtagaaattttggtattggatgaagctgaccggatgctggatatggggtttattcatgatattcgtcgagtgctgaataaattaccaccgaaacggcaaaatttactgttttccgcgactttctctgacgatatcaaaagcttagccagtaagttattgcgtgatcccgtcagtgttgaagttgcacgtcgtaactctgcttctgaacagattgaacagcttgttcactttgtcgataaaaagcgtaaaggtgagctgctctctttcttgatcggcagccgtaactggcagcaagttctggtatttacccgaaccaaacatggcgcgaaccgtttggcagaacagttaaataaagatggtgtaacggcttcggctattcatggtaataaaagtcagggggcgagaacccgtgcactggctgattttaaagatggccggatcagagtgctggtagcgacagatattgcggcccgtggtctggacattgatcaactgccttatgtggtgaattttgaattgcctaatgtcgctgaagattatgtccaccgtattggtcgtactggccgagcagatgcaacagggcaggcactttctctggtctgtgttgatgagcataagctgttgaaagatattgagcgtttgttaaaacgggagattccccgtatggcaattcccggttatgagccagatccaacgatcaaggctgaacctatccaaaacggtcgtcaggcacgtggcgataatcggcagaaaaatagccatcgccgttctggggcaccttcgcgtcagcgtagcagcagtcatgatgtatcccataaatcgcctaacgtcagaggttaa

SEQ ID NO: 65365 - protein, 434 aa, Photorhabdus luminescens subsp. laumondii TTO1
MEHFLFMNFKSLGLSADILRAVEEQGYSAPTPIQQQAIPVVLAGKDLLASAQTGTGKTAGFTLPMLQRLNDSPIQMKGRRPVRALILTPTRELAAQVGENVRDYSKYLRLRSLVVFGGVSINPQMMKLRGGVDILVATPGRLLDLEHQNAVDLSRVEILVLDEADRMLDMGFIHDIRRVLNKLPPKRQNLLFSATFSDDIKSLASKLLRDPVSVEVARRNSASEQIEQLVHFVDKKRKGELLSFLIGSRNWQQVLVFTRTKHGANRLAEQLNKDGVTASAIHGNKSQGARTRALADFKDGRIRVLVATDIAARGLDIDQLPYVVNFELPNVAEDYVHRIGRTGRADATGQALSLVCVDEHKLLKDIERLLKREIPRMAIPGYEPDPTIKAEPIQNGRQARGDNRQKNSHRRSGAPSRQRSSSHDVSHKSPNVRG

SEQ ID NO: 65366 - DNA, 1935 bp, Photorhabdus luminescens subsp. laumondii TTO1
  CDS (1)..(1935): transl_table=11
atgaggcaccattacatgaccactgagactgaaatctcttttgctgatctgggtttatcagcacctatcctttctgcgctggaagatcttggctatgaaaagccatctccaattcagcaacaatgtattccccatttattaaatggccgtgacgtactgggtatggcacagacggggagtggtaaaacagcggcattcagtctgcctttactacataatatcaatgctgagttgaaagctccgcagatccttgtgttggcaccgacccgtgaactggcggtacaggtagccgaagcgtgcgcagatttttctaaacatatgcgtaacgtgaatgttgttgcactgtatggtgggcaacgttatgacgttcagttacgcgctttacgtcaagggccacaaattgttgtgggtacaccagggcgtcttctggaccatctgaagcgtggtacgttggatctgtctaacctgagcggtttagttttggatgaagcagacgaaatgctgcgtatgggctttatcgaagatgttgaaaacatcatgagccagattcctgctgaacatcagactgcactgttctctgcaactatgccagaagctatccgtcgcattactcgtcgttttatgaacgatccgcaagaagtgcgtatccaagcgagtgtaacgactcgtcctgacatcagccagagctactggtctgtttacggtatgcgtaaaaatgaagctttggtgcgtttccttgaagctgaggattttgatgctgcgattatttttgtgcgtaccaaaaatgcaacgttggaagtagcagaagcactggagcgtaatggctacaacagtgcggcgctaaacggtgatatgaaccaggcactgcgtgagcagacattggaacgtctgaaagatggccgtttggatattttgattgcaactgatgttgcagcgcgtggcttggatgttgagcgcatcagtctggttgttaactatgacattccaatggatgcggaatcttatgttcaccgtattggccgtactggccgtgcaggtcgtgcaggtcgtgcattgttgtttgtagaaaaccgtgaacgtcgcttgttacgtaacgttgaacgtacaatgaagctgactatcccggaagttgaactgccaaatgctgaattattgagtcagcgtcgtctggaaagatttgccgctaatgtacagcagcaattggaaagtagcgatctagatcagtaccgtactctgttgtctaaactgcaacctgcggaagatctggatatagaaacgctggcggctgcattattgaaaatggcacagggtgagcgcccgttgattctgcctccggacccggttcgtcgtcctcgccgcgaattcaacgaacgtgatgatcgtcgtcgtaatggttttgatgatcgtggcgaacgtagtgatcgtcctcgtcgtgaacgccgtgatgttggtgaaatggagttgtaccgtattgaagtgggccgcgatgatggtgttgaagttcgtcatatcgttggtgcgattgctaatgaaggtgatatcagcagccgttatattggcaacatcaaattgtttgcaacgcattccacgattgaattgccaaaaggcatgccaggtgatttgttatcccactttacccgtacccgcattctgaataagccaatgaatatgcagttaatgggtgatgcacagccatttgagcgccgtgaacgtcgtggtggtgggcgtaacggcaatggtaacggtaatagtagtggtagtggccctcgccgtgatcgtgagaatttcaatggtggtggccgtcgcttcaatggtgaacgccgcggtggagaaggtcgtggtgaaggtcagagccgtagcaatttccgtggtcgtggtgatgatcatggttcatctgctccacgccgtcgttataacaatagtaacgcacagtaa

SEQ ID NO: 65367 - protein, 644 aa, Photorhabdus luminescens subsp. laumondii TTO1
MRHHYMTTETEISFADLGLSAPILSALEDLGYEKPSPIQQQCIPHLLNGRDVLGMAQTGSGKTAAFSLPLLHNINAELKAPQILVLAPTRELAVQVAEACADFSKHMRNVNVVALYGGQRYDVQLRALRQGPQIVVGTPGRLLDHLKRGTLDLSNLSGLVLDEADEMLRMGFIEDVENIMSQIPAEHQTALFSATMPEAIRRITRRFMNDPQEVRIQASVTTRPDISQSYWSVYGMRKNEALVRFLEAEDFDAAIIFVRTKNATLEVAEALERNGYNSAALNGDMNQALREQTLERLKDGRLDILIATDVAARGLDVERISLVVNYDIPMDAESYVHRIGRTGRAGRAGRALLFVENRERRLLRNVERTMKLTIPEVELPNAELLSQRRLERFAANVQQQLESSDLDQYRTLLSKLQPAEDLDIETLAAALLKMAQGERPLILPPDPVRRPRREFNERDDRRRNGFDDRGERSDRPRRERRDVGEMELYRIEVGRDDGVEVRHIVGAIANEGDISSRYIGNIKLFATHSTIELPKGMPGDLLSHFTRTRILNKPMNMQLMGDAQPFERRERRGGGRNGNGNGNSSGSGPRRDRENFNGGGRRFNGERRGGEGRGEGQSRSNFRGRGDDHGSSAPRRRYNNSNAQ

SEQ ID NO: 65368 - DNA, 1326 bp, Vibrio vulnificus YJ016
  CDS (1)..(1326): transl_table=11
gtgatcaaaatcaccgaacactctataatattcgcccttttaaactattgctgcccattgaactttgtatctcagggcattgcttgtggagaacacactgtgatcagaacctttgccgatcttgatcttgacccaaacttgctgtctgccatcgaagagatgggttacgagcgcccaactcaaattcaggcagaagcaattccacaagccctagaaggccgtgatattcttgcttccgctccgacaggaaccggaaaaaccgccgcatttgtcttgcctgcgctgcaatacttgcaagattttccacgccgtaaaccaggaccagcacgcgttcttatcctcacgccaacccgtgagctagcgatgcaagtggccgatcaagctcgtgcgcttgccaaaaataccagtttgaacattttcaccatcacaggtggtgttcaataccaagaacatgcggatatccttgcgaccacacaagatatcgtggtagcgacaccgggccgcttgatggagtacatccaagcagagcgctttgattgccgcgcgatcgaatggctgatcctcgatgaagcagaccgcatgcttgacatgggctttgctccgacagtggatcgcctatccaatgagtgtcgttggcgcaaacagaccatgctcttctctgcgacgctagaaggcaaaggagtggaaggttttaccgcggatctactgaacgatcctgcggacattgatgcagagccttcgcgccgcgagcgtaaaaaaatcacccagtggtattaccgtgcagatagcatggagcacaaactcgcgctactgaaagacatcatcaacaaccaagccgagcgcacgattgttttcctcaaaacacgtgaacgtctggcggatctgcgtgctcacctcgaaagcgaacaagtcaattgcgcttggattcaaggtgaaatgccgcaagatcgtcgtaacaacgcgattgctcgcttccgcgatggcagtgtgaatgtactgcttgcaacggatgtcgcagctcgtggtatcgacttaccggacgtgtcacacgttgtaaacttcgacatgccacgcagtgccgatgtttaccttcaccgcatcggtcgtaccgctcgcgcaggtaagaaaggcaacgcaatctctattgtagaagcccacgaccaacccatgatggatcgcgttgctcgctacgtgaaagaggatattaaagagcgctttgtcaaagagcttcgccctcaacacaagaagccggtgtttaagaagaaaaagaaaaaagacgataaaaaaacgtcagtgaaaaagaaaagcaccaaaaagaaaaagtaa

SEQ ID NO: 65369 - protein, 441 aa, Vibrio vulnificus YJ016
MIKITEHSIIFALLNYCCPLNFVSQGIACGEHTVIRTFADLDLDPNLLSAIEEMGYERPTQIQAEAIPQALEGRDILASAPTGTGKTAAFVLPALQYLQDFPRRKPGPARVLILTPTRELAMQVADQARALAKNTSLNIFTITGGVQYQEHADILATTQDIVVATPGRLMEYIQAERFDCRAIEWLILDEADRMLDMGFAPTVDRLSNECRWRKQTMLFSATLEGKGVEGFTADLLNDPADIDAEPSRRERKKITQWYYRADSMEHKLALLKDIINNQAERTIVFLKTRERLADLRAHLESEQVNCAWIQGEMPQDRRNNAIARFRDGSVNVLLATDVAARGIDLPDVSHVVNFDMPRSADVYLHRIGRTARAGKKGNAISIVEAHDQPMMDRVARYVKEDIKERFVKELRPQHKKPVFKKKKKKDDKKTSVKKKSTKKKK

SEQ ID NO: 65370 - DNA, 2043 bp, Corynebacterium diphtheriae NCTC 13129
  CDS (1)..(2043): transl_table=11
atgagcattaccgataacgccaccagcggcgagaacgagctggacattaagattttgtcggaatctcaggataattcgcaggtagacgaaggcaccaccatcaataatgatgtcgttgccgatgtagacgactccagggttgcgaacacttctgaggccaccgactccgctcagcaagaagcggacagtgcagaaaaagatggattcgaggctctaggtctcccagacgcaatcctgaaggcagtcgctaaggttggcttcgaaacgccatccccaattcaggcgcagaccattccggtgttgatgcaggggcatgacgttatgggcctcgcgcagacgggtacaggtaagacggcagcattcgcgttgccaatcttgtcgcgtatcgacgtcaagaagcgccacccacaggcgttgatcctcgccccaactcgcgaacttgctttgcaggttgcagactccttccagtctttcgcagatcatttgggcgacatccacgtgctgccaatctatggcggtcaggcttacggcattcagctgtccggcctgcgccgtggcgcacagatcatcgtgggtactccaggtcgtgtgatcgaccacttggagaagggctccctcgacatttccaacctccgcttcctcgttctagacgaggcagacgagatgctcaacatgggcttccaagaagacgttgagcgtattttggaggacaccccagaggacaagcaggttgctttgttctctgccaccatgccaaatggtattcgtcgtttgtctcgcgactacatgaaggatcctcatgagatccaggtgaagtcgcagacgcgcaccaacacgaacatcactcagcgttacctcaacgttgcacaccgcaacaagctcgatgccttgacccgtatccttgaggtcaccgagttcgaagccatgatcatgttcgtgcgtaccaagcatgaaactgaagaagtcgctgaaaagcttcgcgcacgcggattctccgctgccgctatcaacggcgacatcgctcaggctcagcgtgagcgcaccgtcgaccagctcaaggacggtcgcctcgacatcctcgttgctaccgacgttgctgcccgtggcctcgacgttgaacgcatcactcacgtgttcaactacgacattccaaacgacacagaatcctacgtccaccgcattggtcgtaccggtcgtgcaggtcgttctggtgaagcaatcttgtttgtcactccacgtgagcgtcgcatgttgcgttccatcgagcgcgccaccaacgcaaagctgatcgaaatggatctgcctaccgttgatgaggtcaatgagtcccgcaaggcaaagtttgctgactccatcaccgagtctcttgaagacgatcaggtagcaatcttccgtagcctgattaagtcctacgcggaagagcacgatgttccactagaagacatcgccgccgcattggctacccaggcacgcgctggttccgaattcttgatgaaggagccaccaccagagaagcgccgcgagcgtcgtgaccgcgacgatcgtcgtggcggacgcgaccgcttcgaccgcgatgaccgacgtggcggccgtgaccgtggctcccgcttcgagcgtaacgacgacatgcagctctaccgcctagcagttggtaagcgccagcatgttcgccctggtgccatcgttggtgctctggcaaacgaaggtggcctgtccaacaaggacttcgggcgcatcaacatcttcgttgatcacaccttggtcgagttgccaaagaacatggatccaagcgtgatcgatcgcctcagcgatacccgtatctccggccaattgatccacatcgaaaaggacaatggccgaccaccacgtcgtaacgacgacggtgaccgcggcggataccgtggcggcgaccgcttcgaccgtgacgatcgtcgtggtggacgtggcggacgcgaccgcggcggataccgtggcggacgtgaccgcaacgaccgtggtgatcgcggtggctaccgtggtggccgcggcggataccgcgactaa

SEQ ID NO: 65371 - protein, 680 aa, Corynebacterium diphtheriae NCTC 13129
MSITDNATSGENELDIKILSESQDNSQVDEGTTINNDVVADVDDSRVANTSEATDSAQQEADSAEKDGFEALGLPDAILKAVAKVGFETPSPIQAQTIPVLMQGHDVMGLAQTGTGKTAAFALPILSRIDVKKRHPQALILAPTRELALQVADSFQSFADHLGDIHVLPIYGGQAYGIQLSGLRRGAQIIVGTPGRVIDHLEKGSLDISNLRFLVLDEADEMLNMGFQEDVERILEDTPEDKQVALFSATMPNGIRRLSRDYMKDPHEIQVKSQTRTNTNITQRYLNVAHRNKLDALTRILEVTEFEAMIMFVRTKHETEEVAEKLRARGFSAAAINGDIAQAQRERTVDQLKDGRLDILVATDVAARGLDVERITHVFNYDIPNDTESYVHRIGRTGRAGRSGEAILFVTPRERRMLRSIERATNAKLIEMDLPTVDEVNESRKAKFADSITESLEDDQVAIFRSLIKSYAEEHDVPLEDIAAALATQARAGSEFLMKEPPPEKRRERRDRDDRRGGRDRFDRDDRRGGRDRGSRFERNDDMQLYRLAVGKRQHVRPGAIVGALANEGGLSNKDFGRINIFVDHTLVELPKNMDPSVIDRLSDTRISGQLIHIEKDNGRPPRRNDDGDRGGYRGGDRFDRDDRRGGRGGRDRGGYRGGRDRNDRGDRGGYRGGRGGYRD

SEQ ID NO: 65372 - DNA, 1659 bp, Onion yellows phytoplasma OY-M
  CDS (1)..(1659): transl_table=11
atgaatactttattcgaacaattacctattttagagcaaactaaaaaagctttaaaagaactcaattttattgatgctactccaattcaggccttagtaattccagaaattataaaaggacacgacgtaattggacaagctcaaacaggaacaggaaaaacttttgcttttggtattcccattatcgaaaaaattgaaccaaaaatccaaaaaactcaaagtttaattttatgccccactagagaattaactctccaagtatacgaagaattaaaaaaattactaagattttatcaagaaataagaatcgctgttgtttatggtggtgaatcttacaccaaacaatttagagccctagaagctaaacctcatttaattattgctactcctggacgtgcaattgaccatctagaaagaggtaaaatcgacctctcagcactaaaaattctaactcttgacgaagcagatgaaatgttaaaaatgggattccaagaagccttagaaacaatcttaaaaaagattccagaagaaagacaaactgttttattctcagcaactctacctccatttattaaaaaaatagcaagcaaataccaaaaagacactaaaatcctacaagttcctgttaaaaacattgcagttaatgcaatcgaacaaaattactttttagtaaaagaagttgacaaagctaaattattagtacgtttactagacttaaaaaaagattattcagctatcttatttgcaaacactaaaaaagatgttgacgaaattacagcctaccttcaagacaaaggttttttagctgatgcagttcacggcgatttaaaacaaaatcaaagacaatatgtaatgaataatttccgtaaaggcaaaatcaaaatcttaattgcaactgatgtagctgcaagaggacttgacatttctgacatcaaaatggtaattaactatgacttaccacacgaagacgaagtttatgttcaccgtatcggaagaactggaagagctggcaaaaaaggtttagcttacagtttaattagcccaagaaaagtaagccaacttaaaaaattagaatactacttaaaagaaaaaattactttactagatattccttctgttcaaagcatcaaattacaaaatgccaaagatttagaaaaaaagctattaaacatcattgaaaaaaacaacgaagacgctactccaaatcaattagcacaaaagttattagaaactttttcttctgaacaaattatccaaggattattgaaaaaatttttaccaaaagaaagaaattacactgacatccttcctccaaaaatgactactaacaattcttttaccagatcacgttttggtggcgaatctagatttggttcttatggttctaacaactcttacggcaataaatcttaccaaagagcaaatagcaactttatagaagtagttattaatttaggcaaaaaagacaatattaatcctccaatattattaaaattattaaaagaccatttccaaatttatggcaaaaatattggcaatatcaaacacttaactcacgaaactatttttgaagtagcaagtcgtttttggaatcaaatgaaaagcaaaactaatattcgtttccaaaacaaaactttaattcttaacaaaaaagattaa

SEQ ID NO: 65373 - protein, 552 aa, Onion yellows phytoplasma OY-M
MNTLFEQLPILEQTKKALKELNFIDATPIQALVIPEIIKGHDVIGQAQTGTGKTFAFGIPIIEKIEPKIQKTQSLILCPTRELTLQVYEELKKLLRFYQEIRIAVVYGGESYTKQFRALEAKPHLIIATPGRAIDHLERGKIDLSALKILTLDEADEMLKMGFQEALETILKKIPEERQTVLFSATLPPFIKKIASKYQKDTKILQVPVKNIAVNAIEQNYFLVKEVDKAKLLVRLLDLKKDYSAILFANTKKDVDEITAYLQDKGFLADAVHGDLKQNQRQYVMNNFRKGKIKILIATDVAARGLDISDIKMVINYDLPHEDEVYVHRIGRTGRAGKKGLAYSLISPRKVSQLKKLEYYLKEKITLLDIPSVQSIKLQNAKDLEKKLLNIIEKNNEDATPNQLAQKLLETFSSEQIIQGLLKKFLPKERNYTDILPPKMTTNNSFTRSRFGGESRFGSYGSNNSYGNKSYQRANSNFIEVVINLGKKDNINPPILLKLLKDHFQIYGKNIGNIKHLTHETIFEVASRFWNQMKSKTNIRFQNKTLILNKKD

SEQ ID NO: 65374 - DNA, 1383 bp, Geobacter sulfurreducens PCA
  CDS (1)..(1383): transl_table=11
atgaatccgaaagcattttcgtcgcttcgcctgaaagcccccatgctcaggaacctggcctccctcggctatgccgagatgacaccgattcaggcccacagcctgccgctcatcctggccggcaaggatgtgatcgccagggccaagaccggtagcggcaagaccgcggcttttggcatcggactgctgtcgcgtctggatgcattatccttccgggtgcaggcgttggtgctctgcccgacccgtgagctggccgatcaggtgggcaaggaactgcggcgtctggctcgattcaccgacaacatcaagatcttgaccatctgtggcggtgttcccttcgggccccagctgggttcgctggagcatggggcccatgtggtgataggcacacccggccgcctgctggatcacttgcggcgcggcagccttgacctctccgcgctgcggaccctggtattggacgaggcggaccggatgctcgacatggggttccaggatgacatcagtgccctgatcgccgccgccccgcccaagaggcagactctcctcttttccgccacctacccggactccattgccgccatgagcgccggggtccagagggagccggtggaggtcagcgtggacgaggtccatggggagggggccatcgagcaggtattctacgaggtggacagcggccagcggatcgaagcggtcgagcggattctcgggcactatcgtcccgagtctgctctcatcttctgcaacacgaagctggagtgccaggaggtggccaatgccctggccgtccgggggtatgccgcactggccatccatggtgacctggaccagcgggagcgggaccgggtgctggtccggtttgccaacaggagcgcatcggtgctggtagcaaccgacgttgccgcccgggggctggacatcaaggagctttcggcggtgattaactacgagttgacccgcaatccggaggtccatacccaccgcatcggccgcaccggtcgcgccggggagcgggggctggccgtaagcttggtaacgccccgggaaagccgtctgattgcagccatcgcggatgtgcccggcagcattatcgcccgtggcgacctgtccacgctggcaccgctaacggcgaagccgccgctgccccccatggtgacgctctgcatcgacgggggccgcaaaaacaagctgcggcccggtgatattctgggggcactcaccggagagggaggtatgccggccagcgaggtggggaagattgatgtgttcgatttctttacctacgtggccattgcgcggcagagcagtgagcaggccttgaactttctgaggggacacaggatcaaggggcgtttcttcaaggtgaggaaagcagtctga

SEQ ID NO: 65375 - protein, 460 aa, Geobacter sulfurreducens PCA
MNPKAFSSLRLKAPMLRNLASLGYAEMTPIQAHSLPLILAGKDVIARAKTGSGKTAAFGIGLLSRLDALSFRVQALVLCPTRELADQVGKELRRLARFTDNIKILTICGGVPFGPQLGSLEHGAHVVIGTPGRLLDHLRRGSLDLSALRTLVLDEADRMLDMGFQDDISALIAAAPPKRQTLLFSATYPDSIAAMSAGVQREPVEVSVDEVHGEGAIEQVFYEVDSGQRIEAVERILGHYRPESALIFCNTKLECQEVANALAVRGYAALAIHGDLDQRERDRVLVRFANRSASVLVATDVAARGLDIKELSAVINYELTRNPEVHTHRIGRTGRAGERGLAVSLVTPRESRLIAAIADVPGSIIARGDLSTLAPLTAKPPLPPMVTLCIDGGRKNKLRPGDILGALTGEGGMPASEVGKIDVFDFFTYVAIARQSSEQALNFLRGHRIKGRFFKVRKAV

SEQ ID NO: 65376 - DNA, 1455 bp, Lactobacillus johnsonii NCC 533
  CDS (1)..(1455): transl_table=11
ttgaaattttctgaaatgaacttaaaacctgagattttaaaagctattaagcgttcaggttttgaagaagctacaccaattcaagaaaaaaccattcccctagttttggagggaaaagatgtaattggtcaagcccagacagggactggtaaaactgctgcttttggtttgccaattttacaaaacttagataagcaacacgattcaattcaagctattattattgaacctacccgtgaattggctattcaaacccaagaagagttgttccgtttaggtcgtgatgaaaaagctcgcgttcaagtagtttatggcggtgctgatattagacgtcagattcgtgctttaaaacaaacgccagcaattttggtaggaacacctgggcgtttgcttgatcatttaaaacgtggcacaattgatatttctaaagtcaaaacaattgttttagatgaagcagatgaaatgcttgatatgggatttattcaagatattgaaagtattttgaaatatgcatcaagtaaacatcaaacattacttttctctgctacaatgccaaagccaattttacgaattggtgaaaaattcatgaatgatcctgagattgtaaaaatcaaaggaaaagaattaactgctaatttaattgatcagtattttgtgagagcaaaagaaaatgaaaagttcgacattctatgtcgcttaattgacgttcaaaatcctgatttagctgttatttttggtagaactaagagacgtgttgatgaattaacacgtgggctacaagcacgtggatataacgctgctggaattcatggtgatctttctcaagctaagcgaatgagcgtgttaaagagattccgtaaaggtaagctagatattttagttgcaactgatgtggcagctcgtggattagatatttctggggtaagtcatgtttataactatgatattccgcaggatccaaattcttatgttcaccgtattggtagaactggacgtgctggtcagaacggaatgtctgtaacttttgttactccaaatgaaattggctatatgcgtactatagaacaattaacgcataaaaagatgatgccacttaagccaccaactgatgaagaagcatttaaaggtcagctaagtgcagctaataaaaaggtagcagaattgcttgatagcgatctttctaaatatactgaagaagcatctcaacttcttgacgattattctgcgattgatttagtggccgctttattgaaggacttgtctaaagatgcagatagtgtaaaagtaaaaattacacctgaaaagccgttaccatttaaatcaaagcatggtaataatcgaaactttaaacgtaatttcaaacgtggtggagatcgaaatgaacgatatcatcgtaagcctagtgcccgtaaaggtggtagaaagcatgatttcgttataaagaaaaaagattaa

SEQ ID NO: 65377 - protein, 484 aa, Lactobacillus johnsonii NCC 533
MKFSEMNLKPEILKAIKRSGFEEATPIQEKTIPLVLEGKDVIGQAQTGTGKTAAFGLPILQNLDKQHDSIQAIIIEPTRELAIQTQEELFRLGRDEKARVQVVYGGADIRRQIRALKQTPAILVGTPGRLLDHLKRGTIDISKVKTIVLDEADEMLDMGFIQDIESILKYASSKHQTLLFSATMPKPILRIGEKFMNDPEIVKIKGKELTANLIDQYFVRAKENEKFDILCRLIDVQNPDLAVIFGRTKRRVDELTRGLQARGYNAAGIHGDLSQAKRMSVLKRFRKGKLDILVATDVAARGLDISGVSHVYNYDIPQDPNSYVHRIGRTGRAGQNGMSVTFVTPNEIGYMRTIEQLTHKKMMPLKPPTDEEAFKGQLSAANKKVAELLDSDLSKYTEEASQLLDDYSAIDLVAALLKDLSKDADSVKVKITPEKPLPFKSKHGNNRNFKRNFKRGGDRNERYHRKPSARKGGRKHDFVIKKKD

SEQ ID NO: 65378 - DNA, 1227 bp, Wolbachia endosymbiont of Drosophila melanogaster
  CDS (1)..(1227): transl_table=11
gtgaataattttcatgagatgggtctcccagcttcgcttagacaagctctagataaaaataatcttttcgtcccaactccaattcaaatacaagcgattcccttagcgctacaaggtaaagatattctcggatctgctcaaacggggactggaaaaactttagcatttgctattccgttggttgctaagttgctgaatgagcctaacactggttcagctttagtcatcgtgccaaccagagagcttgcgcatcaggtaacaaatgagataagaaaactcttatctcaaaattctgcactaagggtcgctttgttgattggtggtgagcctatttttaggcagctaaatcagcttcagaaaaaaccacaaattgtaataggtactcctggtcgtattatagaccatattgagcgtaaaactttgattactcgcaatgttagcgttcttgtgcttgatgaaacggatcgtatgtttgatatgggctttggagttcagattgaagaaattatgaagcatttgcctaaaataaggcaaactcttatgttttctgcaactcttcctggagatatagtaaaacttgctgagaagtaccttaatcgaccagaacgtatttctgttgattgtgaggctacaacttctgtaaaaattaagcaagaaattgtttatgcatcagaatcagaaaaatatgaaaagcttgttacacaactatgtcagcgcgaaggatcaatcattatctttgtcaaaacaaagcgaggagcggatcagctagctaacagattgcacaaagatgactatagcgctttagcaattcatggtgatttaaggcagcacaagcgcgaaagggtcattaattcttttcgtcgtggccgtaatcaaatcatggttgcaacagatgttgcttctcgcggccttgatattccccacattcaacatgttatcaattatgatgcaccacaatcgcaagctgactatattcatcgtataggtagaactgcacgcgctggagctgaagggtatgcgctatcttttgttacacctcaagataagagaagactgcctgcactggcagacaaagaaggagagctaaattttgattgtagtgtgcaatttaaaaaacgtaacagcaaaaaggtctttaaaaggccaagtacgttaaagactaaatacggtagaaaaaagatcaatgcatttaagaagaaaagcagagtactagaaaaagcgtattaa

SEQ ID NO: 65379 - protein, 408 aa, Wolbachia endosymbiont of Drosophila melanogaster
MNNFHEMGLPASLRQALDKNNLFVPTPIQIQAIPLALQGKDILGSAQTGTGKTLAFAIPLVAKLLNEPNTGSALVIVPTRELAHQVTNEIRKLLSQNSALRVALLIGGEPIFRQLNQLQKKPQIVIGTPGRIIDHIERKTLITRNVSVLVLDETDRMFDMGFGVQIEEIMKHLPKIRQTLMFSATLPGDIVKLAEKYLNRPERISVDCEATTSVKIKQEIVYASESEKYEKLVTQLCQREGSIIIFVKTKRGADQLANRLHKDDYSALAIHGDLRQHKRERVINSFRRGRNQIMVATDVASRGLDIPHIQHVINYDAPQSQADYIHRIGRTARAGAEGYALSFVTPQDKRRLPALADKEGELNFDCSVQFKKRNSKKVFKRPSTLKTKYGRKKINAFKKKSRVLEKAY

SEQ ID NO: 65380 - DNA, 1518 bp, Bdellovibrio bacteriovorus HD100
  CDS (1)..(1518): transl_table=11
atgccacaaaagagcctgtcgggatacctaaatctgggatcggtcattttttcgtattttcattcagggctcgactttaaaagccccccctgttacctaagtgttttccattttttccgaggtgtgcccgtgtcccagaatgaattttctactcttcccctgtccccggaacttctgactgtggttcaggagctgggctttgagacactgacccccatccaacaggaaagcatcccgctgctgctggcaggaaaagacatcatcggccaggccaaaaccggcagtggaaagaccgccgctttttctttgcccatcctgaacaaaatcaatctggatcagccgctgttgcaagccctcattctgtgcccgacccgcgagctggcaagccaggtggtcacagagatccgcaaactggggcgccgccttccaggattgaaagttctggccatgaccggaggccaatccggacgtgaacaggctgacgctttggaaaacggagtgcagatcgttgtcggcacaccaggccgtctggcggactttgtcggccgtaaccgcattgatctttctgcggtaaaaaccgtagtactcgatgaagccgacaaaatgctggatatgggttttgccgatgaaatcaaaactgtgatgcgtgatctgccagggtcccgccagacagttctgttttccgccactttcccggaatccatcgaacatctttcccgcaaataccagcgccatgcccagcaggtgatcatcgaggatgaagagcaaaacctgattgaacaacttgtttatgacagcgaagacaacgacaaaaccaacgtgctgatgcgtattttgcagcagcatccttcggattccactatcatcttctgcaacaccaaaaatgcagtggcggaaattgcagaacgcctgaatgacctgggtgccgccagcggctgcctgcatggagacatggaacagcgtgaacgtgatcgcgtgatggcgatgttccgcaacggatcccaccgcattctggtggccaccgacgtggcggcccggggcctggacatcgacaacctggaactggttattaactttgatctgccactttccccggaaatctatgttcaccgcatcggtcgcaccggccgagctggcaaaaccggcgttgcggtcacgattgcgcaccctaaagacactctgaaactgggccagttcgaagagctgactggcggcaagttcgcccgtccgtcattgggctttaaaaatcagtatggtttgaataaaaccctgaaagaagctccgatgaaaaccatctccatctcgggaggccgcaaggataaacttcgtcccggcgatattctgggggccttgaccggcgctgcgggtggtttgacttcggcagatgtgggcaaaattgaaattcaggacaagatctcttttgtggcggtgtctgcgaaagtcgcggacggcgccatgcaaaagttgcgtgacggccgcatcaaaggtcaaaagttccaggtcaaatttgtaaagtaa

SEQ ID NO: 65381 - protein, 505 aa, Bdellovibrio bacteriovorus HD100
MPQKSLSGYLNLGSVIFSYFHSGLDFKSPPCYLSVFHFFRGVPVSQNEFSTLPLSPELLTVVQELGFETLTPIQQESIPLLLAGKDIIGQAKTGSGKTAAFSLPILNKINLDQPLLQALILCPTRELASQVVTEIRKLGRRLPGLKVLAMTGGQSGREQADALENGVQIVVGTPGRLADFVGRNRIDLSAVKTVVLDEADKMLDMGFADEIKTVMRDLPGSRQTVLFSATFPESIEHLSRKYQRHAQQVIIEDEEQNLIEQLVYDSEDNDKTNVLMRILQQHPSDSTIIFCNTKNAVAEIAERLNDLGAASGCLHGDMEQRERDRVMAMFRNGSHRILVATDVAARGLDIDNLELVINFDLPLSPEIYVHRIGRTGRAGKTGVAVTIAHPKDTLKLGQFEELTGGKFARPSLGFKNQYGLNKTLKEAPMKTISISGGRKDKLRPGDILGALTGAAGGLTSADVGKIEIQDKISFVAVSAKVADGAMQKLRDGRIKGQKFQVKFVK

SEQ ID NO: 65382 - DNA, 2010 bp, Yersinia pestis biovar Microtus str. 91001
  CDS (1)..(2010): transl_table=11
atgaggcacgtgtacatgactactgagcttgaaacctcttttgctgatctggggctgtccgctccaattctttccgctctgactgatcttggttatgaaaaaccatctcctatccagttggaatgtattccacacctgttaaacggccgtgatgttctcggtatggcgcaaacaggcagtggcaaaacagccgcgtttggtctgccgctgttacacaatattaaagctgatctgaagtcgccacaggttctggtgttggcaccaacccgtgaattggctgttcaggttgctgaagcgctgtccagtttctctaaacacattaatggcgtcaacgtggtggccctgtacggcggtcagcgttatgacgttcaattacgcgctttgcgccaggggccacaagttgttgttggtaccccaggtcgtctgttagaccacctgaaacgcggtacccttaacctgtccaacctgagcggtttagtgttggatgaagcagatgaaatgctgcgcatgggctttatcgaagacgttgaaacgattatggcgcagatcccggctgaacatcagaccgcgttgttctctgcaaccatgccagaagcgattcgtcgtattacgcgtcgcttcatgaaagaaccacaggaagtccgcattcaatctagcgtgacgacccgccctgacattagccagagctactggagagtgggtggcggttaccgtaaaaatgaagcgctggtacgtttcctggaagctgaagatttcgatgctgctattattttcgtacgtaccaaaaatgcgaccttggaagtagcagaagcccttgagcgtagcggctacaacagcgcggcactgaatggtgatatgaatcaggcactgcgtgagcagacgctggagcgtttgaaagatggccgtctggatattctgattgcaactgacgtagctgcccgtggcttggacgttgagcgtatcagcttggtcgtaaactatgatatccctatggattcagagtcttatgttcaccgtatcggtcgtactggccgtgcaggtcgtgcaggtcgcgcgttgctgttcgttgagaaccgtgaacgtcgtctgttgcagaacatcgaacgcacgatgaagctgacgatcccagaagttgagttgccaaacgcagatttgctgagcgaacgtcgtttagctaaattcgccgctaaggttagccaacaactggaaagcagtgatttggatatgtaccgcgcattgctggctaagctgcaaccggaagaagagtttgatatcgagactctggctgctgcactgctgaaaatggcgcagggcgaacgtcctctgatcctgccaccagaagccccacgccgtccgcagcgtgaattcaattcacgtgatgaccgtggtaacgatcgtggtagccgtgatcgtggtgacagccgtcgcgataaccgctctgacagccgttctgctgatagccgtgatggtggtgagcgtcctgctcgtcgtgaacgtcgtgatgttggcgagatggagctgtaccgcattgaagtgggccgtgatgatggtgttgaagttcgccatattgttggcgctatcgctaacgaaggtgatatcagcagccgttatatcggtaatatcaagttgtttgcttcccactcaacgattgaactgccaaaaggcatgccgggcgaaatgttatctcacttcacccgtacccgtatcctgaacaagccgctgaacatgcagctgttgggtgatgcacagccacatgaacgccgtgagcgtccagcgggtggtaacggtggtgagcgtcgtggcggtggccgtccattcagtggcgaacgtcgtgaaggcgcaggcgctcctcctcgtcgttcatttagcggcgatcgtgctcctaccggtggtggtgagcgtcgtggtaaccgcgatggtcagcgttctgcggccccacgtcgtgatgatgctgccgcacctgctgctgcagccgccgcaccagcccgtcgtcgcttcggtgatgcataa

SEQ ID NO: 65383 - protein, 669 aa, Yersinia pestis biovar Microtus str. 91001
MRHVYMTTELETSFADLGLSAPILSALTDLGYEKPSPIQLECIPHLLNGRDVLGMAQTGSGKTAAFGLPLLHNIKADLKSPQVLVLAPTRELAVQVAEALSSFSKHINGVNVVALYGGQRYDVQLRALRQGPQVVVGTPGRLLDHLKRGTLNLSNLSGLVLDEADEMLRMGFIEDVETIMAQIPAEHQTALFSATMPEAIRRITRRFMKEPQEVRIQSSVTTRPDISQSYWRVGGGYRKNEALVRFLEAEDFDAAIIFVRTKNATLEVAEALERSGYNSAALNGDMNQALREQTLERLKDGRLDILIATDVAARGLDVERISLVVNYDIPMDSESYVHRIGRTGRAGRAGRALLFVENRERRLLQNIERTMKLTIPEVELPNADLLSERRLAKFAAKVSQQLESSDLDMYRALLAKLQPEEEFDIETLAAALLKMAQGERPLILPPEAPRRPQREFNSRDDRGNDRGSRDRGDSRRDNRSDSRSADSRDGGERPARRERRDVGEMELYRIEVGRDDGVEVRHIVGAIANEGDISSRYIGNIKLFASHSTIELPKGMPGEMLSHFTRTRILNKPLNMQLLGDAQPHERRERPAGGNGGERRGGGRPFSGERREGAGAPPRRSFSGDRAPTGGGERRGNRDGQRSAAPRRDDAAAPAAAAAAPARRRFGDA

SEQ ID NO: 65384 - DNA, 1290 bp, Strongylocentrotus purpuratus
  CDS (1)..(1290)
atggctgacaatgatgagaatgagcaagagcttttagattacgaggatgaggaagcacaagagactgccgatgctggcggagatgcagtgaaacaacagaaggaaaccaaagccaagggttatgtgtccatccacagttcaggatttagggatttcttgctcaaacctgagctcctcagagccattgttgattgtggttttgaacatccgtcagaagttcagcacgaatgcattccacaagcaattctgggtatggatgtcttgtgccaagctaaaagtggtatgggtaaaacagcagtgtttgtactggctacccttcagcagttagatccagttgatggccaggtttctgtacttgtcatgtgccacactcgtgagctcgctttccagatcgccaaggaatatgaaaggttcagcaagtacatgccaaccgtcaaggtcggtgtgttctttggaggcctgagcatcaagaaggatgagcagaccatcaagaccaactgccctcatatcgtagtagggacccccggaaggacgctggccctaggtcgtcagaagatcctcaacctcaagcatgtgaagcacttcatcctggacgaatgtgacaagatgctggaacagctagacatgagacgagatgtccaggagatcttccgcatgacaccccatgagaagcaagtcatgatgttcagtgctaccctcagcaaggaagtgcgacctgtctgcaagaaatttatgcaagatccgatggaggtgtacgttgatgatgagactaagctgacactccatggtcttcaacagtactatgtgaagctcaaggacaacgagaagaacaggaaattatttgatttattggatgtcttggagttcaaccaggttgtcatctttgtaaagagtgtacaacgatgcatagccctctgtcagcttttggtagagcagaacttccctgccatcggtatccatagagccatgcaacaagatgaaagattggcgaggtatcaagctttcaagaccttccagaagcgtatcctcgttgcaactaatctctttgggcgtggcatggatatcgagagagtcaacattgtcttcaactatgatatgccagaggactcggacacttacctccatagagttgctcgagctggccgtttcggcaccaagggtttggctgtcacgtttgtctctgacgaggaagatgccaagaccctaaacgatgtgcaagatcgatttgaagtcaacatcggcgaactgccagaagagatcgacattgcctcatacatcgaacaagcttga

SEQ ID NO: 65385 - protein, 429 aa, Strongylocentrotus purpuratus
MADNDENEQELLDYEDEEAQETADAGGDAVKQQKETKAKGYVSIHSSGFRDFLLKPELLRAIVDCGFEHPSEVQHECIPQAILGMDVLCQAKSGMGKTAVFVLATLQQLDPVDGQVSVLVMCHTRELAFQIAKEYERFSKYMPTVKVGVFFGGLSIKKDEQTIKTNCPHIVVGTPGRTLALGRQKILNLKHVKHFILDECDKMLEQLDMRRDVQEIFRMTPHEKQVMMFSATLSKEVRPVCKKFMQDPMEVYVDDETKLTLHGLQQYYVKLKDNEKNRKLFDLLDVLEFNQVVIFVKSVQRCIALCQLLVEQNFPAIGIHRAMQQDERLARYQAFKTFQKRILVATNLFGRGMDIERVNIVFNYDMPEDSDTYLHRVARAGRFGTKGLAVTFVSDEEDAKTLNDVQDRFEVNIGELPEEIDIASYIEQA

SEQ ID NO: 65386 - DNA, 1707 bp, Magnaporthe grisea 70-15
  CDS (1)..(1707)
atggactcaaagtccaacggtcgccccccgcgtcggaacaaccgtaagaggccagccaacaacgggaacgcgacccccgactctgagaatcgccggcctcgacagagacccttccacaatgcagtttctgctcagagaaatcaatcccaagatgcgtccgccgcatcagctgccccggtcaccagcgccgccgccgtcatcgacagcaactcccctcgcttcgccgatctggctagtgagaatctcctcgacccggtgctcctcgacaccatcacacaagacttgaagttcgatcgcatgtcaccggtgcaggccgccacaatccgtcatctgatcgccgaccgcggcgatgttctggcacaagccaagacaggcaccggcaagaccatcgcctttcttctccccgctcttcagaccctgctcaggcgacccagttcgcgcggcaatgacgtctcggttcttgtcatctcccccacccgcgagctagcgttacagatcgcaaaggaggctgaggcgctgcttcagaggctgcctcaatacaaggtgtgcaccgccatcggcggcacaaacaaggatgccgagcagaggcgcatcctgcgcgggtgccaaatcttgatcggcactccggggcgtctcatggatcacctcgaggagcaaagtgtggcagagatgctgcagtccgtagacacgtttgtgctggacgaggccgaccgactgctcgacatgggtttcatgccgcagctcaagaagatcgtcgcggcactccccaacaggcaaaaggtccccaggcagggcatgctcttctccgccaccgttgccgagcacgtcgccaaggtctccagcattgccctcgcgcccgactacaagttcatctccaccatccccaagggcgagtccaacacgcacgaacgggtgccgcagcacttgatcgaggtccccaacttttccgacaccatggccgccctcgtcggtgccctgaggcacgagctggccgagagcgccaaccaggacgagttcaaggccatagtgtttgcccctacggctgccctcgtggacttttatgccgctgtcctcgaggggctgcccaacatgccccgcatcctgacgctacactcgcgcatgacgcagagcaagcgcacgagggtgaccgaggactaccgcaagtctaatgcgaccgtgctcgtggccaccgacgtcgtcgcccgtggtatggatttcccctcggtcaccaacgtcttccaggtcggtctgcccatggacaaggagtcatacatccatcgcctcggccggacggcccgtgccggcgccgagggccgtggaaccttcatcgtctctgctgcagagtcgtactttccccgcaaggtcatgaaggactttacctttatcgaccagcctgcggacttgagcgccctgggcgagattaaggaggttgcgccaaagttggagccttacggcaaggcataccaatcctggctcggattttacaaggtgttcaccaagccgctcggctgggacaatgagcagctcgtgcgcgaggccaacaagctggcgcttgaaggttttggtgcgcccgaggttccccctttgaacaagagcacggtcggcaagatgggattgaagggcgtcaaggggttggtggtggtcaaggacccgcccagagagaaccggagtggcggtggtcggcaaaagaagggcgactcatggtga

SEQ ID NO: 65387 - protein, 568 aa, Magnaporthe grisea 70-15
MDSKSNGRPPRRNNRKRPANNGNATPDSENRRPRQRPFHNAVSAQRNQSQDASAASAAPVTSAAAVIDSNSPRFADLASENLLDPVLLDTITQDLKFDRMSPVQAATIRHLIADRGDVLAQAKTGTGKTIAFLLPALQTLLRRPSSRGNDVSVLVISPTRELALQIAKEAEALLQRLPQYKVCTAIGGTNKDAEQRRILRGCQILIGTPGRLMDHLEEQSVAEMLQSVDTFVLDEADRLLDMGFMPQLKKIVAALPNRQKVPRQGMLFSATVAEHVAKVSSIALAPDYKFISTIPKGESNTHERVPQHLIEVPNFSDTMAALVGALRHELAESANQDEFKAIVFAPTAALVDFYAAVLEGLPNMPRILTLHSRMTQSKRTRVTEDYRKSNATVLVATDVVARGMDFPSVTNVFQVGLPMDKESYIHRLGRTARAGAEGRGTFIVSAAESYFPRKVMKDFTFIDQPADLSALGEIKEVAPKLEPYGKAYQSWLGFYKVFTKPLGWDNEQLVREANKLALEGFGAPEVPPLNKSTVGKMGLKGVKGLVVVKDPPRENRSGGGRQKKGDSW

SEQ ID NO: 65388 - DNA, 1431 bp, Nasonia vitripennis
  CDS (1)..(1431)
atggcttcgtcacatgtggattgggggaagttcgccgaggagcaagcaaagctggacgaaaaggtgacaaatctaaatatcaacccggccaaagaagcaacaaaggaaagggtggcaccacaacaaaatgatgatgagagcagggagcacattaatccagcagaaaagtcactgctgcaaaaaattataaggaaaggactggtggagactacaaaacccttggaaattcaacgcaaaaatcctaactctccactctacagcatcaaaagttttgaagctttacacttaaagccagagttgttaaaaggtgtttacgatatgggtttcaactctccttctaaaatccaggagacagcgctacctacgctactggccgatcctccacaaaacatgattgctcaatcacagtcaggaaccggaaaaactgcagcattcgtgttagctatgctgagtagagtagatacaagcaagatgtatccacaaattttatgtctttctcccacttatgagttagcgatacaaacaggagaagtcgcagctagaatgtcaaaattctgtccagatataaagttaaaatttgcagttagaggagaagaaatggcaagagggagcaaaatcgaggaacacatagtcattggaacaccaggaaaagttctggactgggctctcaaattcaaattttttgatttgaagaagatatctgtgctggttttggatgaggctgatgttatgatcgccactcaaggccatcaagaccagtgcattcgaatacataaaatgttacctcaaacgtgtcagatgatgtttttttctgcaacatacgacaaagaagtgatggattttgctgagattattgtcagtaatccgataattattcggctcttgaaagaagaggagtcattggataatattaaacaatattacgttaagtgtaaagaccctgctgaaaaatatcaagctattacgaatatttatggcgtgatcacaattgggcaggctattattttctgtcatacaaaaaagactgctagctggttagctgaaaagatgactaaagacgggcattcggttgccattctgtcgggtgatctgaccgtgagtgaaagaatttctgttttagacagatttagagaaggattagaaaaggttttaataactaccaacgttcttgcgagaggtattgacgtagagcaagtaacgatagttgttaactttgatctaccgatggatcaaaacagagaggcagactgcgagacttatttgcacaggataggaaggacgggtcgattcggtcaatccggtatagcgattaacttgattgactcgcctcatgctatgcaattatgccaagacattgagcggcacttcaagaaaaaaattcactttttggacgcggaagatgccgacgaaatcgaaaagatcggtgcttaa

SEQ ID NO: 65389 - protein, 476 aa, Nasonia vitripennis
MASSHVDWGKFAEEQAKLDEKVTNLNINPAKEATKERVAPQQNDDESREHINPAEKSLLQKIIRKGLVETTKPLEIQRKNPNSPLYSIKSFEALHLKPELLKGVYDMGFNSPSKIQETALPTLLADPPQNMIAQSQSGTGKTAAFVLAMLSRVDTSKMYPQILCLSPTYELAIQTGEVAARMSKFCPDIKLKFAVRGEEMARGSKIEEHIVIGTPGKVLDWALKFKFFDLKKISVLVLDEADVMIATQGHQDQCIRIHKMLPQTCQMMFFSATYDKEVMDFAEIIVSNPIIIRLLKEEESLDNIKQYYVKCKDPAEKYQAITNIYGVITIGQAIIFCHTKKTASWLAEKMTKDGHSVAILSGDLTVSERISVLDRFREGLEKVLITTNVLARGIDVEQVTIVVNFDLPMDQNREADCETYLHRIGRTGRFGQSGIAINLIDSPHAMQLCQDIERHFKKKIHFLDAEDADEIEKIGA

SEQ ID NO: 65390 - DNA, 1467 bp, Nasonia vitripennis
  CDS (1)..(1467)
atggcgtcatcgaacctcgacaaactggtatcacaggttacgagcctgggaatagagaagcagagcagcgaaacttcggagccgccaaagaccaatgaggagaacaacggcacagctccggagacgcagagcagtccaaaagctgccgatggacaggaggagaaaaccgaaaagtcgacggaggagatctcggctgccgagaagtcgcttctgcagaaggttctgaggaagggactagtcgagtcgacgaagagcgtcgaggtgcagaggagagatccaaattcgccgctttacagtgtcaagacttttgaagctctcaatctgaagccggaacttttgaagggtatctatcaaatgggcttcaatgccccgtccaaaattcaagagacggcgttacctaccttgttagccaatccgccccagaacatgattgcccagtcacagtccggaacgggaaaaacggcggcgtttgttcttgcgatgttgagcagagttgacacgagtaaaccgtacccgcaagtactgtgcctatcgccgacctatgaacttgcggttcaaactggtgaagtcgccgcgaagatggccaaattctgtccagacatcaaaatgaaattcgccctcaaaggagaaacactggcgagagggacgaggatagaggagcacgttctgatcggtaccccaggaaaaatcatggactggtcaataaagtttaagttttttgacattaaaaaaatcaccgccttcgttttggacgaggccgacatcatgatcgcgacgcagggccatcaagaccagtgcatcaggatacataaaatgttgtcaccttcgtgccagatgatgttcttctcggcgacgtacgatactgaggtgatggagtttgcggaattaattgtaaaaaatgccaccataattaggttacaaaaagaggaagaaagtttagagaacatcaagcaatactatgtaaagtgcggaaatatagaggagaaatatcaagcaatcaccaatatttatggcgttataactattggtcaagccatcatattttgtcagacgaaaaaaacagcttgttggttatctgataaaatgacccaggatggacactctgtggcaatcttgtctggggatcttactgttgaagacaggatcagtgttctggatagatttagggagggccttgagaaagtgctgatcacaacaaacgttcttgccagaggaattgacgttgagcaggtgactattgtcgttaactttgacttgccagtggaccaaaatcaacaggcagattacgagacgtaccttcacagaataggcaggacaggaagatttggcaattcgggtgtagcaataaatttggtagattcaactcgatcgatgcaaatttgccaggatattgaacggcatttcaagagaacgatttatcatcttgatgccgaggatccggacgcaatcgaaaaaattgccgcttga

SEQ ID NO: 65391 - protein, 488 aa, Nasonia vitripennis
MASSNLDKLVSQVTSLGIEKQSSETSEPPKTNEENNGTAPETQSSPKAADGQEEKTEKSTEEISAAEKSLLQKVLRKGLVESTKSVEVQRRDPNSPLYSVKTFEALNLKPELLKGIYQMGFNAPSKIQETALPTLLANPPQNMIAQSQSGTGKTAAFVLAMLSRVDTSKPYPQVLCLSPTYELAVQTGEVAAKMAKFCPDIKMKFALKGETLARGTRIEEHVLIGTPGKIMDWSIKFKFFDIKKITAFVLDEADIMIATQGHQDQCIRIHKMLSPSCQMMFFSATYDTEVMEFAELIVKNATIIRLQKEEESLENIKQYYVKCGNIEEKYQAITNIYGVITIGQAIIFCQTKKTACWLSDKMTQDGHSVAILSGDLTVEDRISVLDRFREGLEKVLITTNVLARGIDVEQVTIVVNFDLPVDQNQQADYETYLHRIGRTGRFGNSGVAINLVDSTRSMQICQDIERHFKRTIYHLDAEDPDAIEKIAA

SEQ ID NO: 65392 - DNA, 1272 bp, Nasonia vitripennis
  CDS (1)..(1272)
  misc_feature (663)..(663): n is a, g, c or t
  misc_feature (664)..(664): n is a, g, c or t
  misc_feature (665)..(665): n is a, g, c or t
  misc_feature (666)..(666): n is a, g, c or t
  misc_feature (667)..(667): n is a, g, c or t
  misc_feature (668)..(668): n is a, g, c or t
  misc_feature (669)..(669): n is a, g, c or t
  misc_feature (670)..(670): n is a, g, c or t
  misc_feature (671)..(671): n is a, g, c or t
  misc_feature (672)..(672): n is a, g, c or t
  misc_feature (673)..(673): n is a, g, c or t
atgtcgtatactgaacgaagaaacgacgagcaatggcctggagagagtaagaatggcccgagcgaaggagaacagccgatgtatgcggggggacccccaggaatggaccccgatggcatcatcgagtctaactgggaaaccgtcgtcgataatttcgatgatatgaacctgaaggaagagctgctgcgcggtatctatgcctatggttttgaaaagccctccgctattcaacagcgtgccattttgccctgcgtcaagggacatgatgtcatcgcccaggctcagtcgggtactggtaaaactgcaactttctccatttcaattctgcagaagattgatacgaacattaatgaatgccaggccttgatcctcgcgccaacccgtgaattggcccagcagatccaaaaagtagtgattgctcttggtgatttcatgcatgcacaatgtcacgcatgtattggaggaacgaatgtccgcgaggacatgcgcaggctggagcaaggagttcacgtggttgttggtactcctggtcgagtattcgacatgattagccgacgtgcactacgatcaaacagtatcaaactgtttgttcttgatgaagccgacgagatgctctcccgtggtttcaaggatcaaatctacgacgtctttaagctattgccnnnnnnnnnnnaggttattttattgtctgctaccatgccaagtgatgtattggaagtatccaagtgtttcatgcgtgaacccgttcgtattcttgtgaagaaagaggaacttactcttgagggtatcaagcagttctttatttacattgagcgtgaagattggaagttggataccttgtgcgacttgtatgatactctgagtatcactcaggctgttattttctgcaacaccagacgcaaggtcgactggcttacagatcacatgcaccaaaaagactttactgtatccgctatgcacggagacatggagcaacgcgagcgtgacctcattatgaggcaattccgtaccggctcttcccgtgttttgattaccactgatcttcttgctcgtggtattgatgtccagcaagtttccttggtcatcaactatgatttaccctctaaccgagaaaactatattcacagaattggacgtggtggtcgtttcggtcgtaaaggtgttgcgattaacttcgtgacttctgacgataaaagaatactgaaagatattgaacagttttataacactcatattgatgagatgccaatgaacgtcgctgatttgatctaa

SEQ ID NO: 65393 - protein, 423 aa, Nasonia vitripennis
  misc_feature (222)..(222): The Xaa at location 222 stands for Stop, Ala, Arg, Asn, Asp, Cys, Gln, Glu, Gly, His, Ile, Leu, Lys, Met, Phe, Pro, Ser, Thr, Trp, Tyr, or Val.
  misc_feature (223)..(223): The Xaa at location 223 stands for Stop, Ala, Arg, Asn, Asp, Cys, Gln, Glu, Gly, His, Ile, Leu, Lys, Met, Phe, Pro, Ser, Thr, Trp, Tyr, or Val.
  misc_feature (224)..(224): The Xaa at location 224 stands for Stop, Ala, Arg, Asn, Asp, Cys, Gln, Glu, Gly, His, Ile, Leu, Lys, Met, Phe, Pro, Ser, Thr, Trp, Tyr, or Val.
  misc_feature (225)..(225): The Xaa at location 225 stands for Stop, Gln, Glu, or Lys.
MSYTERRNDEQWPGESKNGPSEGEQPMYAGGPPGMDPDGIIESNWETVVDNFDDMNLKEELLRGIYAYGFEKPSAIQQRAILPCVKGHDVIAQAQSGTGKTATFSISILQKIDTNINECQALILAPTRELAQQIQKVVIALGDFMHAQCHACIGGTNVREDMRRLEQGVHVVVGTPGRVFDMISRRALRSNSIKLFVLDEADEMLSRGFKDQIYDVFKLLPXXXXVILLSATMPSDVLEVSKCFMREPVRILVKKEELTLEGIKQFFIYIEREDWKLDTLCDLYDTLSITQAVIFCNTRRKVDWLTDHMHQKDFTVSAMHGDMEQRERDLIMRQFRTGSSRVLITTDLLARGIDVQQVSLVINYDLPSNRENYIHRIGRGGRFGRKGVAINFVTSDDKRILKDIEQFYNTHIDEMPMNVADLI

SEQ ID NO: 65394 - DNA, 1656 bp, Nasonia vitripennis
  CDS (1)..(1656)
atgacttacgcaaactcgtctgccggtggttaccgtaacggcggaagcagtggcggtcagaaccgcggatccgctggaggtcagcgcagctttggagctggcggtggtggcggaggttcacgtttcggaggtggtggtatgggaggccgtggtggaggaggcggtatgcgcatgggccagaggccccagaacagcaacaatgccggcggaaacctaaggaagcctaattgggataacgagactcttcggccgttcaagaaagacttttacaccccacaccccaacgtctccaaccgtcatccacgcgaggtcaacgagttccgcgaaactcacaagatcactctcaagggcgacaaggtgcccaaccccatccagttcttcgaggaaggcaacttccctgactacgttatgcagggtatcaagaagcaaggctactctgagccaactcccatccaagctcaaggctggcccattgctatgtctggcaagaacatggttggcatcgcccagactggatctggaaagactctggcatacattctgcccgccattgtccacattaacagccagcagccgctgaaccgtggtgatggacccattgccctcattctcgccccaacaagagagttggctcaacagattcagacagtagcctcagactttggctcgctgtcctacgtcaggaacacctgcatctttggtggagcaccaaaaggtggacaggctcgtgacttagagcgtggagtcgagatcgtcatcgctacacccggacgattgatcgatttccttgagcgaggaaccaccaacctacgtagatgtacgtacttggtgctggatgaggctgacagaatgttggacatgggttttgaaccccagatcaggaagatcattgaacagattagaccagacagacaggttctcatgtggtctgctacatggcccaaggaagtcaggatgctagctgaagaatatcttgttgactacacacaactgaacattggttccctgcagctggccgctaaccataacatccttcagatcatcgacgtttgccaagaacaagaaaaagaaacgaagttgggaacgctgcttcaagaaattggaaatgtcaatgatgacggcggcaagaccatcattttcgttgagacaaagaagaaggtcgagaacattacaagaaatattcgtcgatacggctggcctgcagtatgcatgcatggtgacaaatcgcaacaagagcgcgactatgttctcagagaattcagaaataagaaaggatcaatattagtagcaactgatgttgctgcccgaggacttgacgttgatgatgttaggtacgtcataaactttgattatccatcgtcatcagaagactacattcaccgaataggcagaactggacgtagtcaaagttctggtactagctacgcctttttcacacctcagaatgggcgacaagctaaagacctcataaatgtattgagggaggccaatcaaatcattaaccctaaactatccgagttggcgtcgaagggaggaaacaactttggaggaagaaaccgatggggttactctggaggacgaggacgggaaaacagtttctctggcacacacaaacgatttgataacaggagtagtggatacaataattatagttga

SEQ ID NO: 65395 - protein, 551 aa, Nasonia vitripennis
MTYANSSAGGYRNGGSSGGQNRGSAGGQRSFGAGGGGGGSRFGGGGMGGRGGGGGMRMGQRPQNSNNAGGNLRKPNWDNETLRPFKKDFYTPHPNVSNRHPREVNEFRETHKITLKGDKVPNPIQFFEEGNFPDYVMQGIKKQGYSEPTPIQAQGWPIAMSGKNMVGIAQTGSGKTLAYILPAIVHINSQQPLNRGDGPIALILAPTRELAQQIQTVASDFGSLSYVRNTCIFGGAPKGGQARDLERGVEIVIATPGRLIDFLERGTTNLRRCTYLVLDEADRMLDMGFEPQIRKIIEQIRPDRQVLMWSATWPKEVRMLAEEYLVDYTQLNIGSLQLAANHNILQIIDVCQEQEKETKLGTLLQEIGNVNDDGGKTIIFVETKKKVENITRNIRRYGWPAVCMHGDKSQQERDYVLREFRNKKGSILVATDVAARGLDVDDVRYVINFDYPSSSEDYIHRIGRTGRSQSSGTSYAFFTPQNGRQAKDLINVLREANQIINPKLSELASKGGNNFGGRNRWGYSGGRGRENSFSGTHKRFDNRSSGYNNYS

SEQ ID NO: 65396 - DNA, 2127 bp, Nasonia vitripennis
  CDS (1)..(2127)
atgagtaatgcagacaaccagaatggatcaggtctagagcagcaattagctggtctggacttgcaggactcccgccaatcgagtgggggtcgctacgttccgccgcaccttcgaaacaagtctgcaacgagtaatcgcgttgtcgacgaaccagactcgttttcagatagtccgcagggcggcgatcgtccacctctctcatcccagggaggccgtttcggggatcggggtggcgatcgtgaccgtggccgcggcttaggaggtggtggtggtggtcctggtggcggcggtggctacggccggcgcaacgacgccgactttggcaacttcggcggacgcaatcggcgccaggagaatggccgtgactatcgctacgagcgcgatgccccgcggtctggcggcaacgacaggtggcaggaacagccgcgcggcaacgaccgctggcaggacaacggcaggaatgaccgcatgggaggtggaggcggtggaagatggaacgacgatgatagaaggggtggcggcggcggcggtaaacagattgactggaccataccgaccgcaagagacgaaagatgtgagcttgagttgttcggcgagagaagcacaggcatcaacttcagcaaatatgaggatatcccagttgaggcatccggtgaagatattccaccgcacatctcatcctttgacgaggttaagctgacggagataatcaagaacagcattaacctggctggctacgacaagcctactcctgtgcagaaatacgctataccgatcatcattggtcgtcgcgacgtgatggcttgcgcccagactggctcgggcaaaacggccgcttttctcgtaccgattttgaatcaaatttacgagagcggaccgccacccttacccccaaatgccagtggtcgtcgcaagcagtatccgctgggtctggtgctggcgcccacccgcgagctcgctacgcaaatctacgatgaggcgcgcaagttcgcctacagatcgcgtatgcgtccggccgtagtctacggaggatccaatatggtcgagcagttgcgtgaactcgatcgtggatgtcatttgttagttgccacgcctggtcgtctcgtagacatgctgggcagaggcaaaattggtctgcacaattgccgttacttagtactagatgaggctgatcggatgcttgacatgggtttcgagcctcaaattcgacgcatcgtcgagcaggacactatgcctcccactggagaaagacaaactcttatgttctctgctaccttccccaaagagattcaaatgttggccagagatttcttaagcaactacattttcttggccgttggcagagtcggttcgacctcggagaatatcacccagaaaatcgtctgggtagaggagcatgagaaacgatcgtatcttctagacttgcttggagcttgtaacttccaagagccaactcaggaatcattgacattggtgttcgtggagaccaagaagggagctgacatgctggaagagttcctgcataatcagcattacccggtaacaagtatccacggagatcgttctcaacacgaacgtgaggatgcgctacgtcgcttccgctctggtcatactccgattttagtggccactgccgttgcagctcgtggtcttgatattccccatgtgaagcacgttattaactttgatcttcctggagacgtagaagaatacgttcatcgtattggtcgtaccggccgtatgggaaatcttggtttggcaacatccttctttaactcaaagaatcagaatttggtgcgcgatttagtatcattgctcgttgaggctaatcaagaattgccgcactggctagaagatatgtgctctgattctcggcatggtggaggtgccagccggcgaccagctgccaagggtcgcttcagtggtggtggatttggcgccagagattaccgtcaatctagcggtggtggtggaccacccagtcgtagcagcggacctcccggtagacccggcggttatggagggggttatggaggtggcggtggctatggtggcaactacaactcttcgtacaattccagtaacaatagtggtggtggtagtgatcaagactggtgggcgtcatga

SEQ ID NO: 65397 - protein, 708 aa, Nasonia vitripennis
MSNADNQNGSGLEQQLAGLDLQDSRQSSGGRYVPPHLRNKSATSNRVVDEPDSFSDSPQGGDRPPLSSQGGRFGDRGGDRDRGRGLGGGGGGPGGGGGYGRRNDADFGNFGGRNRRQENGRDYRYERDAPRSGGNDRWQEQPRGNDRWQDNGRNDRMGGGGGGRWNDDDRRGGGGGGKQIDWTIPTARDERCELELFGERSTGINFSKYEDIPVEASGEDIPPHISSFDEVKLTEIIKNSINLAGYDKPTPVQKYAIPIIIGRRDVMACAQTGSGKTAAFLVPILNQIYESGPPPLPPNASGRRKQYPLGLVLAPTRELATQIYDEARKFAYRSRMRPAVVYGGSNMVEQLRELDRGCHLLVATPGRLVDMLGRGKIGLHNCRYLVLDEADRMLDMGFEPQIRRIVEQDTMPPTGERQTLMFSATFPKEIQMLARDFLSNYIFLAVGRVGSTSENITQKIVWVEEHEKRSYLLDLLGACNFQEPTQESLTLVFVETKKGADMLEEFLHNQHYPVTSIHGDRSQHEREDALRRFRSGHTPILVATAVAARGLDIPHVKHVINFDLPGDVEEYVHRIGRTGRMGNLGLATSFFNSKNQNLVRDLVSLLVEANQELPHWLEDMCSDSRHGGGASRRPAAKGRFSGGGFGARDYRQSSGGGGPPSRSSGPPGRPGGYGGGYGGGGGYGGNYNSSYNSSNNSGGGSDQDWWAS

SEQ ID NO: 65398 - DNA, 1371 bp, Nasonia vitripennis
  CDS (1)..(1371)
atgacagagttcacggatttgaatattagttcttggattattgatcagttaaagttgattggtgttaagaagcctacaccaattcaacagaactgtattcctgccatattaagtggaaaggattgtataggttgtgcgaaaactggtagtggcaaaacattagcttttgcccttccaattttacaaaagctgtcggaagatccatatggcatatttgcacttgtgctgacaccaacgagagaacttgcttttcagattggtgatcagtttgctgcgattggaaaaactatcaacctaaaaaaatgtacaatagttggaggaatggacatggtagtgcaaggacaggaactggcaaggcatccccatatagtggttgctactccaggacgtttagctgaccatttagaaagttgtaacacattttctctagcaagaataaagtttcttgttcttgatgaagctgacaggcttctaggaggtcattttgatgaacagttgagtgtgatatttaaagcgctgcctaagaacagacagtctctactatttagtgctaccattacagatgctttggacaaggtaaaacaagtatctactaaggagtggttcatatgggaatctactgatgattctggtgttgccacagtaaaggaattagatcaacgttatgtgctttgtcctaaggatgttcgtgatgcctttttagttgaagttatcagaacatttagagctgataatgaaaatggatcaattatgatctttactgacacttgcaagaattgtcagctgctatctatgacattaaatgaagtagggtttgacaatgtagcattacatgctatgatcaaacaaaaagaacgtttatcagcgctgtcaaagttcaaatccaatcatacaaagattttgattgctacagatgtggctgcaagaggtttagatattcctattgtagccctagttattaatcacaacataccaaatataccaaaagaatatattcacagagttggtagaacagctcgtgctggaagaggtggtatggctgttagtttggtaacgccatacgacatcaatttgttacacgcaattgaggaaacaattggtaccaaattgacggaattcaaagttgaagataaagagatcgtcaatattttcactcaaatatccgtgacaaaacgagaagctgaaataaaattagatgagaccgatttttatgaaaagaaaatgatcaacaaaaggaaaaaactaattttagaaggaaaagatcctgatgaagtagatgaaatattagaaaagaagaagaagaaacgtaggaagcctgaaaaaaaggaaattaagagtaagaaagatagtactagtaaagaaactaattag

SEQ ID NO: 65399 - protein, 456 aa, Nasonia vitripennis
MTEFTDLNISSWIIDQLKLIGVKKPTPIQQNCIPAILSGKDCIGCAKTGSGKTLAFALPILQKLSEDPYGIFALVLTPTRELAFQIGDQFAAIGKTINLKKCTIVGGMDMVVQGQELARHPHIVVATPGRLADHLESCNTFSLARIKFLVLDEADRLLGGHFDEQLSVIFKALPKNRQSLLFSATITDALDKVKQVSTKEWFIWESTDDSGVATVKELDQRYVLCPKDVRDAFLVEVIRTFRADNENGSIMIFTDTCKNCQLLSMTLNEVGFDNVALHAMIKQKERLSALSKFKSNHTKILIATDVAARGLDIPIVALVINHNIPNIPKEYIHRVGRTARAGRGGMAVSLVTPYDINLLHAIEETIGTKLTEFKVEDKEIVNIFTQISVTKREAEIKLDETDFYEKKMINKRKKLILEGKDPDEVDEILEKKKKKRRKPEKKEIKSKKDSTSKETN

SEQ ID NO: 65400 - DNA, 1287 bp, Nasonia vitripennis
  CDS (1)..(1287)
atggccgacatcgataaccttctggaatatgaagactatgaagacgaggagcaaactgtaaaactcgcagcaagtgacagcgaagttgcccctgccaagaaggaagtcaagggaacgtacgtatccatccacagcagcagcttcagggactttttgctgaaaccagaacttctacgtgccatttctgactgcggtttcgagcatccatcggaagttcaacacgagtgtatacctcaagccgtactcggcatggacattttgtgccaagctaagtctggtatgggtaagacggccattttcgtcttggccaccttgcaacagctagagttggcggaaaacaaagttttgggcttggtgatgtgtcacactcgagagttggcttttcaaatcagcaaggagtacgagagattcagcaaatacttgccgaaagtgaaagtgtcagttttcttcggcggaatgcctattcaaaaggacaaggaagtcctgaagaataattgccctcacatcgttgtgggaacgcctggacgcatctcagctctcgtcaagggcaagaagctcagcctccagcatttgaaattcttcattcttgacgagtgcgataagatgctggaacaactggacatgcgccaagatgtgcaatacattttcagaagcactccacacggcaagcaagtcatgatgttcagcgcaaccttgtccaaggaaattcgcccagtctgcaagaaattcatgcaggatccaatggaggtctacgtggacgacgaagccaagctcacccttcatggattacaacagcattatctcaaactcaaggagaaggagaagaacaagaagctcttcgaactcctggacgagctcgagttcaatcaagtggttatttttgtgaaatccgtgcagagatgcaactcactgacccagcttctgacagaagagaacttcccgacgattggcatccacaagggaatgacgcaagaggagcgattgaccaaatatcagtcgtttaaggatttccagcagagaatcctggtagccacaaatctgttcggtcgaggcctggacatcgagcgcgtgaacatcgtctttaactatgacatgccggaaaattctgacacgtacctccatcgagtggctcgagctggacgattcggcactaaaggattggccatcacctttgattgcgatgaagcagacgacaaaattctcaacgacgtgcaagaaagattcgatgtaaacatcgccgcactacccgacgaaattgacttagcttcttatattgagggacgataa

SEQ ID NO: 65401 - protein, 428 aa, Nasonia vitripennis
MADIDNLLEYEDYEDEEQTVKLAASDSEVAPAKKEVKGTYVSIHSSSFRDFLLKPELLRAISDCGFEHPSEVQHECIPQAVLGMDILCQAKSGMGKTAIFVLATLQQLELAENKVLGLVMCHTRELAFQISKEYERFSKYLPKVKVSVFFGGMPIQKDKEVLKNNCPHIVVGTPGRISALVKGKKLSLQHLKFFILDECDKMLEQLDMRQDVQYIFRSTPHGKQVMMFSATLSKEIRPVCKKFMQDPMEVYVDDEAKLTLHGLQQHYLKLKEKEKNKKLFELLDELEFNQVVIFVKSVQRCNSLTQLLTEENFPTIGIHKGMTQEERLTKYQSFKDFQQRILVATNLFGRGLDIERVNIVFNYDMPENSDTYLHRVARAGRFGTKGLAITFDCDEADDKILNDVQERFDVNIAALPDEIDLASYIEGR

SEQ ID NO: 65402 - DNA, 1341 bp, Anopheles gambiae str. PEST
  CDS (1)..(1341)
ctgcaaacgctccgacccgtccagtggtcccaggtgaagctggacccgatcgtgcgggaaccgtaccgttccaaggcaacgtaccggcggtccgagcgcgagatctccgaatggcgccgatcgaaggaaatcaccaccaagggccacgacatcccggacccgatctttaccttcgaagagtccggcttcccggcggaaatcattgacgagctgcggtacgccggctttaccacgcccacgccgatccaggcccagggctggccgattgcactgtccggccgggatatggtcggcatcgcgaaaacaggctcggggaaaacactgtcctacctgatccccgccctgatacacatcgatcagcagccgcggcttcgccgtggcgacgggccgatcgcgctgatactagcgccaacgcgcgagctagcgcagcaaatcaaacaggtggcggacgactttgggcgggcgctgaagtacaaaaacacctgcctgtttggcggtgggaaaaagcgcaagcagcaggacgatctggagtacggggtggaaatcgtgatcgccacgcccggtcggctgattgactttctgtcgagcaaccagacgaacctgcgccgctgctcgtacctggtgctggacgaggcggatcgtatgctggacatggggttcgagccgcagatacgcaccatcattgagcagatccgtcccgaccggcagacgctgatgtggtcggccacgtggcccgacatcgtggcccgcctcgtgaaggactatctgaaggactacgcgcagatcaatgtgggatcgctgaagctggcggcgaaccacaacatcctgcagataatcgacgtttgccaggagtacgagaaggagtcgaagctgagcatactgctgcgcgagataatggccgagaaggagtgcaaaacgatcatcttcatcgagacgaagaagcgcgtcgatgatatcacgcgcaaggtgaagcgggacggttggccagcccgctgtatccatggcgacaaatcgcagaacgagcgtgatgctacattaaactcattccgttcgggaaggacgccgattttgattgccaccgatgtggcagcacgtggtctagacgtggacgacgtaaagtttgtaatcaactttgacttcccgaccacctcggaggactacattcatcgcattgggcgcacgggacggtgcaataacactggcacagcctacacgttcttcaccccgaacaatgcctcgaaagcgcgcgatctgatcgatgtactgaaggaggcaaagcaggtgatcaatccaaagctggtcgagttggcaagcatgaaggtcaagggcaaaggtacgtaa

SEQ ID NO: 65403 - protein, 446 aa, Anopheles gambiae str. PEST
LQTLRPVQWSQVKLDPIVREPYRSKATYRRSEREISEWRRSKEITTKGHDIPDPIFTFEESGFPAEIIDELRYAGFTTPTPIQAQGWPIALSGRDMVGIAKTGSGKTLSYLIPALIHIDQQPRLRRGDGPIALILAPTRELAQQIKQVADDFGRALKYKNTCLFGGGKKRKQQDDLEYGVEIVIATPGRLIDFLSSNQTNLRRCSYLVLDEADRMLDMGFEPQIRTIIEQIRPDRQTLMWSATWPDIVARLVKDYLKDYAQINVGSLKLAANHNILQIIDVCQEYEKESKLSILLREIMAEKECKTIIFIETKKRVDDITRKVKRDGWPARCIHGDKSQNERDATLNSFRSGRTPILIATDVAARGLDVDDVKFVINFDFPTTSEDYIHRIGRTGRCNNTGTAYTFFTPNNASKARDLIDVLKEAKQVINPKLVELASMKVKGKGT

SEQ ID NO: 65404 - DNA, 2106 bp, Apis mellifera
  CDS (1)..(2106)
atgagtaatgcagccaaccagaatggatcaggtctagagcagcagttagctggtctggacttgcagggctcccgccaaccaagtgggggtcgctacgtaccaccgcatttacgaaataaatctggaagtaacgcgccttctggcggagatcatcatttttcttccaactcaagaccatattctgatagagatagaggaagggatcgtgatcgcgaaagggaaagggaaagagatcgtgatagaggaagaggtggttcaggttatagagatacgcgctctcgtgatgtcgattttggaaatttcggaaatttcggtgggcgcactagacgtagtgccaatcaagaaaatggaagagattatagatattccaattcagaccgtgagcgagatcgagatcgcacggttaactctggaaatgatcgttggcaagaacctagaaacgatcgctggccagacaacagaaacgatcatagaatggggggcggtcgatggaaggacgacagagaaggaggtaggacgaattctgaaatcgactggacaatacccacttccagagatgagcgattggaggtggaattatttggtactggaaatactggcattaattttagtaaatatgaggatatcccagttgaggctaccggggataacatacctccacacatcacatcttttgacgaagttaagctgacggagataataaagaatagtattagtttggctggttatgataaacccacaccagtacagaagtatgcgataccgattattatcggacgccgtgatgttatggcctgtgcccaaacagggtctggtaaaacagcggcctttttagtgccaatattaaatcagatttatgaaagcgggccacgtccaccaccaattaattcttctggaaagcgcaaacatttccctcttggtctagtattagcacctacaagagagcttgctacgcaaatatatgacgaagcacggaaatttgcatacagatcacgtatgcgtcctgctgttgtctacggtggttcgaacatcgtagatcaaatgcgagaattggatcgtggatgtcatttacttgttgcaacacctggtcgccttgtagatatgttaggtcgtggtaaaatcggattacataattgtcgatatttagtattggacgaagctgatcgtatgttggatatgggtttcgagccacaaataagacgtatagttcaggaggatacaatgcctcccacgggagaaagacaaacgctcatgttttcagctacatttccaaaagaaattcaaatgctggcaagagattttcttagtaactatatctttttagctgtaggccgtgttggttctacgtctgaaaatattactcagaaaattgtatgggtggaggaacatgataagcgttcttatttgcttgatcttcttcaagctagcaatttttcagatccttctgccgaatcattgactctagtattcgtggaaacaaagaaaggtgcggatatgttagaagaatatttacatcaaatgggatatccggtcactagcatccatggtgatcgaacacagcgtgaacgagaagatgctttacgtcgttttcgagctggtaaagcgccaatacttgttgctactgctgttgctgcccgtggacttgatattccacatgttaaacatgtgataaatttcgatttacccggagatgtagaagaatatgttcatcggatcggtcgtacaggtcgtatgggaaatttaggtttagcaacatcatttttcaacaataagaatattaacttagtacgtgacttggtatctctcttagttgaagctaatcaagaacttccaccttggttagacgatatgtttagtgaagcaagatattccggaggtggatctcgtcgtgccggaagtactaaaggccgatttagcggtggatttggtgctagagattatcgtcagcaacctagctccgggtctgctcgcaataatggttcctccaataggcctggtagttatggaggaagttacggaaattatggaggtaactataacaattcatcgtataataattctgctaacaacgtcaacagtaatgatcctgattggtgggacaagtaa

SEQ ID NO: 65405 - protein, 701 aa, Apis mellifera
MSNAANQNGSGLEQQLAGLDLQGSRQPSGGRYVPPHLRNKSGSNAPSGGDHHFSSNSRPYSDRDRGRDRDRERERERDRDRGRGGSGYRDTRSRDVDFGNFGNFGGRTRRSANQENGRDYRYSNSDRERDRDRTVNSGNDRWQEPRNDRWPDNRNDHRMGGGRWKDDREGGRTNSEIDWTIPTSRDERLEVELFGTGNTGINFSKYEDIPVEATGDNIPPHITSFDEVKLTEIIKNSISLAGYDKPTPVQKYAIPIIIGRRDVMACAQTGSGKTAAFLVPILNQIYESGPRPPPINSSGKRKHFPLGLVLAPTRELATQIYDEARKFAYRSRMRPAVVYGGSNIVDQMRELDRGCHLLVATPGRLVDMLGRGKIGLHNCRYLVLDEADRMLDMGFEPQIRRIVQEDTMPPTGERQTLMFSATFPKEIQMLARDFLSNYIFLAVGRVGSTSENITQKIVWVEEHDKRSYLLDLLQASNFSDPSAESLTLVFVETKKGADMLEEYLHQMGYPVTSIHGDRTQREREDALRRFRAGKAPILVATAVAARGLDIPHVKHVINFDLPGDVEEYVHRIGRTGRMGNLGLATSFFNNKNINLVRDLVSLLVEANQELPPWLDDMFSEARYSGGGSRRAGSTKGRFSGGFGARDYRQQPSSGSARNNGSSNRPGSYGGSYGNYGGNYNNSSYNNSANNVNSNDPDWWDK

SEQ ID NO: 65406 - DNA, 1212 bp, Apis mellifera
  CDS (1)..(1212)
atggcggaaataaaatcacgtcgtgtcgcgcaaacagaagatttatcaaacgttgagtttgaaaccagtgaagatgtggaagttattccaacattcgataatatgggactcagagatgaactattacgtggaatttatgcttatggttttgaaaaaccttctgcgattcaacaacgatctattaaaccaatcatgaaaggacgagatgtaattgcacaagctcaatctggtacagggaaaacagcaacattttcaattgctatattgcaatctttggatacacaagttcgagaaacacaagtattggtcttgtcgcctacaagagaattggcaactcaaatacaaaaagttattctggctttaggagattttatgaatgttcaatgtcatgcttgtataggtggtacaaatcttggagaagatattagaaaattagattatggacagcatgttgtatcaggcacacctggaagagtatttgatatgataaaaagaagagttcttagaacaagagctataaaaatgttagttcttgatgaatctgatgaaatgttaaataaaggtttcaaagaacagatttatgatgtatatagatatttgccacctgcaacacaagttgtattggtatctgcaacattaccacatgaaattcttgaaatgacaagtaaatttatgacagatcccattcgtattcttgtaaaacgtgatgaattgacattagaaggaataaaacaattttttgtggctgttgaaagagaagaatggaaatttgatacattatgtgacttgtatgatacattgacaataacacaggcagtaattttctgtaatactaaacgtaaagtggattggctgacagaaaaaatgagagaagctaatttcacagtttgttctatgcatggtgatatgcctcaaaaagaaagggataacataatgaaagaatttcgatctggacaaagtcgtgttttaattacgactgatgtatgggcaagaggaatagatgttcagcaagtatctcttgtgatcaactatgatttacctaacaatcgtgaattatatattcatagaataggacgatcaggacgttttggaagaaaaggcgtttccatcaattttgtaaaaactgatgatataagaattcttcgagatattgaacaatactattcaacacaaattgatgaaatgcctatgaatgtagcagatttaatataa

SEQ ID NO: 65407 - protein, 403 aa, Apis mellifera
MAEIKSRRVAQTEDLSNVEFETSEDVEVIPTFDNMGLRDELLRGIYAYGFEKPSAIQQRSIKPIMKGRDVIAQAQSGTGKTATFSIAILQSLDTQVRETQVLVLSPTRELATQIQKVILALGDFMNVQCHACIGGTNLGEDIRKLDYGQHVVSGTPGRVFDMIKRRVLRTRAIKMLVLDESDEMLNKGFKEQIYDVYRYLPPATQVVLVSATLPHEILEMTSKFMTDPIRILVKRDELTLEGIKQFFVAVEREEWKFDTLCDLYDTLTITQAVIFCNTKRKVDWLTEKMREANFTVCSMHGDMPQKERDNIMKEFRSGQSRVLITTDVWARGIDVQQVSLVINYDLPNNRELYIHRIGRSGRFGRKGVSINFVKTDDIRILRDIEQYYSTQIDEMPMNVADLI

SEQ ID NO: 65408 - DNA, 1359 bp, Apis mellifera
  CDS (1)..(1359)
atggaagaaaatgatttaatagaacaacaagatcaagaaaatttgaaagaaataacgtggaaagatttgggtattgtagatgtattatgtaaagcatgtgaagatctgaaatggaaatcacctacaaaaattcaatatgaagccattcctttagcacttgagggtaaagatataataggattagcagaaactggttctggtaaaactgctgcttttgctcttcctattttacaagcacttttagaaaatcctcaaagatattttgctttaattttgacacccactagagaattagcttttcaaatatcagaacaatttgaagctttaggatcaagtattggagtaaaatgtgcagtaatagtaggtggaatggatatgatgtcccaagcattaatattagcaaaaaaaccacatattttaattgctactccaggaagattagttgatcatttggaaaacaccaaaggttttagtctacgttctttaaaattcttagtcatggatgaagcagatcgaattttgaatatggattttgaagttgaagtagataaaattttaagagtaattcctcgagaaagaaaaacattattattttctgctacaatgaccaaaaaagtgcaaaaattacaacgtgcatctttacgaaatcctgttaaagtagaagtttcaacaaaatatcaaactgttgaaaagttacaacaatattacatttttattcctgtcaaattcaaggatgtatatcttgtacatatcttaaatgaattagctggtaatagttttatgatattttgtgcaacttgcaataatacagttagaactgcccttcttttacgaaatttgggtttcactgctgtccctttacatggtcaaatgtcgcaaaataaaagaatagctgcacttactaaatttaaagccaaaaatcgatctatacttatttccacagatgttgccagcagaggtcttgatattccgcatgtggatattgtaataaattttgatatacctacacatagtaaagactatatacatagagttggacgtactgcacgtgctggtcgttctggtcgttccataacattcgtaacgcaatacgatgtagaattatatcaaagaatagaacaattaatatcaaaacaattaccattatatgcaactcaagaagaagaagtaatggtacttgaagaaagagttgccgaagcacgacgtattgtgaaaatggaaatgaaagacatcgaggacagtaaaaaagtaggtaaacgaaagaagcgacaagatgacgatgaagatgatacagaacaatctttaggagttagaaaaagaataaaaggaaaaaataaaaaacaagggaaaaggttttaa

SEQ ID NO: 65409 - protein, 452 aa, Apis mellifera
MEENDLIEQQDQENLKEITWKDLGIVDVLCKACEDLKWKSPTKIQYEAIPLALEGKDIIGLAETGSGKTAAFALPILQALLENPQRYFALILTPTRELAFQISEQFEALGSSIGVKCAVIVGGMDMMSQALILAKKPHILIATPGRLVDHLENTKGFSLRSLKFLVMDEADRILNMDFEVEVDKILRVIPRERKTLLFSATMTKKVQKLQRASLRNPVKVEVSTKYQTVEKLQQYYIFIPVKFKDVYLVHILNELAGNSFMIFCATCNNTVRTALLLRNLGFTAVPLHGQMSQNKRIAALTKFKAKNRSILISTDVASRGLDIPHVDIVINFDIPTHSKDYIHRVGRTARAGRSGRSITFVTQYDVELYQRIEQLISKQLPLYATQEEEVMVLEERVAEARRIVKMEMKDIEDSKKVGKRKKRQDDDEDDTEQSLGVRKRIKGKNKKQGKRF

SEQ ID NO: 65410 - DNA, 2061 bp, Yarrowia lipolytica CLIB122
  CDS (1)..(2061)
atgttcgactcgaccaagttgcctgcctctgaattcgagcagcgatacggacgagtccccgaccacggcgagaccatctggtccgatctggtggccgaaggagtgactgctcccgagggcaagtcgcacatgaccaacctgacgttccaggcgctgggcgacaacaaggtgctgactgcggatctgtccgactcgctcaacaagatgaacttcaccaacatgtccgaggtgcaggcccgaaccgttctgcctgctctcaagggcgagcatatgctggtgaaggccaagaccggtaccggtaagacggccgcgttctgcatccccgctctccagcgagcccgagacgccaagatcatcgacggagtccagggcctcaagtctctggtcatttcgcccactcgagatctggcccagcagaccctggccttcctcaaacaggtgaccgccaagggcccccttaaagacctgacagtggctgaggccgttggaggaacctcggttcgtcatctgttgaacgagaccgtcaacgactacgatggcggagccgactttctggtcgccacccccggacgtctgcttttcctgctcaaggacccccaggccgccgagtactttgccaacattgactccgtgattctggacgaagccgacacgctgctggaccagggcttcgaggccgatctctgcgagattgtgcgtctcatctccacctacactaaggacccttaccagcgaaacttctactccgccactctggacgaccgagtcaagcggtttgccatcaagaactgccagggccgagtgcgagtggtcgacgctgttggaaaggaatcccccgcccaggatctggtcgagcagcggttcgtcaagattgaggagctgggagacatgctgaccatcatggctcaggatatgaagcgagatgctgccgagactctgcccaaggagcccttcaaggccattgtcttctgccccaccaagcgtctcaccgagaccaaccacgccattctcaagcagctggtgtacgagcagggcgacattttcggctgtgaggcccgaaacgtcttttctctgcactcggatatgtcccagaatggccgtcttcgagccgccgaaaacttccgaaacactcctcattcgatactcgtcacctctgacgttgctgcacgaggtatggacttccccaatgtgacccacgtctaccactacggagtcaccaaccagtttgagccctacgtgcaccgaatgggccgatgtggacgaaacggagccaccggagtctccaccatgtacatgatggagcactccaagtggtacctgaccatgctcaagcgaaacaagatgcttgacaacgccgacaaggtcaagattctggaggaggagcccgaggagtccgtcaaggagaacgtggctaaggccactaaggctgccttttcctccggaaaagacaagactcccaacggccacgacgcttcgcgaatcgcctcggccgtgacttcgttcatgggctattacaactcgtgttcgcccgacatgaagcccaacgacaagcccaagcaggttttctcctcgtttgtgtcgctgtgtcggtctcttggaatggagggcaacctcaacttccagtctctcgaccgatcaggcatgttctcccagaactttggtattgatcgacgagacatttcgcagcttgccattcctcgacgagacgccgttccccagtctatctccgagactttgtttggagttgacgccaatgacattgactacaatgacaccacctctcaggccgacaggctccgggctcagcgaggcggcagccggggaggtaaccgaggcggctacaacagccgaggaggtgaccgaggtggatacaacaagcgaggaggagatcggggtggatacaacagccgaggaggagatcgaaacaactaccgaaatgaccgtggagatcgaaactacgaccgaaatgatcgaaacgaccgaaacaacaacagatacaacaaccgaaacgaccgaaacgaccgaagcggaggaaactggggcaagcgagagcagtactaa

SEQ ID NO: 65411 - protein, 686 aa, Yarrowia lipolytica CLIB122
MFDSTKLPASEFEQRYGRVPDHGETIWSDLVAEGVTAPEGKSHMTNLTFQALGDNKVLTADLSDSLNKMNFTNMSEVQARTVLPALKGEHMLVKAKTGTGKTAAFCIPALQRARDAKIIDGVQGLKSLVISPTRDLAQQTLAFLKQVTAKGPLKDLTVAEAVGGTSVRHLLNETVNDYDGGADFLVATPGRLLFLLKDPQAAEYFANIDSVILDEADTLLDQGFEADLCEIVRLISTYTKDPYQRNFYSATLDDRVKRFAIKNCQGRVRVVDAVGKESPAQDLVEQRFVKIEELGDMLTIMAQDMKRDAAETLPKEPFKAIVFCPTKRLTETNHAILKQLVYEQGDIFGCEARNVFSLHSDMSQNGRLRAAENFRNTPHSILVTSDVAARGMDFPNVTHVYHYGVTNQFEPYVHRMGRCGRNGATGVSTMYMMEHSKWYLTMLKRNKMLDNADKVKILEEEPEESVKENVAKATKAAFSSGKDKTPNGHDASRIASAVTSFMGYYNSCSPDMKPNDKPKQVFSSFVSLCRSLGMEGNLNFQSLDRSGMFSQNFGIDRRDISQLAIPRRDAVPQSISETLFGVDANDIDYNDTTSQADRLRAQRGGSRGGNRGGYNSRGGDRGGYNKRGGDRGGYNSRGGDRNNYRNDRGDRNYDRNDRNDRNNNRYNNRNDRNDRSGGNWGKREQY

SEQ ID NO: 65412 - DNA, 1332 bp, Apis mellifera
  CDS (1)..(1332)
atgacagaaacacatataaattccaatcatgtcctaaattctggtttgaatactaaatcagaaatcgacaaaatggacgatgtaggttggaaagctaaattaaaaattccaccaaaggacaaacgaattaaaactagtgatgttactgatactcgtggcaatgaatttgaggaattttgcctaaaacgagaattattaatgggcatctttgaaaaaggctgggaaaagccttccccaattcaagaagccagtattcccattgcattatctggtaaagatatcttggcccgtgcaaaaaatgggactggtaaaactggggcctattcaattccagtgctagaacaggttgatccacgaaaagatgtgattcaggcactagtacttgtacctactagagagttagctcttcaaacatcacaaatttgcattgaactggcaaaacatatggaaataaaagtaatggtaactactggaggaacagacttacgggatgatattatgaggatttaccagtcagtgcaagtaataatagcaaccccaggaagaattctcgatcttatggataagaatgttgcaaatatggatcattgtaaaactctagttttggatgaagcagataaacttctgtcacaagattttaaaggaatgttggatcatgtcatttcgagattaccacacgaacgtcagatactgctgtattcagccacatttcccctgacagtgaaacaattcatggaaaaacatttaagagatccatatgagattaatttaatggaggaactcacattgaaaggtgtaacacaatattatgcctttgtacaagaacgacaaaaagttcattgtcttaacacactgttttccaagttacaaataacacaaagtataatattctgcaattcaacacaacgtgttgaattacttgcaaagaaaataacagatcttggatattgctgttattacatacacgcgaaaatggcgcaggcacaccgaaatcgcgtgtttcatgatttccgagcaggactttgcagaaacttggtgagcagtgatctgtttactcgtggtattgatgttcaagctgtgaacgtcgtaatcaattttgactttccaaaaatggcagagacataccttcatcgtatcggccgatcaggacgattcggtcacttaggtatagcaattaacctaatcacatacgaggaccgttttaacttacatcgtatcgaacaagaacttggaacagaaattaaacctattccaaaggtaatagatccaagtttgtatgtagcaagaccagaagacaataatagcatggaagagggtaacgtgtctaagtag

SEQ ID NO: 65413 - protein, 443 aa, Apis mellifera
MTETHINSNHVLNSGLNTKSEIDKMDDVGWKAKLKIPPKDKRIKTSDVTDTRGNEFEEFCLKRELLMGIFEKGWEKPSPIQEASIPIALSGKDILARAKNGTGKTGAYSIPVLEQVDPRKDVIQALVLVPTRELALQTSQICIELAKHMEIKVMVTTGGTDLRDDIMRIYQSVQVIIATPGRILDLMDKNVANMDHCKTLVLDEADKLLSQDFKGMLDHVISRLPHERQILLYSATFPLTVKQFMEKHLRDPYEINLMEELTLKGVTQYYAFVQERQKVHCLNTLFSKLQITQSIIFCNSTQRVELLAKKITDLGYCCYYIHAKMAQAHRNRVFHDFRAGLCRNLVSSDLFTRGIDVQAVNVVINFDFPKMAETYLHRIGRSGRFGHLGIAINLITYEDRFNLHRIEQELGTEIKPIPKVIDPSLYVARPEDNNSMEEGNVSK

SEQ ID NO: 65414 - DNA, 1275 bp, Apis mellifera
  CDS (1)..(1275)
atggcagataacgatgatcttttggattatgaggatgaagaacagactgaacaattagttgatggaagcagggatacacctgctaaaaaagaagttaaaggcacatatgtatctattcacagtagtggatttagagattttcttcttaaacctgaaatattacgtgcaattattgattgtggttttgagcatccatctgaagttcaacatgaatgtattcctcaagcagttcttggcatggatatattatgtcaagcaaaatctggtatgggaaaaactgctgtatttgtgttagcaacattacagcaattagaattaactgaaaaccaagtttatgttcttgtcatgtgccacacacgagaacttgcttttcaaataagcaaagaatatgaaagatttagtaaatatatgcctcatgtaaaggttggagtattttttggtggtttgccaattcagaaagatgaagaagttctgaagaatacatgtcctcacattgttgttggtactccaggtcgcatccttgctcttgttcgaaataaaaaattaaatttgaaacatttgaaacattttattctcgacgaatgtgacaaaatgctcgaattattagacatgcgtagggacgtacaggaaatatttagaagcactccacacggcaaacaagtcatgatgttcagcgctacattgtccaaggagatacgtcctgtctgcaaaaaattcatgcaagatcccatggaagtctatgtggatgatgaagcgaaactcacgttgcatggtctacaacaacattatgtgaaacttaaagaaaatgaaaagaataagaagctatttgaattgcttgatgtacttgaatttaatcaggttgttatctttgtaaaatctgtacaaaggtgcatggccttggcacaacttttaacagaacaaaattttcctgcaattggtatacatagaggtatgactcaagaagaacggttatcaaggtatcagcaatttaaagatttccaaaaacgaattcttgtagcgacaaatttatttggacgtggtatggatattgagcgtgtaaacatagtatttaattacgatatgccagaagattcagacacatacttacatcgagtagctagagccggtcgttttggtaccaagggtcttgccattacactagtaagtgatgaaagtgatgctaagatattaaatgatgttcaagaacgatttgatgttaacattacagaattaccagatgaaatagatttagcttcatatattgaaggacgataa

SEQ ID NO: 65415 - protein, 424 aa, Apis mellifera
MADNDDLLDYEDEEQTEQLVDGSRDTPAKKEVKGTYVSIHSSGFRDFLLKPEILRAIIDCGFEHPSEVQHECIPQAVLGMDILCQAKSGMGKTAVFVLATLQQLELTENQVYVLVMCHTRELAFQISKEYERFSKYMPHVKVGVFFGGLPIQKDEEVLKNTCPHIVVGTPGRILALVRNKKLNLKHLKHFILDECDKMLELLDMRRDVQEIFRSTPHGKQVMMFSATLSKEIRPVCKKFMQDPMEVYVDDEAKLTLHGLQQHYVKLKENEKNKKLFELLDVLEFNQVVIFVKSVQRCMALAQLLTEQNFPAIGIHRGMTQEERLSRYQQFKDFQKRILVATNLFGRGMDIERVNIVFNYDMPEDSDTYLHRVARAGRFGTKGLAITLVSDESDAKILNDVQERFDVNITELPDEIDLASYIEGR

SEQ ID NO: 65416 - DNA, 1605 bp, Ustilago maydis 521
  CDS (1)..(1605)
atgaaatgggaaacgagcccaacgcacgactctttgaaaaagacaggcacagaacagcagtcacagagtgacgagttgggcagtcacgagtcagatcgggccagcccaatcacaaatttcaaaccaaaaagggtcgatgcgtcgcgctgtgttgcccatcgccaatcacgaatcacgaatcgtgaatcacactcacgccaatcccgaatcacgaatgtgactcgtgactgtgactcttccatcatcaccctcatccaacgctccaccacctcatcgcacgcagctatcgcaagcactttcaatcatctacatctacaatacgatcactttataagctgcgcctccgaacatcgccctcattctcagccaccctcgtcacacctgcttctgccgcatcatgagcgtcctcagaccgaagatgtgctcaacacaaaaggcaacgagttcgaagattactttctcaaacgtgaactccttatgggcatctttgaagccggtttcgagcgcccctcccccatccaagaagaggccatcccgatcgcactcaccggtcgcgatatcctggcgcgtgccaagaacggtacgggcaagacagctgcctatgtcatcccttcgctcgaaaagctcaacaccaagaagaacaaaattcaggccgtccttctggtgcccacccgtgagcttgctctccaaacaagtcaagtcgcaaagacgctcggaaagcacctcggcgtcgaagtcatggtcaccaccggaggtaccacgcttcgcgacgatattctccgtctcggacagacggttcacctgcttgttggtactcccggtcgaatcctcgacctggccggcaagggcgtcgccgatctcagtcaatgtaccactttcgtcatggatgaagccgataagctcctgtcacccgaattcaccccagtcatggagcagctgctcagctttctccccaaggagaggcaagtcatgctcttctcggccacgttcccactcatcgtcaaggatttcaaggaccgcaacatggtcaagccctacgagatcaacctcatggacgagctcacgctgcgcggtgttacacagtactatgcctttgtcgaagaaagacagaaagtgcattgtctgaacactctcttctccaagctccagatcaaccagtcgattatcttttgcaactcgaccaaccgtgtcgaattgctagccaagaagatcaccgagcttggctatagctgcttctactcgcacgcaaagatgctccaagcgcaccgaaacagagtcttccacgatttccgcaacggtgcctgccgtaacctggtctgctccgacttgcttacccgaggtatcgacatccaggccgtcaacgtggttatcaactttgatttccccaagaacgccgaaacctatcttcaccgaatcggtcgttccggccgtttcggccacctcggtctcgccatcaacctcatcacgtacgaagatcgattcaatctctaccgcatcgagcaggagctgggtaccgagatccagcccattcccagcaacattgacaagaggttgaggctgagggcaacaaccagaatggcaacaagcaggagggaaggccagtga

SEQ ID NO: 65417 - protein, 534 aa, Ustilago maydis 521
MKWETSPTHDSLKKTGTEQQSQSDELGSHESDRASPITNFKPKRVDASRCVAHRQSRITNRESHSRQSRITNVTRDCDSSIITLIQRSTTSSHAAIASTFNHLHLQYDHFISCASEHRPHSQPPSSHLLLPHHERPQTEDVLNTKGNEFEDYFLKRELLMGIFEAGFERPSPIQEEAIPIALTGRDILARAKNGTGKTAAYVIPSLEKLNTKKNKIQAVLLVPTRELALQTSQVAKTLGKHLGVEVMVTTGGTTLRDDILRLGQTVHLLVGTPGRILDLAGKGVADLSQCTTFVMDEADKLLSPEFTPVMEQLLSFLPKERQVMLFSATFPLIVKDFKDRNMVKPYEINLMDELTLRGVTQYYAFVEERQKVHCLNTLFSKLQINQSIIFCNSTNRVELLAKKITELGYSCFYSHAKMLQAHRNRVFHDFRNGACRNLVCSDLLTRGIDIQAVNVVINFDFPKNAETYLHRIGRSGRFGHLGLAINLITYEDRFNLYRIEQELGTEIQPIPSNIDKRLRLRATTRMATSRREGQ

SEQ ID NO: 65418 - DNA, 1944 bp, Ustilago maydis 521
  CDS (1)..(1944)
atggattcaaacagcctagccaacaggctcggcccacagggaaacacgggaaacacaggcagtggacgcggaggaggaggcggtggtcgtggtcgcagtggtcgaggtggtggtcgcggtagagggcgaggaggtgctggtgctggacgaggtcgcggcaggggtcctcgtgttggcctagcgggagcctcggaacaacagtcgccactgactgcaaccgccagcagcagtgttgtcgccactcccgatgagacacctgctgcctctggcactaacacacccacatggacacccaagcctatcgctcccggcaccgatgctgctgtctatctcacggaaaacaagtttgcggatctcaagggctccgttgacgatcgacttctctcggccattcccttccctaccatgtccgctgttcaagctgccactctttcgactgctctgtcgggcaaggacgtgctggcacaggctaagaccggtacgggcaagacgctcgccttcctcattccttccatccacaagctttgtgctctgcccaagccaccaccgcaaacatcgatctcggtgcttgtcctctcgcctactcgcgagctggcgctacaaatcgaaaaggaggcccacatgttgctcgccaatctccaaggcactttcggtgtccagcacgttgtcggaggaaccaacattggcgctgagcgaaagcgtctccagaaggatcgcaaagatattctgatcgctactcctggtcgcttgcttgaccacctctcaagcaacaattcgggtctcgatctgcgccgagcatgtcagaacctcagagtgctcgttcttgacgaagccgatcgcatgctcgacatgggtttccgcaacgagctcgaaaagattctcaagatgcttcccgatccggttgctagcgaacgacagtcgctcttcttctcggccaccatcccgtcgtttgttcacgaggtggccaaacttcgccctgaccacgccttcatctcgacgcttaccgaacaagacaccaacacgcacgagcatgttccgcaagaatcgctcatttgctctctccgcgattgcctgccgcgtgcgctccaagtggtgctttcggaagcggttggctacccaaccaaccacaagatcctcgtatttttgcctacggcaagatcgacttcgttggcagccgccgtatttacacagctgcgcaaccagaagaactcggcatatgcaaagttgggacctatctttgagattcattcgcgaaagtcgcaggcggtgaggacaaagaccatggagacgttccagacgagggcatcgggtatcctcttctcttcagatgtcacggcgcgcggtatcgatattccaggtatctcgctcgtgctccaactcggactacccagcagtctagagcagtacattcatcgtcttggacgaactgctcgagcgggcaaacagggtcgcggcgttttgatccttgccgatttcgaagcgttcttcctgaaccaacaagatgtcaagaagttgcctatcactaaactagacgtagcagccgtggagaccgagagtcgagtcacactgccacaggtagcgacggacgtagatggcgcgatgcaaaccatcgattccaccacaagaagccaggcgtaccaggctcatctaggcttttacaaggcatacttgaaacagctcaagtggacatcggaacagctcatcgcttcaacgaatgactatgccaggcacattttgcagtggccggcggatccttctggaacgtgggtgggtcctcctttgttgcaaaagacggtttccatgatgggcttgaaaggtaagcccggcttgaacattgtcaaggaattgccggccaagaccaacgctggaggaagaggcagtgccggtaatgagctcaagagacatggtcagactcaaggagggcgccaagctaacaaacgttaa

SEQ ID NO: 65419 - protein, 647 aa, Ustilago maydis 521
MDSNSLANRLGPQGNTGNTGSGRGGGGGGRGRSGRGGGRGRGRGGAGAGRGRGRGPRVGLAGASEQQSPLTATASSSVVATPDETPAASGTNTPTWTPKPIAPGTDAAVYLTENKFADLKGSVDDRLLSAIPFPTMSAVQAATLSTALSGKDVLAQAKTGTGKTLAFLIPSIHKLCALPKPPPQTSISVLVLSPTRELALQIEKEAHMLLANLQGTFGVQHVVGGTNIGAERKRLQKDRKDILIATPGRLLDHLSSNNSGLDLRRACQNLRVLVLDEADRMLDMGFRNELEKILKMLPDPVASERQSLFFSATIPSFVHEVAKLRPDHAFISTLTEQDTNTHEHVPQESLICSLRDCLPRALQVVLSEAVGYPTNHKILVFLPTARSTSLAAAVFTQLRNQKNSAYAKLGPIFEIHSRKSQAVRTKTMETFQTRASGILFSSDVTARGIDIPGISLVLQLGLPSSLEQYIHRLGRTARAGKQGRGVLILADFEAFFLNQQDVKKLPITKLDVAAVETESRVTLPQVATDVDGAMQTIDSTTRSQAYQAHLGFYKAYLKQLKWTSEQLIASTNDYARHILQWPADPSGTWVGPPLLQKTVSMMGLKGKPGLNIVKELPAKTNAGGRGSAGNELKRHGQTQGGRQANKR

SEQ ID NO: 65420 - DNA, 1083 bp, Strongylocentrotus purpuratus
  CDS (1)..(1083)
atgaccagagaacttggatttgaaaagccatctgcaatccagcagagagccatcaaaccagttgtgaaaggaagggatgttattgcacaggcacaatctggtacaggaaagacagccactttttccatttcaattctacaatgtctagacacacaggtcagagaaacgcaagctttgattctctctccaacaagagaattggcaaatcaaattcaaaaggttatcctagccttgggtgactacatgagcgttcagtgccattcatgcatcggaggaaccaatgtaggagaggatatcagaaagctggactttggtcagcatgtcgtctcaggaacacctggcagagtgttcgacatgatcaggagaagaaacctgaggacgagagccatcaagatgctggtcttggacgaagcagatgaaatgctgaacaaaggcttcaaggagcagatctatgatgtgtacaggtaccttccccctgcgacccaggttgtacttttcagtgctacgctgccacatgagatcctagaaatgaccagcaagttcatgacagaccccatcagaatcctggtcaaacgtgatgagttgactctggagggtatcaagcagttctttgttgccgtggagagggaagaatggaagtttgacacgctatgtgacctctatgacacactcaccatcacacaggctgtcatcttctgcaacacaaagagaaaggtcgactggttgacagaaaagatgcgtgaagctaacttcacagtgtcctcgatgcatggtgacatgcctcagaaggagagagaagccatcatgaaggagtttagatcaggagctagtcgtgttctgattaccactgatgtatgggctagaggtctggacgttcagcaggtctcgctggttatcaactatgatctgccaaacaaccgtgagctctacatccacagaatcggtcggtcgggtcgttacggccgtaagggtgtggccatcaactttgtgaagagtgatgacatcagaatcctgcgtgacatagagcagtattacagcacacagattgatgaaatgcccatgaatgttgcggatctcatctag

SEQ ID NO: 65421 - protein, 360 aa, Strongylocentrotus purpuratus
MTRELGFEKPSAIQQRAIKPVVKGRDVIAQAQSGTGKTATFSISILQCLDTQVRETQALILSPTRELANQIQKVILALGDYMSVQCHSCIGGTNVGEDIRKLDFGQHVVSGTPGRVFDMIRRRNLRTRAIKMLVLDEADEMLNKGFKEQIYDVYRYLPPATQVVLFSATLPHEILEMTSKFMTDPIRILVKRDELTLEGIKQFFVAVEREEWKFDTLCDLYDTLTITQAVIFCNTKRKVDWLTEKMREANFTVSSMHGDMPQKEREAIMKEFRSGASRVLITTDVWARGLDVQQVSLVINYDLPNNRELYIHRIGRSGRYGRKGVAINFVKSDDIRILRDIEQYYSTQIDEMPMNVADLI

SEQ ID NO: 65422 - DNA, 1974 bp, Strongylocentrotus purpuratus
  CDS (1)..(1974)
atggtgaatggtgatgatgtatcattaaatggagaaattcgtaagaaaaagaaatcaaagaaggaaaagaaaattaaatctgatgatgcagaaatagaatctccttctaaagaggaatcaccatcagaggagaaaccaaagaagaagaggaaaaagggctctgatgaggaaggagaagatgaaatcaagaagaagaaagtgaagaaagagaagaatggagaggttcaacagaatggcatcgtaaaggaaaagccatcatcatcaaagcagggagaagtagatgaagagacccaagaaaagataggagccttctcaaattttggcataagacccaaaaccattgagaaactgcatgccaaaggagtcaaatacctgtttcccattcaagcccagactttcaagccgattgatgatggttttgatgtcatagcacaagcacgaactggaaccggtaagactttatcctttgttctcccgctggtcgagaaatggcagcagttccctcagaagagcggccgacaacccatcatcctcgcccttgctcctaccagagaactcgccaagcagatatcggagtactttgaagccattggtccgcacctcagcaccacctgcatctacggaggcacctcctactggccccaggagtcggccatccggcggggtctggacgtcgtcgtgggaacgcccggacgcatcctggactacatccgcaagaacaccctggacctgtccaagctgaagcacgtcgtgttggacgaagtggatcggatgctggacatggggtttgcggaatcggtggaggagatcctcggtgctgcttacaagactgaggaagcccctaacaacccccagacactgctcttctcagccactgtccctccctgggtctaccagactgcagtcaagtacatgcgcaaggatctcaagaaggtcgaccttgtaggtagggacaggatgaagacagctacaacagttcagcatctggccatcaactgtagctattttgaccgaccacaggtcattagtgatgtcatcaaggtttacgggggtttggacggccgctgcatggtcttctgtgagaccaagagggatgccaacgagctggccatgagctctgacgtgaagcaagagacgcaggtcatgcatggagatatacctcagacacagcgagaggtcactctaaagggtttccgagagggcaagttccagtgcctggtcaccactgacgtagcagcgagggggttagacataccggaagttgatctagtcatccagtgtaatccgccaagggatgtggattcttacatccatcgatcagggaggaccgggagagctggtcgtaatggagtctgtgtctgtttctacaagcgacaggaagagagggatctacagaaagtagaatacaaagcgggcatcaagttcaaacgagtgtcggctccccagccaagtgacatcatcaagtcatccgtcaaagatgttacagatttactgggcgctgtacagcccgagatggtggctatgttcaagagtgcagcagaggccatcatagctgagaagggggcggtggcggcgctagcggcagctctggctcacataacaggttccacagccatgaagacaagatcactgctaacggcagaagagggtaagaccacgttcctccttgagacgcaatcgcagctgatggacatcggtgatgtcttcaagacccttggacgctacattgaccgtgactcacggaatgccatcaagggcatccgtctgtgcaaggatcagactgcggcagtctttgatgtttcagatgaccacaaggactatctactgtcattatggcaggacacgtctgaagctcaactcaccatcgcgacagaactgccagagctcctcgtccctacccagtcgggatcctttgacgaccgaagaggaggtggagagttagataccggtacccttgtattatcttcaaagtaa

SEQ ID NO: 65423 - protein, 657 aa, Strongylocentrotus purpuratus
MVNGDDVSLNGEIRKKKKSKKEKKIKSDDAEIESPSKEESPSEEKPKKKRKKGSDEEGEDEIKKKKVKKEKNGEVQQNGIVKEKPSSSKQGEVDEETQEKIGAFSNFGIRPKTIEKLHAKGVKYLFPIQAQTFKPIDDGFDVIAQARTGTGKTLSFVLPLVEKWQQFPQKSGRQPIILALAPTRELAKQISEYFEAIGPHLSTTCIYGGTSYWPQESAIRRGLDVVVGTPGRILDYIRKNTLDLSKLKHVVLDEVDRMLDMGFAESVEEILGAAYKTEEAPNNPQTLLFSATVPPWVYQTAVKYMRKDLKKVDLVGRDRMKTATTVQHLAINCSYFDRPQVISDVIKVYGGLDGRCMVFCETKRDANELAMSSDVKQETQVMHGDIPQTQREVTLKGFREGKFQCLVTTDVAARGLDIPEVDLVIQCNPPRDVDSYIHRSGRTGRAGRNGVCVCFYKRQEERDLQKVEYKAGIKFKRVSAPQPSDIIKSSVKDVTDLLGAVQPEMVAMFKSAAEAIIAEKGAVAALAAALAHITGSTAMKTRSLLTAEEGKTTFLLETQSQLMDIGDVFKTLGRYIDRDSRNAIKGIRLCKDQTAAVFDVSDDHKDYLLSLWQDTSEAQLTIATELPELLVPTQSGSFDDRRGGGELDTGTLVLSSK

SEQ ID NO: 65424 - DNA, 1617 bp, Strongylocentrotus purpuratus
  CDS (1)..(1617)
atggcaacagcaccaccacaactcaaccgcgtgatgaataacaatcacggggcgaggagcccgaacagggggcagcagaacaacgactcgaggagaggagatggcaaccaccaggggagccaccaggggaaccaccagggaagccaccaggggaatcatcaggtaaatcatcaaggacgtggagacaggaacggaccccaccagcagcgagacgggccaggtagctaccatcatggacactacggagggtacagggggagcggaggctacggcagcagacagtattcaagacagaaggactttgagagaccagcacctaaaccagctgcaccacttccaaagccatcacccatagacatggatgatccagactggaaagaaaagctggcaatcccagataaggatagaagaattagaaccacagatgtgacagataccaaaggaaacgaatttgaggattactgcctcagtcgccccctgctcatgggcatctttgagaagggctgggagaaaccatccccgatccaagaagagagcattcctatcgccttgaccggacgagacattatggccagggccaagaatgggaccggcaagaccggggcatataccatacccgtcctggaaaagacgaacacagaaaacaattttattcaagctttagtccttgtcccaacgagagagctggctctccagacgagtcagatctgtaagcagctgtcaaagcacacgggccacaatgtcatggtcacaacgggtggtacaagcctaagggacgacatcctcagactggaagacccagttcaccttgtgatagctacacctgggcgtattcttgatctcatgaagcagagcattgccaaaatggacaagtgcagtgtgctggtgttagatgaggctgacaagttactgtctaaagacttccagaacatgctagatgacatcatcagctttcttccacaggatcgacaaatcatgctctactctgcaacctttccaatcacagtcaagaactttatggatcgttacttgaccaaggcatatgaaatcaacctcatgcaggaattaaccctgaagggtatcactcagtattacgcttttgtggaggagaaacaaaaagttcactgccttaatactctcttctctaagttgcaaatcaaccaagcgataatcttctgcaatacgacccagcgtgtggaactccttgccaagaagatcacagagcttggctactcctgttactacatccattcacgcatgcagcaggaacatcgaaacagagtattccatgacttccgcaacggcgcctgcagaaaccttgtctgtacagacttgttcacccgcggtatcgacatccaatctgtcaacgtcgtcatcaacttcgacttcccgcgcgtgtcggagacctacctccaccgcatcggtcgctctggacgttacggccacatgggactggccatcaacatgatcacccacgacgaccgcgtccccatgtatgtcattgagaaggagctgtcgaccaagatcgttcccttcccgtgcaaggaggcagtcgacaagaggctctacgtggcagagtaccagacggaggaagagatcggagacggatccggctag

SEQ ID NO: 65425 - protein, 538 aa, Strongylocentrotus purpuratus
MATAPPQLNRVMNNNHGARSPNRGQQNNDSRRGDGNHQGSHQGNHQGSHQGNHQVNHQGRGDRNGPHQQRDGPGSYHHGHYGGYRGSGGYGSRQYSRQKDFERPAPKPAAPLPKPSPIDMDDPDWKEKLAIPDKDRRIRTTDVTDTKGNEFEDYCLSRPLLMGIFEKGWEKPSPIQEESIPIALTGRDIMARAKNGTGKTGAYTIPVLEKTNTENNFIQALVLVPTRELALQTSQICKQLSKHTGHNVMVTTGGTSLRDDILRLEDPVHLVIATPGRILDLMKQSIAKMDKCSVLVLDEADKLLSKDFQNMLDDIISFLPQDRQIMLYSATFPITVKNFMDRYLTKAYEINLMQELTLKGITQYYAFVEEKQKVHCLNTLFSKLQINQAIIFCNTTQRVELLAKKITELGYSCYYIHSRMQQEHRNRVFHDFRNGACRNLVCTDLFTRGIDIQSVNVVINFDFPRVSETYLHRIGRSGRYGHMGLAINMITHDDRVPMYVIEKELSTKIVPFPCKEAVDKRLYVAEYQTEEEIGDGSG

SEQ ID NO: 65426 - DNA, 1260 bp, Tribolium castaneum
  CDS (1)..(1260)
atgtcagtgaacgatagaagaaatgaagaatgggacaaaaacggtcccgcctccgacaaggaatctcaggcgtacgacggccccccgggcatggaccccgatggcgtcatcgactccaactgggacgaagtcgtcgacaacttcgatgatatgaacttgaaggaggagctgctccgaggcatttacgcttacggtttcgagaagccctcggccatccagcaaagggccatcataccatgtgttaagggccatgacgtcattgcgcaggcgcaatccgggaccggcaaaaccgccaccttttcgatatcaattcttcagcagatagacacttcgcttagagaatgccaagctttgattttggctccaacgcgagaattagcacaacaaattcagaaagttgtcatcgctcttggagatttcatgagcgcccaatgccacgcgtgcatcgggggcaccaacgttagggaagatatgaggaagctcgagactggggtccacgtcgttgtggggacaccgggacgggtctacgatatgatcaaccgaaggtcgttgcgggctaatttcatcaagatgtttgttctggatgaagccgacgagatgttgtctcgcgggttcaaggatcaaatacacgatgtcttcagaatgctcaactcggacgttcaggttattcttctctcggccacgatgcctgctgacgtgttggacgtaacgaaatcgtttatgcgtaaccccgttcgtatccttgtgaaaaaggaagaactaaccctagaaggtatcaagcaattcttcgtgtatgttgaaagagaggattggaagttggaaacattatgcgatttatatgacactctgtccatcactcaagctgttatcttttgcaatacccgtcgtaaggtcgattggcttactgaaaatatgcacaagagggatttcacggtgtcagctatgcacggtgatatggaacaaagagaacgtgacgtcattatgcgtcaatttaggacaggatcatctagggttttaattacgacggatctgcttgccagagggatcgacgttcaacaagtttcactagttattaactacgatttgccttcaaacagggaaaactacattcataggattggtcgtggtggccgctttggtcgtaagggcgtggccataaactttgtgacagaagaggacaaacgtacgctcaaggacattgagcagttttataataccaaaatcgacgaaatgccaatgaatgtggccgacctgatataa

SEQ ID NO: 65427 - protein, 419 aa, Tribolium castaneum
MSVNDRRNEEWDKNGPASDKESQAYDGPPGMDPDGVIDSNWDEVVDNFDDMNLKEELLRGIYAYGFEKPSAIQQRAIIPCVKGHDVIAQAQSGTGKTATFSISILQQIDTSLRECQALILAPTRELAQQIQKVVIALGDFMSAQCHACIGGTNVREDMRKLETGVHVVVGTPGRVYDMINRRSLRANFIKMFVLDEADEMLSRGFKDQIHDVFRMLNSDVQVILLSATMPADVLDVTKSFMRNPVRILVKKEELTLEGIKQFFVYVEREDWKLETLCDLYDTLSITQAVIFCNTRRKVDWLTENMHKRDFTVSAMHGDMEQRERDVIMRQFRTGSSRVLITTDLLARGIDVQQVSLVINYDLPSNRENYIHRIGRGGRFGRKGVAINFVTEEDKRTLKDIEQFYNTKIDEMPMNVADLI

SEQ ID NO: 65428 - DNA, 1623 bp, Tribolium castaneum
  CDS (1)..(1623)
atgaggggacgttctggacgaagatcaaggagtcgagaccgccgtcgatcgcgaagccgcgaccggggttacggtggcggtggtggccgtcgaaacaccgccggtgctaacttacgaaaaccccgttgggatttaagccgtcttgagccgttcaaaaaagacttctatgtaccacatcctaacgtaacaaaccgtccaagctacgaagtggaagaatggcgaagagagaaagaaattaccctcaaaggaaaatgcatccccgatttagtgttcacattcgaagaagctggttttccagactacgtcatgtccgaaattcgcaaaatgggattcaaacatccgacacctatacagtcgcaaggatggcctattgctttatcgggacgtgacatggttggaatcgcttcgacagggtctggaaaaacgctttcgtatattctgccagcgattgtgcacattaaccatcaacccaggttattacgaggtgatggacccattgcgttggtgctggcgcccacgagggagctggcacagcagatacaacaggtcgcaactgatttcggccgttcatcaaaaattcgcaacacttgcgtttttggaggcgcccccaaaggacctcaagctaacgatttgatggatggtgtagaaatagttatagcaaccccgggcagattgatcgactttttagaaagtaatagaacgaaccttcgacgttgcacgtatttagttttagacgaggcagatcggatgcttgatatgggttttgaaccccaaattcgtaaaataatcgaacagattagaccagatagacagaccctgatgtggtcagcgacttggcctaaagaagttcaagccctagcggctgagtttctaaaagactacattcagataaatgtaggttctttgcagttgtctgcaaatcataacatacttcagattattgatgtgtgtcaggaatatgagaaagagacgaaattgagtacgttacttaaagaaatcatggccgagaaggaaaataagacgatcatatttattgaaactaagaagagagttgatgagattaccagaaaaatgaaacgtgacggatggccagcggtttgcatacatggagataagtcgcaacaggagagagattgggttttacaagacttcaggactggtaaggcccctattctcgtggcgactgacgtggcggctcgaggtttagatgtagaagacgtaaaatttgtaatcaattttgactacccgtccaattccgaagactacgtgcaccgtattggtcgcacggggcgttcgcaacgcaccggaacagcctatacatttttcacaccagcaaacgccaacaaagcggccgatttggtgtccgttctcaaagaagccaaacaagttatcaatccgaaactccaagaaatggccgacaatcgcaactggagctcgaacggcagttcaggtcgaggtctgtctcccgctccaggtcgcggtctcctcgcagaggaagacgcgacagaagtcgatcgagagacagaaataggagaaagaagtcgcgtagcacaagcagggaccgcagtcctccccgtaatagcaaatcagcaccctctcaacagccccctccacaacccttga

SEQ ID NO: 65429 - protein, 540 aa, Tribolium castaneum
MRGRSGRRSRSRDRRRSRSRDRGYGGGGGRRNTAGANLRKPRWDLSRLEPFKKDFYVPHPNVTNRPSYEVEEWRREKEITLKGKCIPDLVFTFEEAGFPDYVMSEIRKMGFKHPTPIQSQGWPIALSGRDMVGIASTGSGKTLSYILPAIVHINHQPRLLRGDGPIALVLAPTRELAQQIQQVATDFGRSSKIRNTCVFGGAPKGPQANDLMDGVEIVIATPGRLIDFLESNRTNLRRCTYLVLDEADRMLDMGFEPQIRKIIEQIRPDRQTLMWSATWPKEVQALAAEFLKDYIQINVGSLQLSANHNILQIIDVCQEYEKETKLSTLLKEIMAEKENKTIIFIETKKRVDEITRKMKRDGWPAVCIHGDKSQQERDWVLQDFRTGKAPILVATDVAARGLDVEDVKFVINFDYPSNSEDYVHRIGRTGRSQRTGTAYTFFTPANANKAADLVSVLKEAKQVINPKLQEMADNRNWSSNGSSGRGLSPAPGRGLLAEEDATEVDRETEIGERSRVAQAGTAVLPVIANQHPLNSPLHNP

SEQ ID NO: 65430 - DNA, 1377 bp, Tribolium castaneum
  CDS (1)..(1377)
atgtctcagaagatagattgggctaaatttgcggaagaacaggaaaaaagcgtccaaaagaagttgggcgacgttagtctgagttcaaatagaaacaactccactgccgaggctagtttgctgcgaaaattgatgcgaaatggtctcgtggaaagcaaaactgatatcgagatccagaggcaaaacccgaactcgccgctttattctgttaaaactttcgaagccctgaacttaaaccccaatttattgaagggggtttacgatatggggttcaatgcgccgtcgaaaatccaggaaacggctctaccgaccctcttagccaaccctccacagaacctcatagctcaggcccagtcaggcactgggaaaacggccgcttttgtcttagccatgttaagtcgcgtcgatgcttcgctaaagtatcctcaagttttgtgtttgtcacccacttacgagctggctatccaaactggcgaagtggcggcacatatggcaaagttttgccccgaaatcgagatgaaatacgccgtgagaggcgaagaagtttcaagagggtcgcatttaaccgaacacatcataattggaacgcctggaaaagtgctagattgggccctgaaattccgtgttttcgatctgaaaaaactaacagtgtttgtcttggatgaggctgatgtgatgatcgcaacccaaggccaccaggatcaatgcatcagaatacacaaaaatttggggccgaattgtcaaatgatgtttttctctgcaacgtacgatcaacagattatggagtttgctgaaatgattgttcccgattctatcacaataagactgaaacgcgaagaagaaagtctggataatatccaacaatattatgtcaaatgctctggaccacaggaaaaatataacgctgtgacgaatatttatggaactgtgggggtgggacaggcgatcattttttgtcacaccagacgcactgcgagctggctcgctgaaaaaatgtcgaaagatggccatgctgtggccgtcttaactggagatttaacggtggaacaacgtattaacgtcttagatcggttcaggtctggtcaagaaaaagttcttataaccaccaatgtattgtctagaggtattgacgtcgaacaagtgacaatcgttgtaaatttcgatttgccaatagacatgcaaggcaaggccgactgcgacacttacttgcacagaatcggtcgaactggacgttttggtaaacagggtattgctataaatctggttgattcacaagaggccatgaatatttgtcgcgatatcgagaaacattttaaccgaaaaattcattatttgaatgccgatgattcggacgaaattgagaaaattggagcctga

SEQ ID NO: 65431 - protein, 458 aa, Tribolium castaneum
MSQKIDWAKFAEEQEKSVQKKLGDVSLSSNRNNSTAEASLLRKLMRNGLVESKTDIEIQRQNPNSPLYSVKTFEALNLNPNLLKGVYDMGFNAPSKIQETALPTLLANPPQNLIAQAQSGTGKTAAFVLAMLSRVDASLKYPQVLCLSPTYELAIQTGEVAAHMAKFCPEIEMKYAVRGEEVSRGSHLTEHIIIGTPGKVLDWALKFRVFDLKKLTVFVLDEADVMIATQGHQDQCIRIHKNLGPNCQMMFFSATYDQQIMEFAEMIVPDSITIRLKREEESLDNIQQYYVKCSGPQEKYNAVTNIYGTVGVGQAIIFCHTRRTASWLAEKMSKDGHAVAVLTGDLTVEQRINVLDRFRSGQEKVLITTNVLSRGIDVEQVTIVVNFDLPIDMQGKADCDTYLHRIGRTGRFGKQGIAINLVDSQEAMNICRDIEKHFNRKIHYLNADDSDEIEKIGA

SEQ ID NO: 65432 - DNA, 1278 bp, Tribolium castaneum
  CDS (1)..(1278)
atggccgatgccgatgatcttttagactacgaagacgaagaaaatccggaacaaaccgttgccgagaccgtcggggccggtgaccagaagaagggcatcaagggtacttacgtgtccatccacagttcaggcttcagggattttctcctgaaaccggaaattttgcgcgccattgttgactgcggttttgagcacccgtctgaagtgcaacacgaatgcatcccacaggcagttcttggtatggacatcttgtgccaagccaagtccggtatgggcaagactgcagtgttcgtcctggcgacgcttcagcagttggagccaaccgaaaacgtggtttacgtgcttgtaatgtgccacacgcgcgaattggccttccaaatcagcaaagagtacgagcggttcagtaaatacatgccaaacatcaaagtcggtgtgtttttcggcggcttgtctatacaaaaggacgaggaggtgttgaagaataattgcccccatatcgtcgttgggacaccgggacgcatcctcgccttggtccggtccaagaaactcaatctcaagcatctcaaacatttcattcttgacgagtgcgacaagatgctggagttattagatatgaggagggacgtgcaagaaatttaccgtaacacgccgcacggcaagcaagtaatgatgttcagcgccaccctaagtaaagaaattcgccccgtctgcaagaagtttatgcaagatccgatggaagtttatgtggacgatgaagcgaaattaactctgcacggacttcagcaacattacgttaaactaaaggaaaatgagaaaaacaaaaaattgtttgagctgcttgatgttttggaatttaaccaggttgttattttcgtcaaatcagtccaacgatgtattgctttggcgcaactattgacggaacagaatttccccgccattggcattcacagaggtatgaaccaagaagaacgtctttcacgttaccaacaatttaaagacttccaaaagagaattttggtcgccacgaatttgtttggcagaggcatggatattgaacgagtaaatatcgtttttaactacgacatgcctgaggattcagatacttacttacatcgtgtggcaagagctggtcgttttggtactaaaggtcttgctgttacttttgtatcagaagaaagcgatgcgaaaatcttaaatgaagtgcaagacaggtttgatgttaacattacggaattaccggacgaaattgatctcagcacatatattgaaggacgatga

SEQ ID NO: 65433 - protein, 425 aa, Tribolium castaneum
MADADDLLDYEDEENPEQTVAETVGAGDQKKGIKGTYVSIHSSGFRDFLLKPEILRAIVDCGFEHPSEVQHECIPQAVLGMDILCQAKSGMGKTAVFVLATLQQLEPTENVVYVLVMCHTRELAFQISKEYERFSKYMPNIKVGVFFGGLSIQKDEEVLKNNCPHIVVGTPGRILALVRSKKLNLKHLKHFILDECDKMLELLDMRRDVQEIYRNTPHGKQVMMFSATLSKEIRPVCKKFMQDPMEVYVDDEAKLTLHGLQQHYVKLKENEKNKKLFELLDVLEFNQVVIFVKSVQRCIALAQLLTEQNFPAIGIHRGMNQEERLSRYQQFKDFQKRILVATNLFGRGMDIERVNIVFNYDMPEDSDTYLHRVARAGRFGTKGLAVTFVSEESDAKILNEVQDRFDVNITELPDEIDLSTYIEGR

SEQ ID NO: 65434 - DNA, 1215 bp, Tribolium castaneum
  CDS (1)..(1215)
atggctgtcgcaaaaccttcaaaccgcaatgcggctttcgaagacttgtcgaacgttgagttcgaaaccagcgaagatgtggaagtcatcgagcaatttaagaatatgcacctgaaggaggagctccttcgcggtgtctttgcatatggttttgagaaaccatcagctatccaacagagggctatcaagccgataataaagggccgagatgttatcgctcaagcccagtcaggtaccggcaaaacggccacattctcgatcgctattttgcagtcgcttgacttgcaaacgcgggaaacccaagtactttgcttgtcgccaacgagggagttggccgtgcaaatccagaaagttatcctggctttgggggactttatgaacgtgcagtgtcacgcctgcattggtgggaccaatctgggagaggatatcaggaagctggattatgggcaacatgttgttagtggaacacctggaagagtttacgacatgatcagacggcgcgcccttaggaccaggtccgtcaaaatgctggttttggacgaagccgacgaaatgttaaacaaaggcttcaaggagcaaatctacgacgtttacaggttcctgccgccctccactcaagtcgtgttgatttctgcgactttgccccacgagattttggagatcacgtcgaagttcatgacggacccgatccgtattttggtaaaacgtgatgaattaactcttgaaggcatcaagcaatttttcgtcgcggttgagcgtgaggagtggaaatttgacacactttgtgacttgtacgatactttaaccatcacgcaagctgttatcttttgcaacactaaacgcaaagtcgattggttgactgaaaaaatgcgcgaaaacaatttcaccgtgagttccatgcacggtgatatgccccagaaggagagagataatattatgaaggagttcaggtcgggacagagtcgtgtacttatcacgaccgatgtgtgggcgagaggtatcgacgtccagcaagtcagtttggtcattaattacgatttgccgaacaaccgtgagttgtacattcaccgtattgggcgatctggcaggtttggtagaaagggtgttgcgattaatttcgtcaagtcggacgatatcaggattttgcgggatattgagcagtattattccacacagattgacgaaatgccgatgaatgtcgctgatttaatttaa

SEQ ID NO: 65435 - protein, 404 aa, Tribolium castaneum
MAVAKPSNRNAAFEDLSNVEFETSEDVEVIEQFKNMHLKEELLRGVFAYGFEKPSAIQQRAIKPIIKGRDVIAQAQSGTGKTATFSIAILQSLDLQTRETQVLCLSPTRELAVQIQKVILALGDFMNVQCHACIGGTNLGEDIRKLDYGQHVVSGTPGRVYDMIRRRALRTRSVKMLVLDEADEMLNKGFKEQIYDVYRFLPPSTQVVLISATLPHEILEITSKFMTDPIRILVKRDELTLEGIKQFFVAVEREEWKFDTLCDLYDTLTITQAVIFCNTKRKVDWLTEKMRENNFTVSSMHGDMPQKERDNIMKEFRSGQSRVLITTDVWARGIDVQQVSLVINYDLPNNRELYIHRIGRSGRFGRKGVAINFVKSDDIRILRDIEQYYSTQIDEMPMNVADLI

SEQ ID NO: 65436 - DNA, 1614 bp, Clostridium difficile 630
  CDS (1)..(1614): transl_table=11
atgaatataacaaagtttgaagatttaccaataagtgagggaataaaaaaagctatagctgaaatggggtttgaagaaccatctcctatacaagcacagtctatacctgcgattttgtcaggtaaagacgttataggacaagctcaaactggtacgggaaaaacagctgcttttagtatccctatactagaaacaatagacccaaataatagaagtttacaagctgtagtgctttgtccaacaagagaactggcaatacaagtatcaacagaaataagaaagttagctaagtattcgcacggaataaagacattacctatatatggtggtcagccaatagatagacaaataaaatctctaaagagtggtgtgcaagttgtaataggtacaccaggacgtacaatagaccatatcaatcgtaaaacattaaagatggataatgtaaaaatgattatattagatgaagcagatgaaatgctagatatgggatttagagaagatatagaaatgattttaagtaagattccagaagaaagacaaacaactttcttttcagctactatgccaagaggaattttggaattaactaagagatatcaaaaagacccagagcatataaaagttgttagaaaagaacttacagtttcaaatacaaagcaatactatatagaaactaggtcatcaaataaattagaagtattatgtagattagtagatgtatatgaccctaaactatctgttgttttctgtaatactaagagaaaagcagatgaattggtaggagatttacaagcaagaggatattttgcagatgcattacatggtgacttaaaacagactcaaagagatatagtaatggataagtttagaaatggtacaatagatatacttgttgctactgatgttgcagctagaggtatagatgttgatgatgttgaatgtgtattcaactatgacttaccacaagatgaagagtattacgttcatagaattggtagaactggtcgtgctggtagagaaggtatgtcatttacttttgtatttggaaaagaaatgagaaagatgaaagatatagaaagatatactaaatctaaactaataaagcataatataccaacaataactgatgttgaagagaaaaaagtaggtactttctttgcacaagttaaacaaactatagaagaaggtcacttaactaaacaattacaatggttagaaggtttctgtaatgatgaagattatgcaatggttgatatagctgctgcacttgtaaaactatctctaggtgaagaaatgaaagaagaaataatagaagaaaaacctagaagagagcgtggagatagaaaaggtggtactggagctaaagatggtatgattagattatttatcaatattggtagaaatcaaagagtacaagcaaaagatatagttggtgctatagctggagaagttggaataccaggtaaagtagtaggtactatagatatatatgataagtatacttttgttgaaatacctaaaaaagatgcaaaaacagtaattgaaaagatgaaagatattaagataaaaggtaataagattaatatagaaaaagcaaataagaagaaaaaataa

SEQ ID NO: 65437 - protein, 537 aa, Clostridium difficile 630
MNITKFEDLPISEGIKKAIAEMGFEEPSPIQAQSIPAILSGKDVIGQAQTGTGKTAAFSIPILETIDPNNRSLQAVVLCPTRELAIQVSTEIRKLAKYSHGIKTLPIYGGQPIDRQIKSLKSGVQVVIGTPGRTIDHINRKTLKMDNVKMIILDEADEMLDMGFREDIEMILSKIPEERQTTFFSATMPRGILELTKRYQKDPEHIKVVRKELTVSNTKQYYIETRSSNKLEVLCRLVDVYDPKLSVVFCNTKRKADELVGDLQARGYFADALHGDLKQTQRDIVMDKFRNGTIDILVATDVAARGIDVDDVECVFNYDLPQDEEYYVHRIGRTGRAGREGMSFTFVFGKEMRKMKDIERYTKSKLIKHNIPTITDVEEKKVGTFFAQVKQTIEEGHLTKQLQWLEGFCNDEDYAMVDIAAALVKLSLGEEMKEEIIEEKPRRERGDRKGGTGAKDGMIRLFINIGRNQRVQAKDIVGAIAGEVGIPGKVVGTIDIYDKYTFVEIPKKDAKTVIEKMKDIKIKGNKINIEKANKKKK

SEQ ID NO: 65438 - DNA, 1431 bp, Bradyrhizobium sp. ORS278
  CDS (1)..(1431): transl_table=11
atgtccttttccaatctcggcttgtccgacaaggtgttggctgcagttgcggccaccggatacaccacccctactcccattcaggaacaggcgattcctcatgtgctggcacggcgagacgtgctcggcatcgcccagaccggcaccggcaagaccgccgctttcgtcctgccgatgctgaccatcctcgagaagggccgcgcccgcgcacgcatgccgcgcaccctcatcctggagccgacccgcgaattggcggctcaagtcaaagagaacttcgaccgttacggcgccggacagaagctcaacgtcgcgctcctgatcggcggcgtctccttcggcgaccaggacgcgaagttgacgcgcggcgtggacgtcctgatcgcgacgccgggccgcctgctcgatcatacggaacgtggcggtctcctgctcaccggcgtcgagctcctggtcatcgacgaagccgaccgcatgctggacatgggcttcattccggacatcgagcgcatctgcaagctcgtccccttcacccgccagaccctgttcttcaccgcgaccatgccgccggaaatccggcgcatcaccgacgccttcctgcacaatccgcagaaggtcgaagtgtccaagccggccacgaccgcagtcacggtgactcagctgcaggtcccctcgggccgcgaagcgcatcagaagcgcgaggtgctgcgccgcctgctgcgcgaggccaaggatctcaagaacgcgatcatcttctgcaatcgcaagcgcgacgtcgccatcgttcacaagtcgctgcagaagcacggcttcagcgtcggcgccctgcacggcgacatggaccagtcggcgcgcatggccgccctcgatcagttccgcaagggcgagctgccgctgctcgtggcctccgacgtggcggcgcgcggtctcgacattcccgaagtcagccatgtcttcaatttcgacgtgccgcatcattcggacgactacgtccatcgcatcggccgcaccggtcgcgccggccgcaccggtaccgcgatctccatcgtctctccgccggatcagaaatccgttgcggcaatcgagaagctgatcgggcagagcatcccgaccatcgaaggcgactacgaggtgcaggagtcctcgcgcgatgacgaggcgcgtgagcgtcgtccgcgcgacagctcgcggcgcagccgcggcaaggcaccgcgtgagcgcgaagctcgcgagccgcgcgagcgtgagccgcgtccggccgcagcctctccgcgtgcggcgcagcccgcggcgccgcacccggcgccgaacgcacgtcatgagcagccgcgcaacgaatcccgccggccgcgacgtgaccacgacaacgagccggccgatcattcgcatcttccggcctttctgctgcgcccggtccgcgccccgctgccttga

SEQ ID NO: 65439 - protein, 476 aa, Bradyrhizobium sp. ORS278
MSFSNLGLSDKVLAAVAATGYTTPTPIQEQAIPHVLARRDVLGIAQTGTGKTAAFVLPMLTILEKGRARARMPRTLILEPTRELAAQVKENFDRYGAGQKLNVALLIGGVSFGDQDAKLTRGVDVLIATPGRLLDHTERGGLLLTGVELLVIDEADRMLDMGFIPDIERICKLVPFTRQTLFFTATMPPEIRRITDAFLHNPQKVEVSKPATTAVTVTQLQVPSGREAHQKREVLRRLLREAKDLKNAIIFCNRKRDVAIVHKSLQKHGFSVGALHGDMDQSARMAALDQFRKGELPLLVASDVAARGLDIPEVSHVFNFDVPHHSDDYVHRIGRTGRAGRTGTAISIVSPPDQKSVAAIEKLIGQSIPTIEGDYEVQESSRDDEARERRPRDSSRRSRGKAPREREAREPREREPRPAAASPRAAQPAAPHPAPNARHEQPRNESRRPRRDHDNEPADHSHLPAFLLRPVRAPLP

SEQ ID NO: 65440 - DNA, 1329 bp, Dichelobacter nodosus VCS1703A
  CDS (1)..(1329): transl_table=11
atgaataatacgttctccgaactcggactatccacgcaaattctgcgtaccattagccgtcacggttacgaaaaacccacgcccattcaagcgcgcgccattcctttggctttgcaaggacgcgatcttttgttatccgcgcaaactggctccggaaaaaccgcagcgtttgtgctacccatactgcaacaactcgccgcagaaccaaccaaaagcaaattgccgcgcgcgttaatcgtcattccgacgcgtgaactcgcgcaacaagtgcaagacagcgtttttcaatacagccgtgaattcaaagaattatattcaatcacgctcgttggcggcacagcttatcaaaaacaaatccgcgctttgaaaaaaggcgtatccatcgtggtggcaacgcctggacgcctgctcgatcacgttcgtgaaggtcatttagatttatcacaaatccgttatttagtgttagatgaagccgatcgcatgctggatatgggtttttccgacgatatgcacgccatcatcaaacaatgtccccaaaatcgccaaaccatcatgagctcggcaacatgggacggcaacgttggcaaaatcgccgcaggttttacgcacaacgccgaaaaaatcatcattgcccccgaaaccagccacattgaagaaatcagttatttcaccgacgatcaagcgcataaaaacgccgttttagatcgtttattagctgatgaagcagtcacacaatgcattgtttttactgcaacaaaatcaaccaccgaaaccgttgctcatcatttatatgaaaacggttttcaagcgcaatttttacacggcgatttacaacaacaaaaacgcaatcgcatcatcgaacgttttcgtaacgggcaaattaacgttttagtcgccaccgatatcgccgcgcgcggcattgatattcctgcgattagccacgttattaattatgatttaccgcgccaaagtgaagattatgtgcaccgaattggacgcagcggacgcgccggacgcagcggcgttgccttgaatttagtcagcctcaccgaccgcgcagcaatggcacatattgaacgctatttaaaacgcgccattaaaactgatgttttagaaggtttggaacccacaaaagtaccgagcaagaaaaaaccaagcagtggacgcggcaaaacgtggcaagcgcgcggcgcaaaaaatggaagtcgtgcaaatagtgaagcaaaatctgcgcgcggcaattggcatgaccgcaaaacgggcaaaataaccgtcgcgcgaaaaagaagccgcgccgagggcaaatcttttgcacaccgcgcttcataa

SEQ ID NO: 65441 - protein, 442 aa, Dichelobacter nodosus VCS1703A
MNNTFSELGLSTQILRTISRHGYEKPTPIQARAIPLALQGRDLLLSAQTGSGKTAAFVLPILQQLAAEPTKSKLPRALIVIPTRELAQQVQDSVFQYSREFKELYSITLVGGTAYQKQIRALKKGVSIVVATPGRLLDHVREGHLDLSQIRYLVLDEADRMLDMGFSDDMHAIIKQCPQNRQTIMSSATWDGNVGKIAAGFTHNAEKIIIAPETSHIEEISYFTDDQAHKNAVLDRLLADEAVTQCIVFTATKSTTETVAHHLYENGFQAQFLHGDLQQQKRNRIIERFRNGQINVLVATDIAARGIDIPAISHVINYDLPRQSEDYVHRIGRSGRAGRSGVALNLVSLTDRAAMAHIERYLKRAIKTDVLEGLEPTKVPSKKKPSSGRGKTWQARGAKNGSRANSEAKSARGNWHDRKTGKITVARKRSRAEGKSFAHRAS

SEQ ID NO: 65442 - DNA, 1599 bp, Desulfovibrio vulgaris subsp. vulgaris str. Hildenborough
  CDS (1)..(1599): transl_table=11
atggaatccgtagaatcgttcaaggacctccccctcgaagaggaactgctcaaggccatcgaagaactcggcttcaccgagccctcgcccatccagtccatcgccatcccccgcctgcttgaaggccgcgacgtgataggtcaggcccagaccggcaccggcaagaccgccgccttcggtctgcccctgcttcagcgcatcgacgccgccgaccgctcggtacaggccctcgtgctctgtcccacccgtgaactggccctgcaggtggccaatggcctcaccgccctcgccaagcatctgcgcggggtacgcatcctctccgtgtacggcggccagcccatcgaaccgcaggcctccgccctgcgccgtggcgcacaggtcgtcgtgggtacgcccgggcgcatcctcgaccatatcaaccgcggcaccctgcaactcggcgtcgtgcgcatgaccgtgctcgacgaagccgacgaaatgctcgacatgggctttcgcgaggacatcgaacgcatcctcagcgaaatgcccgaatgggtgcagtctgcgttcttctccgccaccatgcccgacggcatcctcgaactcgcccgccgcttcctgcgcgaacccgagttgctgcgcgtgacgcgccgccagcttaccgtcgccaatacggaacaggcatggttcgaagtgcggcccttccgccgcgtggacgccgtatgccgaattttcgacgcctacattccgcgcaaggccatcgtcttccgcgccaccaagcagggcgtcgatgaactggccgccgcactccagcagcgcggcatcctcgccgacgccctgcacggcgacctcaaccagacccagcgcgaacgtgtcatgtcccgcttccgcgccgggggcatctccgtgctggtcgccaccgacgtggcagcccgtggtctggacgttgacgacgtggacaccgtcatcaacttcgacctgcccaacgaccccgagacctacgtgcaccgcataggccgcactggccgtgcaggccgcaccggcagggccttctcgttcgccgcaggtcgcgacgtgtacaagttgcgcgacatccagcgcgtgaccgggtcgcgcatcgaccgccgcgccatgcccaccgccgccgacgcctcccgcgcccgcaccgggcagttgcttgaggaagtcgccgccgggcttgccagcgccgagacctcggcctgcctgcctgtggtggagaagctcatcgccgaaggcgccgacccgacccagcttgccgccacgctgctgcgcatgatcatgcagcgcgaccgcatcgacctgccgggtgcccgccagaccgatgacatcggcaccgggcgcgtgcgcctgttcttcaacgtggggcgccgtatgcgcatcaccccgcgtgacctcgtgggcgccatcgccggtgagacgggcatctccggccgttccatcggttccatcgaaatccacgaccgcttctcgttcgtggaagtggatgcctccatcgcccccgaagtggtgtcggtgatgcacggcaaccagattcgcggcttccgcctcgccgtggaacaggcaagcccccgtgagggtcaggaccgcgccgcttaa

SEQ ID NO: 65443 - protein, 532 aa, Desulfovibrio vulgaris subsp. vulgaris str. Hildenborough
MESVESFKDLPLEEELLKAIEELGFTEPSPIQSIAIPRLLEGRDVIGQAQTGTGKTAAFGLPLLQRIDAADRSVQALVLCPTRELALQVANGLTALAKHLRGVRILSVYGGQPIEPQASALRRGAQVVVGTPGRILDHINRGTLQLGVVRMTVLDEADEMLDMGFREDIERILSEMPEWVQSAFFSATMPDGILELARRFLREPELLRVTRRQLTVANTEQAWFEVRPFRRVDAVCRIFDAYIPRKAIVFRATKQGVDELAAALQQRGILADALHGDLNQTQRERVMSRFRAGGISVLVATDVAARGLDVDDVDTVINFDLPNDPETYVHRIGRTGRAGRTGRAFSFAAGRDVYKLRDIQRVTGSRIDRRAMPTAADASRARTGQLLEEVAAGLASAETSACLPVVEKLIAEGADPTQLAATLLRMIMQRDRIDLPGARQTDDIGTGRVRLFFNVGRRMRITPRDLVGAIAGETGISGRSIGSIEIHDRFSFVEVDASIAPEVVSVMHGNQIRGFRLAVEQASPREGQDRAA

SEQ ID NO: 65444 - DNA, 1923 bp, Acinetobacter sp. ADP1
  CDS (1)..(1923): transl_table=11
gtgaaactctctatgagcaaaaattttgccgatttctctctacatgaatctttacaacaagcactacaggatcttggttttactagcccaacacctgttcaagaacaagcgattcctgcagctttagaaggtaaagaccttttagtttcaagccaaactggttctggtaaaactgcagctttcttgctgccaacattacattcacttgctggtcaagacacgttccttccatttaaagaacgtatgcgtgcagtgactcaaccgaatattcttgtcatttcaccaacgcgtgaattggctcagcaagtgagtcaggacgcgattgcacttgtacgtcacatgaaaggtgttcgtattgctgcaattatgggtggtatgccatttgcaaaacagatccagcaattaaaaggcgctcaggttgttgttgcaaccccaggtcgtttacttgatttggtcaatcgtcgtcaaattaaattagataaagttgatgctttaatcgtagacgaagcagaccgtatgctggatcttggtttctctgaagatcttgaagcgattagcgagttggctgccaaccgtaaacaaactttgatgttctctgcaacatttgcagatcgtattattcgtcttgcagaatgcatgatgcaagatccaatgcgtattgccattgaaacaggtcattcaaccaacactgacatcacccagactttacactggactgatggttttgagcacaagaaaaaattgctgactcattggttaagtgatgaaagcatggatcaagcagtggtgtttgcaagcacacaagaagatacagatatgctcgctgaagagcttgctgaagctggtcattcagtggttgcactacatggtgcgatgccacaaactgtacgtaaccgtcgtttacgcagtattcgtgaaggtaaagctaaaatcctggttgcaactgacgttgcagcacgtggtctagatgtaccaaccatttctcacgtgatcaactttggcttgccaatgaaacacgaagactatgtacaccgtattggtcgtactggtcgtgcaggccgtactggtcaagcgattacactagcaacttatcgtgagcgcggtaaaattcgtgcgcttgaagactatttagaagcacgtttaagcgtatctgaaattgaaggtcttgagccatctccacctcctgcacgttctggtcgtgatggtggtggtcgtggtcgcggtggtaatggtggtggtcgtcgtgacggtggtcgcggtggtttcggtggtggtcgtcgttttgaaggcgaaagtaatttcaaacgtcgtgatggtggtcgtgatgaccgtccaaaacgtagtttcgatgataaaccacgtggtgaacgtcctgcattcggtggcgaagatcgtccacgtcgcgagtttaattctgatcgcccacgtcgtgaaggtggttttgaagaccgtccaaaacgtagctttggtggtgaagaccgtccgcgtcgcgagtttaattcagaccgcccacgtcgtgaaggtggctttgaagaccatccaaaacgtgattttggtgatcgtccagcacgtcgtgaaggtggtttcaatgataagccacgtttcgattctaatgacgacaaccgtggtaatcgtgtagattacaaaccacgtcgtgaaggtagcttcggtgatcgtccaaaacgtgatttcggtgatcgtccagcgccacgtcgtgaaggtagcttcggtgatcgtccaaaacgtgatttcggtgatcgtccagcacgtcgtgaaggtggctttggtgatcgtccacaacgttcttttggcgatgaccgtccaaagcgtagctttggtggcgaagatcgtccacgtcgcgcgacacaagaagaatttttcaatcgtgagtctggcgaccgtcgccgtaagaacgatcgttaa

SEQ ID NO: 65445 - protein, 640 aa, Acinetobacter sp. ADP1
MKLSMSKNFADFSLHESLQQALQDLGFTSPTPVQEQAIPAALEGKDLLVSSQTGSGKTAAFLLPTLHSLAGQDTFLPFKERMRAVTQPNILVISPTRELAQQVSQDAIALVRHMKGVRIAAIMGGMPFAKQIQQLKGAQVVVATPGRLLDLVNRRQIKLDKVDALIVDEADRMLDLGFSEDLEAISELAANRKQTLMFSATFADRIIRLAECMMQDPMRIAIETGHSTNTDITQTLHWTDGFEHKKKLLTHWLSDESMDQAVVFASTQEDTDMLAEELAEAGHSVVALHGAMPQTVRNRRLRSIREGKAKILVATDVAARGLDVPTISHVINFGLPMKHEDYVHRIGRTGRAGRTGQAITLATYRERGKIRALEDYLEARLSVSEIEGLEPSPPPARSGRDGGGRGRGGNGGGRRDGGRGGFGGGRRFEGESNFKRRDGGRDDRPKRSFDDKPRGERPAFGGEDRPRREFNSDRPRREGGFEDRPKRSFGGEDRPRREFNSDRPRREGGFEDHPKRDFGDRPARREGGFNDKPRFDSNDDNRGNRVDYKPRREGSFGDRPKRDFGDRPAPRREGSFGDRPKRDFGDRPARREGGFGDRPQRSFGDDRPKRSFGGEDRPRRATQEEFFNRESGDRRRKNDR

SEQ ID NO: 65446 - DNA, 1914 bp, Erwinia carotovora subsp. atroseptica SCRI1043
  CDS (1)..(1914): transl_table=11
atgactgatttatttacttctttttccgatttggggctgtctgctcctattattaatgccctgaccgatctgggctatgaaaaaccatcgccgattcaggctgaatgtattcctcacctgctgaacggtcgcgatgtgctgggtatggcacagaccggcagtggtaaaactgcggcttttgctctgccattactcaataatttaaaacctgagttaaaagcgccgcagatgttggtgttggccccaacccgtgaactggctgttcaggttgctgaagcctgtagtgattttgccaaacatatgcacggcgttaacgttgttgccctgtacggcggccagcgttatgacgttcaactgcgcgctttgcgtggtggagcacagattgttgttggtactccaggtcgtctgctggaccacctgaaacgcggtacgctggatctgtccaacctgagtggtctggtactggatgaagctgatgaaatgctgcgtatgggcttcatcgaagatgttgaaaacatcatggctcagatccctgctacgcatcaaactgcactgttctctgcaaccatgccagaagcgattcgccgcattacgcgtcgtttcatgaaagatccacaggaagttcgcatccaatcaagcgtgactacgcgtccagacatcagccagagctactggacggtgcagggtatgcgtaaaaatgaagcgctggttcgtttccttgaagctgaagattttgatgcggcgattattttcgttcgtaccaagaatgctacgctggaagtggccgaagcgttggagcgtagcggttataacagtgccgcgctaaacggtgacatgaaccaggcgctgcgtgagcaaacgctggagcgcctgaaagatggtcgtctggatatcctgattgcgaccgacgttgcggcgcgtggtctggacgttgagcgtatcagcctggtagtcaactacgatatcccaatggactccgagtcttacgtccaccgtattggtcgtaccggtcgtgctggtcgtgctggtcgcgcattgctgtttgtagaaaaccgcgagcgtcgcctgctgcgcaacgttgaacgcacaatgaagctggcgattcctgaagtggaattgccaaatgcggaattgctggggcaacgccgtctggctaaatttgctgccaaagtacagctacagctggaaagcagcgacttggatatgtaccgcgctctgctgacgaagatgcaaccgcaggaagagctggatatcgaaacgctggctgctgcgctgctgaaaatggcgcagggtgaacgtcctctgatcctgccgccggaaccggcattccgtcctcgccgcgaattccgcgatcgtgatgagtctcgtagtgattcacgtggcgatcgtcgccgtgaaccccgcgatgctcgcgattcccgtgaaccccgtgacggtgaccgtccacaacgccgtgagcgtcgtgagtcgggtgaaatggaactgtatcgtatcgaagtgggtcgtgatgacggtgttgaagtacgtcacattgttggtgctatcgccaacgaaggtgatatcagcagccgctacatcggtaacatcaagctgttcgggtctcattcgacgatcgaactgccgaaaggtatgccgggcgacctgttatcacactttacccgcacgcgtattctgaacaaaccaatgaatatgcaattgctgggtgatgcagtagcacagccagaacgtcgtggcggtggccgtcctgctggtgctggtacgggtggtgaacgtcgtgatggcgcagctccacgtcgctctttcggcggtggtgaacgccgtgaaggtaacgctaacggcggtgagcgtcgtgaacgctctgtcaaccgtgatgcggcaccgcgtgctccacgtcgtcgtcctgctgacgcgtaa

SEQ ID NO: 65447 - protein, 637 aa, Erwinia carotovora subsp. atroseptica SCRI1043
MTDLFTSFSDLGLSAPIINALTDLGYEKPSPIQAECIPHLLNGRDVLGMAQTGSGKTAAFALPLLNNLKPELKAPQMLVLAPTRELAVQVAEACSDFAKHMHGVNVVALYGGQRYDVQLRALRGGAQIVVGTPGRLLDHLKRGTLDLSNLSGLVLDEADEMLRMGFIEDVENIMAQIPATHQTALFSATMPEAIRRITRRFMKDPQEVRIQSSVTTRPDISQSYWTVQGMRKNEALVRFLEAEDFDAAIIFVRTKNATLEVAEALERSGYNSAALNGDMNQALREQTLERLKDGRLDILIATDVAARGLDVERISLVVNYDIPMDSESYVHRIGRTGRAGRAGRALLFVENRERRLLRNVERTMKLAIPEVELPNAELLGQRRLAKFAAKVQLQLESSDLDMYRALLTKMQPQEELDIETLAAALLKMAQGERPLILPPEPAFRPRREFRDRDESRSDSRGDRRREPRDARDSREPRDGDRPQRRERRESGEMELYRIEVGRDDGVEVRHIVGAIANEGDISSRYIGNIKLFGSHSTIELPKGMPGDLLSHFTRTRILNKPMNMQLLGDAVAQPERRGGGRPAGAGTGGERRDGAAPRRSFGGGERREGNANGGERRERSVNRDAAPRAPRRRPADA

SEQ ID NO: 65448 - DNA, 2001 bp, Mesoplasma florum L1
  CDS (1)..(2001): transl_table=4
atgacatttaaagaattacaattaagcgacaaagtattagtcgcactggaaaaagctaattttaacgaagctacagaaattcaagctagagcaataccacttttcctagaaggaaaaaacatttttggtaaatcaagcactggtacaggtaaaacagcatcatttgtattaccaatcttagaaaaaatagaaccaaacaaaagaagagttcaagccgttataatggcaccaacaagagaattagcaatgcaaattgttaaccaaattagaatatttggatcaagaatagaaaatctagtaatagcaccattaatcggtggagctgatatgcgagatcaaattaaaagactgaaagactcacaaatagttgtgggaactccaggaagggttaatgaccacttaaatagaaaaaccttaaaattagatgatgttagaacaatcattttagatgaagctgatgaaatgctaaaaatgggatttaaaaacgaaattgatgctttatttgaaagagtttcaccagatgttcaaattggtttattttcagctacaacatcaccaaaagtaatgcaaattgctaatgattatatgaatgaatatgacgttattgaaattgaaaatcaaatagaagttaatgctaatattacaaatacttttattttcacaaaaggttttagcaaagaagatttaattgttaaagtatttaaaaaacacaaacctaaaagagctatagtgttttcaaacacaaaaaatcatacagataaaattgcagataatttagaagcagcaggaattagagctatagttattaatggtgataaaagacaatcacaaagatcaagagctattgcaaaatttagaaacaatgaaatatcagttttagttgcaactgatgttgttgctcgtggaattgatattacaggtgttgactacgtaattaactatgatgtatcaatggaagacgaacattttgttcatagaattggtagaacaggaagaaataatacaaaaggtgattcaattacttttgtacaaaatcaaaatgttttaagacaaataaaaggaatagaaaaaaactttaatttaattattgatgaaatgcaaatttctgaatatggtgaagtagacaagcaagaaggaagagggaactcaaatagaagttcacgtggagatagaagagattcaggtcgtggagatagaagagattcaaatcgtggagatagaagagattcaggtcgcaatgaaagaagagattcaaatcgtggtcgtgatgacagaagaaatgctggacacaatgatagaagagactttgctcatggcgaaagaaaaagaacaagtgaaagactagatagcagaagtagcgcttgaacttctcaatcatgagaagaaagaatgctatctttatcaccagaagaaaaagaatttgctaaaaaagctttatctttagttgatgattattcagtgaatgaaaatcaagatagcaatcaaaatgtttttgaaagaaatgacagaagagattcaggtcgaggagacagaagaagttcaggtcgtggtcgtggagacagaagtggttcaaaccgtggccgtgatgacagaagaagttcaggtcgtggtcgcgatgacagaagagattcaaaccgtggtcgtgatgaaagaagaaactcaaaccgtggtcgtgatgacagaagaacagatggtcaagaaagagataataaaaaatttgaaggtactagacattcttcatgagatgttaaaactgattattctaaacaagattcaggccgttgagaaagagttacaggaaaagaaaaaagaccagattcatttaataaaaaagacgggtttaattcaaataatgaaagagacgaaagaagaaacagaagaagttctggtcgtggagaatgagttcattcaggtccaagagaaaacaagggatcaggaacacgtaacagaagaaattcttcttcaaatagttcttcaagaaaaccaaaaaataaatgataa

SEQ ID NO: 65449 - protein, 666 aa, Mesoplasma florum L1
MTFKELQLSDKVLVALEKANFNEATEIQARAIPLFLEGKNIFGKSSTGTGKTASFVLPILEKIEPNKRRVQAVIMAPTRELAMQIVNQIRIFGSRIENLVIAPLIGGADMRDQIKRLKDSQIVVGTPGRVNDHLNRKTLKLDDVRTIILDEADEMLKMGFKNEIDALFERVSPDVQIGLFSATTSPKVMQIANDYMNEYDVIEIENQIEVNANITNTFIFTKGFSKEDLIVKVFKKHKPKRAIVFSNTKNHTDKIADNLEAAGIRAIVINGDKRQSQRSRAIAKFRNNEISVLVATDVVARGIDITGVDYVINYDVSMEDEHFVHRIGRTGRNNTKGDSITFVQNQNVLRQIKGIEKNFNLIIDEMQISEYGEVDKQEGRGNSNRSSRGDRRDSGRGDRRDSNRGDRRDSGRNERRDSNRGRDDRRNAGHNDRRDFAHGERKRTSERLDSRSSAWTSQSWEERMLSLSPEEKEFAKKALSLVDDYSVNENQDSNQNVFERNDRRDSGRGDRRSSGRGRGDRSGSNRGRDDRRSSGRGRDDRRDSNRGRDERRNSNRGRDDRRTDGQERDNKKFEGTRHSSWDVKTDYSKQDSGRWERVTGKEKRPDSFNKKDGFNSNNERDERRNRRSSGRGEWVHSGPRENKGSGTRNRRNSSSNSSSRKPKNKW

SEQ ID NO: 65450 - DNA, 1899 bp, Desulfotalea psychrophila LSv54
  CDS (1)..(1899): transl_table=11
atgacaacagtttcaacagatgtaacaggttcaacagacacagcaagttcaatagatgcagcagttccatcagctccagtagctccagcagctccagtagctccagcagctccagtagctccagtagctccagtagctccagtagctccagtagctccagcagtttcttttactgattttaatttaaaatcagaccttgtagcaaatcttgtaaaacttggctttagccaacctacacctatccaagagaaggccattcctctccttctagcaggttctgatctgataggtcaggctcaaaccggaacaggtaagaccgcagcttttggtttaccacttctaaataatattgatttttctaaaaaatgtgtgcaggcccttgttcttgctccaacccgtgagcttgcccagcaagtaggtgatgctcttgccacttatagtggtgacgatggtcgcaatgttctggttgtgtatggtggttcgtcttatcaagctcaggtaggtggacttcgcaggggtgcgcgtgttgttgttggtactcctggacgattgcttgacttaatccgtcagggatctctgaagcttgatcagctgaagacccttgttcttgatgaagcggatgagatgctcagtatgggctttattgatgatattgaaacaattttgtcacaaacaccgaaagatcgtcaaacaatgcttttttctgcgaccctttcttctcgtgtaatgagtattgccaatcgttatcttcattcgcctgagtctatctctatcagtccgaagcagatgatcggctcttccattgagcaacgttactatcttattaataatagtgataaaattgctgcaataacaagagtatttgaagtagagactgttgaaagcgccctcatctttgccagaactcgtgcaacggttagtgagcttgcaaacgagcttatttcccgtggatttgctgcagaaggtcttagtggcgatttgagccaagaggctagaacacgagttttgagtcgttttaagaagggtcagatcaaggtacttgtggcaacagatgttgcggctcgtggtcttgatattgacgatatttctcatgttttcaattatgatctgccagaagatcctgaggtttatgttcatcgtattggtcgtaccggtcgtgctggtcgtagtggaaccgctatctcactggtaactcttcgtgatcgttggatgcatcgccgtatagagcaatatactggtaaaaaattgatcaagggcgagcttcccaccgttgagcagattgaagagcatcgcaacactcaatttttagagcgtcttgatgtatggatccgtcgtggtcgttgtcgtggtgagagagagattgtagaggctcttgttgagcagggaatggatcctcttgatgttgctgctgctgccttgaaaattgttcgtaaggatgagaccaagcgtccaattgatccgatcaaacctgttattgaagatgcaggcggaagaaatcgcaagcgcggtgacagaaatgatcgtggtgctaatggtcgaggtgatagaggcggtcgatctgatagccgtggtggacgtccacagggccgtcgcgatgatcgttttgctaagggtggtgatagaggcccaaagaaaaaaggcgatgatgtccgacaggttagcgacaaagatatggtgcctcttacccttgatgctggtaaaaaagacggtgttgcggtaaatcatattgtggcctccttgtctcattttgcaggaatttcttctcgggaacttggaaaaattcgtattaatgaaacccatagtagtatcgacgtgccaaagggtttggttgataaaatgctctcccataacggtagctaccgcatctccaaaaaagcggtaaatcttacccaccaatag

SEQ ID NO: 65451 - protein, 632 aa, Desulfotalea psychrophila LSv54
MTTVSTDVTGSTDTASSIDAAVPSAPVAPAAPVAPAAPVAPVAPVAPVAPVAPAVSFTDFNLKSDLVANLVKLGFSQPTPIQEKAIPLLLAGSDLIGQAQTGTGKTAAFGLPLLNNIDFSKKCVQALVLAPTRELAQQVGDALATYSGDDGRNVLVVYGGSSYQAQVGGLRRGARVVVGTPGRLLDLIRQGSLKLDQLKTLVLDEADEMLSMGFIDDIETILSQTPKDRQTMLFSATLSSRVMSIANRYLHSPESISISPKQMIGSSIEQRYYLINNSDKIAAITRVFEVETVESALIFARTRATVSELANELISRGFAAEGLSGDLSQEARTRVLSRFKKGQIKVLVATDVAARGLDIDDISHVFNYDLPEDPEVYVHRIGRTGRAGRSGTAISLVTLRDRWMHRRIEQYTGKKLIKGELPTVEQIEEHRNTQFLERLDVWIRRGRCRGEREIVEALVEQGMDPLDVAAAALKIVRKDETKRPIDPIKPVIEDAGGRNRKRGDRNDRGANGRGDRGGRSDSRGGRPQGRRDDRFAKGGDRGPKKKGDDVRQVSDKDMVPLTLDAGKKDGVAVNHIVASLSHFAGISSRELGKIRINETHSSIDVPKGLVDKMLSHNGSYRISKKAVNLTHQ

SEQ ID NO: 65452 - DNA, 1383 bp, Yersinia pseudotuberculosis IP 32953
  CDS (1)..(1383): transl_table=11
gtgagcacaacttccttttcttccctgacactgcctgctgagcagttgtccaatcttaatgaacttggctataccgagatgaccccggtacaagctgcggtgttacccgcaatcctcaacgggcaggatgtccgggcgaaggccaaaaccggcagcggtaaaacagccgcatttggcattggtttgctggacaaaatagcggtaggggaatttgttacccaagcgctggtattgtgcccaacccgagaattagcagaccaggtcagtaaagagctgcgccgtttagcacggtttacacaaaatattaaaattctgaccctgtgtggcggccaaccgatgggccaccaattagattctctggtccatgcaccgcacattgtcgtgggtacgccagggcgtattcaggaacatctgcgcaagaaaacgctggtacttgatgagttgaaaacgctggtgttggatgaagctgatcgcatgttggatatgggtttttccgatgccattgatgacgtgattgcgtatacccctccacagcggcaaaccttgttgttctctgccacctacccatcaggtattgagcagatcagtgcacgagttcagcgccaaccattgaatgttgaagtgggtgataccgatgaagagcccgctattgaacaggtgttttttgaaacgactcgtgagaaacggctgccactgctgatctcagttctgagctattaccagccggcctcttgtgtggtgttctgtaacaccaaaaaagattgtcagagcgtttatgagtcactggaatcacgtggtatcagtgtcttggctttgcacggggatttagaacagcgtgatcgtgatcaggttctggtgcgttttgccaatcgtagctgccgtgtgttggtggcgaccgatgttgctgctcgtggtttagatatcaaggatctggagctggtcattaactttgaattggcgtttgatcccgaaattcacgtacaccgcattggccgtaccgggcgcgcagggatgagcggcctggccgttagcctatgtacgccacaggaaatggtacgtgcccataccatcgaagattatctgcaaataaaattgaaatggacacctgcggaacaggttagccgtagcaccaacatcatgctggaaccagaaatggtgacgttatgcattgacggggggcgcaaagctaaaattcgccctggtgacattctcggggcattaaccggtgatgcagggttaaccgccgcagatgtgggtaagattgatatgttcccggttcatgcctatgtggctatccgtaaagccagtgccaagcgtgcgttgcaacaattgcagcaaggcaaaatcaaaggtaaaaactgtaaagcccgtctattaaaataa

SEQ ID NO: 65453 - protein, 460 aa, Yersinia pseudotuberculosis IP 32953
MSTTSFSSLTLPAEQLSNLNELGYTEMTPVQAAVLPAILNGQDVRAKAKTGSGKTAAFGIGLLDKIAVGEFVTQALVLCPTRELADQVSKELRRLARFTQNIKILTLCGGQPMGHQLDSLVHAPHIVVGTPGRIQEHLRKKTLVLDELKTLVLDEADRMLDMGFSDAIDDVIAYTPPQRQTLLFSATYPSGIEQISARVQRQPLNVEVGDTDEEPAIEQVFFETTREKRLPLLISVLSYYQPASCVVFCNTKKDCQSVYESLESRGISVLALHGDLEQRDRDQVLVRFANRSCRVLVATDVAARGLDIKDLELVINFELAFDPEIHVHRIGRTGRAGMSGLAVSLCTPQEMVRAHTIEDYLQIKLKWTPAEQVSRSTNIMLEPEMVTLCIDGGRKAKIRPGDILGALTGDAGLTAADVGKIDMFPVHAYVAIRKASAKRALQQLQQGKIKGKNCKARLLK

SEQ ID NO: 65454 - DNA, 1842 bp, Mannheimia succiniciproducens MBEL55E
  CDS (1)..(1842): transl_table=11
atgactgaaactaaaatcacttttggggatttaggcctgcctgaattcattctttctgctgtttccgacatggggtttgaaacgccttcaccaattcaacaagcatgtattccgcatttattaaacggtcgtgacgtgttaggtatggcgcaaaccggtagcggtaaaacggcggcattctcacttccattgttagcgcaaattgatatagaagaaaaacatccgcaaatgctggtgatggcgccaacccgtgagcttgcaattcaggtagcggaagcttgtgaactatttactaaaaatgcaaaaggcgttcacattgcgacactttatggcggtcaacgctatgacatccaattacgcgcattacgccagggcgcacaggttgtagtcggaacaccgggccgtattttagatcatatccgccgcggcaccttaaatctttccgagttaaagttcatcgtattggatgaagcggacgaaatgctgcgtatgggctttattgatgatgtggaaaccgtgatggcggaattgccggcacaacatcaaaccgcgcttttctcggcaaccatgccggaaccgattcgccgtataaccaaacgttttatgacggatccgcaagaggtaaaaattcaatctactcaacgcactaatccggatattgcgcaaagttgttggtatgtgcgcggttatcgtaaaaatgaagccttgttgcgttttcttgaggtggaagattttgatggagccattatctttacccgcactaagaccggtactttagacgttaccgaactattggaaaaacacggtttccgtgccgccgcattaaacggcgatatgactcagcaactgcgcgaacagactttagatcgcttacgtaacggtagcctggatattttagtggcaacagatgttgcagctcgcggtttggacgttgaacgtattagtttggtggttaattatgatattccgttagatgcggaatcttacgttcaccgcatcggtcgtaccggtcgcgcgggtcgttccggtagcgcaattttgtttgtagagccgcgcgaacgccgtttgttaagtaatatcgagcgtttaatgaaaaaaccgattgaagaagtggacgtaccgaatcacgaagcgttacaggctcgccgtcgtgaaaaattcaaagcgaaaattaccaaacaattggaacatcatgatttagaacaatatcgtttattattagaaggtctgtttactccggatcaggatcaggaagacattgcggccgcaatgttgatgttattacaaggcaaacagaaattaattcttccgcctgagccgccgatggaaaaacgcggtcgtcgcgaacgtgatgatcgtcgcggagagcgaggtgatcgtcgtgaacgtcgtccggaagagcgccgcggttacggcaatcctcaaccgatggatttataccgtattgaagtcggtcgtgcggacggtgttgatgttcgtcatattgtcggtgcgattgccaatgaaggcgatattaacagccgtaatatcggtcatattaaactttatgatgaatattcaacggtagaattaccacaaggtatgccgaaagaattattacaggttttcggtaaggctcgtgtgttaaacaaacaaatgcgtatgacatttgtaagtgaagccggtgaaaccgtaggtcgtgaacgtcatgaaggtcgccgtaatgatcgtcgtgataacggttttagacgtgaagaacgtcgctttaatgacagaggaaaccgctcttttaatgagcgggcgcctcgcagagagttcagagaacgtaatgatcgcagagaccgtagggatcgtcgcagttaa

SEQ ID NO: 65455 - protein, 613 aa, Mannheimia succiniciproducens MBEL55E
MTETKITFGDLGLPEFILSAVSDMGFETPSPIQQACIPHLLNGRDVLGMAQTGSGKTAAFSLPLLAQIDIEEKHPQMLVMAPTRELAIQVAEACELFTKNAKGVHIATLYGGQRYDIQLRALRQGAQVVVGTPGRILDHIRRGTLNLSELKFIVLDEADEMLRMGFIDDVETVMAELPAQHQTALFSATMPEPIRRITKRFMTDPQEVKIQSTQRTNPDIAQSCWYVRGYRKNEALLRFLEVEDFDGAIIFTRTKTGTLDVTELLEKHGFRAAALNGDMTQQLREQTLDRLRNGSLDILVATDVAARGLDVERISLVVNYDIPLDAESYVHRIGRTGRAGRSGSAILFVEPRERRLLSNIERLMKKPIEEVDVPNHEALQARRREKFKAKITKQLEHHDLEQYRLLLEGLFTPDQDQEDIAAAMLMLLQGKQKLILPPEPPMEKRGRRERDDRRGERGDRRERRPEERRGYGNPQPMDLYRIEVGRADGVDVRHIVGAIANEGDINSRNIGHIKLYDEYSTVELPQGMPKELLQVFGKARVLNKQMRMTFVSEAGETVGRERHEGRRNDRRDNGFRREERRFNDRGNRSFNERAPRREFRERNDRRDRRDRRS

SEQ ID NO: 65456 - DNA, 1245 bp, Legionella pneumophila subsp. pneumophila str. Philadelphia 1
  CDS (1)..(1245): transl_table=11
atgagttttaaacaattagcgctgattgagccgctaaacagggcggttagtgagttaggctacactacccctaccagtattcaattaaaagccatcccgctcattttaaatgggcatgatttacttggttccgctcaaacaggaacaggaaaaacagcaagctttgtattgcctatcttgcaaaaagccagtcagcaaactcaaaccagccctaatcgagttaaagtactgattttaacgcctacacgtgaattagccatccaggtccacgagagcataatccaatatggcaaatacctaacactgcgctcagctgtgatttacggaggagtaaaaagccacaaccaaattaaacaattagactcaggccttgagatactggttgcaacaccgggaagattattggatttatatcagcaacgtgctgttaaatttgatgagattgacaccctggtactcgatgaggcggatagaatgctggatatggggtttattcatgatataaaaaaaattatcaaattattacctttaaaaaggcagaacctgcttttttcagcaacctttacccctgaagtacgcgctttagccagaaatatactgaataaagcggttgaaattgatatcgcaccgagaaataccgcggtaaaaaccataaaacaaactgtttattcagtagatagaaaccataagttagcccttctgagtcatttacttcataagaataactggggacaaactttggttttttctcgaaccaaacatggagccaataaactggttaagcaactggccgaatcccaaatatattcggttgctattcatggcaacaaatcacaggctcaacgaataaaagccttagctgatttcaagtcaggcaaagtacaaacattaattgcaacagacatcgcagcacgtggcatagacatcgagaaacttgcctgtgtagtgaattttgacctgcctcatgtgcctgaggactacgttcatcggattggacgaacaggacgggcaggcgcctctggattggctgtatccttggtcagcacagaagaaataaagctgctgctgtctatagaaaaattaatcaatcaaaaactggagcgcattaaaattaaagattttgagtttttgcataacttttcagattttgtctcagccaaaattcaaaaatttgcgccgccaaaagcaggatataagggcaatatcagcagaaaatccaggacggcttttaataaaagcgcgtaa

SEQ ID NO: 65457 - protein, 414 aa, Legionella pneumophila subsp. pneumophila str. Philadelphia 1
MSFKQLALIEPLNRAVSELGYTTPTSIQLKAIPLILNGHDLLGSAQTGTGKTASFVLPILQKASQQTQTSPNRVKVLILTPTRELAIQVHESIIQYGKYLTLRSAVIYGGVKSHNQIKQLDSGLEILVATPGRLLDLYQQRAVKFDEIDTLVLDEADRMLDMGFIHDIKKIIKLLPLKRQNLLFSATFTPEVRALARNILNKAVEIDIAPRNTAVKTIKQTVYSVDRNHKLALLSHLLHKNNWGQTLVFSRTKHGANKLVKQLAESQIYSVAIHGNKSQAQRIKALADFKSGKVQTLIATDIAARGIDIEKLACVVNFDLPHVPEDYVHRIGRTGRAGASGLAVSLVSTEEIKLLLSIEKLINQKLERIKIKDFEFLHNFSDFVSAKIQKFAPPKAGYKGNISRKSRTAFNKSA

SEQ ID NO: 65458 - DNA, 1407 bp, Legionella pneumophila subsp. pneumophila str. Philadelphia 1
  CDS (1)..(1407): transl_table=11
atgactcaatcagaacacaacgaccaacacctatcattctctcaattcccccttcgtcaagaattaataaaaagtcttgcttcttcaaattatgaaaatatgacccctatccaaatgcaaagcctgcccataattcttagaaatgaagatatgatagctcaagcaaaaacagggagtggaaagaccgctgcttttgctttgtgtttattaaataatttaaaaatttctttttttgtagtacaagccttggttctttgccctacccgtgaactcgcggaacaagtaagccaagctatccgtcgattagcctgtttgatgcctaatgtcaaaattattaatttatctggtggtataccaatgcagcctcagcttgattcattacgacatggagctcatattattgtaggaacaccggggagaatacttaagcatttaaaaaacgcctctttagacttatctcaggtaaaagctttagttttggatgaggcagacagaatgctggatatgggtttttttgatgacattaaaaacattatttcggtttgtcccaaacaacgacaaaccctgcttttttctgcgacttatcctgaagaaatcaaacggctttcaaaacaatttatgaaggacccgaaagaagttcatgtggtaacccctcctgaagaaattgatattgaacaacatttttatgaagtctcgagacatgctcagaaatttcccttattaaaatcattactgttgcactatcaacccgtttcagtgttaatcttctgtaataccaagcaacaaacaatagaagtcacagaccagctcatcaatgaaggcttcagtgccatcgctttaaatggtgatatggaacaaatcgagcgtgatcttgctgtcttgcgttttgccaaccaaagttgttctattcttgtcgccactgatgttgcagcacgaggacttgatataaaagaactttccgcagtgattaattttgatctcgcttttgatcacgacgtccatattcatcgtattggtcgaacaggacgagctgggagtaaaggcattgccttaagcattgtaacgcctgcagatgcacaacgaatttgcgccattgaagataactacccgctccccattcattggggaaacattaatgaattagaaaatcacaacactgctcgcttagtgccagaaatggttacactctgtattgcttccggtaaaaaagataaaattcgccctggtgacatccttggggcattaaccaaagatgcaggattagcaggcaacacaattggcaaaattaacatcaccgccatgtactcctatgttgcaattcaccatagccaagcagataaagcctaccaatatttacaaagtggaaaattaaaaggacgcaaagttaatgtacgtaaaataaattga

SEQ ID NO: 65459 - protein, 468 aa, Legionella pneumophila subsp. pneumophila str. Philadelphia 1
MTQSEHNDQHLSFSQFPLRQELIKSLASSNYENMTPIQMQSLPIILRNEDMIAQAKTGSGKTAAFALCLLNNLKISFFVVQALVLCPTRELAEQVSQAIRRLACLMPNVKIINLSGGIPMQPQLDSLRHGAHIIVGTPGRILKHLKNASLDLSQVKALVLDEADRMLDMGFFDDIKNIISVCPKQRQTLLFSATYPEEIKRLSKQFMKDPKEVHVVTPPEEIDIEQHFYEVSRHAQKFPLLKSLLLHYQPVSVLIFCNTKQQTIEVTDQLINEGFSAIALNGDMEQIERDLAVLRFANQSCSILVATDVAARGLDIKELSAVINFDLAFDHDVHIHRIGRTGRAGSKGIALSIVTPADAQRICAIEDNYPLPIHWGNINELENHNTARLVPEMVTLCIASGKKDKIRPGDILGALTKDAGLAGNTIGKINITAMYSYVAIHHSQADKAYQYLQSGKLKGRKVNVRKIN

SEQ ID NO: 65460 - DNA, 1770 bp, Legionella pneumophila subsp. pneumophila str. Philadelphia 1
  CDS (1)..(1770): transl_table=11
atgaatcaagaaatatcaaacttctctacttttaatttttctaatgctttaaataaggcgttagaagatatgaagtttattacgccatcgcctatccaggctcaaaccattcctttgatattgcaaggtcgtgatgccattgctcttgcgcaaactggtacaggtaaaacagcggcttttgcattaccaattttgcaaaatttgtcccctgagatatctaccactcaggctttgattttagcccctactcgtgaattggcaatccaggttgcagagcaatttgaattattaagcaagtaccaacgcaatgtgacgatcgccgttctttgcggtgggcaagaatatggtcgtcaattaaaacaattgcgtagtggtgcgcaagtggttgttggaacgccaggacgtattctggaccatatcgataaaggcaccttgctcttaaataatctgaagacatttattctggatgaagcagatgaaatgttgcgtatgggtttcatcgaagatgtagaaaccattttagaaaaactgcctgaaaaaaagcaaatggcattgttttcagcaaccatgccctatcgaattcgtcaaatagccaatacttatttgaatgaccctgcctcaattgaaatccgtatggaaactgcgacggtcaagtctattgagcaacggtttttatttgcttccgtacatcaaaaaccggatgcgttaatccgggtcttggaagtggaggattatcaaggggttatcgtttttgtacgcactaaaagcagtactgaggaagtagcagaactattgcaacaacatggattaagagcaatggcaattcatggtgatattactcagtctttgcgtgagcggattattgctcaatttaaacaaggagcgattgatattctggtggcgacggatgtcgctgcaagaggtttggatgtcgagcgagttactcatgtgattaattatgatatgccacatgataatgaaacttatgttcacagaattggcagaacagggagagctggccgttctggtgttacgattttatttgtaactcccaaggaatcgcgtttaatttccagcattgaacgccataccaggcaacgaattgagaaagttcaagttcctaatgaccatatgatacagatggctcgtcaacaaagattcatgtctaacattactactcgactgaatcatgagcatgtgtattcctacaaaaggattgtggaagaatacattaaagagcatgacgtatcagcagtagatgttgcggctgctcttgctttattgctgcataaagacatgccttggagaaaagaattaaatatgcctaaagcagcttcagcattcaaagaagagagagctcgggcaggagaaaaaggattggatttacgtggtcgatttaaggaagatagaaaaagttcttttgctgatcggaaaggtgcgcgaggaagcaagaaagattttgccaaagacttttctaatgaaagaaaaaaatttaatgatggcaggaaggccgttaatcaagaatcagtagcccaggatttatttcgtatcgatgtaggcaaaattcatggagtcaaacctggcaacatagtaggggctattgctaatgaggctggcttgcaaagccgatatattactggtcttaaaattcatgaagatcactctactgttcgtttaccaaaaggtatgccaaaagaagtgatgaaggacttaaccaaggcttgggtttgtggccgccaactcaatttaacattaattggtagtgcctga

SEQ ID NO: 65461 - protein, 589 aa, Legionella pneumophila subsp. pneumophila str. Philadelphia 1
MNQEISNFSTFNFSNALNKALEDMKFITPSPIQAQTIPLILQGRDAIALAQTGTGKTAAFALPILQNLSPEISTTQALILAPTRELAIQVAEQFELLSKYQRNVTIAVLCGGQEYGRQLKQLRSGAQVVVGTPGRILDHIDKGTLLLNNLKTFILDEADEMLRMGFIEDVETILEKLPEKKQMALFSATMPYRIRQIANTYLNDPASIEIRMETATVKSIEQRFLFASVHQKPDALIRVLEVEDYQGVIVFVRTKSSTEEVAELLQQHGLRAMAIHGDITQSLRERIIAQFKQGAIDILVATDVAARGLDVERVTHVINYDMPHDNETYVHRIGRTGRAGRSGVTILFVTPKESRLISSIERHTRQRIEKVQVPNDHMIQMARQQRFMSNITTRLNHEHVYSYKRIVEEYIKEHDVSAVDVAAALALLLHKDMPWRKELNMPKAASAFKEERARAGEKGLDLRGRFKEDRKSSFADRKGARGSKKDFAKDFSNERKKFNDGRKAVNQESVAQDLFRIDVGKIHGVKPGNIVGAIANEAGLQSRYITGLKIHEDHSTVRLPKGMPKEVMKDLTKAWVCGRQLNLTLIGSA

SEQ ID NO: 65462 - DNA, 1977 bp, Azoarcus sp. EbN1
  CDS (1)..(1977): transl_table=11
ttgagccaagcggcaccggcaggatttcggtacgatgcgcttcattcgctaagcgccccgttactctcgacggatcggcgccttttccctttccgctgcccgcaccagaatcccatgacttcccccatcgaaagcttcgcccaactcgatctccgtgcaccgctgctcgatgcgctgtccgaaatcggctatgaaacgccgtcgccgatccaggcgatatgcatcccgcatctgctcgccggccacgacctgctcggggaagcgcagaccggtaccggcaagactgccgcgttcgcgctgccgctgctcgaccggctcgacctcgcagtcaaaaatccgcaggtgctcgtactcgcgccgacccgcgaactcgcgatccaggtcgccgaggctttccagcgttacgcgaagaacctgccgggtttccacgtgctgccggtgtatggcggccagagcatggtcgtgcaactgcgccagctcgcccgcggcgcacatgtcatcgtcggcaccccgggccgcgtcatggaccacatcgagcgcaagagcctcaatctcgacagcctgacgacattggtgctcgacgaagccgacgagatgctgcgcatggggttcatcgacgacgtcgaatggatcctgcagcacacgccggccgagcggcagacggcgctgttctcggcgacgatgcccgacgcgatccgccgcgtcgcgcaccgttacctgcgcgagccgcgcgaggtcaagatcaaggccagcacgacgacggtgtcgacgacgcgtcagcgctactgccagatcagcgtcgcgcacaagctcgacgcgctgacgcgcatcctcgaagtcgaggaggatttcgacgccgcgatcatcttcgtccgcaccaagaccgcgaccgtcgagctcgccgacaagctcgaggcgcgcggctactcggccgccgcgctgaacggcgacatgacgcagcagctgcgcgagcgcgtcatcgaacagctcaagggcggacagctcgacatcgtcgtcgccaccgatgtcgctgcgcgcggcctcgacgtgtcgcgcatcagccacgtcatcaactacgacatcccgtacgacaccgaagcgtatgtgcatcgcatcggacgcaccgggcgcgcgggtcgcaccggcagcgcgatcctgtttgtcgcgccgcgcgagatgcggatgctgaaagtcatcgagcgcgcgacccgccagccgatcgaggcgctgcaactgccgtcgcgcgaggccgtcgcggacaagcgggtcgccgcgttccgccagcaagtcgccaccgtgctcgaatccgaagacctcgcatttttccgcgacgtcgtcgccggcatggaatcgacgcacgaagccgaactccacgacatcgccgccgccctcgccttcctcgcgcagcgcgagcgcccgctgcagttgccggagtcgaaaggccccgacatcgcccgcctgcccgaaccgcggcgcgaaccaggcgccgagcgcgccccgcgcgaaaaccgcgacaaaatactcgaacgccgacgcgagttttccgagggcaatctgcagcgctaccgcatcgaagtcggccgcaaccagcaggcgacgccgaaggatatcgtcggcgcgatcgccaacgaggccggcatcgaaagccgctatatcgggcagatcaacctctacgaggactacagcaccgtcgaactgccgagcgccctcccgcacgacgtgctcgacatcctgcgccgcgtgcgcgtacgccagcaccagctgaacatccgcccgctcgacgcggaggaagcgaagcgcgacgcggcccgcgtgcgcccgggagcccctcgtccgggcgcggcgccgcgtcacgcggctcaccctggaagcaaacccgctcatccgggaagggtcggcccgagatccttcagcagcgaaaagcgcacgccgtcccccggcttcaaaccgggcaagaaaaaaccgcacgatcgctga

SEQ ID NO: 65463 - protein, 658 aa, Azoarcus sp. EbN1
MSQAAPAGFRYDALHSLSAPLLSTDRRLFPFRCPHQNPMTSPIESFAQLDLRAPLLDALSEIGYETPSPIQAICIPHLLAGHDLLGEAQTGTGKTAAFALPLLDRLDLAVKNPQVLVLAPTRELAIQVAEAFQRYAKNLPGFHVLPVYGGQSMVVQLRQLARGAHVIVGTPGRVMDHIERKSLNLDSLTTLVLDEADEMLRMGFIDDVEWILQHTPAERQTALFSATMPDAIRRVAHRYLREPREVKIKASTTTVSTTRQRYCQISVAHKLDALTRILEVEEDFDAAIIFVRTKTATVELADKLEARGYSAAALNGDMTQQLRERVIEQLKGGQLDIVVATDVAARGLDVSRISHVINYDIPYDTEAYVHRIGRTGRAGRTGSAILFVAPREMRMLKVIERATRQPIEALQLPSREAVADKRVAAFRQQVATVLESEDLAFFRDVVAGMESTHEAELHDIAAALAFLAQRERPLQLPESKGPDIARLPEPRREPGAERAPRENRDKILERRREFSEGNLQRYRIEVGRNQQATPKDIVGAIANEAGIESRYIGQINLYEDYSTVELPSALPHDVLDILRRVRVRQHQLNIRPLDAEEAKRDAARVRPGAPRPGAAPRHAAHPGSKPAHPGRVGPRSFSSEKRTPSPGFKPGKKKPHDR

SEQ ID NO: 65464 - DNA, 1389 bp, Neisseria gonorrhoeae FA 1090
  CDS (1)..(1389): transl_table=11
atgtctattaaatttgccgatttgaaccttgataaaaacattttgtccgccgtcagcagcgagggttacgaaagcccgacgccgattcaggcgcaagctattccgtttgctttggaaggctgcgacatcatggcttcggcgcaaaccggctccggaaaaaccgcagcctttctgttaccgactttgcagcgactgaccaaacgcagcgaaaaaccgggcaaaggcccgcgcgcgctggtgttggcaccgacccgcgaactggcggcgcaagtcgagaaaaacgcactggcgtatgccaaaaatatgcgctggttccgcaccgtcagcatcgtcggcggcacatcgttcggctaccaaacccgcgccctgagcaaaccggtcgatttgattgtcgccactccgggccgtctgacggacctgatgcaaagcggcaaagttgattttgaacgtttggaagtgctgattttggacgaagccgaccgtatgttggatatgggctttatcgacgacatcgaaaccatcgtggaagccaccccggccgaccgtcagactttattgttctccgccacttgggacggcgcagtcggcaaactggcgcgcaaactgaccaaagactctgaaattatcgaagtcgaacgcgtggacggccaaggcaaaatcgaagagcagttgttgtactgcgacgatatgcgccacaaaaaccgcctgctcgaccacatcctgcgcgatgccaacatcgaccaatgtgtgattttcacgtccaccaaagcgatgaccgaagtcatcgcggatgaattgtacgaaaaaggtttcgccgccaactgcctgcacggcgatatgccgcagggctggcgcaaccgcacgctgacggatttgcgtaaaggccgctgcaaaattttggttgccaccgacgttgccgcacgcggtattgacgtaccgaccattacccacgtcataaactacgacctgccgaaacaggcggaagactacgtccaccgcatcgggcgcaccggccgcgcaggccgcacgggtattgcgattacgtttgccgaagtgaacgaatacgtcaaagtccacaaaatcgaaaaatacattaaccgcaaactgcccgaactgaccatcgaaggcatggagccggcccgcaaacgcaaatccgcaggcggcaagccgaaaggcaaaggcggctggggcgataggaaatccggcggccggcgcggcgatcataaaccgggcaaagaaggcttcggcggcaaaacgcgcggcgaaggtttcaagaaagaaggctttaagaaagacagtttcaaaaaaaccggcgaaggcttcaaaggcaaacgcaaagccggcgactcttttgcaggcaaaagcgaacgccgttacaaagaccgctaa

SEQ ID NO: 65465 - protein, 462 aa, Neisseria gonorrhoeae FA 1090
MSIKFADLNLDKNILSAVSSEGYESPTPIQAQAIPFALEGCDIMASAQTGSGKTAAFLLPTLQRLTKRSEKPGKGPRALVLAPTRELAAQVEKNALAYAKNMRWFRTVSIVGGTSFGYQTRALSKPVDLIVATPGRLTDLMQSGKVDFERLEVLILDEADRMLDMGFIDDIETIVEATPADRQTLLFSATWDGAVGKLARKLTKDSEIIEVERVDGQGKIEEQLLYCDDMRHKNRLLDHILRDANIDQCVIFTSTKAMTEVIADELYEKGFAANCLHGDMPQGWRNRTLTDLRKGRCKILVATDVAARGIDVPTITHVINYDLPKQAEDYVHRIGRTGRAGRTGIAITFAEVNEYVKVHKIEKYINRKLPELTIEGMEPARKRKSAGGKPKGKGGWGDRKSGGRRGDHKPGKEGFGGKTRGEGFKKEGFKKDSFKKTGEGFKGKRKAGDSFAGKSERRYKDR

SEQ ID NO: 65466 - DNA, 1704 bp, Psychrobacter arcticus 273-4
  CDS (1)..(1704): transl_table=11
atgactgacatcttatctgcaatcgctgctgaaaacggcattatcgaaagcactgacaccccaaacactactgcaaataccgatactaataatgaagcggctacgactgacgctactgacgaaaataaagttacctttactgacctaaatattgccaagccaattcttagcgcgcttgagcgtagtggttatactcacccaacacctattcaagcagaagccattccttttgcattacaaggtcgtgaccttttgttatctgcgcaaacgggtagtggtaaaacagctgcattcgttatcccagtacttgatcgcttgagccgtgcaaccagcttcgacaaattgaccaaagctcttattctaacgccaacgcgtgaacttgctcagcaagtacatgatagcgtacgtacgtattctaaagatatgcgtggtctattctgcgtgcctttagttggcggcgcaccatacaacggtcagattactgctttgaaaaaaggcgtacaagttatcgttgcaaccccaggtcgtttacttgaccatatcaatgcgggtcgcgttgacttatcaagccttgaaatcttggtacttgatgaagctgaccgtatgctagatatgggttttgctgacgatatcagcgacatactacgtgcagcaccgattgatcgtcaaacgattatgtgttcagcaacttgggacggtcctgtcggcaaaatcgctgccagcttcaccaaaaaccctgagcgtgtatcaatcaaagttgaatctgcgcacatcgaagaaaaagtgtattactgtgatgattttgatcacaaaaaccgtttgcttgacaaaatcgtttgccacaaagatatggaacaaatcattatctttgctgccactaaacgtagtactgaaaaattagcaaaacagctacaagaagccggtcataaagcaagcttcctacatggcgatttgccacaaagcaagcgtaaccgcattgttcaagacctacgtaatggtaaatgcaaaatcttagttgcgaccgacgtagcggctcgtggtctagacgttccagcactatcgcacgtcattaactatgacttaccgcgtcaaacggaagattacgtccatcgtatcggtcgttgtggtcgtgcaggccgtactggtgttgctataagcttatgtagcatggatgaccgtccacagcttaacgctattaaccgttatttagatcgtaaaatggaagcctctgttatcgaaggcatggagcctaagaaaacttacgttcctagcgaaaacaaaggcaatggtcgtggtcgtggccgtggtcgttcaaacggcggtggtaatggtaatggtcaaggtcgtggtcgttcagcgggtggttatgctggttctggcgctagtaaacctagtggtcaaggccgtggtcgcccatcaggtgatagcagcaacgctactggtcaacgcgcaagcaatgacagcggttatcaaggtaagccacgtgattcatctggcaagccaaatgagcgttcaggtggcaagccttaccaaggtaagcgtactggtgctcctagccgcggcgatagcactggcgttccacgtggtgagcgtgctgcaacgggtcgtggtcgtccaagtggtagccaaggtcgcccagcagctcgttcagacagccgtggtcaaggtcgtccaactggcggcaaccgtggtaacaactcgtaa

SEQ ID NO: 65467 - protein, 567 aa, Psychrobacter arcticus 273-4
MTDILSAIAAENGIIESTDTPNTTANTDTNNEAATTDATDENKVTFTDLNIAKPILSALERSGYTHPTPIQAEAIPFALQGRDLLLSAQTGSGKTAAFVIPVLDRLSRATSFDKLTKALILTPTRELAQQVHDSVRTYSKDMRGLFCVPLVGGAPYNGQITALKKGVQVIVATPGRLLDHINAGRVDLSSLEILVLDEADRMLDMGFADDISDILRAAPIDRQTIMCSATWDGPVGKIAASFTKNPERVSIKVESAHIEEKVYYCDDFDHKNRLLDKIVCHKDMEQIIIFAATKRSTEKLAKQLQEAGHKASFLHGDLPQSKRNRIVQDLRNGKCKILVATDVAARGLDVPALSHVINYDLPRQTEDYVHRIGRCGRAGRTGVAISLCSMDDRPQLNAINRYLDRKMEASVIEGMEPKKTYVPSENKGNGRGRGRGRSNGGGNGNGQGRGRSAGGYAGSGASKPSGQGRGRPSGDSSNATGQRASNDSGYQGKPRDSSGKPNERSGGKPYQGKRTGAPSRGDSTGVPRGERAATGRGRPSGSQGRPAARSDSRGQGRPTGGNRGNNS

SEQ ID NO: 65468 - DNA, 1821 bp, Dechloromonas aromatica RCB
  CDS (1)..(1821): transl_table=11
atgtcgacacctgtcgaaagctttgccgatctcggtttaagcgaaacgcttctgcaaactctcacccaaatcggctacgaaaccccgtcgcccattcaggctcaatgtatccctgttctgctcgaaggtcatgacctgatcggcatggcccagaccggcaccggcaagaccgccgcctttgcgctgccgctgatggaacagatcgacgtcaagctgaccaagccgcaggcgctgatcctgacgccgacgcgcgaactggccatccaggtcgccgaagccctgcagacctacgccaagaacctgcccggcttccacgtgctgccgatctacggtggccagagctacaccatccagctcaagcagttgtcgcgcggcgctcacgtcatcgtcggcaccccgggtcgcgtcatggaccacctcgagcgcaagacgctcaacctcgaccacctgaagaccatggtgctcgacgaagccgacgaaatgctgcgcatgggcttcattgacgacgtcgagtggattctcgaacgtacgccagcccagcaccagaccgcgctgttctcggccaccatgccggaacagattcgccgcgtcgcccagaaatatctggtcgagccgcgcgaaatcaagatcaagtcagctaccgctaccgtcgctgccatccgtcaggtttactggcaggtttccggcatgcacaagctggatgccctgacccgcatcctcgaagttgaagaagacttcgacgcggccatcatcttcgtgcgcaccaagacggccaccgtcgagctggccgacaagctgtcagcccgtggttacgccgccgccgcgctgaacggcgacctcaaccagcagatgcgcgaacgcgtcatcgagcagttgaagtcgggcgccctggacatcgtcattgcgaccgacgttgccgcccgcggtatcgacgtaccgcgcgtcagccacgtcgttaactacgatattccatacgacaccgaagcctacgtgcaccggatcggccgtaccggccgcgctggccgcaccggcaacgccatcctgttcgtcgcgccgcgcgaaatccgcatgctgcgtacaatcgagcgcgccacccgttcgccgatcgccccgctgaccctgccgagccgcgccgatgtgaccaacaagcgcgttgccgacttcaagagcaaggttgttgaagtgctcaacgccgaaggcctggatttcttctcgaacatcgtctcgcaaattgccgaagagcaaaatgtcggcgccgaggaagtggctgctgcgctggccatgatggctcaagaaggcaagccgctgcagatcgccggtgaagatccgcgtccggcaccggcgccccgcccgggcagctttggcgaaagcgatcgcaagccgcgttttgaagatcgtggcgatcgtccacgcttcgaagatcgcggggaacggccgcgtcgcgaagaccgcccggctcgccaggctccggccggcgacatggtgcgctaccgcattgacgtgggtcgtgaccacggcgtcgaagtacgcgacatcgtcggcgccatcgccaacgaagccggcatcgaaagccgtttcatcggccgcatcggtctctacgaagactccagtaccgttgaactgcctgcaggcatgccggccgaagcctccaacgccctgaagcgcacccgcattcgcggcgtgccgatcaacctgcgtccggatgaaggtcgtccgggtgccggcggcgcgggtggcggcgaacgcaagttcggcggcggtgatcgcaagcctgaaggtgatcgcggcggcttcaagaagaagaagttcggcgaccgctaa

SEQ ID NO: 65469 - protein, 606 aa, Dechloromonas aromatica RCB
MSTPVESFADLGLSETLLQTLTQIGYETPSPIQAQCIPVLLEGHDLIGMAQTGTGKTAAFALPLMEQIDVKLTKPQALILTPTRELAIQVAEALQTYAKNLPGFHVLPIYGGQSYTIQLKQLSRGAHVIVGTPGRVMDHLERKTLNLDHLKTMVLDEADEMLRMGFIDDVEWILERTPAQHQTALFSATMPEQIRRVAQKYLVEPREIKIKSATATVAAIRQVYWQVSGMHKLDALTRILEVEEDFDAAIIFVRTKTATVELADKLSARGYAAAALNGDLNQQMRERVIEQLKSGALDIVIATDVAARGIDVPRVSHVVNYDIPYDTEAYVHRIGRTGRAGRTGNAILFVAPREIRMLRTIERATRSPIAPLTLPSRADVTNKRVADFKSKVVEVLNAEGLDFFSNIVSQIAEEQNVGAEEVAAALAMMAQEGKPLQIAGEDPRPAPAPRPGSFGESDRKPRFEDRGDRPRFEDRGERPRREDRPARQAPAGDMVRYRIDVGRDHGVEVRDIVGAIANEAGIESRFIGRIGLYEDSSTVELPAGMPAEASNALKRTRIRGVPINLRPDEGRPGAGGAGGGERKFGGGDRKPEGDRGGFKKKKFGDR

SEQ ID NO: 65470 - DNA, 1521 bp, Ralstonia eutropha JMP134
  CDS (1)..(1521): transl_table=11
atgtctttctccgaactcggcttgtccgacaagcttgtgcgggccgtggccgaacagggctacaccacccccacccccatccaggcccaggcaattcccgccatcctcaaaggtggcgacctgcttgccggcgcgcagaccggtaccggcaagacggcaggctttacgctgccgatgctgcagctgctgtccgaatcggcgccacagcgccagggcaagccggcggtgcgcgcactggtgctgacgccgacgcgtgaactggccgcgcaggtggaagaaagcgtgcgcaactacggcaagtacgtgcggttgcgctcgatggtcatgttcggcggcgtgggcatcaacccgcagatcgaacagctgcgccgtggcgtggaaatcgtcgtggcaacgccgggccgcctgctggatcacgtgtcccagcgcacgatcgacctttccagcgtggaactgctggtactcgatgaagccgaccgcatgctcgacatgggcttcatccacgacatccgcaagatcctcaacgtcctgccgcccaagcgtcagaacctgctgttctcggcaacgttctcggatgatattcgcgcgctggcggaccgcctgctgaacaacccggcatcgatcgaggtcgcgcgccgcaacaccacggccgaaaccgtggcgcagcgcgtctacccggtggaccgcgaacgcaagcgcgaactgctcgcccacctggtgcgcgagcatgactggcaccaggtgctggtcttcacgcggaccaagcacggcgccaaccggctcgccgagcagttgaccaaggacggcctgtccgcgctggcgatccacggcaacaagagccagtcggcgcgcacgcgcgcgctgtccgagttcaaggccggcacgctgcggctgctggtggccaccgatatcgccgcgcgcggcatcgacatcgaccagttgccgcacgtggtcaacttcgacctgcccaacgtgccggaagactacgtgcaccgcatcggccgtaccggccgcgccggcgcagagggtgaggcgatctcgctggtctgcgtggacgagcatggcctgctgcgcgacatcgaacgcctgatcaagcgcaagctcgaacagacggtgctgacgggcttcgaagtcgatccgaccatcgcggcggagccgatccagaagggtcgccagcagcgaggcggcgggcagggcggtggacaaggtggtggacgtggccgtgcgcaggcaaagcctgcggcgccagcggcagccaagccgtcgcagggccagccgcgtcagcgcccggcccagaacgcaccgcgtggcgccagccaggccgggggcgaggcagcccgtggccacggcggcgcaaaccgcaacgccggccaggctcagccgcgcaacccgcaacgcaacggcggcggccaggcgcggcctgctcaggacgccactggcgccccggcgcgcaacaacaaccgccgcccggcctcgcaggccgcactgcttggcggcgcgcgggctaagccggcgcgctga

SEQ ID NO: 65471 - protein, 506 aa, Ralstonia eutropha JMP134
MSFSELGLSDKLVRAVAEQGYTTPTPIQAQAIPAILKGGDLLAGAQTGTGKTAGFTLPMLQLLSESAPQRQGKPAVRALVLTPTRELAAQVEESVRNYGKYVRLRSMVMFGGVGINPQIEQLRRGVEIVVATPGRLLDHVSQRTIDLSSVELLVLDEADRMLDMGFIHDIRKILNVLPPKRQNLLFSATFSDDIRALADRLLNNPASIEVARRNTTAETVAQRVYPVDRERKRELLAHLVREHDWHQVLVFTRTKHGANRLAEQLTKDGLSALAIHGNKSQSARTRALSEFKAGTLRLLVATDIAARGIDIDQLPHVVNFDLPNVPEDYVHRIGRTGRAGAEGEAISLVCVDEHGLLRDIERLIKRKLEQTVLTGFEVDPTIAAEPIQKGRQQRGGGQGGGQGGGRGRAQAKPAAPAAAKPSQGQPRQRPAQNAPRGASQAGGEAARGHGGANRNAGQAQPRNPQRNGGGQARPAQDATGAPARNNNRRPASQAALLGGARAKPAR

SEQ ID NO: 65472 - DNA, 1602 bp, Thiobacillus denitrificans ATCC 25259
  CDS (1)..(1602): transl_table=11
atgagcttctccgaactggggcttgatcccctcattctcaaatccgtactcgccgccggctacgaaaacgccacgccggttcagcagcaggcgattcctgccgcgctgagtgggggcgacctgctggtgtcctcgcacaccggcagcggcaagacggccgccttcctgctgccgtcgatccagcgtctgctcgccgagccggcggtcaaaagcatcgggccgcgtgtgctggtgctgacgccgacgcgcgaactcgcgctgcaggtcgaaaaggccgcgatgacctacggcaaggagatgcgccgcttccgcaccgcctgtctggtcggcggcgccccctatggcctgcagctcaagcgactctcgcagccggtcgacgtcgtggtcgccacgccgggtcgcctgatcgaccatctcgagcgcggcaagatcgacttctcgcgcctcgaggtgctcgtgctcgacgaagccgaccgcatgctcgacatgggcttcgtcgacgacatcaaggcgatcgccgcgcgctgtccggccgaacggcagaccctgctgttctcggccacgctcgacggcgtcgtcggcaacctcgcacgcgaactgacccgcgacgcgcaacgcatcgagatcgaggcggtgccgcacaaggaagccaagatcgagcagcgcctgctgttcgccgacaacatggaccacaagaaccgcctgctcgacgcgctgttgcgtgacgtcgagatggtgcaggcgatcgtgttcgcatcgaccaagcgcagcaccgaggagatttccgacctgctcgccgaaagcggcttcgcctccgacgccttgcacggtgacatgcagcagggccagcgcaaccgcgcgctgcagcggctgcgcgaagggcgcacccgcgtgctcgtcgcgaccgacgtcgcggcccgcggcatcgacgtcgccagcatcagccacgtcatcaacttcgatctgccgcgccaggccgaggactacgtccaccggatcggccgcaccggccgcgcgggtcgtaccggcatcgcggtgagcttcgccggcatgcgcgagggcggactggtgaagaacatcgagcgctacaccggcaaccgcatcgaggtgcacaccttgcccgggctggagccgacgcagcggccgtcgaccgggcgacccggcaatggccggccgcgcggcaacggtccgcgcgggggctacgagaagcgcagcttcggggatcgcagcgagccgcgcagctacggcgaccggccccgtggcgatagccgcgacaaccgcgaccgcggctaccgcggcgacgcccgtcgtaacgacggcgcacccgcccgtcgcttcgacaatggcgtccgcgggccgtccgacgtgccgcgcatgaccagcgagcagacggcagggcctcgtggcgccgcctccaagcccgaggttaatggcaacagcgtcgagtactgggagaagcgcgaacgcgaggccaaggccaaagccgccacgggccgctcctacggcgaccgcggcaacgccgcgcgtccggcacgtggctacggcaacgagaaccgtggcggggcagggcgcggcggggtgcgcgggcgcttcaaggactga

SEQ ID NO: 65473 - protein, 533 aa, Thiobacillus denitrificans ATCC 25259
MSFSELGLDPLILKSVLAAGYENATPVQQQAIPAALSGGDLLVSSHTGSGKTAAFLLPSIQRLLAEPAVKSIGPRVLVLTPTRELALQVEKAAMTYGKEMRRFRTACLVGGAPYGLQLKRLSQPVDVVVATPGRLIDHLERGKIDFSRLEVLVLDEADRMLDMGFVDDIKAIAARCPAERQTLLFSATLDGVVGNLARELTRDAQRIEIEAVPHKEAKIEQRLLFADNMDHKNRLLDALLRDVEMVQAIVFASTKRSTEEISDLLAESGFASDALHGDMQQGQRNRALQRLREGRTRVLVATDVAARGIDVASISHVINFDLPRQAEDYVHRIGRTGRAGRTGIAVSFAGMREGGLVKNIERYTGNRIEVHTLPGLEPTQRPSTGRPGNGRPRGNGPRGGYEKRSFGDRSEPRSYGDRPRGDSRDNRDRGYRGDARRNDGAPARRFDNGVRGPSDVPRMTSEQTAGPRGAASKPEVNGNSVEYWEKREREAKAKAATGRSYGDRGNAARPARGYGNENRGGAGRGGVRGRFKD

SEQ ID NO: 65474 - DNA, 1557 bp, Rhodobacter sphaeroides 2.4.1
  CDS (1)..(1557): transl_table=11
atgctaatgaccaagttctccgacctcgcgctggatccccgcgtgctgaaggccgtgcaggaagccggctacgaaacgcccaccccgatccaggcgcaggccatcccgcatgcgctggaaggcaaggatgtgctgggcatcgcccagaccggcaccggcaagaccgccagcttcacgctgcccatgatcaccatcctcggcaagggccgcgcgcgcgcccggatgccgcgcagcctcgtgctctgcccgacgcgcgagcttgcagcccaggtggccgagaatttcgacatctatgccaagcactccaagctctcgaaggcgctgctgatcggcggcgtctccttcaccgagcaggacaagctgatcgaccgcggcgtggacgtgctgatcgccaccccgggacgcctcctcgaccatttcgagcgcggcaagcttctgctcaccggcgtgcagatcatggtggtggacgaggccgaccggatgctcgacatgggcttcatcccggatatcgagcgcatcttctcgctgacgcccttcacgcgccagacgctgttctactcggccaccatggcgcccgagatcgagcggatcaccaacaccttcctcaccggcgcggtgaagatcgaggtggcgcggcaggccacgacctccgagacgatcgagcagaagctcatccaggtcacaccgacgcggaaggagcgtagcttcgccgacaagcgcgccgtcctgcgggcgctgatccgggccgaaggcgaggcctgcaccaacgcgatcatcttctgcaaccggaagatggacgtggacgtggtggccaagtcgctgaagcagcacggcttcaacgcgtcgcccatccatggcgatctcgaacagtcgcagcgcatgaagacgctcgacgggttccgcgacgggtcgttgcacctgctcgtagcctccgacgtggccgcgcgcgggctcgacattccggcggtgagccatgtgttcaacttcgacgtgccgacccaccccgaggattacgtccaccgcatcggccggaccggccgcgcgggccggaagggcaaggcctacacgatcgccgtgccgtcggacgagaagcatgtgaccgccatcgagagcctcgtgaaacaggcgatcccgcgcggcgagctgcccgagggcttcagcctcgaggatcgccccgaccggcccgagcgtgacaacgcacgcggcgagcggtccgaacgccctgcgcgcggccgtcgcggccgcgaccgcgaccggcgcgaggagccccgggtcgaggccgtggaagccccggccgcggccgttcccgaagtgcgggaagtgcgcgaggagcgcccgccccgccgcgaagagcggcgcgacgagcgccgcgagggcggcaacaaccggcgcgagcgtgaccgcgaccgccgcgaggaacgcgtggtgggcatgggcgaccatgtgccggacttcctgctccgcagcttccgcatcccgagcctgacggcctccgacgaagaggagcccgtccccgaggccgcggaagagatgctggcgggcgacggcgaggcctga

SEQ ID NO: 65475 - protein, 518 aa, Rhodobacter sphaeroides 2.4.1
MLMTKFSDLALDPRVLKAVQEAGYETPTPIQAQAIPHALEGKDVLGIAQTGTGKTASFTLPMITILGKGRARARMPRSLVLCPTRELAAQVAENFDIYAKHSKLSKALLIGGVSFTEQDKLIDRGVDVLIATPGRLLDHFERGKLLLTGVQIMVVDEADRMLDMGFIPDIERIFSLTPFTRQTLFYSATMAPEIERITNTFLTGAVKIEVARQATTSETIEQKLIQVTPTRKERSFADKRAVLRALIRAEGEACTNAIIFCNRKMDVDVVAKSLKQHGFNASPIHGDLEQSQRMKTLDGFRDGSLHLLVASDVAARGLDIPAVSHVFNFDVPTHPEDYVHRIGRTGRAGRKGKAYTIAVPSDEKHVTAIESLVKQAIPRGELPEGFSLEDRPDRPERDNARGERSERPARGRRGRDRDRREEPRVEAVEAPAAAVPEVREVREERPPRREERRDERREGGNNRRERDRDRREERVVGMGDHVPDFLLRSFRIPSLTASDEEEPVPEAAEEMLAGDGEA

SEQ ID NO: 65476 - DNA, 1824 bp, Synechococcus sp. CC9605
  CDS (1)..(1824): transl_table=11
gtgagcctgatttcagagatcaatcaggcgaagccaccttttatgaccgaacagcaacagcagcgcgacgattccgcctgcgcagtggatctttctgcatccgaactgccggaagccaactccaatgctgaggtgttcaccaccaccatcacatcggctgaaccggaatccggttttgccggttttggtttcagcgaggccctgctccgcaccctggcggacaagggatacagcgaaccttcccccattcagaaggcggccttccccgagctgatgcttggccgcgatttggtgggtcaggcccagaccggcaccggtaaaacagcagcgtttgcgttgccgttgctcgagcgtctggaaagcggccagaaaacaccccaggctctcgttctcgcccccacacgggagctggcgatgcaggtggccgaatcgttcaaggcctattccgccggccatccccatctgaaggtgctggcggtgtacggcggcacggatttccgctctcagatcagtgctctcaggcgcggtgtggatgtggtggtaggcacccctggccgggtgatggaccacatgcgtcagggcacgctcgacaccagtggtctgcgcagcctggtgctcgatgaagcagacgaaatgctccgcatgggcttcatcgacgatgtggagtggatcctcgatcagcttcctgagcagcgtcaggtggttctgttctccgcgacgatgcctcctgagatccgtcgtctgtccaagcgttatctcaaggatcctgctgaggtcacgatccgcaccaaggatcaggaaggcaagcggatacgccagcgctcgatcacggtgccgatgccgcacaagctcgaagccctgcaacgggttctcgacgcctgtggtagtgagggtgtgatcatcttcgcccgcaccaaggcgatcaccctgaccgtggctgaaacccttgaagccggcggccatcaggtggcggtgctcaatggcgatgttccccagaaccagcgggaacgcaccgtggagcggttgcgcagtggatcggtcgacatccttgtggccaccgacgttgcggcgaggggtcttgatgtggagcgcatcggcctggtgatcaactacgacatgccgttcgacagcgaggcctacgtgcaccgcatcggccggacgggccgggctggacgcaccggcgaagcggttctgttcgtgaccccacgggaaaggcgcttcatccgcaacctcgagcgggccacggggcagccgatcgaagcgatggaggtgcccggcaacacggccatcaaccagggacggctcgaccgcctgcgcaagcgtttgagtgatgcagcccaatcccaacgtcctgatgccgatgaagcggccttgcttcaggagttgatgcagcgggtggccacggaactcgagctaagccccgagcagctggccatggcagcactgaacctggccatcggacccgatgcgctgctgcgcaagggtgacgacgactggattcagaacacccgtcgcaacgaccgcgaccgtgatcgccattcaggagatcgccgtgagcggcgcgagcgtccggcacgggcacctgaggagaacatgcagcgttaccgcgttgaggtgggtcaccgcgatcgggtcaaacccggcaacctcgtgggcgccatcgccggtgagaccggactgcagggccggatgatcggtcggatccagattttcgacaatcacagcctggtggatctccccaagggcatgccagaggatgtgttcaacagccttcaacgcctgcgcgtgatgaaccgcgaactgcaaatcagcaaggcctcttga

SEQ ID NO: 65477 - protein, 607 aa, Synechococcus sp. CC9605
MSLISEINQAKPPFMTEQQQQRDDSACAVDLSASELPEANSNAEVFTTTITSAEPESGFAGFGFSEALLRTLADKGYSEPSPIQKAAFPELMLGRDLVGQAQTGTGKTAAFALPLLERLESGQKTPQALVLAPTRELAMQVAESFKAYSAGHPHLKVLAVYGGTDFRSQISALRRGVDVVVGTPGRVMDHMRQGTLDTSGLRSLVLDEADEMLRMGFIDDVEWILDQLPEQRQVVLFSATMPPEIRRLSKRYLKDPAEVTIRTKDQEGKRIRQRSITVPMPHKLEALQRVLDACGSEGVIIFARTKAITLTVAETLEAGGHQVAVLNGDVPQNQRERTVERLRSGSVDILVATDVAARGLDVERIGLVINYDMPFDSEAYVHRIGRTGRAGRTGEAVLFVTPRERRFIRNLERATGQPIEAMEVPGNTAINQGRLDRLRKRLSDAAQSQRPDADEAALLQELMQRVATELELSPEQLAMAALNLAIGPDALLRKGDDDWIQNTRRNDRDRDRHSGDRRERRERPARAPEENMQRYRVEVGHRDRVKPGNLVGAIAGETGLQGRMIGRIQIFDNHSLVDLPKGMPEDVFNSLQRLRVMNRELQISKAS

SEQ ID NO: 65478 - DNA, 1317 bp, Geobacter metallireducens GS-15
  CDS (1)..(1317): transl_table=11
atgaaattcaccgacttaaacctccccgaactggtgcaacggggtatcgccgacaccggcttcaccgactgcaccccgatccaggaaaagacccttcccctggccctttccggtaaggatgtggccggccaggcccagaccggcaccggcaagactgcagcctttctcatcagcctcttcacccggctcctgaagaaccccacggagggagaaacccgcaatccgcgcgccctgatcctggctcccacccgggagctcgtcgtccagatcgagaaggacgcccaggccctcggggcccactgcggcttcgtgatccaggccatctacggcggcgtcgactacatgaagcagcggagcgccctcaaggaaggggccgacgtggtggtcggcaccccggggcgcctcatcgactacctgaagcagaaggtctactccctcaaggagatcgaggtgctggtcatcgacgaggcggaccggatgttcgatatggggttcatcgccgacctccgcttcatcctccggcggctcccccccttcgacaaacgccagaacctcatgttctccgccaccctcaaccagcgggtgatggaactggcctacgagttcatgaacgtccccgaaaaggtggcggtcacccccgagcagatgaccgccgagcgggtggagcaggtcctctaccacgtggggcgcaaggagaaattcccgctcctcctgggcctcctgcgcaagaaggggatggagcggaccatgatcttcgtcaacaccaagcgggaggcggagttcctggacgagcggcttaatgccaacgacttcccctgtcgggtcatctccggcgacgtggagcagcgcaagcggatgaggattctggaggacttcaagaacggcaagctcccgatcatgatcgccaccgacgtcgcctcccgcggcctccacatcgacggggtctcccacgtcatcaactacgaccttccccaggacgccgaggactacgtccaccgcatcggccgcaccgcccgggccggcgccgagggaaaggcgatctccatggccgatgaggacggcgccttccacctggaggcgatccacgagtacatcaaggacaaaatcccggttgaatgggccgaggacgacctcttcgtccacgacttcaagcgggtgaaaccgaagcccaaggggcacgagacccgagccaaggggccgacccgccacggccggaagcacccggaaggggagaagaaagagggagaaggggaggcgaagaagcgccgccgcgggccccggaagaaaccggcgggggagaagccgaagccggaatag

SEQ ID NO: 65479 - protein, 438 aa, Geobacter metallireducens GS-15
MKFTDLNLPELVQRGIADTGFTDCTPIQEKTLPLALSGKDVAGQAQTGTGKTAAFLISLFTRLLKNPTEGETRNPRALILAPTRELVVQIEKDAQALGAHCGFVIQAIYGGVDYMKQRSALKEGADVVVGTPGRLIDYLKQKVYSLKEIEVLVIDEADRMFDMGFIADLRFILRRLPPFDKRQNLMFSATLNQRVMELAYEFMNVPEKVAVTPEQMTAERVEQVLYHVGRKEKFPLLLGLLRKKGMERTMIFVNTKREAEFLDERLNANDFPCRVISGDVEQRKRMRILEDFKNGKLPIMIATDVASRGLHIDGVSHVINYDLPQDAEDYVHRIGRTARAGAEGKAISMADEDGAFHLEAIHEYIKDKIPVEWAEDDLFVHDFKRVKPKPKGHETRAKGPTRHGRKHPEGEKKEGEGEAKKRRRGPRKKPAGEKPKPE

SEQ ID NO: 65480 - DNA, 1719 bp, Desulfovibrio desulfuricans G20
  CDS (1)..(1719): transl_table=11
atggaaagtaaagaggcagccctccggcaaaaaaagggcgtttctgcttgcaatggcagaaacatccggctctgccgcagcgttgtcataacgcgatgccgaaagacgcatggcaaggaaacatacaagataatggttgaaaaacttcttttcgcagatcttcccctttctaaggaagtgctgcgcgcgatacaggacatgggctttgaggaggcgtctcccatccagacgatgtccatcccgcacatactggcgggtaaggatgtggtcggacaggcccagacaggcacgggcaagactgctgcgttcggcattcccattctcgagcgcattgacccccgtgataaagccacgcaggccgtggtgctgtgtcctacgcgtgaactggccattcaggtggccgaagaagtgactacactggcccgccacaagcggggcatcagtgttgttcccgtatacggcggacagcccatcgaacggcaggtccgcgctctgcgccgtggtgcgcaggttatcgtgggtacgccgggccgcgtgatggaccacctcgacagaggaaccatggacatcaataccgtgaaaatggttgtgctggacgaggcggacgaaatgctcgatatgggcttccgcgatgacattgaattcattctgggcaagatggagcaggaagtacagaccgtgttcttttccgccaccatgccccgcgccattctggatatggcgcagcgctacctcaaggaaccggagttcctgaaagtcacccagaagctgcttaccgtgcccagcatcgagcagatatacttcgaggtgcgtcctttccagaagctggaaagtctgtgccgtgtgctggacgtgtataatcccaagctgaccatcgtgttctgctccaccaaggtgggcgtggacgaactggcaaccaatctgcaggcccgcggatatgatgccgacggactgcacggcaacctgaatcaggcccagcgcgacagggtgatgaaccgcttccgcaaaggaaacattgatattctggtggccaccgacgtggctgcccgcggtattgatgtggaaaacgtggaagccgtggtcaactacgacatacccaacgatgtggaaagctatgtgcaccgtatcggccgtacgggccgtgcgggccgtgcgggccgtgcattcacctttgtgtccggccgcgaattctacaagctgcgcgacatcaagcgctttaccaaggcgcagatagcacagcgtcaggtaccctcgctttccgaagtggaaaacgccaaattcacccagatgctcaatgaagtgaccaaccagatacgcaccggcggtctggagcgctacatagaactggtggaaggcattatcggcgaagagttcacctctgtggaagctgccgccgccctgctgcgcatgatgatgcaccgtaacgcaggcgatgccgtgaccgaagagcagaagttcggtgataccggtgcccagccgggcatggtacgcctgttctttaacgtgggccgcaaagcccgcgtgacggcacgtgactttgtgggggccattgccggagaaaccggcctgcccggacggatgatcggctccatagatatctatgaccggttcacgtttgtggaagtgcccaacgagtttgccgcagaagtgcttgcagtgatgaacggcaaccagatacgcggcaacaagcttgccgtggaacctgccagccgccgctga

SEQ ID NO: 65481 - protein, 572 aa, Desulfovibrio desulfuricans G20
MESKEAALRQKKGVSACNGRNIRLCRSVVITRCRKTHGKETYKIMVEKLLFADLPLSKEVLRAIQDMGFEEASPIQTMSIPHILAGKDVVGQAQTGTGKTAAFGIPILERIDPRDKATQAVVLCPTRELAIQVAEEVTTLARHKRGISVVPVYGGQPIERQVRALRRGAQVIVGTPGRVMDHLDRGTMDINTVKMVVLDEADEMLDMGFRDDIEFILGKMEQEVQTVFFSATMPRAILDMAQRYLKEPEFLKVTQKLLTVPSIEQIYFEVRPFQKLESLCRVLDVYNPKLTIVFCSTKVGVDELATNLQARGYDADGLHGNLNQAQRDRVMNRFRKGNIDILVATDVAARGIDVENVEAVVNYDIPNDVESYVHRIGRTGRAGRAGRAFTFVSGREFYKLRDIKRFTKAQIAQRQVPSLSEVENAKFTQMLNEVTNQIRTGGLERYIELVEGIIGEEFTSVEAAAALLRMMMHRNAGDAVTEEQKFGDTGAQPGMVRLFFNVGRKARVTARDFVGAIAGETGLPGRMIGSIDIYDRFTFVEVPNEFAAEVLAVMNGNQIRGNKLAVEPASRR

SEQ ID NO: 65482 - DNA, 1782 bp, Prochlorococcus marinus str. MIT 9312
  CDS (1)..(1782): transl_table=11
atggctttaaaaaaagatggcaactcagttgataatgggcaggaaaaatctcagcatgatgacgcgtcccttctcgagataaagaacttagaaaacaaaacagatattaaatctcaaccattggaaatatcaataggaaatgataatgagaatgggtttctcgattttgggtttaatcaatcgatcttaaattcgttaagcaataaaggatataaaaatccaactcctatccaaaaagctgcaattccggaactaatgttaggcagagatttattaggccaagctcaaactggaacaggaaagactgcagctttcgcattaccattaatagaaaaacttgcagataataaagaattaaatgccaaggttttagttatgacccctactagagagttggcaactcaagttgcagaatcttttaaaagttatagttctgaatctactaattttaagacaattgcaatatatggaggcaccgactatcgaaatcaaatttatgcgttaaaaagaaaagttgacgtagtagttggaacccctggccgaataatggatcatataaggcagggaacctttaaagttaatagcataaattgtcttgttttagatgaggccgatgaaatgttaaatatgggttttcttgaagatattgaatggataatagatcaactacctaaaaataagcagatggtattgttttcagcaacaatgcctaatgagattagaaacatagcaaaaaaatatctaaatgatcccgccgaaatattaatcaaaagtgtcaaaaaagaaacccaattaatttcgcaaaaatttctttacgtccaaaggcatcataaattagatgctttaaaaagaatattagaacttaataacgagggagtaataatttttgtaaggacaaaactacttactacttcaatagcagaagctttagaaaatttaggtcatagtgtggcagtgcttaatggagatattcctcaaaatcaaagagaaaatactgtagatagattaaaaaaaggatttattgatattcttgttgcaactgatgttgcagctagaggattagatgtagagaggataaaactagttgttaattacgattttccttttgataaggaaacatatactcatagaattggaaggactggaagggcaggcagatccggagaggcaattttattcgttaatcatagagaaaaacattttctaagaaacttagaaaactcaacaagaactaagattgaagaaattaatataccaagcaataaaataataaatgaaaaaaggatggagaaacttatagagaacgttaatgagagttctttagctaaagaagataatgaagaaaataaagctttgattattgatgtactagataatttaaaagaaaaacactctatggatgactcaaatattgcaatggctgcgattaatttagtaataggtaataaagcattttttgttaatgaagatgattcttggattcataaacaaaataatactgatagaaatagatcaaatagaaatggtaataatcgtatgagaaattcaaatagaagaaataattttcaaaatgattcttttgaaacctacaaatttgactttggtaaatttgatggtgttagagtagcaaatattatatcctcaatctgtaattcaactaatataaatggtagatccataggtaagatacagatttttaatgattatagtttggttgatttacctagagatctgcatagagaaactaaaaataaattaaaaaaaattaaagtaagaaactaa

SEQ ID NO: 65483 - protein, 593 aa, Prochlorococcus marinus str. MIT 9312
MALKKDGNSVDNGQEKSQHDDASLLEIKNLENKTDIKSQPLEISIGNDNENGFLDFGFNQSILNSLSNKGYKNPTPIQKAAIPELMLGRDLLGQAQTGTGKTAAFALPLIEKLADNKELNAKVLVMTPTRELATQVAESFKSYSSESTNFKTIAIYGGTDYRNQIYALKRKVDVVVGTPGRIMDHIRQGTFKVNSINCLVLDEADEMLNMGFLEDIEWIIDQLPKNKQMVLFSATMPNEIRNIAKKYLNDPAEILIKSVKKETQLISQKFLYVQRHHKLDALKRILELNNEGVIIFVRTKLLTTSIAEALENLGHSVAVLNGDIPQNQRENTVDRLKKGFIDILVATDVAARGLDVERIKLVVNYDFPFDKETYTHRIGRTGRAGRSGEAILFVNHREKHFLRNLENSTRTKIEEINIPSNKIINEKRMEKLIENVNESSLAKEDNEENKALIIDVLDNLKEKHSMDDSNIAMAAINLVIGNKAFFVNEDDSWIHKQNNTDRNRSNRNGNNRMRNSNRRNNFQNDSFETYKFDFGKFDGVRVANIISSICNSTNINGRSIGKIQIFNDYSLVDLPRDLHRETKNKLKKIKVRN

SEQ ID NO: 65484 - DNA, 2400 bp, Rhodospirillum rubrum ATCC 11170
  CDS (1)..(2400): transl_table=11
atgaccttcgccgacctcggcctcagtccagaaaccctccgggccatcgaggaagtgggctatacaacgcccactcccattcaggttcaggcaattccctatgttcagatggggcgcgatgtcttgggcatcgcccagaccggaacgggcaaaaccgcctcgttcacgctgccgatgatcgacatcctggccagcggcaaggccaaggcgcggatgccgcgctcgctgatcctcgccccgacccgggaactggccacccaggtttccgaaaacttcaccctctatggcaagtaccagaagctgtcgatggcgttgctgatcggcggcgagtcgatgaacgagcagcaaaaggttcttgatcgcggcgtcgacgtgctgatcgccacccccgggcggctgatcgatctgttcgaacgcggatcgatcctgctgcgcgacgtcaaggtgctggtgatcgacgaggccgaccgcatgctcgacatggggttcatccccgatgtcgaacgcatcgtcgccctgctgcccaaaatccgtcagacgctgttcttctcggcgacgatggacaaggaaatccgccggcttgccgatgccttcctgatgaaccccaaggaagtccgcatcgaacccacccagaaggtggccgaaacggtggaacaggccctgatcatggtcaaggcctcggaaaagcgcgaggccctgcgccaacttctgcggcgcgagacggtgaccaacgccttcatcttctgtaaccgcaagcgcgatgtcgacgtgctctataagtcgttgtcgggccacggcttcgacattctggccctgcatggcgacatgccccaatacgtgcggaccgagcggctggagaagttcaagcgcgccgaagtccagttgatggtctgttcggacgtggcggcgcgcggcatcgacgtgaccgaggtttcccacgtcttcaatttcgacgtgccgacccaccccgaggattacatccaccgcatcggccgcaccggccgggccggccgcctcggccgcgcctataccctggccacccctgaggacgccaagtacctgcgggccatcgaaaacctgttgggcaaaaccattccgcccgacccccaattggagctttcagacgtggccgtggaggatgtcgccctagccgttgccgaagatgatcgccggcccaagcgtggtggcaagggccgccccgaacgcggcgcccggcggtcaggccggggaagcgccgacgccgaacgcccccgtccgctcgcccccgagcgcgcggccaatgatcaggccccggtcgagcgccccgccgttgaaaagaccctggccgaacagcccgtcgccgagcgcccgccggtcgagcgcgggcaggccgagcggaccgccgaacgcccctcctccgaccgcaccaatgagcgtgcgtcctccgaccgcagcagtgagcgtgcgtcctccgaacgcaacggcgacgatcgtggccggggtggtcgtggtcgcgatgaccgctcggcggcgcgcggtcgccggccccggcgctgggaagatgatccccagtccgaagtcatggaaatgcgcatcggcgacgatgtgatcggctttggcggctttacccccgccttcctgctggtgccctcggttcccttcagcgatcccgacgagctcgaccgcgaggccctggccgaggaagccctggccgatgccggtttgctggtcgaagccgaagagcccgaaaacgactccgacttcgtccccgcccccggccttgccgcccgcgagatcgagaccgcccccaaggcgccggtcgccgccgagaagcccgagcgcgaaaaagccgagcgcgagaagcccaagcgcaagcgcggcggtcgccggaccaagggcgcgaccgatggcgccgacaccgccccgacggccgagacgctcgccgcgacgaccgaagggaccgatgcgctcgccgcaacgagcgaaggaaccgatgcgctcgccgcaacgaccgaaggaaccgacgccgtcgccgagcccctttccgacgatgcggcgccgatggtcgccgaagcgccgggggcagagcctgtcgtcgaagctccgacggtggctgaggccgcccccgaaaagcccaagcgcaagcgcgccgcaccgcgcaaaaaggccgaagcggcggaaaccgtgaccaacgaggccgcagcaagccccgaggccgaggcgcccgccgaaaagcccaagcgcaagcgcgccgccccgcgcaaaaaggccgaagcggtgggggccgagggtgacgagacggtggcggtggtcgccgaaaagcccaagcgcaagcgcgccgccccgcgcaaaaaggccgaagccgcccaggcggacgccgaggccgaggtcgccgcgccgacggagccgcgcgaagactag

SEQ ID NO: 65485 - protein, 799 aa, Rhodospirillum rubrum ATCC 11170
MTFADLGLSPETLRAIEEVGYTTPTPIQVQAIPYVQMGRDVLGIAQTGTGKTASFTLPMIDILASGKAKARMPRSLILAPTRELATQVSENFTLYGKYQKLSMALLIGGESMNEQQKVLDRGVDVLIATPGRLIDLFERGSILLRDVKVLVIDEADRMLDMGFIPDVERIVALLPKIRQTLFFSATMDKEIRRLADAFLMNPKEVRIEPTQKVAETVEQALIMVKASEKREALRQLLRRETVTNAFIFCNRKRDVDVLYKSLSGHGFDILALHGDMPQYVRTERLEKFKRAEVQLMVCSDVAARGIDVTEVSHVFNFDVPTHPEDYIHRIGRTGRAGRLGRAYTLATPEDAKYLRAIENLLGKTIPPDPQLELSDVAVEDVALAVAEDDRRPKRGGKGRPERGARRSGRGSADAERPRPLAPERAANDQAPVERPAVEKTLAEQPVAERPPVERGQAERTAERPSSDRTNERASSDRSSERASSERNGDDRGRGGRGRDDRSAARGRRPRRWEDDPQSEVMEMRIGDDVIGFGGFTPAFLLVPSVPFSDPDELDREALAEEALADAGLLVEAEEPENDSDFVPAPGLAAREIETAPKAPVAAEKPEREKAEREKPKRKRGGRRTKGATDGADTAPTAETLAATTEGTDALAATSEGTDALAATTEGTDAVAEPLSDDAAPMVAEAPGAEPVVEAPTVAEAAPEKPKRKRAAPRKKAEAAETVTNEAAASPEAEAPAEKPKRKRAAPRKKAEAVGAEGDETVAVVAEKPKRKRAAPRKKAEAAQADAEAEVAAPTEPRED

SEQ ID NO: 65486 - DNA, 1242 bp, Syntrophus aciditrophicus SB
  CDS (1)..(1242): transl_table=11
atgaaattcgagaattacaccatctccgaggccatcaaacagaacctcgcgcagctcggcttcaggaggccgacggatatccagtttaaatccatcccctcaatcatgaagggggaagatgtgttagccatcgcccagacgggaacgggcaagacagccgcgttcgccattcctctgatcgaccggattcaccgggaaaagagcagtaagcgggtttttggaatcaaatgcatcgtgctggttcccacccgggaactggccatgcagatcggggaggtctttgccggtctggcgaagcatacccgggtgaagacttttcctttgatcggcggtgtcgaacaggatgaacagattcggaagcttcaggatggcatcgatatcctcattgccaccccggggcggatgttcgatctcatccatcagggacatattcgtctggaccgcatcgagactctggtcctggacgaagccgatcacatgctggacctgggatttatcgaggacatcaagtttgtcaaaagaatgcttcataaaaagcatcaaacccttttcttctcggcgaccattaatccggaaatcaagaagctggctttttcgcaggtaaaaggcacggcgatccgcatccagatctctcccgaagatcccgtatccgcgaatgtgacccacgcggtcatgttcgtcgagatggacgacaagcggtttttcctcgaacggtttctcaaagagaatcaggaaagcaaagtcatcgtctttgttcgaacccggattcgcgcggagcgggtcgcccgggccatggagcgggtcgggctccactcgctgaccatccacggtgaaaaggaccaggcggagcgaaccagcgtgatgcgcaaatttaaggagggggaatgcaatcttttgattgcaacggacgtcagcgcgcggggcatcgacattcccgatgtgaattatgtgatcaactacgatctgcccgaaaaggcggaaaactatgtccatcgcgtgggaaggacaggtcggggcgacaacaagggcatcgcgctttctttctgcagttcggatgagaaaatgcggctgcaggaaatccagcagtttctgaataaagagattgaagtcgtaaaggtcgggaaaaaagattatgggctgacactgggcgcctccagtgcgaaaaccggcgtcgaagcgcttatcgaagaacatgaggcatggctgaagacaaaaagaaagacgaaaaaatccagaaagtga

SEQ ID NO: 65487 - protein, 413 aa, Syntrophus aciditrophicus SB
MKFENYTISEAIKQNLAQLGFRRPTDIQFKSIPSIMKGEDVLAIAQTGTGKTAAFAIPLIDRIHREKSSKRVFGIKCIVLVPTRELAMQIGEVFAGLAKHTRVKTFPLIGGVEQDEQIRKLQDGIDILIATPGRMFDLIHQGHIRLDRIETLVLDEADHMLDLGFIEDIKFVKRMLHKKHQTLFFSATINPEIKKLAFSQVKGTAIRIQISPEDPVSANVTHAVMFVEMDDKRFFLERFLKENQESKVIVFVRTRIRAERVARAMERVGLHSLTIHGEKDQAERTSVMRKFKEGECNLLIATDVSARGIDIPDVNYVINYDLPEKAENYVHRVGRTGRGDNKGIALSFCSSDEKMRLQEIQQFLNKEIEVVKVGKKDYGLTLGASSAKTGVEALIEEHEAWLKTKRKTKKSRK

SEQ ID NO: 65488 - DNA, 1395 bp, Novosphingobium aromaticivorans DSM 12444
  CDS (1)..(1395): transl_table=11
atgaagtttgccgacctcggcctctcggatgaattgctcaagtcggtactggacgccggctacgacgagccgactccgatccaggcgcaggccattcccgctgtcctcatgatgaaggacatcatcggcattgcccagaccggcaccggcaagaccgccggcttcgtgctgccgatgatcgacatcctcgcccacggacgccgacgcgcgttgatgccgcgctcgctgattctcgaacccacgcgcgaactggccgcccaggtcgccgagaacttcgaaaagtacggcaagaaccacgatctcaagatggcactgctcatcggcggcgtgcagatgggcgaccaggtcaaggcgctgcaggaaggcgtcgacgtgctgatcgccacgccgggccgtctgatggacctgttcgaacgcggcaagatcctcctcaccggctgcgagatgctggtgatcgacgaggctgaccgcatgctcgacatgggcttcatccccgatatcgagaacatctgctcgaagctgccgaccacgcgccagacgctgctgttctcggccaccatgccgccgccgatcaagaagctggccgacaagttcctgtcgaaccccaagtcgatcgaggtggcccgcccggcggcgaccaacaccaacatcgcccagttcaaggtccgcagcaccacccgccagaagcgcgaagtcctgcgccacctgctgcgcaccgacaacgtcagcaccgcgatcatcttcgccaaccgcaagacgaccgtgcgtgaactggccaagtccttgcagcgccacggctttgccgccggcgaaatccatggcgacatggaccagagcgcccgcaacgccgaactccagaagttcaaggacggcgaaatctcgatcctgtgcgcgtccgatgtcgccgcccgcgggctcgacgtgaagggcgtgagccacgtcttcaacttcgacacgccctggcatccggacgattacgtccaccgcgtcggccgcaccggtcgcggcggcgccaccggtcgcgccttcacgctggtctccgacgaggacagcgaatcgatcgagaacgtcgagaagctgcagggcaccaagatccccgagttcaaggtcgaactcccgggcaaggaagagcgcaagccgcgcgaatccggcgccgaacgcgacgaagagcccaagcgtggcagccgccgcgaacgccccgcgcgcgaggaacgcaagccccgcgccgaacgcgaatctcgccccgaacgcgaagcccgtccggaacgcgaagtccgcgccgaacgtgctccgcgccgcgagccgacgccctaccgcgaccagtccgagccgccgtcgaagcccggcgagtggaacggcccgatccccgagtttctggccgtctccgcgctctga

SEQ ID NO: 65489 - protein, 464 aa, Novosphingobium aromaticivorans DSM 12444
MKFADLGLSDELLKSVLDAGYDEPTPIQAQAIPAVLMMKDIIGIAQTGTGKTAGFVLPMIDILAHGRRRALMPRSLILEPTRELAAQVAENFEKYGKNHDLKMALLIGGVQMGDQVKALQEGVDVLIATPGRLMDLFERGKILLTGCEMLVIDEADRMLDMGFIPDIENICSKLPTTRQTLLFSATMPPPIKKLADKFLSNPKSIEVARPAATNTNIAQFKVRSTTRQKREVLRHLLRTDNVSTAIIFANRKTTVRELAKSLQRHGFAAGEIHGDMDQSARNAELQKFKDGEISILCASDVAARGLDVKGVSHVFNFDTPWHPDDYVHRVGRTGRGGATGRAFTLVSDEDSESIENVEKLQGTKIPEFKVELPGKEERKPRESGAERDEEPKRGSRRERPAREERKPRAERESRPEREARPEREVRAERAPRREPTPYRDQSEPPSKPGEWNGPIPEFLAVSAL

SEQ ID NO: 65490 - DNA, 1326 bp, Francisella tularensis subsp. holarctica
  CDS (1)..(1326): transl_table=11
atgaaattctcagatttaggtttaaattccttaatatgtaacgctttagaaaagaagggttatacaaaaccaactcctattcaagcacaagcgataccaatagttctaaagggtaatgatgttatggcatcagctcaaacaggaacaggaaaaacagcaggctttacattaccaattatccaaagacttcttgatcaacccaaagctcaagcaaataggatcaaaacattaatcctaactcctacaagagagttagcagcacaaatacaagaacaaattcaaatatatgccgcaaatacacatattcgttcagcagtaatatttggtggagtaagtattaatcctcaaatgatgaaattacgtaaaggtgtcgagattttgatagctactcctggaagattacttgacttatatagtcaaaatgctgtcaagtttgatagtttaaatacctttgttttagatgaagcagacagaatgttagatatgggtttcattaatgatttaaaaaaaatccataaccttttaccgaaaaagttacaaacactaatgttctcagcaacattttcatcagagataaaaaatcttgctaatgaatttctaaataatccccagtttgtatcagctgatgttgtaaatacgacggtcaaaaagattactcagaaaatttatacattagataaatcaaataaaattaatgcgctaatctcactaataaaagatcagaatctacatcaagtactagttttctcgcggactaaaaatggagcaaataaaatctcggaaaagttaaataatgctggcattagtagtagtgctattcatggtaataaaagtcaaactgctcgtactaaagctttagctgattttaaatctaatgatataaatgtcttagttgctactgatattgcagctcgtggaattgatattgcccaacttccttgtgtgataaatcttgatttatcaaatgtcgctgaagactatgtccatagaataggtagaactggcagagcaggacaagagggtttagcaatttctcttgtaagtgctgatgaagtcgaatctttatcaaacattgaacatctgatcgggcatcttttaccacgagaggaactagaaggctttgaggcaactcataatgtacctataacaagtatgtcacacaaaaacaaagctaagaaaatcgatgaagttaagataatagctgcaaaaagagcaaaaaagaacaataacaacaaaaaaccttctaataagaatgattttgctaaaaaaattagacaaaaaatacatcaaaataaaagtgttagaaaaccaaaggcaaaagattaa

SEQ ID NO: 65491 - protein, 441 aa, Francisella tularensis subsp. holarctica
MKFSDLGLNSLICNALEKKGYTKPTPIQAQAIPIVLKGNDVMASAQTGTGKTAGFTLPIIQRLLDQPKAQANRIKTLILTPTRELAAQIQEQIQIYAANTHIRSAVIFGGVSINPQMMKLRKGVEILIATPGRLLDLYSQNAVKFDSLNTFVLDEADRMLDMGFINDLKKIHNLLPKKLQTLMFSATFSSEIKNLANEFLNNPQFVSADVVNTTVKKITQKIYTLDKSNKINALISLIKDQNLHQVLVFSRTKNGANKISEKLNNAGISSSAIHGNKSQTARTKALADFKSNDINVLVATDIAARGIDIAQLPCVINLDLSNVAEDYVHRIGRTGRAGQEGLAISLVSADEVESLSNIEHLIGHLLPREELEGFEATHNVPITSMSHKNKAKKIDEVKIIAAKRAKKNNNNKKPSNKNDFAKKIRQKIHQNKSVRKPKAKD

SEQ ID NO: 65492 - DNA, 1710 bp, Francisella tularensis subsp. holarctica
  CDS (1)..(1710): transl_table=11
atgaattctgaaactaaaaaagattttagtcagcttgggctgaatcaagatattgtagatactgttattaaactaggatatgaaaatccaacacctatccaacagtatgctattccatatatcttatcaggtagagatgtgctaggtcaagcacaaacgggtacgggcaaaacagcagcttttgcattacctctaataaataacatggacttggcatctagagatagagctccacaagttttggtactagcacctacaagagagttagctatacaagtggcggagcagtttgaagcttttgctaaaaatgtacctaatttagatgttgcttgtatttatggtggtcaagaatatggttctcaaataagagcacttaagcaaggtgtaaaagttgtagttggtacaactggtcgagtaatggatcatattgagaaaggtacattacagcttgataatcttagagcattagtattagatgaagcagatgagatgctcagaatgggctttattgatgatgttcaatttgtcttaagtcatgtttctgaacaatgccaaagattacttttctcagcaacaattcctactgatattgctgatattatcgaagaatatctaagaaatccttgtaagatacaagtgaaagcgaaaacaaaaactgctaatacagtgacacaaaaatttatcgtcattaaaggctttagaaagatagatgctttagataggttgcttgagaccgaagaaactgacggtgttattatctttgttaagactaagacaagtactatagaagtagcagataatttaaaagctcttggctataaagtagcagctataaatggcgatatgcaacaatcacagcgtgagtatattgttgatcaattcagaagtgctaaatccgatatcctcgttgctacagatgtagtagctaggggtatagatcttgaacgtattagtcatgtgattaactatgatatgcctaatgatactgatacatatgtacatagaattgggcgtacaggtagagcagggcgtgaaggcacgtcaatttctttagtacctcttaaagagatgagatttttacgtactttagagagatttacaggttcaccaatgcaagaagtatttatgccaagtgctaaagatttagctcaaagcagggtagaacactttaaagctagaataatctcagcattggataaaaataagtctttagataagtataaagaaattattacaagtattcgttatgaattacagttagactcagaagagcttttagctggacttacattactagctcaaggtaagaaaactttcttcccaagagaaattcaagctaaagaagaaaaaccagctcgtgataatagaaattctagagatggtagaagaaatgaaagatttgagcgtagaaatgatcaaggtgatagaactaaacgttttgataaagcagatagaaagccacgtcgtgctgtaaatatcgatctaactacttataagttagatgttggtcgtgataatgatgttcaagcgcgaaatattgttggtgctatagctaatgagggtaatatcgatagtaaacatatctgtaatatctctattcaaaaagattatacattagttgatttaccagcaaatctttcaccaaaagtgataaatcatctaaaaaaagtttgggttgctgggaagaagttaaatcttactgctcagtaa

SEQ ID NO: 65493 - protein, 569 aa, Francisella tularensis subsp. holarctica
MNSETKKDFSQLGLNQDIVDTVIKLGYENPTPIQQYAIPYILSGRDVLGQAQTGTGKTAAFALPLINNMDLASRDRAPQVLVLAPTRELAIQVAEQFEAFAKNVPNLDVACIYGGQEYGSQIRALKQGVKVVVGTTGRVMDHIEKGTLQLDNLRALVLDEADEMLRMGFIDDVQFVLSHVSEQCQRLLFSATIPTDIADIIEEYLRNPCKIQVKAKTKTANTVTQKFIVIKGFRKIDALDRLLETEETDGVIIFVKTKTSTIEVADNLKALGYKVAAINGDMQQSQREYIVDQFRSAKSDILVATDVVARGIDLERISHVINYDMPNDTDTYVHRIGRTGRAGREGTSISLVPLKEMRFLRTLERFTGSPMQEVFMPSAKDLAQSRVEHFKARIISALDKNKSLDKYKEIITSIRYELQLDSEELLAGLTLLAQGKKTFFPREIQAKEEKPARDNRNSRDGRRNERFERRNDQGDRTKRFDKADRKPRRAVNIDLTTYKLDVGRDNDVQARNIVGAIANEGNIDSKHICNISIQKDYTLVDLPANLSPKVINHLKKVWVAGKKLNLTAQ

SEQ ID NO: 65494 - DNA, 1788 bp, Saccharophagus degradans 2-40
  CDS (1)..(1788): transl_table=11
atgaccgaatccagccccaattttgctcaactgggcctaaatgaacacattcttaaagcactaacagacgttggttacgaaaccccctcccccattcaggccaaaagtattcctgagttattagctggacgagatattctgggccaagcccaaaccggtacgggaaaaaccgcagcatttgctctaccaatacttaacaacctagacctaagccaaaaagcgccacaggttctagtacttgcacctacccgcgaactagccattcaggtagcagaagcatttcaatcatacgcccatcacttgcccggcttccacattctacctatctacggtggccaagggtacgaccagcaaatacgcgcactgaagcgcggtgttcacgttattgtgggcacacccggtcgtgttatggaccatatgcgtaaaggcacgctaaagctagaccaacttaaagtattggtactagacgaagccgacgaaatgttgcgcatgggctttattgacgacgttgaatgggtactcactcaaaccccacctacccgccaaatcgcgctattttcggctaccatgcctaaagagattgctaaggttgctaacaaataccttaacgacccagcgcttattaagattgaagttaaaacccaaaccgccgacaccattcgtcagcgttactggggcgtgagcggccaccacaagctagatgccactacgcgcatactcgaagcggaagagttcgacgcgatgattattttcgtgcgtaccaaaaccacaactatcgagctggcagaaaaactggccgcacgcggctactccagtgcggcacttaacggcgacatctcgcaaaacctgcgtgagcgcaccgtagagaagttgaaaaaaggccaaattgatattctagttgctaccgatgtagcggcacgcggcctagacgtagatcgcattagccacgtactaaactacgatattccctacgattcagaagcttacgtgcaccgcatcggccgtacaggccgcgctggtcgctcgggcgaagccattctttttgttgcaccgcgcgaaatgcgtatgttgcgcacaatagaaaaagctacccgcaagcctatcgaactaatgaaaatgccaagcacggatgatattaaccaaattcgtgttgatcgctttaaacaaaaaatattggatgcagccaaatcaccaggcctagagtttttccgcaagctcgttaccgaaatgcaacacgacaacgaactggatactgccgacatagcagcagcgcttgctcttctataccaaggtgaccaaccactattgttggaagaccgtcctcagcgtcaacagcgtgaatttaaagagcgcgatggcgacttcgataaacgcggccgtggcgacagagatggccgtggacgcgaaggtcgagatcgcggtaaaggccgtgaaaaagacgaaaacatggagacctaccgtatagaagtaggccgcaaagacggtgttaagcctggcgacattgttggcgccattgccaacgaagcaaatattagcagcaagtttattggccacattaaactgcacgacgacttcagcaccgtagacttgccatcaggtatgcccaaagaagttttcgaaaccctaagcaaaacttgggtttgtcaaaagcagctgcgcattacccgtgcagaaggcaacgctggcggtggtcgaggccgtggtggtgacgacttcaaacgcaaaaaacgcccagccaataaagatggcgcaccgcgtaaaccaagagccaaaaaagccgatagctaa

SEQ ID NO: 65495 - protein, 595 aa, Saccharophagus degradans 2-40
MTESSPNFAQLGLNEHILKALTDVGYETPSPIQAKSIPELLAGRDILGQAQTGTGKTAAFALPILNNLDLSQKAPQVLVLAPTRELAIQVAEAFQSYAHHLPGFHILPIYGGQGYDQQIRALKRGVHVIVGTPGRVMDHMRKGTLKLDQLKVLVLDEADEMLRMGFIDDVEWVLTQTPPTRQIALFSATMPKEIAKVANKYLNDPALIKIEVKTQTADTIRQRYWGVSGHHKLDATTRILEAEEFDAMIIFVRTKTTTIELAEKLAARGYSSAALNGDISQNLRERTVEKLKKGQIDILVATDVAARGLDVDRISHVLNYDIPYDSEAYVHRIGRTGRAGRSGEAILFVAPREMRMLRTIEKATRKPIELMKMPSTDDINQIRVDRFKQKILDAAKSPGLEFFRKLVTEMQHDNELDTADIAAALALLYQGDQPLLLEDRPQRQQREFKERDGDFDKRGRGDRDGRGREGRDRGKGREKDENMETYRIEVGRKDGVKPGDIVGAIANEANISSKFIGHIKLHDDFSTVDLPSGMPKEVFETLSKTWVCQKQLRITRAEGNAGGGRGRGGDDFKRKKRPANKDGAPRKPRAKKADS

SEQ ID NO: 65496 - DNA, 1674 bp, Mycobacterium sp. MCS
  CDS (1)..(1674): transl_table=11
atgacgtcgcctgagccggacgcccccggtaccgaaaccaccttcgctgatctgcagattcacccggaggtgttgcgggccgtcaccgacgtcggctatgagacgccgtcggcgatccaggccgcgaccatcccggcgatgctcgccggctccgacgtcgtcgggctcgcccagaccggcaccggcaagaccgcggccttcgccatcccgatcctgtcgaagatcgaccccaacagccgcgccacccaggccctggtcctcgcgccgacacgtgagctcgcgctgcaggtcgccgaggcgttcggccgctacggcgcgcatctgccggtcaacgtgctgccggtgtacggcggctcgtcctacggaccgcagatggccgggctgaaacggggcgcgcaggtcgtcgtcgggaccccgggccgggtgatcgaccacttggagaagggcagcctcgacctgtcgcacctggactacatggtgctcgacgaggccgacgagatgctgcagatgggtttcgccgaggacgtcgaacggattctgtccgacacccccgagtacaagcaggtggcgctgttctccgcgaccatgccgccgggaatcaagaagatcaccaagaagtacctgcacgatccggtcgaggtcacggtcaagtccaagacgcagaccgccgagaacatcacgcagcgctacatccaggtgtcgtacccgcgcaagatggacgcactgacccggctgctggagacggagcagggcgacgggatgatcgtgttcgtccgcaccaaacaggccaccgaggaggtggccgagaagctgcgggcgcgcgggttcgcggcggcggcgatcaacggcgacatcccgcaggcggtgcgtgaacgcaccatctcgcaactcaaggacggttcgatcgacatcctcgtcgcgaccgacgtcgccgcccgtggtctggacgtcgagcggatctcgcacgtggtgaacttcgacatcccgcacgacccggagtcctacgtgcaccgcatcgggcgcaccgggcgcgcaggccgctcgggcaccgcgctgctgttcgtcaccccgcgcgaacggcacctgctgaactcgatcgagcgggtcacccggcagaagctcgtcgagatccagttgccgtcggtcgaggacgtcaacgcccagcgcgttgagaagttccgcgactcgatcggtgaggccctcaacgctccgggcatcgacctcttccgccgcctcatcgaggactacgaacgcgacaacaacgtgccgctggccgacatcgccgcggcgctcgccgtgcagtcccgcaacggcgaggagttcctgatgaccgaaccgccgccggagaagcggcgggagcggcccgtccgggatgagagcggcccacgcaaggcgcgcgaccgcacgcggtcggacctcgcgacctaccgcatcgcggtgggcaagcggcacaaggtgatgcccggtgcgatcgtcggcgcgatcgccaacgagggcggcctgaaccgcagcgacttcggtcatatcgcgatcaagccggagtactcgctggtggagctgcctgccgacctgccgaaggacaccctcaagaagctcgagcgcacacgcatccagggtgtgctgatcaatctcgagcccgatcgcgggccgaaggcgcgctacaagggcaagtga

SEQ ID NO: 65497 - protein, 557 aa, Mycobacterium sp. MCS
MTSPEPDAPGTETTFADLQIHPEVLRAVTDVGYETPSAIQAATIPAMLAGSDVVGLAQTGTGKTAAFAIPILSKIDPNSRATQALVLAPTRELALQVAEAFGRYGAHLPVNVLPVYGGSSYGPQMAGLKRGAQVVVGTPGRVIDHLEKGSLDLSHLDYMVLDEADEMLQMGFAEDVERILSDTPEYKQVALFSATMPPGIKKITKKYLHDPVEVTVKSKTQTAENITQRYIQVSYPRKMDALTRLLETEQGDGMIVFVRTKQATEEVAEKLRARGFAAAAINGDIPQAVRERTISQLKDGSIDILVATDVAARGLDVERISHVVNFDIPHDPESYVHRIGRTGRAGRSGTALLFVTPRERHLLNSIERVTRQKLVEIQLPSVEDVNAQRVEKFRDSIGEALNAPGIDLFRRLIEDYERDNNVPLADIAAALAVQSRNGEEFLMTEPPPEKRRERPVRDESGPRKARDRTRSDLATYRIAVGKRHKVMPGAIVGAIANEGGLNRSDFGHIAIKPEYSLVELPADLPKDTLKKLERTRIQGVLINLEPDRGPKARYKGK

SEQ ID NO: 65498 - DNA, 1743 bp, Cytophaga hutchinsonii ATCC 33406
  CDS (1)..(1743): transl_table=11
atgttatttaaagaccttggattgtctcctgaagttgtggaggctatcgaatctattggctattctgaagccacgcctattcaggaaaaaacaattccaattttaatgacaggaaaagaccttacaggtcaggcacaaacgggtactggtaaaacagctgcctttggtattcctgctattgaacatgttgatatttctatcaaccaaacacaatccttaattctttgtcctacacgtgaacttgctttacaggtatgtacggaattaaaaaaactttctaaattcaaaaaaggtcttcgtgtacttgcagtatacggtggcgaatcgattgaaagacaaatccgcgatctgaaagcgggtgcgcatatcgttgtaggtacacctggccgtatcattgatcacctggacagacgtacattgaatgcttctcacctttctcagatcatcttagatgaagcggatgaaatgctgaacatgggtttcagagaagacatcgaattaatcttaacccgtttaccagaagaacgtcagactgtattattttctgcaacgcttgctcctcctatcctggcgcttgctaaacgtttccagaataatccggagatcattaaaattgaaagaaaagaattaacgatcagcacggttgaacaattctattacttagttaaaaactctcaaaaaacagaaattgttacacaaatcattgacctgaacaatcttcagttgatgttgatcttctgtaatacaaaaagaaaagttgaagaagttaccgatgaattaaaagcatacggacacaatccgatcagcttacacggtgataaaacacaacgcgacagaacagaagtaatgagcaaattccgtaagggattagccaatatccttgttgctacagatgttgcggcacgtggtattgacgttacaggtgttgatgcggttatcaactacgatgttccattggatattgaaaactacgttcaccgtatcggcagaacaggtagagcaggtcagttaggtaaatcattcacattggtaacaagtgatgagaaatataaattgagagacatcgaacgttatacaaaggcaacaattgaaaaagctgaaacgcctacacgtcaggaattagttgcttataaaaaagataaattagctacacgtattactactgaattagaaaaaccaaacattaaaatctggtctgatttattagaagaatataaagaaaaaggtattactgctgatcagattgcaattgcgttgctttctaaagaaatgaaagatcttgcagaacctgaacgcagagtatttgaagaccgtggcgatcgtcgtgatcgcggcgacagaggtgaccgtggcggtcgtttcgatcgtggtgacagaagagatggacctcgcagagatggccgttcttcagaccgtttcggagacagaccagctgcttcaagagaccgtgatggtggtgaaagacgtgaaagaacgccgagaccaagaacaagtgatgcaagtatggcacgtttattcgtaaacgttggacgtattgaccgcatctctcctggtgatatcgttggtgcatttgccggtgaggcaaacatcaaaggttctcagatcggacagatcgatatcttcgataaatattcattcgtggaacttccacatgacttagttgatcaggttatggacggaatgagaaacaataaaattaaaggaaaatcaatcaacatcgaaatttcgaacggtaagcaataa

SEQ ID NO: 65499 - protein, 580 aa, Cytophaga hutchinsonii ATCC 33406
MLFKDLGLSPEVVEAIESIGYSEATPIQEKTIPILMTGKDLTGQAQTGTGKTAAFGIPAIEHVDISINQTQSLILCPTRELALQVCTELKKLSKFKKGLRVLAVYGGESIERQIRDLKAGAHIVVGTPGRIIDHLDRRTLNASHLSQIILDEADEMLNMGFREDIELILTRLPEERQTVLFSATLAPPILALAKRFQNNPEIIKIERKELTISTVEQFYYLVKNSQKTEIVTQIIDLNNLQLMLIFCNTKRKVEEVTDELKAYGHNPISLHGDKTQRDRTEVMSKFRKGLANILVATDVAARGIDVTGVDAVINYDVPLDIENYVHRIGRTGRAGQLGKSFTLVTSDEKYKLRDIERYTKATIEKAETPTRQELVAYKKDKLATRITTELEKPNIKIWSDLLEEYKEKGITADQIAIALLSKEMKDLAEPERRVFEDRGDRRDRGDRGDRGGRFDRGDRRDGPRRDGRSSDRFGDRPAASRDRDGGERRERTPRPRTSDASMARLFVNVGRIDRISPGDIVGAFAGEANIKGSQIGQIDIFDKYSFVELPHDLVDQVMDGMRNNKIKGKSINIEISNGKQ

SEQ ID NO: 65500 - DNA, 1488 bp, Trichodesmium erythraeum IMS101
  CDS (1)..(1488): transl_table=11
atggatttgtcatttgcaagtttaggaatttcagaggaacgtgcaaatcatctggaaacaattggttttactgaacctacccctatccaagctcaagcaataccccctttgctagagggaaaggatattgtgggtcaagctcaaacaggaacaggtaaaactgcagcgttttcgttaccaatattggagcaaattgatatagatactaatgcagttcaagcattaattttaactcccactcgtgagttagcactgcaagtgacagaagcgattcgtcaatttactggaattaatagtaaaggtcctactaaacggcggttatttgttttaacggtttatggtggtcagtctattgaacgtcagagccagcgtctgcaaaagggtgttcatattgtagtgggaacaccagggcgaattatagatatgctgaatcgaaatagcttgaaactagatcatttgaaaatgatggttttagacgaagctgatgaaatgttgagcatgggttttattcaagatgtggaaaaaattctggaagcagcacctgctgaacgtcaaacagctttcttttccgctactatggattattcaatccggaaactagttaataagtatttgcaatcaccagtaacagttaaagttgcccaacaaaaaactactcctaagcgcatcactcaaactgtatacatattacctcgtggttggtctaaaggaaaagctctacagccaattttagaactagaagacccagaagcagctttgatatttgtccgcacaaggcaagctgcagcagaactaacaaatcaattacaatcagcaggtcatagtgttgatgagtatcacggtaacttaaaccagtctcaacgagaacggttgttaactcgctttcggaatcaacaggtacgttgggttgtggcaactgatattgcagctcgtggtttagatgtagatcatttaactcatgtgattaattacgatttgcctgatagtgtagatagttatgttcatcgcattggtcgtacaggtcgtgcaggtcgggaaggaacagcaatttccttgattcatcctgtagataagcggaagttgcggttaatagaacgtcatttacgtcaacgtttgaacactcgttcaattcctaagcggtctcaaattgaagctcgacagttacagaaattacaggataaagtgcgaagtgctctgagtggtgagcggatggcttctttcttgcccttaatttctcagttaggtaaagaatatgatccccatgcgatcgcggctgcagctttacagatagcttatgatgaaactcgtcctgcttggatgggacttgattattctcaggaggaagatgagcctatgtacgaaactcctaaaccaaggttgaaaaagcagttacctaagaagtctaataataaaagttattctgataaaaataagaatttaaaggatgaaatatatgtagaagaagcatctctgccacagaataattaa

SEQ ID NO: 65501 - protein, 495 aa, Trichodesmium erythraeum IMS101
MDLSFASLGISEERANHLETIGFTEPTPIQAQAIPPLLEGKDIVGQAQTGTGKTAAFSLPILEQIDIDTNAVQALILTPTRELALQVTEAIRQFTGINSKGPTKRRLFVLTVYGGQSIERQSQRLQKGVHIVVGTPGRIIDMLNRNSLKLDHLKMMVLDEADEMLSMGFIQDVEKILEAAPAERQTAFFSATMDYSIRKLVNKYLQSPVTVKVAQQKTTPKRITQTVYILPRGWSKGKALQPILELEDPEAALIFVRTRQAAAELTNQLQSAGHSVDEYHGNLNQSQRERLLTRFRNQQVRWVVATDIAARGLDVDHLTHVINYDLPDSVDSYVHRIGRTGRAGREGTAISLIHPVDKRKLRLIERHLRQRLNTRSIPKRSQIEARQLQKLQDKVRSALSGERMASFLPLISQLGKEYDPHAIAAAALQIAYDETRPAWMGLDYSQEEDEPMYETPKPRLKKQLPKKSNNKSYSDKNKNLKDEIYVEEASLPQNN

SEQ ID NO: 65502 - DNA, 1869 bp, Shewanella sp. MR-4
  CDS (1)..(1869): transl_table=11
atgtcatccagtgaaagaactttccgtgaactcggcttgtccgagaatttgttgcgtgctcttgacgagctaggttacgaaaaaccaacgccaatccaatcagccagtattgacccattaatggctggcaaagatattttaggtcaggcacaaacaggcacaggtaaaactggcgccttcgccctgcccctgctcaacaaagtgaccagccaagctgttccacaaatcctagtattagcgccaacccgcgaattagcggtgcaagtagcagaagctttcagcagctacgcgaaatttatgaaaggtttccatgtactgccaatctatggcggtcagagcatgcatcagcaattaaacgccctgaagcgtggtccacaggttatcgtgggtacaccgggtcgtgttatggaccatatgcgccgtggcaccttaaagctggaaaccctgcaagcgctggtactcgacgaagccgacgaaatgttaaaaatgggctttatcgacgatatcgaatggattctggaacacacgccagaacagcgccaactggcactgttctcggccactatgccagaacaaatcaagcgtgttgctaacaagcacttaaaagatgcgactaacatcagcatcgctgcgagccacaccacagttgactctatcgagcaacgtttcgtgcaagtgtctcagcacaacaagttagaagccttagtacgcgtattagaagttgaaaatactgaaggtattatcatcttcgttcgtacccgtaactcatgcgttgaattagcagaaaaactcgaagcccgcggctacgcttcatcaccactgcacggtgatatgaaccagcaagcccgtgagcgtgcggttgagcagctgaaaagcggcaagctagacattctgatcgcgaccgacgttgcggctcgtggtctggacgttgagcgtatcggccacgtagtaaactacgatatcccttacgatactgaagcttacgtacaccgtatcggtcgtactggccgtgctggccgtacgggcatggcgattctgttcgtgaccagccgtgaaatgcgtatgctgcgcaccatcgagcgcgcaaccaacagccgtatttcaccaatgaaggtaccaagcccagagacggttgcagaacgccgcctgtctcgcttaggtgagcaattagcgcaaaccatgacacaagatctggactttatgcgcgaagcagttgcccagttatgccaacaactggaagtggataccgatctgctggccgcagccctgctgcaccaagttcagcaagaacgcccactgcaattacctgcgattcaagagcgtacccgcgatgaacgcaatgagcgcagcgaacgtggtgctgaacgtggcgagcgcggtgaacgtcgcagccgtgaatcacgcccactgccagctagccttggcagcgccgaagcgttaaaagacaacccagatctgaagatgtgccgttatgttatcgatgtaggtcgtgacaatggcgtgggtgtgggcaacatcgttggcgctattgcaaacgaagctaacatcgacagtcgttacattggtgctatccagttatacgatgcagtgactaccgttgacctgccagacggcatgccaaaagaagtactgcagcatctgaagaaagtgcgcgtatgtggcaagccactgaacatccgtgaagctggcgatcaagtcttcgtagactcaggccgtggcgcacgtagcgaccgtcgtccacgtggtgatcgtccaatgggtgagcgtaaaccacgttcagcctctggcgacaaaccatttgctgaccgcaaaccacgttcagacaagccagcaggcgagcgtagaccacgtaaaccacgcgaagagtaa

SEQ ID NO: 65503 - protein, 622 aa, Shewanella sp. MR-4
MSSSERTFRELGLSENLLRALDELGYEKPTPIQSASIDPLMAGKDILGQAQTGTGKTGAFALPLLNKVTSQAVPQILVLAPTRELAVQVAEAFSSYAKFMKGFHVLPIYGGQSMHQQLNALKRGPQVIVGTPGRVMDHMRRGTLKLETLQALVLDEADEMLKMGFIDDIEWILEHTPEQRQLALFSATMPEQIKRVANKHLKDATNISIAASHTTVDSIEQRFVQVSQHNKLEALVRVLEVENTEGIIIFVRTRNSCVELAEKLEARGYASSPLHGDMNQQARERAVEQLKSGKLDILIATDVAARGLDVERIGHVVNYDIPYDTEAYVHRIGRTGRAGRTGMAILFVTSREMRMLRTIERATNSRISPMKVPSPETVAERRLSRLGEQLAQTMTQDLDFMREAVAQLCQQLEVDTDLLAAALLHQVQQERPLQLPAIQERTRDERNERSERGAERGERGERRSRESRPLPASLGSAEALKDNPDLKMCRYVIDVGRDNGVGVGNIVGAIANEANIDSRYIGAIQLYDAVTTVDLPDGMPKEVLQHLKKVRVCGKPLNIREAGDQVFVDSGRGARSDRRPRGDRPMGERKPRSASGDKPFADRKPRSDKPAGERRPRKPREE

SEQ ID NO: 65504 - DNA, 1317 bp, Alkalilimnicola ehrlichei MLHE-1
  CDS (1)..(1317): transl_table=11
atgaaaaacgaacatctctccaacacccgctttgacaccctgggcctgcacgatgccctgatggacggcatcaagcgtgcaggcttcgagtactgcacgcccatacaggccgccaccctccccaaggcgctggaagggcgcgacatcgccggccaggcccagaccggcaccggcaaatccgccgccttcctgctcgccgcaatgcaccggctgatgaccgtaccggtggaggaaggcaaggaaggcccctggaccctcatcctggcccccacccgggaactggccctgcagattcaccgcgacgccctgcaactgggccgctacaccggcctcaaatgcgccgccatctacggcggcaccggctacgaggcccagcgccagcaactgcaggaaggcgtggacatcattatcggcaccccgggccgggtcatcgacttcttcaaacagcggattttccacctcaagcacatcgaagtggtgatcctcgacgaggccgaccgcatgttcgacctcggcttcatcgccgacatccgctacctcatgcgacgcatgcccgagccgtccaaacggatgaacatgctcttctccgccaccctctcccaccgggtgatggaactggcctacgagcacctcaacgaccccgaggtggtccgcatcgaatccgagcagatcaccgccgacaaggtccgccagaagctctaccacgtctccaaggacgaaaagatccccctcctgctcggcctcatccgccaggaggaggcgatgaaccgcagcatcatcttcgtcaacaccaagcgggccgccgaccgggtcaccggctacctgctgggcaacgacatcgaggccgcggtcatctccggcgacatcccgcagaaaaagcgcgaatccctgctcaagcgcttccaggacggcgaactgcgcttcctggtggccaccgatgtggccgcccgtgggctgcacattgaagacgtctcccacgtcatcaactacgatctgccccaggatcccgaggactacgtgcaccggatcggccgcaccgcccgggccggggccagcggcgacgcgatctccttcgcctgcgaggagtacgtcttctcactgccggacatcgaaagcttcatcgagcagcggatccccgccgagatgccctcgcccgagatgatggtcgagcccaagccccccaagcgcatccagcgcagccgccccggtggcaagggcggccggggacgccccggcggggcgggcaatcgccgtcgaagcggcaacgaccgccggggtggcaacaacggctccaacggaagcggcggcaacaactag

SEQ ID NO: 65505 - protein, 438 aa, Alkalilimnicola ehrlichei MLHE-1
MKNEHLSNTRFDTLGLHDALMDGIKRAGFEYCTPIQAATLPKALEGRDIAGQAQTGTGKSAAFLLAAMHRLMTVPVEEGKEGPWTLILAPTRELALQIHRDALQLGRYTGLKCAAIYGGTGYEAQRQQLQEGVDIIIGTPGRVIDFFKQRIFHLKHIEVVILDEADRMFDLGFIADIRYLMRRMPEPSKRMNMLFSATLSHRVMELAYEHLNDPEVVRIESEQITADKVRQKLYHVSKDEKIPLLLGLIRQEEAMNRSIIFVNTKRAADRVTGYLLGNDIEAAVISGDIPQKKRESLLKRFQDGELRFLVATDVAARGLHIEDVSHVINYDLPQDPEDYVHRIGRTARAGASGDAISFACEEYVFSLPDIESFIEQRIPAEMPSPEMMVEPKPPKRIQRSRPGGKGGRGRPGGAGNRRRSGNDRRGGNNGSNGSGGNN

SEQ ID NO: 65506 - DNA, 1704 bp, Pseudomonas aeruginosa UCBPP-PA14
  CDS (1)..(1704): transl_table=11
atgggtctttgcggatgtatacgaggcaaacccatgactcaggaaaccgtcggcttcgccgcgctcggtattcaccccaatgtgctcgcggcaatcgtcgccgtaggctacgaagagccttcgcctatccaggctcaatcgattccgctgatcctcgaaggccacgacatgatcggccaggcgcagaccggtaccggcaagaccgccgcgttcgccctgccgctgctgtcgcgcatcgacccgagccgtcgcgagccgcagatgctggtgctggtgccgacccgcgagctggccctgcaggtcgccaccgcctgcgaaacctattccaagcaattgccgggcgtcggcgtggtcgccgtctacggcggcgcgcccatggggccgcaactgaaggccctgcgccagggcgcacagatcctcgtcgctacccccggccgcctgtgcgaccacctgcgccgcgacgagaagctgctggccaccgtccagcgcctggtgctcgacgaagccgacgagatgctcaagctcggcttcatggacgacctggaagtgatcttcgaggcgcttcccgaatcgcgccagaccgtgctcttctcggcgaccctgccggcgtccatccgtggcatcgccgagcgccacctgaagcagcccaagcacgtcaagatcgccgccaagacccagaccgtggcgcgcatcgagcaggtccacctgatggtccatgccgaccagaaggccggttcgatccagcgcctgctggaagtcgagcagttcgacgcgctgatcgccttcgtccgcaccaagcaggccaccctcgactacgccgaattgctcgagcgccagggctaccgcgccgccgcgctcaacggcgacatgccgcaggcccagcgcgagcgggtcatcgagtcgctgaaggacggttcgctggacatcgtcatcgccaccgacgttgctgcccggggcctggacgtaccgcgcatcacccacgtgctgaacatcgatatgccctacgaccccgagtcctacgtgcaccgcatcggccgtaccggccgtgccggtcgggaagggcgcgcgctgttgctggtgactccgcgcgagcggcgcatgctgcaggtgatcgagcgggtcaccgggcagaaggtcggcgaagtccgcctgccggatgccgagaccgtactggaggcccgcctggcgcgcctggccgcgagcctgacgcccttgctcgacagcgccgtcgagcagcgcggcgcggtgcgcgacgagctgtgccgtcgcctcggctgcgatgccgagaccctggccgccgcactgctggcgcgcctgaccgccggcaaggcgctggacctggagtcggtgcgccgcgaacagccgctgaccccatcggcaccgcgcgagcgtgccgaccgtggcgaacgcggcgagcgtccggagcgcagcggcgagcgtcgtccgatggcgccgccgagcgaaggccgtgcccgctgccgcaccgccctcggcgcgcgcgacggggtcgcggcgaagaacctgctgggcgcgatcctcaacgagggcggcctgtcccgcgaggacatcggccgcatccagattcgcgataccttcagcctgatcgaactacccgaggccaacctcgagcgcctgctgaccaagctcaaggacacccgcgtcgccggcaaggccctgcgcctgcgccgctatcgcgaggactga

SEQ ID NO: 65507 - protein, 567 aa, Pseudomonas aeruginosa UCBPP-PA14
MGLCGCIRGKPMTQETVGFAALGIHPNVLAAIVAVGYEEPSPIQAQSIPLILEGHDMIGQAQTGTGKTAAFALPLLSRIDPSRREPQMLVLVPTRELALQVATACETYSKQLPGVGVVAVYGGAPMGPQLKALRQGAQILVATPGRLCDHLRRDEKLLATVQRLVLDEADEMLKLGFMDDLEVIFEALPESRQTVLFSATLPASIRGIAERHLKQPKHVKIAAKTQTVARIEQVHLMVHADQKAGSIQRLLEVEQFDALIAFVRTKQATLDYAELLERQGYRAAALNGDMPQAQRERVIESLKDGSLDIVIATDVAARGLDVPRITHVLNIDMPYDPESYVHRIGRTGRAGREGRALLLVTPRERRMLQVIERVTGQKVGEVRLPDAETVLEARLARLAASLTPLLDSAVEQRGAVRDELCRRLGCDAETLAAALLARLTAGKALDLESVRREQPLTPSAPRERADRGERGERPERSGERRPMAPPSEGRARCRTALGARDGVAAKNLLGAILNEGGLSREDIGRIQIRDTFSLIELPEANLERLLTKLKDTRVAGKALRLRRYRED

SEQ ID NO: 65508 - DNA, 1581 bp, Pediococcus pentosaceus ATCC 25745
  CDS (1)..(1581): transl_table=11
ttgaaatttaccgaactagggttagacgaagacattttaaaagcagttttagacaatgggtatgacgaaccaacacctatccaagctgaaactattcctggtgttttagaaggaaaagacatcattggacaagctcaaacaggtactggtaagacagctgctttcggattaccaatcctacaaaatgttgacctagataatcctaacattcaagcaattattatctcacctacacgtgagttagctgctcaaacacaagcagaaatctttaaattaggaaaatataaaaaagctaaagttcaagtggtttacggtggatcagatatccgtcgtcagattaatgctttaaagagccatccacaaatcgtggttggtacacctggtcgtttgttggaccatattggtcgaaagacaattcgtttagaccacgttaaaacattagttcttgatgaagctgacgatatgctagatatgggattcttacctgatatcgaacacattattgaacaaacacctagcgaacgccaaacattattgttctcagccacaatgccagcaccaattaagaaaattggtgttaagttcatgactgatccaaaacaaattacagttaagtctaaagaacttactgctgatttggttgatcaatactacgttcgttctaaagaattcgaaaaatttgatattttaacccgcgtacttgatgtacaagcaccaaaacttgcagttatttttggtcgtactaagcgtcgcgttgatgaagtttctaagggattagttactcgtggttacaatgctgctggaatccatggtgatttaactcaacaacgccggatgagtattttacgtcaattccgtgaaggacaattagatattttagttgctactgacgttgctgcacgtgggcttgatatctctggtgtaactcacgtttacaactatgatattcctcaagacccagaaagttatgttcaccgtattggtcgtacaggccgggccggtgctacaggtacttcagtaaccttcgttactaactgggaaatggactatcttcgtgacgttgaacatttgacaaagaaacgtttgttaccaatgaagccaccaacagaagaagaagcttttgctggacgtgctgcaatggctgaacaaagcattgaagaattggttcaaaaaacagatgttgctaagttcgaagaacaagttgatcatcttttagaacaacatgatgctaaaacgctggttgctgcacttctaaatgaagtaactaagtctgacgctagtgaaatcaaagttaagattactcctgaacgcccacttcctcgtaaaaaaggtggcaacaaaggcggtaaaggtggcggcggataccgtggcggaaaccatcgtggtggtaatggtcgtcgtagtaatggtaatagcagcaatggcgggggccgtggtggtaaatggaataacgatcgtaagggtggcggcaagtcacgctttggtcgcgatgaccgtaaccacaatggtggtaagcgtaatgatcgcaactcaggtaacaagggtggatcaaaccgtcaatttgtaattaaagaaaaataa

SEQ ID NO: 65509 - protein, 526 aa, Pediococcus pentosaceus ATCC 25745
MKFTELGLDEDILKAVLDNGYDEPTPIQAETIPGVLEGKDIIGQAQTGTGKTAAFGLPILQNVDLDNPNIQAIIISPTRELAAQTQAEIFKLGKYKKAKVQVVYGGSDIRRQINALKSHPQIVVGTPGRLLDHIGRKTIRLDHVKTLVLDEADDMLDMGFLPDIEHIIEQTPSERQTLLFSATMPAPIKKIGVKFMTDPKQITVKSKELTADLVDQYYVRSKEFEKFDILTRVLDVQAPKLAVIFGRTKRRVDEVSKGLVTRGYNAAGIHGDLTQQRRMSILRQFREGQLDILVATDVAARGLDISGVTHVYNYDIPQDPESYVHRIGRTGRAGATGTSVTFVTNWEMDYLRDVEHLTKKRLLPMKPPTEEEAFAGRAAMAEQSIEELVQKTDVAKFEEQVDHLLEQHDAKTLVAALLNEVTKSDASEIKVKITPERPLPRKKGGNKGGKGGGGYRGGNHRGGNGRRSNGNSSNGGGRGGKWNNDRKGGGKSRFGRDDRNHNGGKRNDRNSGNKGGSNRQFVIKEK

SEQ ID NO: 65510 - DNA, 1566 bp, Oenococcus oeni PSU-1
  CDS (1)..(1566): transl_table=11
ttgaaatttgaagaatttggacttagtccagaacttttgtctgcggtcaaaaagcatggttacgatgaagcaaccccgattcaggaaaaaacaattccgttgattatacagggagttgatgtcattggccaagcacagaccggtacaggtaagacggcagcttttggtttgccgattttagaagaagtggatccaaagaacccacaaatccaagccttggttatcagcccaacacgcgagttggctatgcagaccgaagaagaactcaacaagcttggttccgacaaacacgtgaaaactcaagttgttttcggtgggtatgatattcgccgacagatccatgctttaaaagaacatccacaaatccttgtcggtactcccggacgattgattgatcatttgaatcgtcatacgattgattttcgcggagttaagactttggtaatcgatgaagccgacgagatgctaaacatgggtttcttagaagatatcgaaacgattgttcattacacgccggatgatcgtcaaactttacttttttctgcaacgatgcctgacgacattaagaaaataggcgttaaatttatggaagatcccgaagaagtccacattgcttctaagggtctgactatcgatttggttgaccaatatctggttaatactcgcgaatatgaaaagttcgatgcgatgacacgcttattcgatgtcgaacaacctgaactggcaattgtctttggtcggacaaagcgtcgggttgacgaattgaccaaagctttgcagctccgtggctataaagctgccggaattcatggcgatttggatcaagcagcccgtatgcggactttacgttcctttaaaaaaggagaattgcagttcttggttgcaaccgatgttgcggctcgtggcttggatatttccggagttacgcatgtttataattacgatgttccccaagatcccgagtcttacgttcaccggatcggtcgtaccggtcgtgccggacaccatggtgtttctgtaacttttgttgttcgtggtgaaattgattatctgcgggcaattgaaaaattgatcaataagcgtatggccgctttaaagccgccttcggctgaagaagcgcatattgcccgtctgaagaacgccaaagcagagacttatgctgttttgggtaaaacaactattgataacgtcgaagacgaagcaacagaaattgccaatcaatacgatgctaagttaatcgcagctgcattgttgcacgctctgtccaaagatgatgaaagaactcgtcctgtcgatatcgcacaggaaaagcctcttccgcgtcgtcatagttcatctgaccacggtcataacttccgtagtggacgctctaatggcaatcgtggtcgcaatggtcatagcaatggcaaccgcggtggtcgtcgtggcggatttaaagaagaatttgtaattgatcgtggccataagccggtcgatcgtcgcaatcaacgaattcaggcacgtccaaaaggggttgcgaaagcggctccgaaaaaacgtgagtttaaaattgtcaaaaagtcatga

SEQ ID NO: 65511 - protein, 521 aa, Oenococcus oeni PSU-1
MKFEEFGLSPELLSAVKKHGYDEATPIQEKTIPLIIQGVDVIGQAQTGTGKTAAFGLPILEEVDPKNPQIQALVISPTRELAMQTEEELNKLGSDKHVKTQVVFGGYDIRRQIHALKEHPQILVGTPGRLIDHLNRHTIDFRGVKTLVIDEADEMLNMGFLEDIETIVHYTPDDRQTLLFSATMPDDIKKIGVKFMEDPEEVHIASKGLTIDLVDQYLVNTREYEKFDAMTRLFDVEQPELAIVFGRTKRRVDELTKALQLRGYKAAGIHGDLDQAARMRTLRSFKKGELQFLVATDVAARGLDISGVTHVYNYDVPQDPESYVHRIGRTGRAGHHGVSVTFVVRGEIDYLRAIEKLINKRMAALKPPSAEEAHIARLKNAKAETYAVLGKTTIDNVEDEATEIANQYDAKLIAAALLHALSKDDERTRPVDIAQEKPLPRRHSSSDHGHNFRSGRSNGNRGRNGHSNGNRGGRRGGFKEEFVIDRGHKPVDRRNQRIQARPKGVAKAAPKKREFKIVKKS

SEQ ID NO: 65512 - DNA, 1320 bp, Magnetococcus sp. MC-1
  CDS (1)..(1320): transl_table=11
gtgtctgattttgcttcgttgaatcttgttaaacccctccttaatgccttaactcaagctggttacaccaccccaacccccattcaagcacaggctattccgcatctgttggcaggtcgggatctgctgggcattgcccagaccgggacaggtaaaaccgcagcttttgcactacccatactcaataagttgagccaaattaaaggtcgccccgcgcccaatgcgccccgcgccttgatccttaccccaacccgtgagctcgcttcacaaatcggcaacagcatcgccgtttatggtaagcatgtgccaaccacccacaccgttgtatttggtggcgtgggcaaacagccacagattcgcgccctctcccgtggcgttgatattttggtcgctacccctggccgcttactggatcttatgggggagcgccatgttcgcctggatcagattcaggtttttgtactggatgaggccgaccgcatgctggacatgggctttatccatgatatccgtcgcatcattaaggtgatcccagctaagcgccatacgctgctcttttctgccaccatgcccaaggatattgcagagctggcagagggcttattgaccaatcccgccaaggttgaggtcacgccagaatccacgacggttgagcgtattacgcaaaaggtgctgtttgtcgataaacagaacaagcgttctttgctcaaaaatgtgcttgagcatgagtctattgagcaggttttggtctttacccgcaccaagcatggggccaaccgggtggcggagtatcttgacaaacaccgcattgcctctgcggcgattcatggcaacaaatcccaaagcgcccgcgaaaaggcactggatggctttcgcaaaggcaagttaaaggttttggtagcgacagatattgcggcgcggggaattgatgtggcgggcattagccacgtgatcaattttgacctgcccaatgagtcggaaagctacgtgcaccgcataggccgcacagcgcgcgctgggcgggatggcaatgccatctctttttgcgatgctgaagagcgcggctatctgctggatattgaaaagaccatccgccagaccgtgccggttgatattgaccatgaattccattgcgaagtggttgccaacgcagccccaatcaaacccagccgcaaacgcagcagcggccatggtgccggtggtggcaatccccatggtgggggacatcgtcgcggcaaccccagtaccgccagcaaaccacgtcagcatagcggacgtcgcaccccatccagcaagggtcgtagcggtagcgtagcgtaa

SEQ ID NO: 65513 - protein, 439 aa, Magnetococcus sp. MC-1
MSDFASLNLVKPLLNALTQAGYTTPTPIQAQAIPHLLAGRDLLGIAQTGTGKTAAFALPILNKLSQIKGRPAPNAPRALILTPTRELASQIGNSIAVYGKHVPTTHTVVFGGVGKQPQIRALSRGVDILVATPGRLLDLMGERHVRLDQIQVFVLDEADRMLDMGFIHDIRRIIKVIPAKRHTLLFSATMPKDIAELAEGLLTNPAKVEVTPESTTVERITQKVLFVDKQNKRSLLKNVLEHESIEQVLVFTRTKHGANRVAEYLDKHRIASAAIHGNKSQSAREKALDGFRKGKLKVLVATDIAARGIDVAGISHVINFDLPNESESYVHRIGRTARAGRDGNAISFCDAEERGYLLDIEKTIRQTVPVDIDHEFHCEVVANAAPIKPSRKRSSGHGAGGGNPHGGGHRRGNPSTASKPRQHSGRRTPSSKGRSGSVA

SEQ ID NO: 65514 - DNA, 1860 bp, Shewanella sp. ANA-3
  CDS (1)..(1860): transl_table=11
atgtcatccagtgaaagaactttccgtgaactcggcttgtccgagaatttgttgcgtgctcttgacgagctaggttacgaaaacccaacgccaatccaatcagccagtatcgacccattaatggctggcaaagatattttaggtcaggcacaaacaggtacaggtaaaactggcgccttcgccctgcccctgctcaacaaagtgaccagccaagctgtcccacaaattttagtattagcgccaacccgcgaattagcggtgcaagtcgcagaagctttcagcagctacgcgaaatttatgaaaggtttccatgtactgccaatctatggcggtcagagcatgcatcagcaattaaacgccctgaagcgtggcccacaggttatcgtgggtacaccgggccgtgttatggaccatatgcgccgtggcactttaaagctggaaaccctgcaagcgctggtactcgacgaagccgacgaaatgttaaaaatgggctttatcgacgatatcgaatggattctggaacacacaccagagcagcgccaactggcactgttctcggccactatgccagaacaaatcaagcgtgttgctaacaagcacttaaaagatgcgactaacatcagcatcgctgcgagccacaccacagttgactctatcgagcaacgtttcgtgcaagtgtctcagcacaacaagttagaagctttagttcgcgtattagaagttgaaaatactgaaggtatcatcatcttcgttcgtacccgtaactcatgcgttgaattagcagaaaaactcgaagcccgtggctatgcctcatcaccactgcacggtgatatgaaccagcaagcccgtgagcgtgcggttgagcagctgaaaagcggtaagttagacattctgatcgcgaccgacgttgcggcccgtggtctggacgttgagcgtatcggccacgtagtgaactacgatatcccttacgatactgaagcttacgtacaccgtatcggtcgtactggccgggctggccgtactggtatggcgattctgttcgtgaccagccgagaaatgcgtatgctgcgcaccatcgagcgcgcaactaatagccgtatttcgccaatgaaagtgccaagcccagagacggttgcagaacgtcgtctgtctcgcttaggtgagcagttagcgcaaaccatgactcaagatctggactttatgcgcgaagcggttgcccagttatgtcaacaactggaagtggataccgatctgctggccgcagccctgctacaccaagttcagcaagagcgtccactgcagttgccagcgattcaagaacgtactcgcgatgagcgcagcgaacgtggtgctgaacgtggcgagcgcggtgaacgccgtagccgtgaatcacgcccaatgccagcaagccttggtagcgctgaagcgttaaaagacaatccagatctgaagatgtgccgttatgttatcgacgtgggtcgtgacaatggcgtgggtgtgggcaacatcgttggcgctattgcaaacgaagctaacatcgacagccgttacattggtgctatccagttatacgacgcagtgactaccgttgacctgccagacggcatgccaaaagaagtactgcagcacctgaagaaagtgcgcgtatgtggcaagccactgaacatccgtgaagctggcgatcaagtatttgtagactctggccgtggcgcacgtagcgaccgtcgtccacgtggtgatcgtccgatgggcgagcgtaaaccacgttcagcctctggtgacaagccgtttgcagaccgcaaaccacgttcagacaagcctgcaggcgagcgtagaccacgtaaaccacgcgaagagtaa

SEQ ID NO: 65515 - protein, 619 aa, Shewanella sp. ANA-3
MSSSERTFRELGLSENLLRALDELGYENPTPIQSASIDPLMAGKDILGQAQTGTGKTGAFALPLLNKVTSQAVPQILVLAPTRELAVQVAEAFSSYAKFMKGFHVLPIYGGQSMHQQLNALKRGPQVIVGTPGRVMDHMRRGTLKLETLQALVLDEADEMLKMGFIDDIEWILEHTPEQRQLALFSATMPEQIKRVANKHLKDATNISIAASHTTVDSIEQRFVQVSQHNKLEALVRVLEVENTEGIIIFVRTRNSCVELAEKLEARGYASSPLHGDMNQQARERAVEQLKSGKLDILIATDVAARGLDVERIGHVVNYDIPYDTEAYVHRIGRTGRAGRTGMAILFVTSREMRMLRTIERATNSRISPMKVPSPETVAERRLSRLGEQLAQTMTQDLDFMREAVAQLCQQLEVDTDLLAAALLHQVQQERPLQLPAIQERTRDERSERGAERGERGERRSRESRPMPASLGSAEALKDNPDLKMCRYVIDVGRDNGVGVGNIVGAIANEANIDSRYIGAIQLYDAVTTVDLPDGMPKEVLQHLKKVRVCGKPLNIREAGDQVFVDSGRGARSDRRPRGDRPMGERKPRSASGDKPFADRKPRSDKPAGERRPRKPREE

SEQ ID NO: 65516 - DNA, 1746 bp, Mycobacterium smegmatis str. MC2 155
  CDS (1)..(1746): transl_table=11
atgacctcgcaagaaccggatccgagtccggtaaccaactcggattcggcccctactgaaccgactttcgccgacctgcagattcaccccgccgtgctgcaggcggtcaccgacgtcggctacgaatcgccgtcggcgatccaggccgcaaccattcctcccatgctcgcgggctccgacgtggtgggcctggcccagaccggtacgggcaaaaccgcggcgttcgccatcccgatcctgtcgaagatcgacacgtcgcgcagggacacccaggccctggtgctggccccgactcgtgagctcgcgctgcaggtcgcggaggccttcggccgctacggctcgcacctgccccaggtcaacgtgctgccgatctacggcggctcgtcctacaccgtgcagctgtccggcctgcgccgcggcgcgcaggtggtggtgggcacgcccggccgcgtgatcgaccatctcgaacgcggcacgctggacctgtcgaagctcgactacctggtgctcgacgaggccgacgagatgctcaccatgggcttcgccgaggaggtcgagcggatcctcgccgacacccccgagtacaagcaggtcgcgctgttctcggcgaccatgcccgcggcgatccgcaagatcaccaccaagtacctgcacgatccggtcgaggtcacggtcaaggcgaaaaccgccacggccgagaacatctcacagcggttcatccaggtggccggcccgcgcaagatggacgcgctgacccgcatcctcgaggtcgaggagggcgacgcgatgatcgtgttcgtccgtaccaagcaggccaccgaggaggtcgccgaccgtctcaaggcccgcgggttcgccgcggccgcgatcaacggcgacatcaaccaggcgcagcgcgaacgcaccatctccgcgctcaaggacggcacgatcgacatcctgatcgcgaccgacgtcgccgcgcgtggtctggacgtggagcggatctcgcacgtcatcaactacgacatccctcacgacaccgagtcctacgtgcaccgcatcggccgcacgggccgtgccggacggtcggggcacgcggtgctgttcgtgaccccgcgtgagcgtcacctgctcaagtcgatcgagaaggccacgcggtccaagctcatcgaagccgagctgcccagcgtcgaggacgtcaatgcccagcgcgtcgcgaagttccgcgactcgatcagcgattcgctcaacgcaccgggcatcgacctgttccgtcgtctcatcgaggactacgagcgcgagagcaacgtgccgctggccgacatcgccgcggcgctcgcggtgcagacgcgcaacggcgaagagttcctcatgaccgaaccgccgccggacaagcggcgtgaccgtgaccgcgaccgcgacgaccgcggcgaccggggtccgcgcaaggagcgcccgccgcgcgaaggccttgcgacctaccgcatcgacgtcggcaagcgccacaaggtcggccccggccacatcgtgggcgcgatcgccaacgagggcggactgcaccgcaacgagttcggccatatcaccatccgcctggactactcgctggtggagttgccggagaagctgccgaagaagacgctcaaagcgcttgagaacacccgcatctccggggtgttgatcaacctgcagcctgaccgtggaccgcgacgggaaggggcgggcaagccttcgggcaagtacaagccacaccggaaggtgaagtga

SEQ ID NO: 65517 - protein, 581 aa, Mycobacterium smegmatis str. MC2 155
MTSQEPDPSPVTNSDSAPTEPTFADLQIHPAVLQAVTDVGYESPSAIQAATIPPMLAGSDVVGLAQTGTGKTAAFAIPILSKIDTSRRDTQALVLAPTRELALQVAEAFGRYGSHLPQVNVLPIYGGSSYTVQLSGLRRGAQVVVGTPGRVIDHLERGTLDLSKLDYLVLDEADEMLTMGFAEEVERILADTPEYKQVALFSATMPAAIRKITTKYLHDPVEVTVKAKTATAENISQRFIQVAGPRKMDALTRILEVEEGDAMIVFVRTKQATEEVADRLKARGFAAAAINGDINQAQRERTISALKDGTIDILIATDVAARGLDVERISHVINYDIPHDTESYVHRIGRTGRAGRSGHAVLFVTPRERHLLKSIEKATRSKLIEAELPSVEDVNAQRVAKFRDSISDSLNAPGIDLFRRLIEDYERESNVPLADIAAALAVQTRNGEEFLMTEPPPDKRRDRDRDRDDRGDRGPRKERPPREGLATYRIDVGKRHKVGPGHIVGAIANEGGLHRNEFGHITIRLDYSLVELPEKLPKKTLKALENTRISGVLINLQPDRGPRREGAGKPSGKYKPHRKVK

SEQ ID NO: 65518 - DNA, 1344 bp, Azoarcus sp. BH72
  CDS (1)..(1344): transl_table=11
atgactttccacgctctcggccttgccgaagaactcattgccgccgttgaacagagcggctacaccacgccgaccccggtgcaggaacaggccattccggccgccatcgctggcggcgacctgctggtgtcctcgcacaccggcagcggcaagacggccgcgttcacgctgccctcgctgcaccgcctggtcggccgccgcccggcgccgaacagcggcccccgcgtgctggtgcttacgcccacccgcgaactcgcccagcaagttgaagaggcggtgaagacctacggccgcgcgctgcgctggctcaacaccgcctgcctggtgggcggcgcgcccttctttgcccaggtcaagcagctcagccgtccggtcgacgtggtcgtcgccacgccgggccgtctgctcgaccacctcaaccgccgcaagctcaagctgtcggacgtcgaaaccctggtgctggacgaagccgaccgcatgctcgacatgggttttgccgaggacatcgaggccatcgtcggcgcgattccggccagccgccagaccctgctgttctcggccacgctggacggcgtggtcggcgcgctcgccaacaagctcacccgcaacccgcagcgcatcgagatcgccagcaccgaagccaagcgcggcaacatcgagcagcgcctgatgtttgcggacgacatgggccacaagagccgcctgctcgaagccctgctcggcaccgacggcctgcagcaggcggtggtgttcaccgccaccaagaagagtgccgacgagctgtcgctgagcctgcaggaaaagggtttctccgccgctgcgctgcatggcgacatgcaccagacggtgcgtaaccgcacgctgcagcgcctgcgccagggccgtatcggcgtgctggtggccaccgacgtcgcggcgcgcggcatcgacgtcgccggcattagccacgtcatcaacttcgacccgccgcgccaggtggaagactatgtccaccgcatcggccgtaccggccgtgccggccgcgacggcatcgcgatcacgctgtcgggtccgcgcgaaaccgggctgatccgtgcgatcgagcgtttcaccggcgaccgtctcgcggtccacaccatccccggtctggagccggcgccgcggcgcccgtccgcgccgcgtcccggtggcccgggtcgtcgcttcggcagcggcggcaagccgggtggcggctttggtggccgcagtgagggtggctacggcggtcgcggtgaaggtggtcgtggcgcttatggccgcgacggccatgcgacccgcaatgagcgcagtcacggcgaccggcgtgaccgcggtccgcgcggctga

SEQ ID NO: 65519 - protein, 447 aa, Azoarcus sp. BH72
MTFHALGLAEELIAAVEQSGYTTPTPVQEQAIPAAIAGGDLLVSSHTGSGKTAAFTLPSLHRLVGRRPAPNSGPRVLVLTPTRELAQQVEEAVKTYGRALRWLNTACLVGGAPFFAQVKQLSRPVDVVVATPGRLLDHLNRRKLKLSDVETLVLDEADRMLDMGFAEDIEAIVGAIPASRQTLLFSATLDGVVGALANKLTRNPQRIEIASTEAKRGNIEQRLMFADDMGHKSRLLEALLGTDGLQQAVVFTATKKSADELSLSLQEKGFSAAALHGDMHQTVRNRTLQRLRQGRIGVLVATDVAARGIDVAGISHVINFDPPRQVEDYVHRIGRTGRAGRDGIAITLSGPRETGLIRAIERFTGDRLAVHTIPGLEPAPRRPSAPRPGGPGRRFGSGGKPGGGFGGRSEGGYGGRGEGGRGAYGRDGHATRNERSHGDRRDRGPRG

SEQ ID NO: 65520 - DNA, 1485 bp, Azoarcus sp. BH72
  CDS (1)..(1485): transl_table=11
atgagttttgccgacctcggcctcatccccgaactgcagcgcgcagtagccgacgccggctacaccgagccgacgccgatccagcgccaggccatccccatcgtcatcgccggcaacgacgtcatgggcggcgcccagaccggcaccggcaagaccgccggcttcacgcttccgctgctgcatcgcctggcacgccacgccaacaccagcacctcgccggcacgccaccagacgcgcgcgctcatcctcgcgccgacgcgcgaactggcgatgcaggtgtacgaatcggtcaagacgtacagcaaacacctgccgctgcgcgccacctgcatctatggcggggtggatatgaacccgcagatccaggaactgcgccgcggcatcgaaatcgtcatcgccacccccggccgcctgctggaccacgtgcagcagaagacgatcaacctcacccaggtcgagatgctggtgctggacgaggccgaccgcatgctagacatgggcttcatccccgacatcaagcgcatcctcgcgctgctgccggccagccgccagagcctgctgttctccgccaccttctcggacgagatcaagaagctcgccgaccagatgctgaagaacccgcagctgatcgaagtcgcgcggcgcaacatggtgtcggagaccatcacccaccgcgtacacccggtgtcgtcgggcatgaagcgcaacctgctcgcccatctgctgcgccaccagcccgacacgcaggcgctggtcttcgtcgacaccaagctggtatgcggccggctggcccacttcctcgaacgccacagcatctcggccgactcgatccacggtgacaagagccagcagcagcgcaccgaaacgctggaagccttcaaggcgggcaagctgcgcgtgctggtcgccaccgacgtcgccgcacgcggcattgacatcgacgagctgccctacgtcatcaactacgagctgccgcacaccgcggaagactacgtgcaccgcattggccgcaccggccgcgccggccaccagggcaacgcggtgtcgctggtatgcaccgaggaaaagcacctgctggccgacatccagaagctgatcaagctggagattccgcaggaagtggtgcccggcttcgagcccgaccccgatttcttcgaagccggcagccgcgcccacaggggccgccgcccggtcgaggatttcgacgaacgcccccggcgcgagccgcgcggcggccgcgaagaacgcccgccgcgcgaagagcgcgccccgcgcgaggatcgcggcgcccgcaacgtcgtggccaaacgcccgccgcgctctacgatcgccccggacggtttcgatttcagcaaaccctacgtcgccaagcccgtggtgctggccgaaggcgccgcccccgacgccagccccgccgaagccggcacgccgcgtcgcggccaacggccgatcgccttcctgctgggcggtctcgggcggaaatag

SEQ ID NO: 65521 - protein, 494 aa, Azoarcus sp. BH72
MSFADLGLIPELQRAVADAGYTEPTPIQRQAIPIVIAGNDVMGGAQTGTGKTAGFTLPLLHRLARHANTSTSPARHQTRALILAPTRELAMQVYESVKTYSKHLPLRATCIYGGVDMNPQIQELRRGIEIVIATPGRLLDHVQQKTINLTQVEMLVLDEADRMLDMGFIPDIKRILALLPASRQSLLFSATFSDEIKKLADQMLKNPQLIEVARRNMVSETITHRVHPVSSGMKRNLLAHLLRHQPDTQALVFVDTKLVCGRLAHFLERHSISADSIHGDKSQQQRTETLEAFKAGKLRVLVATDVAARGIDIDELPYVINYELPHTAEDYVHRIGRTGRAGHQGNAVSLVCTEEKHLLADIQKLIKLEIPQEVVPGFEPDPDFFEAGSRAHRGRRPVEDFDERPRREPRGGREERPPREERAPREDRGARNVVAKRPPRSTIAPDGFDFSKPYVAKPVVLAEGAAPDASPAEAGTPRRGQRPIAFLLGGLGRK

SEQ ID NO: 65522 - DNA, 1953 bp, Azoarcus sp. BH72
  CDS (1)..(1953): transl_table=11
atgacagataccgtcaccttcgccgatctcgccctgcccgccccgctgctgcaagcccttgccgacgtcggctatgaaacgccttcgccgatccaggccgcctgtattccgcacctgctcgcgggccacgacatcctcggcgaggcgcaaacgggaaccggcaagacggccgcgttcgcgttgccgatgctggcacggctcgacctcgccgaccgccgtccgcaggtgctggtgctgacgccgacgcgcgaactcgcgatccaggtggccgaagcgttccagaagtatgcgcatcacctgcgcgacttccatgtgctgccgctgtatggcggccagagcatggtggtgcagctgcgccagctgtcgcgcggcgcgcagatcatcgtcggcaccccggggcgcgtcatggaccacctcgaacgcggcagcctcaagctcgacacgctgtccggcctggtgctcgacgaggccgacgagatgctgcgcatgggcttcatcgaggacgtcgagtggatcctcgaacacacgccgtcaggccgccagaccgcgctgttctccgccacgatgccggacgcgatccgccgcgtcgcccatcagcacctgcgcgaaccgaaggaagtgaagattcgcgcggccaccagcaccgtgtcggcgatcagccagcgctactggctggtgcgcggcgtggacaagctcgacgccctgacccgcatcctcgacgccgaggaaaagctcgacgccgcgatcgtgttcgtgcgcaccaagaccgccaccaccgaactggcagacaaactcgaggcgcgtggctatgcggccgccgcgctcaatggcgacatgacgcagggcctgcgcgaacgcgtcatcgagcagctgaagaacggctcgctcgacatcgttgtcgccaccgacgtcgccgcgcggggtatcgatgtgccgcgcatcagccacgtcatcaactacgacatcccttacgacaccgaagcctacgtgcaccgcatcggccgcaccggccgcgcagggcgtgaaggcagcgccatcctcttcgtcgcgccgcgcgaatcgcgcatgctgaaagcgatcgagcgcgccacccggcagccgatcgaagcgatcgcactgcccagccgcgaggaagtcgccggccgccgtgtcgcgcagttcaagcagctggtgctcgatacgctgcagcaggaggacctcggcttcttcatggaggttgtgaacggcctcgtcgacgaacatgagatcgacgcccacgagatcgcggccgcgctcgccttcctcgcccagcgtgacaagcctttgcaggtggaggaaagcggccgcggctgggatatcgccaccgcgccggaacgcgatcgccgcccgccgcgcgagaccgtgcgtgacggcatgcgcgaagagcgcggcgagcgcgaaccccgccccaaccgcgacgaaatcctcagccgccgccgtgctttcgccgacggcgcgctggtgcgctaccgcatcgcggtcggccgcaaccagggcgcgacgcccaaggaaatcgtcggcgccatcgccaacgaaggcggcatcgagggcaagtacatcggccagatccacctcttcgacgactacagcaccgtcgaactgcccgccagcctgcccggcgaactgctgggcctgctcaagcgcacccgcgtgcgccagtgcgcgctcgacatccgcccgctgaccgaggccgaagccgcctccacgccggcacggcgcccgcgccgtgatgccggcgacgccccggagcgcaccaaacgcccctacgacgaacgccgtccgcgcgacaacgaccggccccagagcaaatcgtacgacaagccctacgacaaaccccacgccaagacggagcgcgcgccctacccgcccaagtccggcgaaaagccgcgcccggccggcggtgacaagccctggaagcgcaaggacaaacgctga

SEQ ID NO: 65523 - protein, 650 aa, Azoarcus sp. BH72
MTDTVTFADLALPAPLLQALADVGYETPSPIQAACIPHLLAGHDILGEAQTGTGKTAAFALPMLARLDLADRRPQVLVLTPTRELAIQVAEAFQKYAHHLRDFHVLPLYGGQSMVVQLRQLSRGAQIIVGTPGRVMDHLERGSLKLDTLSGLVLDEADEMLRMGFIEDVEWILEHTPSGRQTALFSATMPDAIRRVAHQHLREPKEVKIRAATSTVSAISQRYWLVRGVDKLDALTRILDAEEKLDAAIVFVRTKTATTELADKLEARGYAAAALNGDMTQGLRERVIEQLKNGSLDIVVATDVAARGIDVPRISHVINYDIPYDTEAYVHRIGRTGRAGREGSAILFVAPRESRMLKAIERATRQPIEAIALPSREEVAGRRVAQFKQLVLDTLQQEDLGFFMEVVNGLVDEHEIDAHEIAAALAFLAQRDKPLQVEESGRGWDIATAPERDRRPPRETVRDGMREERGEREPRPNRDEILSRRRAFADGALVRYRIAVGRNQGATPKEIVGAIANEGGIEGKYIGQIHLFDDYSTVELPASLPGELLGLLKRTRVRQCALDIRPLTEAEAASTPARRPRRDAGDAPERTKRPYDERRPRDNDRPQSKSYDKPYDKPHAKTERAPYPPKSGEKPRPAGGDKPWKRKDKR

SEQ ID NO: 65524 - DNA, 1734 bp, Acidovorax sp. JS42
  CDS (1)..(1734): transl_table=11
atgacatttgaagaactgaagctggcgccggccattttgcgggccgtgcaagaacaaggctacgacaacccgacccctatccaggcccaggccatcccggccgtcctcgctggacacgacctcctcgccggcgcacagaccggcaccggcaagaccgccgcgttcacgctgcccatgctgcaccgcctggccgaaggccaagccccacgcagccagtttggcggcaagggtgtgcgcgccctggtgctcacgcccacgcgggagctggcagcgcaggtcgaagaatccgtgcgcggctacggcaaatacctggatctgaactccaccgtgatcttcggcggcgtcggtatgaacccgcagatcgaacgcatcaagcgcggcgtggacgtgctggtggccacccctggccgcctgctggacctgcagcagcaaggcttcatggacctgtccaccgtcgagatcctggtgctggacgaagccgaccgcatgctcgacatgggattcatccacgacgtgaagaaggtgctggcgctgctgccccagtccaagcaaagcctgctgttctcggccacgttcagcgacgacatccgtgaactggccaactcactgctcaagaacccgcagagcatccaggtcaccccgcgcaacaccacggtgcaacgcatcagccaggtgatccaccccgtggggcgcggcaagaagaagcaggtgctgctgcacatcatccaggagcacgactggagccaggtgctggtgttcacgcgcaccaagttcggcgccaacaacgtggccgagtacctgaccaagaacggcgtttcggccatggcgctgcatggcaacaagagccagagcgcccgcacccaggcgctggagggcttcaagacgggccagatccgcgccctggtggctaccgacatcgcggcacgcggcatcgacatcgacgacctgccgcacgtcgtgaactacgaaatccccaacgtgcccgaggactatgtgcaccgcatcggccgcacgggccgcgccggccgcgagggccatgccgtgagcctcgtctgcatggacgaggaaggtttcatgatggagatcgagcgcttcaccaagcaggaaatccccgtgcaggtgatcgacggctttggcccggacgagggagagaaggccgagcccatcgccatgggccgccagaccatctggggcggcgcgggcaagccgcccagccgcgaagtcatgcaggccgcggccaaggcggcacgccaggagatgatggagcgcatccgcaccaacaaggcggccactggcggccagcgcggttcgcgccaaggcggtggccagggcgaaggccagcagcgcgccgggggtcagaacggcagcgggggccgcggcggcaacgcaggcaatgcaggccgtcctgccggtccacgtgatcagcaacgtccgcagaacacggccggtggccgccgccgcggcggtcccgcgggtgcaggcaatggcggcggtaatggcggaaatcgccgtttcgacgacagccagcctcgcagcgagaacgcccacctgggcacgcagctcggcaacattggcatcggcccacgccatggcagcggccgtgccagccagccggaccccatgcgcaccagcgtggacagcatggcggaccgcgggcgtcggggcggcttcggccgtggcaacggcggcggcggtggtggccgcggcccacgcggcggcggcttcggccgctga

SEQ ID NO: 65525 - protein, 577 aa, Acidovorax sp. JS42
MTFEELKLAPAILRAVQEQGYDNPTPIQAQAIPAVLAGHDLLAGAQTGTGKTAAFTLPMLHRLAEGQAPRSQFGGKGVRALVLTPTRELAAQVEESVRGYGKYLDLNSTVIFGGVGMNPQIERIKRGVDVLVATPGRLLDLQQQGFMDLSTVEILVLDEADRMLDMGFIHDVKKVLALLPQSKQSLLFSATFSDDIRELANSLLKNPQSIQVTPRNTTVQRISQVIHPVGRGKKKQVLLHIIQEHDWSQVLVFTRTKFGANNVAEYLTKNGVSAMALHGNKSQSARTQALEGFKTGQIRALVATDIAARGIDIDDLPHVVNYEIPNVPEDYVHRIGRTGRAGREGHAVSLVCMDEEGFMMEIERFTKQEIPVQVIDGFGPDEGEKAEPIAMGRQTIWGGAGKPPSREVMQAAAKAARQEMMERIRTNKAATGGQRGSRQGGGQGEGQQRAGGQNGSGGRGGNAGNAGRPAGPRDQQRPQNTAGGRRRGGPAGAGNGGGNGGNRRFDDSQPRSENAHLGTQLGNIGIGPRHGSGRASQPDPMRTSVDSMADRGRRGGFGRGNGGGGGGRGPRGGGFGR

SEQ ID NO: 65526 - DNA, 1356 bp, Bacillus cereus G9241
  CDS (1)..(1356): transl_table=11
gtgaaaaactttttagaattaggaattagtgaaacgtttaatcatacattacgtgaaaatggaattacagaagcaaccccaattcaagagcaggcaattcctgttatactgtcaggtaaagatattattgggcaggcgaaaacaggaacgggtaaaacgttagcatttgtgttaccaattttagaaaaaatcgatccagaatgtagcgatgttcaggctttaattgttgcaccaacaagggaactagcgctgcaaattacaactgaaattaaaaaaatgcttgttcaaagagaagatattaatgtattagcgatttatggtggacaagatgtagcacagcaattgagaaaattaaaaggaaatacacatatagttgttgcgacaccaggacgattattagatcatatacgacgtgaaacgattgatttaagtaatctttcaacgattgtactagatgaagcggatcaaatgctttatttcggtttcttatatgatattgaagatattttagatgagacacctggtagtaaacaaacaatgttattctcagcaacgatgccaaaagatattaaaaaattggcgaaacgttatatggatgagccgcaaatgattcaagtacaaagtgaagaagtaacggtaaatacaattgagcagcgtgtcattgagacgacagatcgtgcaaagccagacgcacttcgttttgttatggaccgtgatcagccatttttagcagttattttctgtcgtacaaaggttagagcaagtaagttgtatgataatttaaaaggactaggttataattgtgctgaacttcatggtgatatacctcaagcgaaacgtgaaagagttatgaagagtttccgcgaagcaaaaattcagtacttaatcgcaacggatgtagcagctcgtggacttgatgtagatggtgtaacgcacgtatttaactttgatatccctgaagatgtagaaagttatattcaccgcattggccgaacaggacgtgcaggtggatcaggtattgcaattacattcgttgcagcgaaagatgaaaaacatttagaagaaattgaaaaaacgcttggtgcaccaatacaaagagaaataatcgaacaaccgaagataaaacgtgtagatgaaaatggaaaaccggtaccaaagccggctccgaagaaatcaggcgagtatcgtcaaagagatagccgtgaaggttcaagaagtgattcaagacgtggttcgagaaatggctcaagaagtgattcaagaaatagttcaagaaatgaaaacaaccgatcatttaataagccaagtaataaaaaaggtagtacaaagcaaggtcagcaaagacgtggccgttaa

SEQ ID NO: 65527 - protein, 451 aa, Bacillus cereus G9241
MKNFLELGISETFNHTLRENGITEATPIQEQAIPVILSGKDIIGQAKTGTGKTLAFVLPILEKIDPECSDVQALIVAPTRELALQITTEIKKMLVQREDINVLAIYGGQDVAQQLRKLKGNTHIVVATPGRLLDHIRRETIDLSNLSTIVLDEADQMLYFGFLYDIEDILDETPGSKQTMLFSATMPKDIKKLAKRYMDEPQMIQVQSEEVTVNTIEQRVIETTDRAKPDALRFVMDRDQPFLAVIFCRTKVRASKLYDNLKGLGYNCAELHGDIPQAKRERVMKSFREAKIQYLIATDVAARGLDVDGVTHVFNFDIPEDVESYIHRIGRTGRAGGSGIAITFVAAKDEKHLEEIEKTLGAPIQREIIEQPKIKRVDENGKPVPKPAPKKSGEYRQRDSREGSRSDSRRGSRNGSRSDSRNSSRNENNRSFNKPSNKKGSTKQGQQRRGR

SEQ ID NO: 65528 - DNA, 1443 bp, Crocosphaera watsonii WH 8501
  CDS (1)..(1443): transl_table=11
atgaccatttccttcgagaacttaggactatccgacgcccgtgtaaacaagttacaaagactgggctttgaaagtcctaccgagattcaagaaaaagcaatacccttaattttagaaagcaacgatatcttaggacaatcccaaacaggaacgggaaaaactgcggcctattccttacctattctggaacaaattgataccaaaaatcctaatgttcagacattaatactaaccccaactcgtgaacttgctcaacaagttgccgaggcgttaaaagatttttcgacagaacgtcgtctatatattttaacggtttatgggggtcaatccattgaaagacaaatccgtagtttagaacgaggggtacagattgttgtcggaacaccaggacgagttatagacttattagaacggaaaaaattggttctagactgtctgcgttgggcggttctcgatgaagcagacgaaatgttaagtatgggcttcattgatgatgtaaaaacgatcctgagaaaaacccctgaaactcgtaatacagcttgtttctctgccaccatgccccgagaaatacgagacttagttaatcagttcctcaagtctcccgtcaccgtatctgtagaacgcaagcaagccgcccctacacacattgaccagcatctctattatgttcccaggggatggtcaaaacgcaaagccctacaaccgatcttagagatggaagatccagagtcggccatcatctttgtccgtactaagcaaactgcctcagaattaaccaccaggctacaagaaatcggtcatagtgtggacgaatatcatggtaacctctcccagtcccaaagagaaagattagtctatcgctttcgggacggaaaaattaagttagtggtagccacagatattgcggctcggggtttagatgtagaaaatttaagtcacgttatcaattacgacttacccgataatagtgaaacctatatccaccgtattggtcgtacaggacgtgcaggaaagacagggacagctatttccctcatcgaaccggttgatcgccgtatggtaagacaaattgagcggaaactgcgacaaaaattagaaacctgcaagatccccagtcgttctcaagtagaagcaaaacgcatcgagaaactgcaaaatgagattaaagaatctttagcaggagaacgcatggcctcatttttacccttggtaagggaattgagtgatgaatacgatccccaagcgatcgcagcggctgctttacagatgatctacgatcaagactgtcccgagtggatgaaaaccgattgggaagtaccagagtccgccgtacctaaacccgtcattaaacgcaaaggaaaatataatcccaataattctaagcgtcatggcaattctaaccgaggtaatcgcaagaaagttattcatccacaaactcgttag

SEQ ID NO: 65529 - protein, 480 aa, Crocosphaera watsonii WH 8501
MTISFENLGLSDARVNKLQRLGFESPTEIQEKAIPLILESNDILGQSQTGTGKTAAYSLPILEQIDTKNPNVQTLILTPTRELAQQVAEALKDFSTERRLYILTVYGGQSIERQIRSLERGVQIVVGTPGRVIDLLERKKLVLDCLRWAVLDEADEMLSMGFIDDVKTILRKTPETRNTACFSATMPREIRDLVNQFLKSPVTVSVERKQAAPTHIDQHLYYVPRGWSKRKALQPILEMEDPESAIIFVRTKQTASELTTRLQEIGHSVDEYHGNLSQSQRERLVYRFRDGKIKLVVATDIAARGLDVENLSHVINYDLPDNSETYIHRIGRTGRAGKTGTAISLIEPVDRRMVRQIERKLRQKLETCKIPSRSQVEAKRIEKLQNEIKESLAGERMASFLPLVRELSDEYDPQAIAAAALQMIYDQDCPEWMKTDWEVPESAVPKPVIKRKGKYNPNNSKRHGNSNRGNRKKVIHPQTR

SEQ ID NO: 65530 - DNA, 1593 bp, Exiguobacterium sibiricum 255-15
  CDS (1)..(1593): transl_table=11
ttgacaacatttcgtgaattaaatcttagtgaggcacttatcaaaggtgtcctaaaaatgggctttgaagaagcaactccaatccaagcagaaacaattccagtcggtcttagcggcgttgacttaatcggtcaagcacaaacaggaacagggaaaacagctgcattcggtattccaacgattgagcgtcttgacgcaaaatcacgttatatccaagcattgatccttgcaccgactcgtgagcttgcgattcaagtagcagaagaacttaaccgcattggtgaagtaaaacgtgttcatgcattgccagtatacggtggtcagcaaatcgaccgtcagattcgtgcgcttcgtaagaacccacaaatcgtcgtcgctacacctggtcgtctaatggaccacatgaaccgtaaaacattaaaccttgaccacgtccaaacagttatcttggatgaggcagatgaaatgttgaacatgggcttcgtggaagatatcgaaaaaatcttgggtacacttccgccaactcgccaaacacttttattctctgcgacaatgccgccgcagattcgtaaaatcgcagatcgtttcatgacgactccgactcacatcaaagtaaaagcaaaagaaatgactgtcgaaaacatcgaccaatcattcatcgaattaaaagaaagccaaaaattcgacgtcctttgccgcttgattgatacggattctccggaactctcgatcatcttcggtcgtacgaaaaaacgtgtcgatgagatgacagaaggtctaatccaacgtggttatacagctgacggcttacacggtgacttaacacaagcaaaacgtgaccaagtcatccgtcgcttcaaaaaaggaacaatcgatatccttgttgcaactgacgtagcggcacgtggacttgatatttcaggcgttacacacgtctacaacttcgacgtcccgcaagatccggagagctatgttcaccgtatcggtcgtacaggtcgtgctggtaaaacaggatcagcaatcacattcgttacaccacgtgagtttggtcaaatcaaaacaatcgaacgtgtaacaaacaaaaaaatgtcacgtcgtcatgcaccgacgcttgacgaaatcttggaaggcaacttgaaacttgctgcacaagagttgatcaaacgtgtagaagcgaaaaactcacaagagtatacaacactcgctcaagaacttcttgaagagtatgaagcggttgaattaatcgcagcagcgcttaaaggattaacgaaagagccggatgcaacgccagttcaaatttcgtcaatcgaaccaatccgtgttaaacgttttggcagcaacggtggcggtggtaaccgtcgtccttacggcaacaaaggtggatcaggttctggttcttcttctaaccgtggtggcggataccgtggcagcaacccacgtggtggggagcgccgtgaaggcggtcgtccttctgaaggaaaccgtagttcttcatcagcgtcatcagatcgccgtgaaggtggatacgctggccgtaaccgcagtgaaagtgatcgcaaccgtggtggacgtaaaccacgttttgaaaagtaa

SEQ ID NO: 65531 - protein, 530 aa, Exiguobacterium sibiricum 255-15
MTTFRELNLSEALIKGVLKMGFEEATPIQAETIPVGLSGVDLIGQAQTGTGKTAAFGIPTIERLDAKSRYIQALILAPTRELAIQVAEELNRIGEVKRVHALPVYGGQQIDRQIRALRKNPQIVVATPGRLMDHMNRKTLNLDHVQTVILDEADEMLNMGFVEDIEKILGTLPPTRQTLLFSATMPPQIRKIADRFMTTPTHIKVKAKEMTVENIDQSFIELKESQKFDVLCRLIDTDSPELSIIFGRTKKRVDEMTEGLIQRGYTADGLHGDLTQAKRDQVIRRFKKGTIDILVATDVAARGLDISGVTHVYNFDVPQDPESYVHRIGRTGRAGKTGSAITFVTPREFGQIKTIERVTNKKMSRRHAPTLDEILEGNLKLAAQELIKRVEAKNSQEYTTLAQELLEEYEAVELIAAALKGLTKEPDATPVQISSIEPIRVKRFGSNGGGGNRRPYGNKGGSGSGSSSNRGGGYRGSNPRGGERREGGRPSEGNRSSSSASSDRREGGYAGRNRSESDRNRGGRKPRFEK

SEQ ID NO: 65532 - DNA, 1680 bp, Sulfitobacter sp. EE-36
  CDS (1)..(1680): transl_table=11
atgcgggccgacatgaatgctgccgcgggccaagtgtatgtccgctatcatcggacacacatgacaaaattttctgatctaaaccttaatcctaaagtcctgaaagccattgatgaggccgggtatgaaacccccacgccgattcaggccggcgcgatcccccctgcccttgaaggcaaggacgtcttgggaatcgcccaaacaggcaccggcaaaactgccagctttaccctgcccatgattaccctgcttgcccgtggccgcgcccgcgcccggatgccgcgcagtctggtgctgtgccccacgcgggaactggcggcacaggtggccgagaacttcgacacctataccaagcacctgaaactgaccaaagcgctgctgatcggcggtgtgtcgttcggagagcaggacaagctgatcgacaagggcgttgacgttttgatcgccacgcccggccgtctgatcgaccactttgagcgtggcaagctgatcttgtccgacgtgaagatcatggtcgtagacgaggccgaccggatgctggatatggggttcatccccgatatcgaacgcatcttccagatgacgccttttacccgtcagacgctgttcttctcggccactatggcccccgagatcgagcggattacgaacaccttcctctctgcgccagagcgtatcgaagtggcccgtcaggccaccacgagcgagaatatcgagcaaggcgtgctgatgttcaaagcctcgcgcaaggaccgcgaagcgacggagaaacgcaaagtgctgcgcgcgttgatcgacgccgaaggcgacaaatgcaccaacgcgatcatcttctgcaaccgcaagatggatgtggatacggtcgctaagtcgttgaaaaagtacggctatgacgcggctccgatccacggggatcttgatcaaagccagcggaccaaaacactggaagggttccgcaacggcgatctgcgcttccttgttgcctctgacgtggcggcgcgcggtcttgatgtgccgtcggtcagccacgtgtataactacgacgtgccctcccatgccgaggattacgtacaccggatcggccgcacgggtcgcgcgggacgtgatggcaaggcgatcatgatctgcgtcccgcgggacgaaaagaacctcgaagacgttgaacgtctggtacagcgcgagatcccgcgcctcgacaaccccttgggcggttcggaggcaaaagcggcccccgcggcagaggccaagacagccgacgcccccgctgcgaaatccgatgacgcggctaaatctgaaaagcccaaacgcacccgcacccgtagccgtaaaaagcctgatgcggctaaggttgacgctgaacaaacagagacggcgcaggcggacagccccaaggcggacaaatccgatgccaaagcggacgccaaatctgacgcaaagccgcaagacaaaaagtcggacaaaccagccaaggagtccgcagacaaggcccctgcccaaaaggcagacgccgctcaggacgacaaacccaacaaccgtcgcggtggccgtggcgggcgcggtgataacaaccgcggtgataacaaccgtcagcagaacaaccgcaacgacaaccgcgtcgtcggtctgggcgatcacacgcccgagttcatcggcctaagctttgccgagcgtcgcgaataa

SEQ ID NO: 65533 - protein, 559 aa, Sulfitobacter sp. EE-36
MRADMNAAAGQVYVRYHRTHMTKFSDLNLNPKVLKAIDEAGYETPTPIQAGAIPPALEGKDVLGIAQTGTGKTASFTLPMITLLARGRARARMPRSLVLCPTRELAAQVAENFDTYTKHLKLTKALLIGGVSFGEQDKLIDKGVDVLIATPGRLIDHFERGKLILSDVKIMVVDEADRMLDMGFIPDIERIFQMTPFTRQTLFFSATMAPEIERITNTFLSAPERIEVARQATTSENIEQGVLMFKASRKDREATEKRKVLRALIDAEGDKCTNAIIFCNRKMDVDTVAKSLKKYGYDAAPIHGDLDQSQRTKTLEGFRNGDLRFLVASDVAARGLDVPSVSHVYNYDVPSHAEDYVHRIGRTGRAGRDGKAIMICVPRDEKNLEDVERLVQREIPRLDNPLGGSEAKAAPAAEAKTADAPAAKSDDAAKSEKPKRTRTRSRKKPDAAKVDAEQTETAQADSPKADKSDAKADAKSDAKPQDKKSDKPAKESADKAPAQKADAAQDDKPNNRRGGRGGRGDNNRGDNNRQQNNRNDNRVVGLGDHTPEFIGLSFAERRE

SEQ ID NO: 65534 - DNA, 1416 bp, Oceanicola batsensis HTCC2597
  CDS (1)..(1416): transl_table=11
atgacaaaatttaccgacctgaatctggaccccaaggtcctgcaagccattgccgacgccggctacgaatcgccgacgccgatccagcagggcgccattccccccgctctcgaggggcgcgacgtcctcgggatcgcgcagaccggcaccggcaagacagccagcttcacgctgccgatgatcacgctgctgtccaagggccgtgcccgggcgcggatgccgcgcagtctggtgctggccccgacgcgggaactcgcggcgcaagtcgccgagaatttcgacacttacacgaaacacctcaagctgaccaaggcgctgctgatcggtggcgtcagcttcaaggaacaggacgccctgatcgaccgcggcgtcgatgttctgatcgcgacgcccggccggctgcttgaccatttcgaacgtggaaagcttttgctgaccggcgtgcagatcatggtggtggacgaagccgaccgcatgctcgacatgggctttattcctgatatcgaacggatattcagccttacgccgttcacccgccagacgcttttcttctcggccacgatggcgcccgagatcgagagaattaccaataccttcctttcgggccccgcccgcgtcgaagtcgcccggcaggccacggccagcgagacgatcgaacagggcgtggtgatgttcaagggctcccgccgggatcgcgagggatcggaaaaacggcaggtcctgcgcgacctgatcgaccgcgagggcgaggactgtcgcaacgccatcatcttctgcaaccgcaagacagatgtggatgtgaccgccaagtcactgaaaaagtacggcttcgacgcagcgccgatccatggcgatctggaacaatcgcagcgcaccaagacgctcgaagggttccgcgacgggtcgctgcgctttctcgtggcctccgatgtggccgcgcgcggcctcgatatcccgaacgtgagccacgtcttcaatttcgacgtcccctctcatgccgaggattacgtgcaccggatcggccgcaccggccgcgccggccggtcgggcaaggcgatcatgatctgcgttccgcgcgacgaaaagaacctcgccgacatcgaatcgctgatcgaaaagaccattccgcggatcgacctgccgaatgcaccggccgccaagcccgagggcgacgcgccggagaaggccgacaagcccaagcggacccgcagccgcggcaagcccaagaccgataccgccgaggccgaggccgccgagacccccaccagggatgacgtacctaccgaggtgcccgcgccgcagcagaaggcccggggcggccgccgcggacgcgaggacgagtccaaggtggtcggcatgggcgatcacatgcccagcttcatcgccctcagctttgcggaacgtcgcaccggctga

SEQ ID NO: 65535 - protein, 471 aa, Oceanicola batsensis HTCC2597
MTKFTDLNLDPKVLQAIADAGYESPTPIQQGAIPPALEGRDVLGIAQTGTGKTASFTLPMITLLSKGRARARMPRSLVLAPTRELAAQVAENFDTYTKHLKLTKALLIGGVSFKEQDALIDRGVDVLIATPGRLLDHFERGKLLLTGVQIMVVDEADRMLDMGFIPDIERIFSLTPFTRQTLFFSATMAPEIERITNTFLSGPARVEVARQATASETIEQGVVMFKGSRRDREGSEKRQVLRDLIDREGEDCRNAIIFCNRKTDVDVTAKSLKKYGFDAAPIHGDLEQSQRTKTLEGFRDGSLRFLVASDVAARGLDIPNVSHVFNFDVPSHAEDYVHRIGRTGRAGRSGKAIMICVPRDEKNLADIESLIEKTIPRIDLPNAPAAKPEGDAPEKADKPKRTRSRGKPKTDTAEAEAAETPTRDDVPTEVPAPQQKARGGRRGREDESKVVGMGDHMPSFIALSFAERRTG

SEQ ID NO: 65536 - DNA, 1875 bp, Pseudoalteromonas tunicata D2
  CDS (1)..(1875): transl_table=11
atgacagatactacacaagtccgttttgaccaattaaaccttcttgcgcctgttcttcaagctataaacgaaatgggttatatcaccccaactccaatccaatcacaagctattccttcattattagcaggtaaagatgtattgggtgaagcgcaaactggtactggtaaaactgcggcttttggtctgcctttgttatcacgtttagacgccgatttaaaacaaccacaaatgctggttgtgtgccctactcgtgaattagcaattcaagttgctgaagccctaactgattttgcaaaacatatccgtggtttatttgttgctaccgtttacggtggccaatcatacacaccacaacttcgtgatttagcccgtggcccacaaattgttgttggtacaccaggtcgaatgatggatcacatcaaaaaaggtcgtttaaaattagacaatcttaaagcatgtgttcttgatgaagctgatgaaatgttaaacatgggtttcttagaagacatcgagtggatcttgaatcaaattcctgatcaaactcaaatggcgttcttctctgcaactatgccagcaccaattaagaaaattactaatcaattcttaactgatcctatacacgtaaaaattgcggtacaaaaatcagataagccaaaaataactcaaaaatcatggactgtaggccgtataggcaaaacagttggtttagagcgtattgctgaagttgttgattacgatgcaatgattgttttcgttcgtacacgtaacgatacgttagtacttgctgagcacttagtaagcaagggctttaaagcttcagcattaaacggtgacatgcaacaacaagatcgcgagcgtattgttgagcaattaaaaaatggtcgcatcaatattctaattgcaactgacgttgtagcccgtggattagatgtaccacgtattacacacgttattaactacgatttaccgcatgattctgagtcttatgttcaccgtattggtcgtacaggccgtgctggtcgtgaaggcgaagctattttgtttgcttcacaccgtgaagtgcgtagcttaagccgtttagagcgtattactgaaggtaagattgaagtatttgatatgcctacagctgagcaactaggtcaagcacgtattgaacgtactcaggctgctttagtaaaagcaatggaagtaaacgacttagcgaatttccaagcaatcgttagtcaaatggctgagcaaagcaatacgacaccacttgagcttgctgctgcattattatttgatcgtcaaattgcacttcctttccaccctaaggcggatccggtagagcgtgagtttgctgctcgttcagatcgcggtggtcgtgaccgtaatgatcgttttgaccgtaatgatcgtagcgagcgagctccacgcgaacgttcagagcgtccacgtcgtgataacggtgagtttgatacatatcgctttaacgttggccgtacgcatggtgtgcgtccaggtgatatcgttggtgctgttgcaaatgaaatcaaaattgattcaaatgatatcggtcaaattcgtttatttgatggtttcacacatgttgatttacctaaaaacatgccaaaaccagcatttgaaaaattacagcaagttttaatacgtaaacataagatttcaccaagtttggttactgctgaacaagctgctgcagctgattcacagcgtgaagaacgtgctccacgttcagatcgtaatgatcgtgcaccacgtgagttccaacctcgtcgtcgtaacgagcgtaataatgaccgtggcgataaaaagccagtgcgtagttttaaagctagcggtgaaggtcgtagccgtccaagttttgaaggttaa

SEQ ID NO: 65537 - protein, 624 aa, Pseudoalteromonas tunicata D2
MTDTTQVRFDQLNLLAPVLQAINEMGYITPTPIQSQAIPSLLAGKDVLGEAQTGTGKTAAFGLPLLSRLDADLKQPQMLVVCPTRELAIQVAEALTDFAKHIRGLFVATVYGGQSYTPQLRDLARGPQIVVGTPGRMMDHIKKGRLKLDNLKACVLDEADEMLNMGFLEDIEWILNQIPDQTQMAFFSATMPAPIKKITNQFLTDPIHVKIAVQKSDKPKITQKSWTVGRIGKTVGLERIAEVVDYDAMIVFVRTRNDTLVLAEHLVSKGFKASALNGDMQQQDRERIVEQLKNGRINILIATDVVARGLDVPRITHVINYDLPHDSESYVHRIGRTGRAGREGEAILFASHREVRSLSRLERITEGKIEVFDMPTAEQLGQARIERTQAALVKAMEVNDLANFQAIVSQMAEQSNTTPLELAAALLFDRQIALPFHPKADPVEREFAARSDRGGRDRNDRFDRNDRSERAPRERSERPRRDNGEFDTYRFNVGRTHGVRPGDIVGAVANEIKIDSNDIGQIRLFDGFTHVDLPKNMPKPAFEKLQQVLIRKHKISPSLVTAEQAAAADSQREERAPRSDRNDRAPREFQPRRRNERNNDRGDKKPVRSFKASGEGRSRPSFEG

SEQ ID NO: 65538 - DNA, 1965 bp, Photobacterium sp. SKA34
  CDS (1)..(1965): transl_table=11
gtgcttgaggttgctgttgcagaacccgtatgtagcaaaggggccccgtttttaagtcgttcatatattgggatcccaatgcaagaaactgtaacagaatttcgccaactagacttggccgacacacttctatctgcactagataacatgggctttgtagcgccaacgccgattcaggcagcgtctatacctctactattaactggtactgatgctcttggtaaagcgcagacaggtactggtaaaacagcagcattctcactgcctgtactaaacaaagttgacttatctcagcacaagccacaagcaattgttatggctccaacgcgtgagcttgcaattcaggttgctgcggaaattaaagtacttggtcaaaatatcaaaggcttaaaggttcttgagatttacggcggtgcttcaatcgttgatcaaatgcgtgcacttaaaaatggtgctcatatcgttgttggtacacctggtcgtgttaaagaccttatctcacgtaagcaacttcaactagacgaagtacatacttttgtgcttgatgaagctgatgaaatgttgaagatgggctttgttgacgatgtaacttggatcatggaacaagcaccagaaacagcacagcgtgtgcttttctctgcaactatgcctccaattgttaaagaaatcgttgatcgtttcctacgtaaccctgcacgtatcgatgttgctggtgaaaaccgtactgtttctaaagtagagcagcagttctgggttgttaaaggcgtagagaaagacgaagcaatgagtcgtctacttgaaactgaagatactgatgcatcaatcgtattcgttcgtactcgtcaagatactgagcgtctagctgattggttatcatctcgtggctttaaagctgcggcacttcacggtgatattccacagtcgctacgtgagcgtactgttgatcacatcaaacgtggtgttatcgatattctagttgcaactgacgttgtagcacgtggtcttgatgttccacgtattactcacgtatttaactacgacatcccgtttgatgttgaatcttatattcaccgtatcggtcgtacaggtcgtgcaggacgtgctggtaaagcgattctattagttcgcacaaaccaaattcgtatgcttcgtactatcgagcgtgttactaaatctcgcatggaagaaattcaacttcctctacgtgatttagttgctgcatctcgtttaaaccgtttaggtgaagaactagcagcacaaaaagaacaaacaagtgtagaagcatttgttgaacttgtagaaaaactacaagagtcaatcgatgttgatgcagcaacactagcagcaatgcttcttcagcgtcagcaaggtaaccgtcctttattctataaaggtccagacccaatgatcgcagctatcgaacgtgaatcacaacgccgtgagcgtcgtggtaacgatcgtgaccgcggtgagcgtggtgaccgtcgcgagcgcggtgaacgtcgttcatacaacaatgctgattgggatacttatcagttacaagttggtcgtgagcaaggtgttcaggttaaagatatcgttggcgcaatcgcaaacgaactaggcttaagcaaagagtttattggtgcaatcaaacttgctccaacgcatacttttgttcagcttcctaagaagatgacagcagaagtggcttctcagcttaagaaactacgcattcgtcaaaatgatgttaaagctgtagttgttgaaggcgaagttcttcgtgaacaccgtcctcgtagcggtaaccgtgatggtaatcgtgacggcaaccgtggtggctaccgtggtaaccgtgatggcaatcgtggtggtgagcgtggtggcgagcgtcgttttgaccgcaatcgtggtaatgatactcgtggtggttaccgtggcaaccgcgatggtgcacctcgtaagcctcatacagaagcataa

SEQ ID NO: 65539 - protein, 654 aa, Photobacterium sp. SKA34
MLEVAVAEPVCSKGAPFLSRSYIGIPMQETVTEFRQLDLADTLLSALDNMGFVAPTPIQAASIPLLLTGTDALGKAQTGTGKTAAFSLPVLNKVDLSQHKPQAIVMAPTRELAIQVAAEIKVLGQNIKGLKVLEIYGGASIVDQMRALKNGAHIVVGTPGRVKDLISRKQLQLDEVHTFVLDEADEMLKMGFVDDVTWIMEQAPETAQRVLFSATMPPIVKEIVDRFLRNPARIDVAGENRTVSKVEQQFWVVKGVEKDEAMSRLLETEDTDASIVFVRTRQDTERLADWLSSRGFKAAALHGDIPQSLRERTVDHIKRGVIDILVATDVVARGLDVPRITHVFNYDIPFDVESYIHRIGRTGRAGRAGKAILLVRTNQIRMLRTIERVTKSRMEEIQLPLRDLVAASRLNRLGEELAAQKEQTSVEAFVELVEKLQESIDVDAATLAAMLLQRQQGNRPLFYKGPDPMIAAIERESQRRERRGNDRDRGERGDRRERGERRSYNNADWDTYQLQVGREQGVQVKDIVGAIANELGLSKEFIGAIKLAPTHTFVQLPKKMTAEVASQLKKLRIRQNDVKAVVVEGEVLREHRPRSGNRDGNRDGNRGGYRGNRDGNRGGERGGERRFDRNRGNDTRGGYRGNRDGAPRKPHTEA

SEQ ID NO: 65540 - DNA, 1254 bp, Oceanospirillum sp. MED92
  CDS (1)..(1254): transl_table=11
atgtcattcgtttctcttggtctttccgattttttcacctctacgcttagctcccttgggtataaagaacccaccgccattcaggacaaagcgatccccgctgtactcaaagggcatgatttaatcgctgccgcagaaactggctcaggaaaaaccgcagggtttgtccttcccttgcttgagaaactgcattcgattccagcaccgggtaacaatctgacacatgccctggtattggtccctacccgtgaattagccgttcaagtgagtcaatctgttgatagatacagtgaaaactgcccccgtaaaatccgcagtgtcgcgatctacggtggggcagcgatcaatccgcagatgcagtcattgagtaaaggctgcgatattgtggtcgcaacaccggggcgccttctggatctgatgcgtaaaaatgcacttgaccttcgtggtcttaaagcactggttttggatgaagccgacaggatgctggatcttggttttgccgatgagcttgatgacattctggatcaaacaccaggaaacgttcaaaccttgttgttttctgcaaccttccctgacaaagtcaaagagctgacggaggagttactccgcaaccctgttgaaatatcggttaaacaggaagcaaccctacccgatcagctgcatcaaagggctattgaggtcgatcgaaataaccggaccatgctattgaagcacctgatcaaacaggaaaaatggcagcaattacttatctttgtaggtagcaaacgaacggcgaataatattgaacttaaactgtatcgatctggaatccagtcctcgaccctgcatggtgatctgacccaaaaagagcgccttggtgctttggaagatttcagcaaaggccgctgtaaaatccttattgccacagatctggccgcacgaggtattgatatcccgtccctgccctgcgtgctcaactatgaccttcccagagcaacatccgactatgttcaccgggcaggccgaactgccagggcgggtgaagcgggtttagccatctcctttgtcgatcatgagagtgatgcacactttaagctgatcgaaaaacgtatccgcatgaaaattccacgggaacagatccctggatttgaaagggctcaagaaccgcctaaggaagtcactcagaaaaaaggccaggctcctgtgaaaggcaaacgtaaaagcaagaaagataaattaagagaagccgcagcgttggcggcgaagaatagttaa

SEQ ID NO: 65541 - protein, 417 aa, Oceanospirillum sp. MED92
MSFVSLGLSDFFTSTLSSLGYKEPTAIQDKAIPAVLKGHDLIAAAETGSGKTAGFVLPLLEKLHSIPAPGNNLTHALVLVPTRELAVQVSQSVDRYSENCPRKIRSVAIYGGAAINPQMQSLSKGCDIVVATPGRLLDLMRKNALDLRGLKALVLDEADRMLDLGFADELDDILDQTPGNVQTLLFSATFPDKVKELTEELLRNPVEISVKQEATLPDQLHQRAIEVDRNNRTMLLKHLIKQEKWQQLLIFVGSKRTANNIELKLYRSGIQSSTLHGDLTQKERLGALEDFSKGRCKILIATDLAARGIDIPSLPCVLNYDLPRATSDYVHRAGRTARAGEAGLAISFVDHESDAHFKLIEKRIRMKIPREQIPGFERAQEPPKEVTQKKGQAPVKGKRKSKKDKLREAAALAAKNS

SEQ ID NO: 65542 - DNA, 1779 bp, Oceanospirillum sp. MED92
  CDS (1)..(1779): transl_table=11
atgaattcagaagatcagctatcatttgctgaacttggcattgcagaacccgttttaaaagtactcgacgagatcggttacgaaacgccttctccgattcaagcagctagtatcccgcaccttttagaaggtcgcgacctgctaggtattgctcaaacaggtactggtaaaacagcagcgttctcactgccgttactgtctcggctgaaccttaagagccgtaacacacagcttctgattctggcacctacccgtgaattggcaatccaggttgctgaagcttgccagacatacgcacgcaacttaccagacttccatgtactgcctatctacggcggccaggcttatgatagccagctgcgtcagttgaagcgcggtgctcaggttgttgtcggcacaccaggccgtgttatggaccacatgcgtcgtggttcgctaaaactggacaaactacaagcgctggtacttgatgaagccgacgaaatgttacgcatgggcttcatcgatgatgttaactgggttctggagcacactccggaagatcgtcagattgccctgttctctgcaactatgcctgcgcagatcaaatcagttgccgaagcgcacctgaatgatcctgccgaagtcagaattaaagcgaaaacagcaaccgctactaccatcacccagaaatacctacgtgtatctggtaatcaaaagctggacgccgtcacccgcatccttgagatgcaggcatttgatgcaatgctggtctttgttcgtactaaatcagctacggtagaactggcggaaaagttatcagctcgtggttatgcctgcgaagctttgaatggcgatatttcgcaaaatctgcgtgagcgcacaatcgacaaactgaagcgcggccagatcgacattctgattgctactgatgttgtcgcacgtggtcttgacgttgagcgtatcagccacgtactaaactacgatatcccatacgataccgaatcttacatacaccgtattggccgtaccggccgagcgggtcgtgaaggtgaagcaattctgttcgtttctccacgtgagcaacgtatgctgaaatcgattgaacgcgcaacgcgccagaagatcgaatccatgcaactgccttctacggatgatatcaacgaaaaacgtgttcagcgtttcgtagatcgtatcagccagacaatcgacggccaggatctggatttcttccgcaatctgctgactgaatatcagcaggagcatgatgcagacccaatcgtaatcgcttcagctttagctcatcttcttcagggtgaaacgccattattgatgaaagagcaggaaaggccaccacgtcgcgaacgtgaaggccgagatggtcgcgataaccgagacaagcgcccaccaaaaggtatgtctactaaggcgaaagcgcttaaggaccatcctgatgtggagatgaaacgctatctgatcaatgtcggtcacgacaatgatgttgcgccgaaaaacattgtcggcgctattgccaatgaagcagatctggatgctaactttatcggtagtatcgaaatctttgatgattgctctactgtagacctgccagcaggcatgccaaaatctgttctacagcaacttcgcaaagttgttgtatgcggccagcgccttaatatcaaggaagcggctggaggcggtggcggtcaacgccgtggcggtggaaatcatcgtggaaaaggcggaaaccaccgtggcaagccacgtcgcaacaaagattcaagaaagtctaaagagagttaa

SEQ ID NO: 65543 - protein, 592 aa, Oceanospirillum sp. MED92
MNSEDQLSFAELGIAEPVLKVLDEIGYETPSPIQAASIPHLLEGRDLLGIAQTGTGKTAAFSLPLLSRLNLKSRNTQLLILAPTRELAIQVAEACQTYARNLPDFHVLPIYGGQAYDSQLRQLKRGAQVVVGTPGRVMDHMRRGSLKLDKLQALVLDEADEMLRMGFIDDVNWVLEHTPEDRQIALFSATMPAQIKSVAEAHLNDPAEVRIKAKTATATTITQKYLRVSGNQKLDAVTRILEMQAFDAMLVFVRTKSATVELAEKLSARGYACEALNGDISQNLRERTIDKLKRGQIDILIATDVVARGLDVERISHVLNYDIPYDTESYIHRIGRTGRAGREGEAILFVSPREQRMLKSIERATRQKIESMQLPSTDDINEKRVQRFVDRISQTIDGQDLDFFRNLLTEYQQEHDADPIVIASALAHLLQGETPLLMKEQERPPRREREGRDGRDNRDKRPPKGMSTKAKALKDHPDVEMKRYLINVGHDNDVAPKNIVGAIANEADLDANFIGSIEIFDDCSTVDLPAGMPKSVLQQLRKVVVCGQRLNIKEAAGGGGGQRRGGGNHRGKGGNHRGKPRRNKDSRKSKES

SEQ ID NO: 65544 - DNA, 1233 bp, Oceanospirillum sp. MED92
  CDS (1)..(1233): transl_table=11
atgcttgctgatatcgcttttcatccccaacttgaagagaatctaaagagttcggagctgttatcagcaactgaggtccagcagcaggcgattcctttagcgcttgagggggctgatttgttgatcagttctccaacgggatcgggtaagacggctgcttatcttatccctgtgatacaagaactgagtgctgggaaatctccgaccaggcaacctaaagctatcgtgcttgtccctgtaagagagcttgccgagcagattgccagttttttcgacaagctagcagcgggtctggatctcaatgctgttgccattgttggtggagaggacttcaaaaaacaagagaaacaactggcgcgtgctgatctggttgtggcgacccccggtcgactcattcctcacttagaaaatcgctccattgagttggacagtctggacctcttggttttggatgaggctgatcgcattctggaaacaggcttcaaagaggcacttgatcagatactgacactttgtcctgaagcgcgtcagacgcttttagtttctgcaactttacctacctcggtcaggaaattagctgagcggatcttacaagagcctgagtgggtcagagttggccaaaagcgtgaagttgaagcgaatattgagcaaagaattattctttctgatgatcagacgctaaaggataagcaactgtgttggttattggaaaatgagagttacgataaagctgttgtgttttgtaatagcaaaaccgaagctcggcgtctggatggttttattcgctaccataagttcaaggcggctttactgcacggtgatgtccagcaaaaaggacgctttgctactatcgaagggtttcgtaagggcacaacaaagattttggtaacgactgaccttgcggcaagaggtttggacattgaaggtgttgatctagtcattaataccgagataccacgtaaaggtgatctgtatattcacagaatagggcgcacaggtcgtggtggtgcatcgggtaaagcggtgtctttaatctcgcctgcagaatggaatctgatgtcttcaattgagcggtatttgaaaacccgttttcgcaagtctgaaatatcagggttaatcgctaattataaaggcccaaaaaaagttaaggcgtccggcaaggcagctggatcaaaaaagaagaccgttaaaaagaaaacagctaaaactaaagctgttaagaaaaagaaataa

SEQ ID NO: 65545 - protein, 410 aa, Oceanospirillum sp. MED92
MLADIAFHPQLEENLKSSELLSATEVQQQAIPLALEGADLLISSPTGSGKTAAYLIPVIQELSAGKSPTRQPKAIVLVPVRELAEQIASFFDKLAAGLDLNAVAIVGGEDFKKQEKQLARADLVVATPGRLIPHLENRSIELDSLDLLVLDEADRILETGFKEALDQILTLCPEARQTLLVSATLPTSVRKLAERILQEPEWVRVGQKREVEANIEQRIILSDDQTLKDKQLCWLLENESYDKAVVFCNSKTEARRLDGFIRYHKFKAALLHGDVQQKGRFATIEGFRKGTTKILVTTDLAARGLDIEGVDLVINTEIPRKGDLYIHRIGRTGRGGASGKAVSLISPAEWNLMSSIERYLKTRFRKSEISGLIANYKGPKKVKASGKAAGSKKKTVKKKTAKTKAVKKKK

SEQ ID NO: 65546 - DNA, 1734 bp, Xanthobacter autotrophicus Py2
  CDS (1)..(1734): transl_table=11
atgttgctatgcgtcgtccgagatatgtcgaatctagcgcgccgaccgacgacccctcgtctgagcccgtacggcacgggacgttcgatcagcggcgcgccgccgcatccaaaagatgcaatgtcattttccgaactcggcctgagcgaaaaggtcctcgcggcagtcgctgacaccggctatacgcagccgacgcccatccaggcccaggccatcccccatgtgctggcgcgccgagatgtgctcggcctcgcgcagacaggcaccggcaagactgccgccttcacccttcccatgctgacgctgcttgagcacggacgggcccgcgcccgcatgcctcgcaccctcatcctggagccgacccgcgagctcgcggcgcaggtggaagagaacttcacccgctacggcaagaaccacaaactgaacgtcgccctgctcatcggcggcgtgtccttcggcgaccaggattccaagctgctccgcggcgtggacgtgctcatcgccacccccggccgcctgctcgaccatgtggagcgcggccgcctgctcctgtccggcatcgaggtgctcgtcatcgacgaggccgaccgcatgctggacatgggcttcatcccggacatcgagcgcgtctgcaagctcgtgcccttcacccgccagaccctgttcttctcggccaccatgccgccggagatccagcgcctggtgtcgcagttcctgtccaatccggtgcgagtggaagtgtcgaagccggcctccaccgccgccacggtcacccacatgctggtcgcctccggacgggaggactacgacaagcgcgaggtgctgcgcgagctcatccgcaattgcgacgggctgcagaacggcatcatcttctgcaaccgcaagcgcgacgtggcggtgctgcaccgctcgctgcagaagcacggcttcaacgccgttgcgctccatggcgacatggaccagcacgctcgcatcaaggccctcgaccagttccgctccggcgaggccacccttctggtggcatccgacgtggcggcccgcgggctcgacatcccggcggtgagccacgtcttcaactatgacgtgccccaccactcggaagactatgtgcatcgcgtgggccgcaccggccgcgccggccgcgccgggacggcctatacgctggtcacccacaccgacgccaagtcggtgacggccatcgaaaagctgatcggcaacgccgtgccctggcacggcgcccccctcggcgatgccccgcccgcgtccgagcggcgggagcgccgcgaggatggcggccggctgcgcggcaagcgccgcgtggagaaggagccccgcgaggcccgtcccgagcgcgagccccgtgcggagcgggagccccgtcccgagcgggaaccgcgtgccgaccgcgagccccgcgtcgcccgcgagccgcgtccggagcgggaaccccgggcggagcgcgccccgcgtcccgagcgtgagccccgtcgcgagcgggaaccccgtcgcgaacgcgaagccccggcaggcgaggtgcgcgccagcgaaccccgcgcggaggcggaaacccgcgcgccgcgtccggatcggcaggagcgaggccgtcgtcccgcccgcgaggatggtcccgaggcccgtctggcacggcgtgaacgcgcccccgccgccgaacccgcggacatgagccacctgcccgccttcctgctgcgcccggtgcgcgtgaaggccggctga

SEQ ID NO: 65547 - protein, 577 aa, Xanthobacter autotrophicus Py2
MLLCVVRDMSNLARRPTTPRLSPYGTGRSISGAPPHPKDAMSFSELGLSEKVLAAVADTGYTQPTPIQAQAIPHVLARRDVLGLAQTGTGKTAAFTLPMLTLLEHGRARARMPRTLILEPTRELAAQVEENFTRYGKNHKLNVALLIGGVSFGDQDSKLLRGVDVLIATPGRLLDHVERGRLLLSGIEVLVIDEADRMLDMGFIPDIERVCKLVPFTRQTLFFSATMPPEIQRLVSQFLSNPVRVEVSKPASTAATVTHMLVASGREDYDKREVLRELIRNCDGLQNGIIFCNRKRDVAVLHRSLQKHGFNAVALHGDMDQHARIKALDQFRSGEATLLVASDVAARGLDIPAVSHVFNYDVPHHSEDYVHRVGRTGRAGRAGTAYTLVTHTDAKSVTAIEKLIGNAVPWHGAPLGDAPPASERRERREDGGRLRGKRRVEKEPREARPEREPRAEREPRPEREPRADREPRVAREPRPEREPRAERAPRPEREPRREREPRREREAPAGEVRASEPRAEAETRAPRPDRQERGRRPAREDGPEARLARRERAPAAEPADMSHLPAFLLRPVRVKAG

SEQ ID NO: 65548 - DNA, 1530 bp, delta proteobacterium MLMS-1
  CDS (1)..(1530): transl_table=11
atgagcaacgacgatatagtgcatttttcccaactgcccctggccccggcggtcagccaggcggtggccgagatcggctacgagaccccgacccccatccaggccgccgccatcgggccgctgctggccggccgcgatctgctgggccaggcccagaccggcaccggcaagaccgccgccttcgcgctgcccttgctgagccgcctggataccagccgtaagtatccccaattgctggtcctggcccccacccgggaactggccctgcaggtggccgatgagatccaggcctacagccgccatctgcccggtttccaggtgctgcccctgtacggcggccagaacatggcccagcagttgcgcgccctgcaacgcggggtccaagcggtggtcggcacccccggccgcatccaggatcatctccgccggggcaccctgaaactggaccgcctgaccgcggtggtcatcgacgaagccgacgagatgctcaagatgggctttgtcgacgaggtggaaaagatcctggcccagaccccgccccagcgccaggtcgccctgttctccgccaccatgacccaggagatcatgcgaatcgcccgacgccatctcaaggaccccgaggagatccggctgaaaacccggaccaccacggtggagaccatcagccagcattactggctggtccagggcctgcagaaactcgacgccttaacccggatcctggaagccgaagcggtggaggcgatgctgatcttcgtccgcaccaaggtggccaccgtcgagctggccgagaaactggcggcccggggctttgccagcgccgccttaaacggcgacatgacccaggggttgcgggagaagaccgtcgaacagctcaaggatggcaccctggatatcgtggtggccaccgatgtcgcggcccggggcctggatgtccagcggatcagccacgtggtcaactacgatatcccctacgacaccgagtcctacgtccaccggatcggccgcaccggccgggccggccgccaggggcaggcgatcatcttcgtggccccccgggagatgcggatgctccacgccatcgaaaaagccacccggcagcagatctcccgcctgcaactgcccagccgccgggaggtcaaccagcggcggatcgaccagttcaaggaaaagatcatcgccgccagccgccagccgggcctggagttcttcgaggaactgatcgcccaggccacggcggaggccgaaatcgactcccagcaactggccgccggcctggcctacctgctgcaacaggcacggccgctgctgcccgaggaaggagggcctcccccggccgaggagcaacagcagcggccccggccccaggggccacggaaaccggcgccgaccggccgcctgcggggccagtacccgggccggcgggaatcgccgtcccgcaagggcaaagcccaaggcaaagcccagggcaaacgcaccccccagggacgtaccggcggcggcccgaccacccatcgaaaaaaaccgtaa

SEQ ID NO: 65549 - protein, 509 aa, delta proteobacterium MLMS-1
MSNDDIVHFSQLPLAPAVSQAVAEIGYETPTPIQAAAIGPLLAGRDLLGQAQTGTGKTAAFALPLLSRLDTSRKYPQLLVLAPTRELALQVADEIQAYSRHLPGFQVLPLYGGQNMAQQLRALQRGVQAVVGTPGRIQDHLRRGTLKLDRLTAVVIDEADEMLKMGFVDEVEKILAQTPPQRQVALFSATMTQEIMRIARRHLKDPEEIRLKTRTTTVETISQHYWLVQGLQKLDALTRILEAEAVEAMLIFVRTKVATVELAEKLAARGFASAALNGDMTQGLREKTVEQLKDGTLDIVVATDVAARGLDVQRISHVVNYDIPYDTESYVHRIGRTGRAGRQGQAIIFVAPREMRMLHAIEKATRQQISRLQLPSRREVNQRRIDQFKEKIIAASRQPGLEFFEELIAQATAEAEIDSQQLAAGLAYLLQQARPLLPEEGGPPPAEEQQQRPRPQGPRKPAPTGRLRGQYPGRRESPSRKGKAQGKAQGKRTPQGRTGGGPTTHRKKP

SEQ ID NO: 65550 - DNA, 1845 bp, Oceanobacter sp. RED65
  CDS (1)..(1845): transl_table=11
atgtcagaatcatccactggctttgccagtcttggtcttccttttaatttattgcgtgctatcgaagagcaaggttatgaacaacctagcccgatccaagagcagagtattcctcaccttttggaaggtaaagatgtattaggtttagcgcaaacgggtaccggtaaaacagcagcctttaccctaccattattggctcgcactcagaatgaagtgcgcgagccgcaggttttagtcttggcccctacccgcgaattagcccagcaagtagcgatggcggtggagtcttacagcaagcatgaatcgaatgtaaaagtcgctagcatttatggcggtagcgattttggttctcaattccgtgcacttaagcagggtccacaatgggtagtgggtacgcccggtcgcgttatggatcatattcgtcgcggtactttgaagcttgaaggcattcgtgccgtagtgcttgatgaagctgacgaaatgttgcgtatgggcttcattgatgatgtggattgggtattggatcaagtacctgaaaagcgtcagatcgcactatttagtgccaccatgcctaagcaaattaaagcggttgccgaaaagcatttgcgtgaaccgactgagattcgaattaaaagcaaaaccgcgaccaatgagtctatcgagcagaaatattggctagtaaaaggtgtcgataagaaccaagcattgttgcgcatctgtgagaccagcgaattcgacgccatgatggtgtttgttcgtactaagcaagccactgaagaggtagcagattatatgcgctctcatggtttacgctgtgaagcattaaacggtgatgtggctcaagcacagcgagagcgtgcggttgatcgtctgaagaagggtcaagtggacatgctagtagcaacggacgtggctgcacgtggtcttgacgtagagcgtatcagtcacgtggtgaactatgatattccttatgatgcagagtcgtacgtacaccgtatcggccgtactggtcgtgcaggtcgttcaggtgaagcgattttgtttgtgcgtccccgtgagcgccgtatgctgagcaccatcgagcgtgttacacgtaagaagattcagcaaattgaattgcctacggcgaaagaagtgaacgctaaacgtcgcgatcaatttaaagtgcgagcgcttgaacacattgaaggtcgtgatatagagatctttaaaaagattgccagtgaaattttggctgagcaaccagcattagatccgattgaattggcagctgcctttgcgcaaatgtcacaaggaaacaagccattatttatggatgaatcggaaccacgctttaaaccagaaaccgatcgtggtgagcgcggcgaacgaaaagagcgtcgtaataacagtggccgagaagagcgtaagcctattgaattggaagccatgccgttgaaagatttcccggatgtggaaatgcgtcgctatcgactagcggttggctataaagacggggttaagccaggcaatatcgttggcgccatagccaacgaagcggacattgaaagcaagttcattggccatattgagatttatgatacattcgcatcggtcgatttaccatcgggcatgcctgaagagacattgacacatctgaagaaagcacgtgtttgtggtcgtccgattaatatcgaaccattgaagaaccgtggtgctggcggtggtcaaaagccacgccgcaatgcgaaaggtggcaacaaaggtaagaagcctcaaggcgagcgtggtcagaataagggcggtgctaagtcaggtaagcctaagcgtaccggtgatcgcaagcctcgcatgagtgccctgtaa

SEQ ID NO: 65551 - protein, 614 aa, Oceanobacter sp. RED65
MSESSTGFASLGLPFNLLRAIEEQGYEQPSPIQEQSIPHLLEGKDVLGLAQTGTGKTAAFTLPLLARTQNEVREPQVLVLAPTRELAQQVAMAVESYSKHESNVKVASIYGGSDFGSQFRALKQGPQWVVGTPGRVMDHIRRGTLKLEGIRAVVLDEADEMLRMGFIDDVDWVLDQVPEKRQIALFSATMPKQIKAVAEKHLREPTEIRIKSKTATNESIEQKYWLVKGVDKNQALLRICETSEFDAMMVFVRTKQATEEVADYMRSHGLRCEALNGDVAQAQRERAVDRLKKGQVDMLVATDVAARGLDVERISHVVNYDIPYDAESYVHRIGRTGRAGRSGEAILFVRPRERRMLSTIERVTRKKIQQIELPTAKEVNAKRRDQFKVRALEHIEGRDIEIFKKIASEILAEQPALDPIELAAAFAQMSQGNKPLFMDESEPRFKPETDRGERGERKERRNNSGREERKPIELEAMPLKDFPDVEMRRYRLAVGYKDGVKPGNIVGAIANEADIESKFIGHIEIYDTFASVDLPSGMPEETLTHLKKARVCGRPINIEPLKNRGAGGGQKPRRNAKGGNKGKKPQGERGQNKGGAKSGKPKRTGDRKPRMSAL

SEQ ID NO: 65552 - DNA, 1593 bp, Desulfitobacterium hafniense DCB-2
  CDS (1)..(1593): transl_table=11
ttgagtgcagaacgtttacaatcttttggtgaaataagtctgagcaagcaagtgctgcaggcattatcagaaatggggtttgaggagccctctccaattcaaaaagcagccattcccgtggctatggatggtgtggatttaatcggccaggcccaaaccggtacaggaaaaactgccgcctttgggattcccatctgtgaaaaagtcaaccctaagtttcaggcagttcaagccttgattctgacaccaacccgcgaactggccgttcaggtgtcggaagagatcagcaagatcgggaaatatcgccatattaaacccttgcccatttacggaggccaatccatcgaccgtcagatccgggcattgcgcttcggcagccaggtggtggtaggaactccgggtcgtatccttgatcatttaaatcgcggaaccctaaaattgcagtatgtaaaaatggtggttctggacgaagccgatgaaatgctggatatgggctttgttgaggatatagaaacgattcttaagcaagttcccaaagaagagcgccaggtgatgcttttctcggctaccatgccgccggaaattaagaaactggctcagaattatatgcaccagcctaaatccgtagccgtaagccgtgatgagctcactgtgcctttgattgagcaagtcttttatgaagccagagacaaaatcaaagtggatgccctctgtcggattattgatatggaagatatcggtcaagccattatcttctgtcggaccaaaagaggggttgatgagcttgtggccgctctggaggcaagagggtattttgcagatgccctgcatggtgatttaagccaacagcagagagaccgggtcatgaagaagttccgtgacggcaaggttgagttgcttgtggctacggacgtggcagcccggggactggatatcgataacgtaacccatgttattaacttcgacattccccaggatcctgaatcttatgttcatcggatcgggcgtaccggcagagccgggagaaaaggccaggctattaccttggtttcttcccgggaataccgtcaactccgcttgatcgaacgtttgatcaagacccggatcatacgcaaagagttaccgaccctggccgatgtcagtgaacggcaagcggaaaatctcaagaatcagctggttaagattttgcagcgaagccacttgggaacctatcgctccatcgtgggatctttgctggaagagtatgattctatggatgtagcggcagcagccttgaaatttgctgttgagggtgttgaggagcgaagtgaagaggaagatgatattgcttttggcaatactggagcagcccctggtatggtccgcctctttatgaatattggccgtcttcaacaggttcgccctcaggacatcgtccgttggatagctgacgaaagcggaattcccggcaacattatcgggatgatcaacatctatgataaatttacctttgtggaaatccctgaacaacatgccagccgggttctcagctgcatgcatcagaacatgattaaaggccgtaaggtcaacgtggaaccggctaaagccagataa

SEQ ID NO: 65553 - protein, 530 aa, Desulfitobacterium hafniense DCB-2
MSAERLQSFGEISLSKQVLQALSEMGFEEPSPIQKAAIPVAMDGVDLIGQAQTGTGKTAAFGIPICEKVNPKFQAVQALILTPTRELAVQVSEEISKIGKYRHIKPLPIYGGQSIDRQIRALRFGSQVVVGTPGRILDHLNRGTLKLQYVKMVVLDEADEMLDMGFVEDIETILKQVPKEERQVMLFSATMPPEIKKLAQNYMHQPKSVAVSRDELTVPLIEQVFYEARDKIKVDALCRIIDMEDIGQAIIFCRTKRGVDELVAALEARGYFADALHGDLSQQQRDRVMKKFRDGKVELLVATDVAARGLDIDNVTHVINFDIPQDPESYVHRIGRTGRAGRKGQAITLVSSREYRQLRLIERLIKTRIIRKELPTLADVSERQAENLKNQLVKILQRSHLGTYRSIVGSLLEEYDSMDVAAAALKFAVEGVEERSEEEDDIAFGNTGAAPGMVRLFMNIGRLQQVRPQDIVRWIADESGIPGNIIGMINIYDKFTFVEIPEQHASRVLSCMHQNMIKGRKVNVEPAKAR

SEQ ID NO: 65554 - DNA, 1803 bp, Alteromonadales bacterium TW-7
  CDS (1)..(1803): transl_table=11
atgtcagaaccagtcacgtttgaatctctaaatctttctcctgcaattttgaaggcagttgaagagttgggttacaagacaccatctgaaatccaagctcaatgtataccgttattgctagaaagaaaggacgtactgggactagcacaaacgggtacaggtaaaaccgcagcatttgcactgccgttactaaacaatattgacccgtctgtgaaacagccacagatccttgtgctcacacctacacgtgagcttgcgatccaagttgctgaggcatttgaacaatatgcaaaaggtactcgtggtgttgaagtattagcactatacggtggccaaagctacagcattcaattaagcgcacttcgtcgtggcgctcaaatcattgttgctactccgggtcgattaatcgatcatataaaccgtggcactatcaagtttgatgctcttcaagcacttgtacttgatgaagccgatgaaatgttacgtatgggctttatcgatgatgttgaaaacatcatggaaaaaacaccgcgcgaaaagcaaacatgtcttttctctgcgaccatgcctaagcaaattcaaaacataagcagcaaatatatgaataaccctgaacaggttcatatttctgcgcgtaactcgacagtatcgtctgttgagcaagtgttttggaacgcaagcgtacataaaaacaaagcgattgttcgctttttagaagcagagcaatacgaaggcgctattgttttcgtacgtacacgtaacgataccgttcaacttgctgaattattagagcgcgaaggtttctctgcagctccgcttaatggtgacatgaaccagcaagcacgtgaacgcactgttgaccgcttaaaaagtggcatgctgaacgttgttattgcaacagacgtagcagctcgtggtcttgatgtagaccgtttaagcttagttatcaactacgacattccacaagattctgaagcctacgttcaccgtattggtcgtacaggtcgtgcaggtcgtactggtaaagcaattttatttgttaagcataacgaacgttacttacttaaaaatatcattcgtcataccaagtctgaaattgctcaggttgaattaccaacagctaaagttgttgaagaaaaacgtatcgctgcgttacaagcaaaattaagtattgcgcttgaaaacaaagacattacgttctttaacgaagtggctactaacatggctgaaaagcttgaccttcctcttgaaaacttagcgggtgctttactgtgtttggcacagcaacagtcgccaattaaagttgaagaagttaagattcaaccacgtgagcgtaatgaacgcaattcacgtaatgaccgtggtgatcgcggacgtcgtaacgaacgtggtggtgaacgttctgaacgtaaaccgcgcgagcgtaacagccgtgatgcaggccctatggatacttaccgtatcgaagtaggtcgtgagcatggtgttcaggttaagaatattgttggcgcaattgctaacgaagctgatatctcaagcaagtttattggtgacattcgtttacacgatcaacacagcactgttcagttaccacaaaacatgcctaaagatgtactggatcatttccaaaaagtgtttatttgtaaacgcccaatgggtatgacaattacacaagatcaaggcccagctgaaccacgtggcgaacgcccatctggtgatagaaaacgtaacgatggcccacgcggtgacaagcgtagcggacctcgtaaagaacgtcgcccagttagctttaccgctaagtaa

SEQ ID NO: 65555 - protein, 600 aa, Alteromonadales bacterium TW-7
MSEPVTFESLNLSPAILKAVEELGYKTPSEIQAQCIPLLLERKDVLGLAQTGTGKTAAFALPLLNNIDPSVKQPQILVLTPTRELAIQVAEAFEQYAKGTRGVEVLALYGGQSYSIQLSALRRGAQIIVATPGRLIDHINRGTIKFDALQALVLDEADEMLRMGFIDDVENIMEKTPREKQTCLFSATMPKQIQNISSKYMNNPEQVHISARNSTVSSVEQVFWNASVHKNKAIVRFLEAEQYEGAIVFVRTRNDTVQLAELLEREGFSAAPLNGDMNQQARERTVDRLKSGMLNVVIATDVAARGLDVDRLSLVINYDIPQDSEAYVHRIGRTGRAGRTGKAILFVKHNERYLLKNIIRHTKSEIAQVELPTAKVVEEKRIAALQAKLSIALENKDITFFNEVATNMAEKLDLPLENLAGALLCLAQQQSPIKVEEVKIQPRERNERNSRNDRGDRGRRNERGGERSERKPRERNSRDAGPMDTYRIEVGREHGVQVKNIVGAIANEADISSKFIGDIRLHDQHSTVQLPQNMPKDVLDHFQKVFICKRPMGMTITQDQGPAEPRGERPSGDRKRNDGPRGDKRSGPRKERRPVSFTAK

SEQ ID NO: 65556 - DNA, 1827 bp, marine gamma proteobacterium HTCC2143
  CDS (1)..(1827): transl_table=11
atgtcgacccctgaagtcaccagttttaccgaactggcgctatctgctcctgtccaaaaagccgtcagtattgtcggttacgagcaaccatcgcccatccaagcagcgactatcccgcatctcctcaatggcgatgatctactgggtgtggcacaaaccggaaccggtaaaacggctgcatttgcacttcctttgctcagccgaattgaccttaagaaaaattcgccacaggtactggtactggcacccacgcgggagttagccattcaggttgctgaagcctttaaaacctatgctagtcaaatgaaaggattccacgttctgccaatctacggcggtcaggatatgagcggccagttgcgtcaattgaaacgaggcgctcatgttgtcgttggcaccccgggacgagtgatggatcatctgcgcaggggcagtctcaacctagacggcctcaccggcttggttctcgacgaagctgatgagatgctgcgtatgggcttcatcgatgatgtcgaatggatattggaacacacaccgccaaagcgccaggttgcgctattttcggcgactatgccaaaacctatccgtaaagtcgccgaccgctacctatctgaccccaaagaggtccgaattgccaccgacgcgacgacggcaccacgcatcgaacaacgctacctgatcgtcaacggcttcgaccgtaaactggatgcaatcacacgcattctcgaagctgatgattttgacgcgatgattatttttgtccgcaccaaaacagcaacagctgaacttgcggagaagcttgaagcgcgtggttattcggcctcagccctgaatggtgatatgaaccaagcgctgcgtgaacgcacgattaaccgtctgaaaaagaaacagctggatattattgtcgcaacagatgttgccgcccgcggtattgacgttgagcgggtgagccacgtactcaatttcgatattccttatgatcccgaagcctacgttcaccgcattgggcgcaccggtcgcgcaggccgtgaaggaaaagctattttatttgtagctccgcgtgaaaaacgcttactgcatacgattgaaaaatccacacgacaaacaatcctgcctatggacctgcccagtggcagtgaggtgtccaataaacgtattcaaagctttaaggaactattaactgaaacattggccaaccagtcgctggatttctttcatgatattctcgctggatacagcgttgagcacgaccgctcctcagaagatattgcctgcgcacttgcctacctcatacaaaaagacaaaccgctgcaagttgccgacgccccgcagccaaaaaggcgccgcgaaaccgaaaagcccaacaatcgagagagcgaaggtcgtcgaaccagtgagcgacgcccagaaagaacacgggaaaagtcgcctagaacagcatcaaaaagtgatgaccttaatatggtcaaataccggattgaagttggtcgcaatgatgacgtcaaacccggtgatattgttggagccatcagcaacgaagccggaattgatggcggtgctattgggcatatcaaacttcacgatgaatacagtacggtcgacctacctgcgggcatgcccaaagaaatcctgcatcatttgaggaaagtccgtatttgtaatctgccaacgcaaattaaactcgataacggtgacggtgcgagtgatagcacaggtgctaagcccagcgcaaaaaaacgcaaacccaaagctgatgcaaaaaaaaccggggctaaggcgtctaaaggcaaaggcgaagtaaaagctaaaaaacgcaaacctgcctag

SEQ ID NO: 65557 - protein, 608 aa, marine gamma proteobacterium HTCC2143
MSTPEVTSFTELALSAPVQKAVSIVGYEQPSPIQAATIPHLLNGDDLLGVAQTGTGKTAAFALPLLSRIDLKKNSPQVLVLAPTRELAIQVAEAFKTYASQMKGFHVLPIYGGQDMSGQLRQLKRGAHVVVGTPGRVMDHLRRGSLNLDGLTGLVLDEADEMLRMGFIDDVEWILEHTPPKRQVALFSATMPKPIRKVADRYLSDPKEVRIATDATTAPRIEQRYLIVNGFDRKLDAITRILEADDFDAMIIFVRTKTATAELAEKLEARGYSASALNGDMNQALRERTINRLKKKQLDIIVATDVAARGIDVERVSHVLNFDIPYDPEAYVHRIGRTGRAGREGKAILFVAPREKRLLHTIEKSTRQTILPMDLPSGSEVSNKRIQSFKELLTETLANQSLDFFHDILAGYSVEHDRSSEDIACALAYLIQKDKPLQVADAPQPKRRRETEKPNNRESEGRRTSERRPERTREKSPRTASKSDDLNMVKYRIEVGRNDDVKPGDIVGAISNEAGIDGGAIGHIKLHDEYSTVDLPAGMPKEILHHLRKVRICNLPTQIKLDNGDGASDSTGAKPSAKKRKPKADAKKTGAKASKGKGEVKAKKRKPA

SEQ ID NO: 65558 - DNA, 1326 bp, marine gamma proteobacterium HTCC2143
  CDS (1)..(1326): transl_table=11
atgacattttccacacttggattgagcgatccacttttacaggcggttgaagagcttggttatacaaaacctaccgctattcaggaacaaacgattcccaccattctagcaggccgtgatctccttgcggcctctcagacaggtacagggaaaaccgcgagctttatactaccggtactgcaaaagttgactggcgagcgcaaacgccgagccaagcggctccgagcattggtgctggtgcctactcgagaactagccattcaagttgagaacactattcatcaatacggcaaatacttgagcctccgctcaatggtgatggtcggtggcgttgacgcagcaccccaaaagcagggactgatcgatgggcttgatattctggttgccacaccggggcgattactggatatggcgcaccagcgcgcgttgtactttgatgagctggaggtattgattctggacgaagccgacagaatgctcgacatgggctttattggcgatatcaataaaattattgagcgcctgcccacacaacgacagaacttactgttttcagccaccctgtctgacgaaatacgattgttggcaaaaacagcgattaatgacccgattgaaatatcgatcaatgccactaacgccactgcaccaaaaatttcccagtggttaatcaccgttgataaagacagtaagtccgccttgctaagtcatttgattaaggaaaatcaatggacgcaagcactgatctttattcgcacaaaacacggtgctgcgaaattagtgagtcagctggaaaaacggggtatcaaagccgaagcaattcacagcggaagaagccaagctgttcgcacccaattactggccgacttcaagtccggcaacattagtttactagtggccaccggtattgctgcccgcggtatcgacattgatgacctcgatcgtgttgttaattatgacttgccagacgatgatgatgactacattcatcgaatcggtcgcaccggtcgcgccggcgctatcggtgaagcggtgtcattggtatccagagatgatttcaagcgcctatgcgccatcgagcgccgcctgaatcaactcatcgaaagacgaattattgatggatttattgctgccaaagaagtgcctgtttcggtcttaaatcatgtcgggaaaaaaccagaaaaaaaagtcgctatcgccacgcaaaaaaaacaagcatcaaagaaaaatgatcgagccaaatcaagcggccataaaaaatcatcccgcggccctgagatcgaaaaagccaatccctggagccaatggtttgaaaaaaacaaaaaataa

SEQ ID NO: 65559 - protein, 441 aa, marine gamma proteobacterium HTCC2143
MTFSTLGLSDPLLQAVEELGYTKPTAIQEQTIPTILAGRDLLAASQTGTGKTASFILPVLQKLTGERKRRAKRLRALVLVPTRELAIQVENTIHQYGKYLSLRSMVMVGGVDAAPQKQGLIDGLDILVATPGRLLDMAHQRALYFDELEVLILDEADRMLDMGFIGDINKIIERLPTQRQNLLFSATLSDEIRLLAKTAINDPIEISINATNATAPKISQWLITVDKDSKSALLSHLIKENQWTQALIFIRTKHGAAKLVSQLEKRGIKAEAIHSGRSQAVRTQLLADFKSGNISLLVATGIAARGIDIDDLDRVVNYDLPDDDDDYIHRIGRTGRAGAIGEAVSLVSRDDFKRLCAIERRLNQLIERRIIDGFIAAKEVPVSVLNHVGKKPEKKVAIATQKKQASKKNDRAKSSGHKKSSRGPEIEKANPWSQWFEKNKK

SEQ ID NO: 65560 - DNA, 1749 bp, marine gamma proteobacterium HTCC2080
  CDS (1)..(1749): transl_table=11
atgagcaccccagatacacagcccagccgctttaattcgttgggattaccagacttcctacaggaaaacctgcagagtcttggctacgaaacagccacaccgattcaggcaggcaccatcccactgttactggaaggaagagacgttgtaggcctggctcaaactggtactgggaagaccgcggcgtttgcgttacccatcctcgcaaacatcgatgtcaaagttcgtagcccacaggcgctagtactgtgccccactcgagaactcgcccagcaggtcgccgaggctttccgtagctatggccgaggcatgggggggctgagaattttaagcatttttggcggcgccgatatgcggcagcaactaaaatctttacgcgagggcacgcatatcgttgtcgctaccccaggacgactattggatcatatcgagcgtcgcagcatcgatttgacgggcatcaatgccgtcgtcctcgatgaggccgatgagatgttgcgcatgggttttatcgacgatgtcgacacgatcttggcgaaaaccccaaaagagcgcaaagtcgccctgttttcagccaccatgcccaagcgggttcgcgacattgccaacaaacacctcagtaatcccgctgaaatatcagtagctgccgccgcaacaaccaacgagaacattgaacaatgctactggctggccaaaggcgccagcaaactcgaagcgttaaagcgcctgctggcttttgaagataccgagggtgttattgtatttacccgaacccgtgagagcaccacggtgatcgccgagcaactccgccagactggtcttaaggcatcgccactcaatggtgatatggaccaaaaaatgcggctacgaactgtcagcgatttaaaaagcggggcactcgatgttttagtcgccaccgacgtcgccgctcgcggcctcgacgttgagcgcatcacacacgtaatcaactatgacgtgcccttcgatgaagaagcctacgttcaccgtattggtcgtacaggtcgtgcaggacgcaaaggcaaagcgattttattcgtcgtgccccgagaacggcgcatgctgcgcaatatcgagcgcctaacgcggcaatccatcccggaaattaagctgccttcggtgttggcaatcgatgccaagcgccgtgaagcctttgccgacagcattcgtactgcccttgcagatccgatgcaggcagagcttgaagaaattatcgatacactgaataaagactcggactatcgcagtatcgcggttgccctggccggcatgttgcacagccccggtgccagcaaagggccgaagcacgccaaaggcgagaagcacacgccctacggaactcgggatgcacgggatgaaaaatccagcaaacccaaccgtaaagaacgtcggcaaggcctgcaaaagaaggcagccacgtctgagtcagagacaccctcggcaccaaagaacgaaaagcatctaggtgaagcacggcctctcagggatcaccccgacgtgccgatggaacgctttcgcgtggaagtcggtcgcaagcatggcgttaaacccggtgagctgatgggtgccattgccaacgaagcgggaatcgagggccagtatattggcatgatcaatattctggaggagtgttccaccattgacctgccggaaggcattcccaagtcaattctgaagcacctgaaaaaaactcgggtcaaaggcgtacatctggccatggggcgagtggcctag

SEQ ID NO: 65561 - protein, 582 aa, marine gamma proteobacterium HTCC2080
MSTPDTQPSRFNSLGLPDFLQENLQSLGYETATPIQAGTIPLLLEGRDVVGLAQTGTGKTAAFALPILANIDVKVRSPQALVLCPTRELAQQVAEAFRSYGRGMGGLRILSIFGGADMRQQLKSLREGTHIVVATPGRLLDHIERRSIDLTGINAVVLDEADEMLRMGFIDDVDTILAKTPKERKVALFSATMPKRVRDIANKHLSNPAEISVAAAATTNENIEQCYWLAKGASKLEALKRLLAFEDTEGVIVFTRTRESTTVIAEQLRQTGLKASPLNGDMDQKMRLRTVSDLKSGALDVLVATDVAARGLDVERITHVINYDVPFDEEAYVHRIGRTGRAGRKGKAILFVVPRERRMLRNIERLTRQSIPEIKLPSVLAIDAKRREAFADSIRTALADPMQAELEEIIDTLNKDSDYRSIAVALAGMLHSPGASKGPKHAKGEKHTPYGTRDARDEKSSKPNRKERRQGLQKKAATSESETPSAPKNEKHLGEARPLRDHPDVPMERFRVEVGRKHGVKPGELMGAIANEAGIEGQYIGMINILEECSTIDLPEGIPKSILKHLKKTRVKGVHLAMGRVA

SEQ ID NO: 65562 - DNA, 1314 bp, marine gamma proteobacterium HTCC2080
  CDS (1)..(1314): transl_table=11
atgagtttttctaccctaggtttatctgaatcactacttaaagcggttgccgacgaaggctacaccacgccgtctcccatacaggcgcaggctatccctgcggtgctggagggccgtgacgtcatggccgcagcccaaaccggtaccggcaaaaccgcgggtttcaccctaccgttgctacacggactatcgaagggacagcccgcaaaagcaaaccaagtgcgagcacttgttttaacgccaacgcgagagttagcggctcaagtcgcggaaagtgtcgacatctacggaaaatacttgaatcttcgttctgcggtggtttttggcggcgttaaaatcaacccacaaatgatgcggctacgtaagggcgtcgatatattaattgctacgccgggacgtctattagacctgtatcagcaaaatgccatgtcttttcagaagcttgaagttctcattttggatgaagcagaccgcatgctcgacatgggttttatccacgatattcgaagaataatgaaagccttaccgaacaaacgacaaaacctgatgttttctgcgactttttctgaagacattcgcgatcttgccaaaaccattgtaaacaacccggtagaaatttctgtaacaccaagaaatagcacggcagtaagcgtgacccagtggatacacccggttgataaaaatcaaaaacggcatttgttggttgagctgattaaccagcacaattgggagcaggtgcttgttttcagccgaacaaaacgcggggcgaaccgcctagccgaatttcttgataagaaaggcattcaagccgcagcaattcatggcaataaaagccaaggtgcacgcaccagagcgcttagcgaattcaagtcagggaaattacgcgtcttagtcgccaccgacatcgcagcccggggccttgatatcgaacagctgccccaagtagtaaatctcgacttacccgaggtcgcgcaagattatgttcatcgcataggccggacggggcgtgcaggagccacggggcaagcgatatcactcgtgagtgctgatgaagcccaactactacaagatattgagcgcttaatccagacgctactttcaagaaagctcgtcgcgggctatgaaccggaaaacccgctacccgaactcgctctacgtccccctgccaaacccaaaaagcccaaaaagcctacgacacaaaggcatgctggcagcaacgttgatggtaataaaactggcgagcgagatagtcgtcgaactccaacttcaaccgatccatggaaacgtagacgcagcaataacaaagcccgctaa

SEQ ID NO: 65563 - protein, 437 aa, marine gamma proteobacterium HTCC2080
MSFSTLGLSESLLKAVADEGYTTPSPIQAQAIPAVLEGRDVMAAAQTGTGKTAGFTLPLLHGLSKGQPAKANQVRALVLTPTRELAAQVAESVDIYGKYLNLRSAVVFGGVKINPQMMRLRKGVDILIATPGRLLDLYQQNAMSFQKLEVLILDEADRMLDMGFIHDIRRIMKALPNKRQNLMFSATFSEDIRDLAKTIVNNPVEISVTPRNSTAVSVTQWIHPVDKNQKRHLLVELINQHNWEQVLVFSRTKRGANRLAEFLDKKGIQAAAIHGNKSQGARTRALSEFKSGKLRVLVATDIAARGLDIEQLPQVVNLDLPEVAQDYVHRIGRTGRAGATGQAISLVSADEAQLLQDIERLIQTLLSRKLVAGYEPENPLPELALRPPAKPKKPKKPTTQRHAGSNVDGNKTGERDSRRTPTSTDPWKRRRSNNKAR

SEQ ID NO: 65564 - DNA, 1398 bp, marine gamma proteobacterium HTCC2080
  CDS (1)..(1398): transl_table=11
atgacctctacactcttttcttcgcttccgctgaatccggcacagctcgacgctttaaccggcttgggttacgccaatatgactcaggttcaggcccaaagtttgccgccaatactgaagcggcaggacgtgattattcaggcaaaaaccggcagcggtaagacagccgcgtttgctattggtttgctgcaccacttaaacccaaggtttttcggtgttcaggcggtggtgatgtgccccacacgggagttggcagagcaggtaggtgaggccactcgtcagttggccagccgaatgtctaacgtgaaagtcgtcatgctgtgtggaggcaagccctttggtgcccagcgagactcgctgcaccacggtgcccatattgttgtcggtacccccgggcggattcaggatcatttgcagcgtggcactttggagcttaagggcgtgacgacctttgtactcgatgaggctgaccgcatgctagatatgggcttcgccgatgttatggcagaaattacggcgaaattgcccgccgatcgacaaacgcttttgctgtctgcgacgtttcctgatgacataaaaaagataagtcgatcgatacaaaaaaatccgatacagattaccgtcgatgccgaagttgttcacgacgaagttgtgttggagcaagtttttttcgaggttcaaaagcatgagcgcaatgtggccttgctggcgctttttgagcactaccgtccggccaacgcaatggttttttgtaatacaaaaaagcaatgcgccgaggtggcacgtttccttcgcgaacacgacatagaggccgcggctattcacggcgaccttgagcagcgagaacgcgatcaggttctgctgcagttcgctaataattcctgccccgttttggtggctagcgatgtggcggcaagaggtctggatataccctctttagaaatggtggttaattttgagctgcctcgagacgcagatacctatgtgcatcggattggacgcaccggtcgagcaggtgaatcaggaaaggcttttagtattgtgacgcctcctgaagccccaaggatgcgcgttattgaggattacctaaaaacccattgcgtttgcgatgttctagcatcgctagatcgagatcctaattatcaactgcaaggcgcgatggtgaccttacaactcgatgcgggaagaaaacaaaaaatacgtccgggagatatcttgggcgccttgaccggagatgcagggttgtccggggggcagattggtaagataaaaattctagacaacggcagttatgtggccattgaacggtcggcgctgcgtcaggcgatgaattatctagccgaaggtaaggttaaggggcgcgcgattaaagtccgccgaatgaaagcgcagcgttaa

SEQ ID NO: 65565 - protein, 465 aa, marine gamma proteobacterium HTCC2080
MTSTLFSSLPLNPAQLDALTGLGYANMTQVQAQSLPPILKRQDVIIQAKTGSGKTAAFAIGLLHHLNPRFFGVQAVVMCPTRELAEQVGEATRQLASRMSNVKVVMLCGGKPFGAQRDSLHHGAHIVVGTPGRIQDHLQRGTLELKGVTTFVLDEADRMLDMGFADVMAEITAKLPADRQTLLLSATFPDDIKKISRSIQKNPIQITVDAEVVHDEVVLEQVFFEVQKHERNVALLALFEHYRPANAMVFCNTKKQCAEVARFLREHDIEAAAIHGDLEQRERDQVLLQFANNSCPVLVASDVAARGLDIPSLEMVVNFELPRDADTYVHRIGRTGRAGESGKAFSIVTPPEAPRMRVIEDYLKTHCVCDVLASLDRDPNYQLQGAMVTLQLDAGRKQKIRPGDILGALTGDAGLSGGQIGKIKILDNGSYVAIERSALRQAMNYLAEGKVKGRAIKVRRMKAQR

SEQ ID NO: 65566 - DNA, 1278 bp, Candidatus Desulfococcus oleovorans Hxd3
  CDS (1)..(1278): transl_table=11
ttgaattttgaagcatttggttttaacccccaggtagcagccggcattaaagaggccggttatgcagtccccacaccgattcaggtccaggcgattgccccggtcatggaaaaccgtgacgtcatgggaatggcccagaccggcaccggcaaaaccgccgcgttcgtcctgccgatcctgcatcggttaatgaaggggcagaaaggcggcattcgtgccctgattttggcccccacccgggaactggcggagcagacccaccaggccattggcgttctgggccgcaagaccggcctgaaaagcgccacggtttacggcggcgtgggcatcaccccccagattcagaagttgaaaaaggttgatatcgtggtggcctgcccgggccgtctcctggaccatatcggtcgccgtaccgccaacctgtccaaactggaggtgctggtcattgatgaggcggatcagttgtttgatatggggtttttccctgatatcaaaaagatcctcacccatctcccgaaacagcgccagaccctgctgttttccgccaccatgcccgctgagattcgcaagctggccgcggatattctgcagaatcccgccaccgtccaggtcggcaatgaagcgccggcggacacggtgagccacgcgctctacccggtggcccagcacctgaaaaccgcgtttctgctggacctgttaaagcagacccaggcccggtcggtattggtgtttacccgcaccaagcaccgcgccaagaacctggaccagaaactggccggcgccggttttcgctccacctcgctgcagggcaacctgtcccaggtcaaacgccaggcggctctggacggttttcgcaaaggaacctttcagatcctggtggccacggatatcgcggcccggggcatcgacgtgacacgggtctcccatgtcatcaactatgacgtgccctccacgccggaagcctatattcaccgcatcggccgtaccggccgggccacctgcaccggagaggcgtttacgttcattaccggtgaggacagaaacatggtacgggccatcaaccggctgctggggtcggagattgagcagcggaccctggaaagttttaattacaaggcagcggctccggcctttaccggcagcgcgccggcccgcaccgattcggcccaccggccggcccgaaaaaaaccggcccggcagtcttcaccgcgaccgaagacttttgaaaaaagcggcagccacggcaaaaagccggcccggcgccacacctttttatag

SEQ ID NO: 65567 - protein, 425 aa, Candidatus Desulfococcus oleovorans Hxd3
MNFEAFGFNPQVAAGIKEAGYAVPTPIQVQAIAPVMENRDVMGMAQTGTGKTAAFVLPILHRLMKGQKGGIRALILAPTRELAEQTHQAIGVLGRKTGLKSATVYGGVGITPQIQKLKKVDIVVACPGRLLDHIGRRTANLSKLEVLVIDEADQLFDMGFFPDIKKILTHLPKQRQTLLFSATMPAEIRKLAADILQNPATVQVGNEAPADTVSHALYPVAQHLKTAFLLDLLKQTQARSVLVFTRTKHRAKNLDQKLAGAGFRSTSLQGNLSQVKRQAALDGFRKGTFQILVATDIAARGIDVTRVSHVINYDVPSTPEAYIHRIGRTGRATCTGEAFTFITGEDRNMVRAINRLLGSEIEQRTLESFNYKAAAPAFTGSAPARTDSAHRPARKKPARQSSPRPKTFEKSGSHGKKPARRHTFL

SEQ ID NO: 65568 - DNA, 1515 bp, Marinobacter sp. ELB17
  CDS (1)..(1515): transl_table=11
atgtctgaattgtcttttgccgaactggggcttaatcctgccgttcttgaagcggtgaccgccgttggctatgaaacccccacaccaatacaggcgcaatctattcctgcgctattgtctggccgccatttgctgggtgtagcccagaccggcaccggtaaaaccgccgcctttgctttgccactgctgagccgggtggacccaaacgtcaacgcgccgcagattctggttctggcacctacccgcgaactggccattcaggtggccgaggcattttccacctatgccagcaagctccctaattttcatgtgctgccgatttatggcggtcaagactttttcccgcagattaaaggcttgcgccgcggagctcacgttattgttggcactcctggccggatgctggaccacctgcgcaaaggcactctgaagctggataacctgaaagccctggtgctggacgaagccgacgaaatgctacgcatgggctttattgatgacgttgaagcgattctgtcgaaaaccccggacaactgtcagcgcgccctgttctcggccaccatgccgccgcaaatcaagaaggttgctcagacctatctgaaagatgcggttgaagtacgtatcgaaagcgcaagccgcacggttgacgctatctcccagtacgtactgccggtgtacgctgagcgcaagcttgatgccctgacccgcattctggaagtggaaccgtttgatgcgtcgatcatctttgtgcgcaccaaggccgaaaccatcgtgttggcggaaaagctggctgctcgcggccacgctgcagcgcccttgaacggcgatctgaaccaacgtcagcgcgagcagacggttgaagacctgaagcgtggcaagaaagacatcgttgtagccacagacgttgctgcccgcggtctggacgtaccgcgcatcacacacgtaatcaactacgacgtaccttacgacaccgaagcatatattcaccgcattggtcgtactggccgtgccggtcgtgatggtaaagccattctgttggtaacgccccgggagcgtagctggctgcgcactctggagcgcgctacaaatgcgaccatggaagcctatgagttgccctcgcccgcggcgctgcagaagatgcgcgtagatcagtttgaaagccaactggtcggttttgcggaagatcgcaaactgagcaaagcaatggcgatgctggacgatattgccgagcgcaacgagatggacattacgatggttgcaggcgctctggcgtgcatgctggaagccactcaaccaggctcgttgccgctggagcagccggaagctctgccggcagtatcaaccacgcagccaaatcgtgaccgcaaagccggtcgccctggcgagttccgcaagggcccgaagcctggtagctacaataagcgtccgggtagcggcgcgccaggcggcaaaggcaagtttgccggcaagccctctggcaagcgcccgccgcgtcagtctgacgccaagcgctga

SEQ ID NO: 65569 - protein, 504 aa, Marinobacter sp. ELB17
MSELSFAELGLNPAVLEAVTAVGYETPTPIQAQSIPALLSGRHLLGVAQTGTGKTAAFALPLLSRVDPNVNAPQILVLAPTRELAIQVAEAFSTYASKLPNFHVLPIYGGQDFFPQIKGLRRGAHVIVGTPGRMLDHLRKGTLKLDNLKALVLDEADEMLRMGFIDDVEAILSKTPDNCQRALFSATMPPQIKKVAQTYLKDAVEVRIESASRTVDAISQYVLPVYAERKLDALTRILEVEPFDASIIFVRTKAETIVLAEKLAARGHAAAPLNGDLNQRQREQTVEDLKRGKKDIVVATDVAARGLDVPRITHVINYDVPYDTEAYIHRIGRTGRAGRDGKAILLVTPRERSWLRTLERATNATMEAYELPSPAALQKMRVDQFESQLVGFAEDRKLSKAMAMLDDIAERNEMDITMVAGALACMLEATQPGSLPLEQPEALPAVSTTQPNRDRKAGRPGEFRKGPKPGSYNKRPGSGAPGGKGKFAGKPSGKRPPRQSDAKR

SEQ ID NO: 65570 - DNA, 1368 bp, Erythrobacter sp. SD-21
  CDS (1)..(1368): transl_table=11
atgacacaatttaccgacctcgggctgtcgcagcccgtgctccaggccctcgacattaagggctataccacgccgacgccgatccaggcgcaggccattccgcccgtgctcgaaggccgcgaccttatgggcattgcccagaccggcaccggcaagaccgccgccttcatgctgcccagcatcgatcggctgcgcgacgcagacaagcagtcgccgttcaagtcctgccgtatgcttatccttgcaccgacacgcgaactggcaggccagattgccgatagcgcgaaagactacggcgcacttgccgggctaaaggtgcacagcattgttggcggcacgagcgttaacaaggatcggaacaagctgcatcgcggtaccgacattctcgtcgccacgcccggccgcctgctcgacctgatcgaccagaaggcctttactctcgacaaggtcgaaatcctgatcctcgacgaggccgatcagatgctcgacctcggcttcatccatgctctgcgcaagatcagcgagctggtgcccgatgaccgccagacgctgttcttcagcgccaccatgcccaagcagattcaggaactggtcggcaaatattgccgcaacccggtcaaggtcagtgtgaccccggaaagcaccacggcagagcgcatcgaccagtatctcttcatggtccagcaggacgagaagcagacgttgctcgagatgatcctgtccgaacgccaccaggtccccggcaagttcgagcgcgtgctcatcttcgcccgcaccaagcatggctgcgaccggatcgtgaagaagctcggacagagcggcatccccgccaacgccatccatggcaacaagagccagccgcagcgcgagcgagcgctggacgagttcaagcgcgccaagacgccgatcctcgttgccaccgatgtcgccgcgcgcggtatcgacattccgggcgtcagccacgtgctcaactacgaactgcccaacgtgccggagcaatatgtccaccgcatcggtcgtaccgcacgcgcaggccgtgacggcgtggccatcgccttctgcgccgaggacgagcgcgattacctcaaggacatccgcaagaagaccgacgcggaattcgagcgcctgccgctgcccgacaatttccgcgccgtggtcgaaggtgtcggcccgaccaagcgcgaacagaagcccaagcttgcgcgccccaaggtgcgtccgaccggcggtgcggcaaaacctaagcccaaacagaagcatcctgcgcgcaagggcaagcctgccggcgccgggcagggcggaaggccgggtggtcggcccggcggcaatcgcaatcgcagccgaaaccgtcgtagtagccagggctga

SEQ ID NO: 65571 - protein, 455 aa, Erythrobacter sp. SD-21
MTQFTDLGLSQPVLQALDIKGYTTPTPIQAQAIPPVLEGRDLMGIAQTGTGKTAAFMLPSIDRLRDADKQSPFKSCRMLILAPTRELAGQIADSAKDYGALAGLKVHSIVGGTSVNKDRNKLHRGTDILVATPGRLLDLIDQKAFTLDKVEILILDEADQMLDLGFIHALRKISELVPDDRQTLFFSATMPKQIQELVGKYCRNPVKVSVTPESTTAERIDQYLFMVQQDEKQTLLEMILSERHQVPGKFERVLIFARTKHGCDRIVKKLGQSGIPANAIHGNKSQPQRERALDEFKRAKTPILVATDVAARGIDIPGVSHVLNYELPNVPEQYVHRIGRTARAGRDGVAIAFCAEDERDYLKDIRKKTDAEFERLPLPDNFRAVVEGVGPTKREQKPKLARPKVRPTGGAAKPKPKQKHPARKGKPAGAGQGGRPGGRPGGNRNRSRNRRSSQG

SEQ ID NO: 65572 - DNA, 1881 bp, unidentified eubacterium SCB49
  CDS (1)..(1881): transl_table=11
atgtcagcatttaaagcgttgggcctcaacgatgaattactacaggccatcacagacatgggttttgaaaccccatctgaagtacaagaacaagcaataccaatccttttagaagaagatacagatcttgttgccttagcgcaaacaggaactggtaaaacagccgcatttggttttccaatgctgcaaaaaatagacgtagcaagccgcacaactcaaggtttgatactatcgcctacacgtgaattgtgtatgcagattaccaatgaaatgaaaagttacggtaagcacatgaaagggcttaacgtagttgcaatttatggtggagcaagcatctctgatcaagcacgccaaattaaaaaaggagcacaaataattgttgctactcctggtcgtatgaaagatatgattagccgtagaatgattgatatttctaaaatagaatattgtgtgctagatgaagcagatgagatgttaaacatgggcttccatgaagatatcacagaaattttatctcactcaccacaagaaaaaagtacttggttgtttagtgcaacaatgccaagagaggtggcgagtatcgctaaagaatttatgtatcaaccacaagaaattacggttggttctaaaaatacaggttcagaaaacgttacacacgaatactatttagtaaacgcgcgtgatcgttaccaagctttaaagcgtcttgcagatgcaaatccagaaatcttttctgtagtgttctgtagaacgaagcgcgatacacaaaaagtagcagagcaattaatacaagatggatatagcgcaggagcaatacatggagatttaagtcaaaatcaacgtgacattgtgatgaagcagttccgtagtcgtcaaattcaaatgatggttgcaacagatgtagctgctcgtggaattgatgtagataatattacacacgttatcaattatcaattacctgatgaggtagagacatatacgcaccgtagtggtcgtactggtcgtgctggtaatcaaggtatttctattgtaattgtttctaaaagtgaagttcgcaagattagaagtattgagaaaaaaatacaaaagaaatttgaagtaaaagaagttccttctggaatggaaatttgcgaaaagcagttaatgcaccttgcaaataacattaaagacacagagatcaacgatgatatcgaagcatatttacctgctattaatgagtcgttagaagatttcagcaaagaagaattaatcaagaaattcttttctgtagaatttacacgtttttataactactataataaagcaaaagatattaatgttaagccaggtcacgaaaaagactacagagatgatacgggtagtactcgtttcttcttaaatgtaggtgagaaagatgactttaactggatgtctctaaaagacttacttaaagaagttcttaatttagggaaagatgatgtttataaggtagatgttaaagattcgttttcattttttaatgtagatgaaaaacacaaagatcttgtaacaagtgtatttgcagattttgaaattgaaggtcgtaaagtaaatgttgaagagtcttctggtggaggcggaggtcgcaaaggtggcggacgcggacgcggaggaagatctggaggtagaggtcgcagtggtggcggaggctacaaaggcggaagacgtcgtgatgatgatcgtggtggaagaagcagtggcggctacaaaggaaagagaagcagtgatggagggtctagtgattcttctaaacgaggaagatttggcggtagctctgaaggtaaatctagatttagcggtaaacgtagaggaaaatctaaaccagaaggtggaggaaccggaggtcgtagaagaagagattaa

SEQ ID NO: 65573 - protein, 626 aa, unidentified eubacterium SCB49
MSAFKALGLNDELLQAITDMGFETPSEVQEQAIPILLEEDTDLVALAQTGTGKTAAFGFPMLQKIDVASRTTQGLILSPTRELCMQITNEMKSYGKHMKGLNVVAIYGGASISDQARQIKKGAQIIVATPGRMKDMISRRMIDISKIEYCVLDEADEMLNMGFHEDITEILSHSPQEKSTWLFSATMPREVASIAKEFMYQPQEITVGSKNTGSENVTHEYYLVNARDRYQALKRLADANPEIFSVVFCRTKRDTQKVAEQLIQDGYSAGAIHGDLSQNQRDIVMKQFRSRQIQMMVATDVAARGIDVDNITHVINYQLPDEVETYTHRSGRTGRAGNQGISIVIVSKSEVRKIRSIEKKIQKKFEVKEVPSGMEICEKQLMHLANNIKDTEINDDIEAYLPAINESLEDFSKEELIKKFFSVEFTRFYNYYNKAKDINVKPGHEKDYRDDTGSTRFFLNVGEKDDFNWMSLKDLLKEVLNLGKDDVYKVDVKDSFSFFNVDEKHKDLVTSVFADFEIEGRKVNVEESSGGGGGRKGGGRGRGGRSGGRGRSGGGGYKGGRRRDDDRGGRSSGGYKGKRSSDGGSSDSSKRGRFGGSSEGKSRFSGKRRGKSKPEGGGTGGRRRRD

SEQ ID NO: 65574 - DNA, 1848 bp, Moritella sp. PE36
  CDS (1)..(1848): transl_table=11
atgtctgatacatcacccgtagtacaatttactgatttaaatttacctgaaccaattttgcaagtgttgaatgatctaggttatgaagcacctacaccaattcaagctgaatgtattccgttactacagaacggtggtgatgtgctaggtatggcacagactggtacgggtaaaactgctgcgtttgcactaccattattgagtaacattgatactgcattgactaaaccacagatattggtgctagcaccaactcgtgagttagcgattcaagttgctgaagcgttccaaacatactcacgtcatatgcgtggattccatgtgctacctatctacggtggtcaaagctaccctattcagctaaaagcacttaaacgcaacccacaagtgattgttggtactcctggccgtgtgattgatcacattaaccgtggtacgcttgatctttctggtattaaagcgttagtacttgatgaagctgatgaaatgctacgcatgggctttattgacgatgtagaatcaattctgtctaaaacacctgcagaacgtcaaatggcgttgttctctgcaactatgcctgaagaaattcgtcgtattacgaaacgttttatgactaacccaacttcggttaaaattgcaaataaaacatcaactgttgaaaacattgaacaaaaatgtttaatcattggtggtttacaagcaaaacttgacggcctaacacgtattcttgaaactgaagactacgatggcgtgatcatctttgctcgtactaaaacaatgactgttgaacttgctgagaaattagaagcgcgcggttattctgctgctgcactaaacggtgacttaaaccaagcaatgcgtgaacgcactgtaagtcgtctgaaaagtggccagttagatattgttatcgcaactgacgttgcggcacgtggtcttgacgttcctcgtattgacctagttattaactacgatatcccaactgatacagaatcatacgttcaccgtattggccgtacaggccgtgctggacgtaaaggtactgcaatcttatttgcagcaccacgcgaacgtcgtttattaaaagcgattgaacgtgctacacgtcagccattaactatgatggatctaccttcacgtgatgatgtgacgaaaaaacgtatttcatcattccgtgatcagttatctgcactttcttctggtaaagaaaatctagatttctacaaaaacttagttggtcaactttctgaagagttagaactaagcgaattggatcttgcatctgcgttattatttatggcccagaaagaaaaaccattagtattaccaccagaagcgccacgtcgtgaacgtagcttccgtgatgatgaccgtggtgatcgtggccgtgatcgcaacgaccgtggcgaacgccgtgatcgtggtgaccgtcctgaacgtggcgaacgtggtgagcgtcgtccagctgcagaaatggaagttttccgtattgaagttggtcgtgcagatggtgttcaagttaagaacatcgttggcgctattgctaatgaagcgaatatcaacagccgtaacatcggcggtatccgtctacatgatgactactcaacaattgaattaccaaaaggtatgccaagcgagcagttacaacaactacaacaagtttatgtttgtaacaaagcattacgcatgagcaaacttgaaggtgttgcagctgaaggtcgtcaagagcgtagccgtccagcacgtgataacgatcgtccagcacgtgacaatgatcgcggacatcgcggtcaacgtcgtgaatcgactggtggcgaagaacgtcgtccacgtcgtccacgtcgtgactaa

SEQ ID NO: 65575 - protein, 615 aa, Moritella sp. PE36
MSDTSPVVQFTDLNLPEPILQVLNDLGYEAPTPIQAECIPLLQNGGDVLGMAQTGTGKTAAFALPLLSNIDTALTKPQILVLAPTRELAIQVAEAFQTYSRHMRGFHVLPIYGGQSYPIQLKALKRNPQVIVGTPGRVIDHINRGTLDLSGIKALVLDEADEMLRMGFIDDVESILSKTPAERQMALFSATMPEEIRRITKRFMTNPTSVKIANKTSTVENIEQKCLIIGGLQAKLDGLTRILETEDYDGVIIFARTKTMTVELAEKLEARGYSAAALNGDLNQAMRERTVSRLKSGQLDIVIATDVAARGLDVPRIDLVINYDIPTDTESYVHRIGRTGRAGRKGTAILFAAPRERRLLKAIERATRQPLTMMDLPSRDDVTKKRISSFRDQLSALSSGKENLDFYKNLVGQLSEELELSELDLASALLFMAQKEKPLVLPPEAPRRERSFRDDDRGDRGRDRNDRGERRDRGDRPERGERGERRPAAEMEVFRIEVGRADGVQVKNIVGAIANEANINSRNIGGIRLHDDYSTIELPKGMPSEQLQQLQQVYVCNKALRMSKLEGVAAEGRQERSRPARDNDRPARDNDRGHRGQRRESTGGEERRPRRPRRD

SEQ ID NO: 65576 - DNA, 1188 bp, Sporosarcina halophila
  CDS (1)..(1188): transl_table=11
atgaaggaaacatttgaacaactaggggtacggaaagattttattgataaattaacgcaagagggtattggggctcccactcctatccagcaagaagcgattcccgctttaatggatggacgcgacgtgatcgctcaagcgcagacaggaacagggaaaacctttgcgtttttattaccaattttacagaacatccgtgtagacgaggcgtctgtacaggctgtgattgtcacgcccacacgtgagcttgcgcttcagattacggaagaagtacgaaagttaaagacagaggatatgcatgtgctggcggtttatggcggtcaggatgttgccaaacaggctcataagctggatggacaagctcatattgtcattgcaacacccgggagaatgcttgaccatttacggaggggaacgatttctcttgaagcggtaaaatacatggttctggatgaagcggatcagatgcttgaagcaggctttctacctgatgtaaaggatatcttaagccagacacctgaagctaagcaaaccatgttattctcagcgaccatcacaactcaggtcaatcagctgggcaagaaaattcttaaagatccaagaagaattactgtgcaggaaaagaccgtaacattagagggaattaaacagctggtctatgaaacaacggaccgtgccaaacaggataccttgattgaaattatgcaggaacaccgcccattccttgctttgatattctgccggactaaacgtagagcaaggaagttgaacgatgccttgttaagtcatgggtttgaagcagatgaacttcatggcgatttatcccaggcgaaacgggagaaagtcatgaagcggttccgtgatgctaagatccaatatctagtagcaaccgatgtagccgcccgcggtcttgatgtggaaggggtcacgcacgtgttcaattacgacatcccgcaggatccggagagttatattcaccggattggccgcactggaagagctggagggaaggggcttgccattacgttcgctgctccaaaggatcgccaggctctgcaatcgattgaaaaaagtattaaacagaaaatagaacgccgttctcttgccaatttatcaccaggtaaggaaaaagaatctaaatcagaaccaccaaagaaaaaaacaaaacgctctcaaagacgaaggtaa

SEQ ID NO: 65577 - protein, 395 aa, Sporosarcina halophila
MKETFEQLGVRKDFIDKLTQEGIGAPTPIQQEAIPALMDGRDVIAQAQTGTGKTFAFLLPILQNIRVDEASVQAVIVTPTRELALQITEEVRKLKTEDMHVLAVYGGQDVAKQAHKLDGQAHIVIATPGRMLDHLRRGTISLEAVKYMVLDEADQMLEAGFLPDVKDILSQTPEAKQTMLFSATITTQVNQLGKKILKDPRRITVQEKTVTLEGIKQLVYETTDRAKQDTLIEIMQEHRPFLALIFCRTKRRARKLNDALLSHGFEADELHGDLSQAKREKVMKRFRDAKIQYLVATDVAARGLDVEGVTHVFNYDIPQDPESYIHRIGRTGRAGGKGLAITFAAPKDRQALQSIEKSIKQKIERRSLANLSPGKEKESKSEPPKKKTKRSQRRR

SEQ ID NO: 65578 - DNA, 1320 bp, Serratia marcescens
  CDS (1)..(1320): transl_table=11
atgacagcaaccactttttccgaactcgaactcgatgatcgcctgatcgacgcgctgcgcgacaaaggctacgatcgccccaccgccattcaggccgctgcgatcccgccggcgatggacgggcgcgacgtcttaggttcggctccgaccggcaccggcaaaaccgccgccttcctgctgcccgttttgcagcacctgctggacttcccgcgcaaaaaatccggcccgccgcgcgtgctgatcctgacgccaacgcgtgaactggcgatgcaggtcgccgatcaggcgcgtgaattggctgctcatacctcgctggatatcgccaccatcaccggcggcgtcgcttacatgaaccacgcggaagtgttcagcgaaaaccaggacgtggtggtcgccaccaccggccgtttgctgcaatacattaaagaagagaacttcgactgccgcgcggtggaaaccctgatcctcgacgaagccgaccgcatgctcgacatgggcttcgcgcaggacatcgaaaccatctccgccgaaacccgctggcgcaaccagacgctgctgttctccgccacgctggaaggcgaagcaattcgcgaattcgccgagcgcattctgaaagagccggtggaagtggaggccgatccgtcgcgccgcgaacgcaaaaagatcctgcagtggtactaccgcgccgatgacgtgcagcacaaaaccgcgctgctgatccacctgctgaagcagccggacgtgcagaaatcggtgatcttcgtgcgcaaacgcgagcgcgtgcacgagctggccacctggctgcgcgaagcgggcatcaacacctgctatctcgaaggcgaaatggtgcaggccaaacgcaacgaagcggtcaaacgcatgatggatggccgggttaacgtgctggtggccaccgacgttgccgcgcgcggtctggatatcctcgatatcacccacgtgttcaacttcgacatgccgcgcacggcggacacctacctacaccgcatcggccgtaccggccgcgccgggcgcaaaggcaccgccatttcgctggtggaagcgcacgaccatctgctgctgggcaaagtgggccgttacctgaacgagccgctgaaagcgcgcgtgatcgacgaactgcggccaaaaaccaaggtgccgaacgagaagagcaacggcaagccatcgaagaaagtgctggccaaacgcgcggaagataaagcgaggaacaaagaaaaggccaaggtaaaagtgcgccatcgcgacgccaaaaacgtcggcaaacgccgtcaggcgaaggccaaaccggccggcgacgcgtaa

SEQ ID NO: 65579 - protein, 439 aa, Serratia marcescens
MTATTFSELELDDRLIDALRDKGYDRPTAIQAAAIPPAMDGRDVLGSAPTGTGKTAAFLLPVLQHLLDFPRKKSGPPRVLILTPTRELAMQVADQARELAAHTSLDIATITGGVAYMNHAEVFSENQDVVVATTGRLLQYIKEENFDCRAVETLILDEADRMLDMGFAQDIETISAETRWRNQTLLFSATLEGEAIREFAERILKEPVEVEADPSRRERKKILQWYYRADDVQHKTALLIHLLKQPDVQKSVIFVRKRERVHELATWLREAGINTCYLEGEMVQAKRNEAVKRMMDGRVNVLVATDVAARGLDILDITHVFNFDMPRTADTYLHRIGRTGRAGRKGTAISLVEAHDHLLLGKVGRYLNEPLKARVIDELRPKTKVPNEKSNGKPSKKVLAKRAEDKARNKEKAKVKVRHRDAKNVGKRRQAKAKPAGDA

SEQ ID NO: 65580 - DNA, 1779 bp, Vitis vinifera
  CDS (1)..(1779)
atgaccggaattccttgggaacagaggcctgacacggcggagtcaaggacttgcttgcggcgacccatgatggcgatggaggctccatggagcccaaattgggtggatatctcgaacccaattcccgatcctcctcctgtgagaagggccactttccctttcagtacatctgctttgaacggtgactccattgaagcagctcggcaccaccccttctccctcttcctctatttctttctgttttgcatacacccgccaatgccgaaactgttaaaattgaaagcaacaggaagaagggaaaaaaaaaaaatggacgaagaaaccttggttgatgaaaacttccccctattttccaaaaggaaacccacccctaaaccctccaaaaactccaccaccaccgctcaaaaccctaatccagagcaaccgctcacaagaaccaccaaccccacttcaccatcttccacgttcgccgacctcggcctcgctgaatgggcagtgcaggcctgcaaagagctcggaatgcgacggccgacgccggtccagcaccactgcataccccgaatcctcgccggtgacgacgtgctagggctcgcccagactgggagcggcaaaacggcggcgtttgctctgccgatactccaccgcctagcggaggacccttttggggttttcgcgctggtggtgacgcccacgcgggagctggcgtatcagttggccgagcagtttcgggctctcgggtcgtgcttgcatctgcggtgtgcggtggtggtgggtgggatggatatgatcaatcaggcgcagactctgatgcaacggccgcatgtggttattgccactccggggagggttaaggttcttcttgagcagaatcctgatattcctgctgttttcgccagaactaagtttctggttttggatgaagctgatagagttttggacgtgggctttgaagaggaactgagagtggtgtttcagtgcttgccaaaaaatcggcagactttattattttctgcgacaatgacaagtgacctacagacactgcttgagctttcgtcaaataaggcatacttctatgaggcatatgaaggcttcaagacagttgaatctcttaaacagcagtatatttttgtccccaaaaatgtgaaggatgtttatcttttgcacattttatccaaaatggaagagatgggtattcgctctgcaattatatttgtttccacctgcaggagttgtcaccttctaagtttattactggaagagcttgatctggaagtcgcagcgctgcattcattcaaatcccagtctttgaggcttgctgcagtacatcgattcaaatctggacaggttccaatattgcttgcaactgatgttgcaagtcgtggtttggacattcctacggttgatcttgttgtcaattatgatattccaaggtacccaagagactatgttcatcgtgtgggaagaaccgcgagagcaggtagaggaggcctgtctttgagcattgttacccagaatgatgtagacctcattcatgaaatagaagctgttcttggaaagcaattggacaagtttgactgtaaagagaaagaagtacttgataatatcactaaggtctacaaagccagacgtgttgcaacaatgaagatgatggatgatggctttgaggagaaagcaaaagcacgaaaagcacaaaaactcaagacattggcagagaaaggattattaaagaaaaagaccagaaagagaaaaagagaaaaggcaagcaaaataggagattaa

SEQ ID NO: 65581 - protein, 592 aa, Vitis vinifera
MTGIPWEQRPDTAESRTCLRRPMMAMEAPWSPNWVDISNPIPDPPPVRRATFPFSTSALNGDSIEAARHHPFSLFLYFFLFCIHPPMPKLLKLKATGRREKKKMDEETLVDENFPLFSKRKPTPKPSKNSTTTAQNPNPEQPLTRTTNPTSPSSTFADLGLAEWAVQACKELGMRRPTPVQHHCIPRILAGDDVLGLAQTGSGKTAAFALPILHRLAEDPFGVFALVVTPTRELAYQLAEQFRALGSCLHLRCAVVVGGMDMINQAQTLMQRPHVVIATPGRVKVLLEQNPDIPAVFARTKFLVLDEADRVLDVGFEEELRVVFQCLPKNRQTLLFSATMTSDLQTLLELSSNKAYFYEAYEGFKTVESLKQQYIFVPKNVKDVYLLHILSKMEEMGIRSAIIFVSTCRSCHLLSLLLEELDLEVAALHSFKSQSLRLAAVHRFKSGQVPILLATDVASRGLDIPTVDLVVNYDIPRYPRDYVHRVGRTARAGRGGLSLSIVTQNDVDLIHEIEAVLGKQLDKFDCKEKEVLDNITKVYKARRVATMKMMDDGFEEKAKARKAQKLKTLAEKGLLKKKTRKRKREKASKIGD

SEQ ID NO: 65582 - DNA, 1620 bp, Vitis vinifera
  CDS (1)..(1620)
atggcatctattcaggaggccttggccagtctcaggcaggagataggcactgagaagaagaagaagaagaagcataaacagtccaaaatcgcttctaatgaagtggtagaaattgggaggaagaagaagaacgaagactacataatcgaagaagaaacagaggctaaccgaaagagaaagctcgaagaaacgccaactgtaacagaggcgaagaagaagaagaaggagaaggagaagaaggagaagaaggagaaagagggagaagaagaaggcttgaaggatgaagatgataaggagagcagaggggcgtgcgtggcggtgactggaaaggacgcgaaggaatcgaagtatgcggctttcaaatcatttgccgagtcgaagctgccggatgatgtgctcgagtgttgccgcaatttcagccagccctcaccgattcagtcccatgcctggccgttcttgttggaccaccgggattttatcgggattgctgctactgggtctggtaagacattggcatttggagttccagcaatgatgcatgttttgagtaagcggaagagtaaaacatccaagggagtgaatcccctttgccttgtcttgtcaccgacgagggagctagctcagcaaatttcagatgttctgtgcgaggctggaaaacattgtggtgtgaagtcagtttgcttgtatggaggaacttctaaaggacctcaaataagttccctgaagtctggtgttgacattgtcataggtactcctggacgtttgaaggatctaattgaaatgggtgtgtgttgccttacagaggtatcttttgtggtgttagatgaagcagatcgtatgctggacatgggatttgaaccagaagttcgctctatattaagccagacatgtcctgctcgccaaatggtaatgtttagtgcaacatggcctctacctgttcatcaattagctcaagaatttatggatcccaacccagttaaggttgtaataggttcagaggatttagctgccaaccatgatgttatgcaaatagtggaggtcttggatgatcgatcacgtgatgaacgtctgctcactttgttagggaaataccacaagtcccaaaggaacagagtgttagtttttgttttgtacaagaaagaagctgctcgtgttgaaaatatgctacaaagaaggggttggaatgttgtttctatacatggtgataaagcgcaacaagcacgtacagcggcattatcattattcaagaagggaagctgtcctttgatgatagctacagatgtggctgcacgaggattggatattccagatgtggaagtagtgatcaactacagttttcctctcactacagaggattatgttcacagaattggaagaactggacgagctggtaagaagggtgttgcacacacattcttcatgcaggaaaacaagggacttgctggggagttggtgaatgttctcaaagaagcagggcagattgtccctgctgaccttttaaaatttggcacacatgtaaagaaaaaggagtccaagctatatggggctcacttcagagaaattgctgctgatgctccaaagtccaaaaagatcacttttgacgactctgatgaagattga

SEQ ID NO: 65583 - protein, 539 aa, Vitis vinifera
MASIQEALASLRQEIGTEKKKKKKHKQSKIASNEVVEIGRKKKNEDYIIEEETEANRKRKLEETPTVTEAKKKKKEKEKKEKKEKEGEEEGLKDEDDKESRGACVAVTGKDAKESKYAAFKSFAESKLPDDVLECCRNFSQPSPIQSHAWPFLLDHRDFIGIAATGSGKTLAFGVPAMMHVLSKRKSKTSKGVNPLCLVLSPTRELAQQISDVLCEAGKHCGVKSVCLYGGTSKGPQISSLKSGVDIVIGTPGRLKDLIEMGVCCLTEVSFVVLDEADRMLDMGFEPEVRSILSQTCPARQMVMFSATWPLPVHQLAQEFMDPNPVKVVIGSEDLAANHDVMQIVEVLDDRSRDERLLTLLGKYHKSQRNRVLVFVLYKKEAARVENMLQRRGWNVVSIHGDKAQQARTAALSLFKKGSCPLMIATDVAARGLDIPDVEVVINYSFPLTTEDYVHRIGRTGRAGKKGVAHTFFMQENKGLAGELVNVLKEAGQIVPADLLKFGTHVKKKESKLYGAHFREIAADAPKSKKITFDDSDED

SEQ ID NO: 65584 - DNA, 2316 bp, Vitis vinifera
  CDS (1)..(2316)
  misc_feature (48)..(48): r is g or a
  misc_feature (456)..(456): k is g or t
atgtcgaagcgaaaattcggattcgaaggtttcgggataaatcggccrgcgacctacaacttcgagcggtcccaagctccgcagcgcctctacgtgcctccgtcgtctcgctccgggggccatgacaactacgaggatcatgacctcgacaatatcgactacgatgacaaggatgagcacggggaggtggctggaggcggtggtgaggtggatgatggtgagatagacccacttgacgctttcatggagggaatccacgaggaaatgagagctccgccgccgccgaaggtggtggagaaggcggagaagtacgtggatgatgatgaggatgatccgatggaaagtttcttgagggcgaagaaggatacggggttggcgttggctgcggatgtgatgcatgccgggtatgattcggacgaggaggtttacgcggctgctaaggctgttgatgcgggkttgatagagtatgattcagatgataatccgattgttttggataagaagaagattgagccgattccggctttggatcatagttccattgagtatgagcccttcaataaggacttctacgaggagaaagattcgatttcaggaatgactgagcaggatgtcactgaatacaggaagagcttgtcgattcgtgtttcaggttttgatgtgccaagaccaattaagacgtttgaagactgtggtttctctccgcaattaatgaatgctatcacgaaacaagggtatgaaaaacctacaccaatacagtgccaagcttttccaattgtgctttctggaagagatattattgggatagcaaaaactgggtctggaaaaactgcagctttcgtgctgccaatgattgtccatattatggatcagcctgaactggccaaagaagaaggtcctattggagtgatatgtgctccaactagggaattagctcatcaaatatatttggagtcgaagaagtttgctaaaccatatggaattcgtgtatctgccatctatggtgggatgtccaaacttgaacagttcaaagaactcaaatcaggatgtgagattgtaattgctactcctgggagattgatagacatgataaaaatgaaggccctgacaatgttaagagcaacttacctagttcttgatgaggctgataggatgtttgaccttggatttgagccacaaataaggtctatcgttggtcagattcggccagaccgtcagactttactcttttcagcgacaatgccccgcaaagttgaaaagttagcaagagagattcttactgatcctgtaagagttaccgttggggaggtgggaatggccaatgaagatatcacacaagttgttcaagtgattccttctgatgctgagaagttgccctggcttcttgataagctacctggaatgattgatgatggagatgttctagtttttgcctcaaagaaagccacagtagatgaaattgaatcacaattgggccaaaaggggcttaaaattgcagctctccatggtgacaaagaccaggcttctcggatggacattctccaaaaatttaaatctggcatatatcatgttcttattgcaactgatgtggctgctcgtggtctagacatcaagtcaatcaaatcagtggtgaactttgatattgctagagacatggatgctcatgttcatcgtattggtagaactggtcgtgctggtgataaagatgggactgcatacaccctgattacacacaaggaggctcggtttgctggagaattggttggaagtctgattgcagccggacagaatgtgcccatggaactaatggatcttgccatgaaggatgggagattcaggtccaaacgtgatgccagaaaaggaggtgggaaaaagtcaaaaggaaagggaggcaatggtcgaggtgttcgtggtgtggattttggtttgggcatcggatataaccctgagtccaataacccttcatctcaaactgttccaagtcgagctgctgcagttaattctttaagaacgggaatgatggcacaatttaaaagcaattttgttgctgctacatctggttcccaaaatcagggctccaataacagtccaagtacttatgccaacaagagaccagttttgcagggttttgtttctggtggttcaataggtggagatatgaatagagctcaaacaaccagttcattcagccctgctccaacgtcagcgggaaaaaccagtggtcagaactctggagaaaatgccagccacagaaactcggaaaactctagagatagatccagagaaaggcggaggccttccggttgggatcggtga

SEQ ID NO: 65585 - protein, 771 aa, Vitis vinifera
MSKRKFGFEGFGINRPATYNFERSQAPQRLYVPPSSRSGGHDNYEDHDLDNIDYDDKDEHGEVAGGGGEVDDGEIDPLDAFMEGIHEEMRAPPPPKVVEKAEKYVDDDEDDPMESFLRAKKDTGLALAADVMHAGYDSDEEVYAAAKAVDAGLIEYDSDDNPIVLDKKKIEPIPALDHSSIEYEPFNKDFYEEKDSISGMTEQDVTEYRKSLSIRVSGFDVPRPIKTFEDCGFSPQLMNAITKQGYEKPTPIQCQAFPIVLSGRDIIGIAKTGSGKTAAFVLPMIVHIMDQPELAKEEGPIGVICAPTRELAHQIYLESKKFAKPYGIRVSAIYGGMSKLEQFKELKSGCEIVIATPGRLIDMIKMKALTMLRATYLVLDEADRMFDLGFEPQIRSIVGQIRPDRQTLLFSATMPRKVEKLAREILTDPVRVTVGEVGMANEDITQVVQVIPSDAEKLPWLLDKLPGMIDDGDVLVFASKKATVDEIESQLGQKGLKIAALHGDKDQASRMDILQKFKSGIYHVLIATDVAARGLDIKSIKSVVNFDIARDMDAHVHRIGRTGRAGDKDGTAYTLITHKEARFAGELVGSLIAAGQNVPMELMDLAMKDGRFRSKRDARKGGGKKSKGKGGNGRGVRGVDFGLGIGYNPESNNPSSQTVPSRAAAVNSLRTGMMAQFKSNFVAATSGSQNQGSNNSPSTYANKRPVLQGFVSGGSIGGDMNRAQTTSSFSPAPTSAGKTSGQNSGENASHRNSENSRDRSRERRRPSGWDR

SEQ ID NO: 65586 - DNA, 1233 bp, Vitis vinifera
  CDS (1)..(1233)
atggcaggcgtagcaccagaaggatcgcagttcgatacccgtaattatgatgccaaaatgactgagctgctttcaactgatggacaggatttcttcacatcttatgatgaggtttatgatagttttgattctatgggtttgcaagagaatcttctcagaggcatttatgcatatggttttgaaaaaccttctgcaattcagcaaagaggaattgttcccttttgcaagggacttgatgtaattcagcaagctcagtcaggaacaggaaagactgcaactttctgctctggtatcctgcagcagcttgattatgggttggtggaatgtcaggccttggttctggcacccactcgtgagcttgcacaacagattgagaaggttatgcgagcacttggtgactaccttggagtgaaggtacatgcgtgtgttggtgggaccagcgtccgtgaggaccagcgcattctttcaagcggtgttcatgttgtcgttggcacacctggtcgtgtatttgacatgctgcgaagacagtcccttcgtcctgattacattaaaatgtttgtgttggatgaagcagatgaaatgctctctcgaggtttcaaggatcagatctatgatattttccaactcctgccatcaaaagttcaagttggagtgttctctgccacaatgccacccgaggcccttgagattacaaggaagtttatgaacaaacccgtaaggattcttgtgaagcgtgatgagctcacccttgaaggtataaagcagttctatgtcaatgttgataaggaggagtggaaacttgagacactctgtgacctttatgaaaccttagccattacccagagtgtcatcttcgtgaacacccgacgcaaagttgactggctgactgacaagatgaggagccgagaccacacagtctcagccacccatggagacatggaccaaaatactagagacattatcatgcgggaattccgttctgggtcttctcgtgttcttatcaccactgatcttctggctcgtggtattgatgtccagcaagtctcccttgtcataaactttgatctccctacccagcctgagaactatctccatcgcattgggcgtagtggacggtttgggagaaaaggtgttgccattaactttgtgaccagggatgatgagagaatgctgtttgacatccaaaggttttacaatgtggtaaatcgaggagctgccatcaaatgttgctga

SEQ ID NO: 65587 - protein, 410 aa, Vitis vinifera
MAGVAPEGSQFDTRNYDAKMTELLSTDGQDFFTSYDEVYDSFDSMGLQENLLRGIYAYGFEKPSAIQQRGIVPFCKGLDVIQQAQSGTGKTATFCSGILQQLDYGLVECQALVLAPTRELAQQIEKVMRALGDYLGVKVHACVGGTSVREDQRILSSGVHVVVGTPGRVFDMLRRQSLRPDYIKMFVLDEADEMLSRGFKDQIYDIFQLLPSKVQVGVFSATMPPEALEITRKFMNKPVRILVKRDELTLEGIKQFYVNVDKEEWKLETLCDLYETLAITQSVIFVNTRRKVDWLTDKMRSRDHTVSATHGDMDQNTRDIIMREFRSGSSRVLITTDLLARGIDVQQVSLVINFDLPTQPENYLHRIGRSGRFGRKGVAINFVTRDDERMLFDIQRFYNVVNRGAAIKCC

SEQ ID NO: 65588 - DNA, 1242 bp, Vitis vinifera
  CDS (1)..(1242)
atggctggcttggcaccggaaggatcacaatttgatgctcgtcaatatgatagcaaaatgaatgagttacttgggactgatggacaagatttcttcacatcatatgatgaggtctatgatagttttgatgcaatggggttgcaagagaatctcctgagaggcatttatgcatacggttttgagaagccctctgcaattcagcaaagaggtattgttcccttcatcaaggggcttgatgtaattcagcaagcacagtctggaactggaaaaacagcaactttctgctctggaattttgcagcagcttgattatgggttagttgaatgccaggcattggtccttgcacccactcgggaacttgcccaacaaattgaaaaggttatgcgagcactaggtgattatcttggtgtgaaggttcatgcttgtgttggtgggaccagtgtccgtgaagaccagcgcattctctcaagtggggttcatgtcgttgtgggtactcctggtagggtttttgacatgttgcgcaggcaatcacttcgtcctgattacattaagatgtttgtgttagatgaagcagatgaaatgctttcacgaggtttcaaggatcagatctatgatattttccagttgctgccatcaaagattcaggttggggtgttctctgccacgatgccacctgaggcccttgagatcacaaggaaattcatgaataaacctgtgaggattctggtgaaacgtgatgagctcacccttgagggtataaaacagttctatgtcaatgttgataaagaggaatggaagcttgagacactttgtgatctctatgagacgctggcgatcacccagagtgtcatctttgtgaacacccggcgcaaggttgactggctgacggacaagatgcgcagccgtgaccacacagtctctgccacccatggagacatggatcaaaacacgagagacatcatcatgcgtgaattccgatctggttcctctcgtgtgctcatcactactgatctattggcccgtggtattgatgtccagcaagtctctcttgtgataaactatgacctcccaacacagccagaaaactacctccatcgaattgggcgtagtggacgatttgggaggaagggggtggcaatcaactttgtgaccaaggatgatgagaggatgctttttgatatccaaaggttttataatgtggtggttgaggagctgccatcaaatgttgctgatctcctgtga

SEQ ID NO: 65589 - protein, 413 aa, Vitis vinifera
MAGLAPEGSQFDARQYDSKMNELLGTDGQDFFTSYDEVYDSFDAMGLQENLLRGIYAYGFEKPSAIQQRGIVPFIKGLDVIQQAQSGTGKTATFCSGILQQLDYGLVECQALVLAPTRELAQQIEKVMRALGDYLGVKVHACVGGTSVREDQRILSSGVHVVVGTPGRVFDMLRRQSLRPDYIKMFVLDEADEMLSRGFKDQIYDIFQLLPSKIQVGVFSATMPPEALEITRKFMNKPVRILVKRDELTLEGIKQFYVNVDKEEWKLETLCDLYETLAITQSVIFVNTRRKVDWLTDKMRSRDHTVSATHGDMDQNTRDIIMREFRSGSSRVLITTDLLARGIDVQQVSLVINYDLPTQPENYLHRIGRSGRFGRKGVAINFVTKDDERMLFDIQRFYNVVVEELPSNVADLL

SEQ ID NO: 65590 - DNA, 1665 bp, Vitis vinifera
  CDS (1)..(1665)
  misc_feature (333)..(333): s is g or c
  misc_feature (1395)..(1395): y is t or c
  misc_feature (1582)..(1582): r is g or a
  misc_feature (1584)..(1584): y is t or c
  misc_feature (1598)..(1598): y is t or c
  misc_feature (1639)..(1639): r is g or a
atggagaaaggcacctcttttctgttctccggcattactttcgacaaaaagaagttcgccgccgatttctccaggtttaaggagaaaaaagagagtgatgatttggttgagagtgggaaatctgaagcagaggagggggcaaggcctgtgaagaagaggaagcggaaggcaacggttgcggatcctgtagaaggattcaatgtcttcaagacttcaaaatcatccgctcaaggaatccagcagaatgaccaggaaaaaagcgaactttctcaagcaaagaaggaactcaatcggcaaattgagagggatgcgcttttgcggaagaagcataasattcatatttctggaaataatgttccatctcccttggagaatttttcagagttgagctcaagatatggatgtgaatcatatttattgcacaacttggcggaacttggatttaaagagccaacaccaattcaaagacaggctattccaggacgcgaatgctttgcttgtgctcctactggatctggaaaaaccttggcttttgtgtgtccaatgcttatgaaacttaagcatgcatcaaaggatggcatccgggctgttatcctttgtcctacaagggagctagctgctcagacagccagagagtccaagaaattggctaaagggaagaaattttacatcaagttattgactaaagaacttttaagaagtggtgatatttcaaaactgccttgtgatatactcatatctacacctctgcgcctgcggtctgctatccgcaaaaaaaagctcgatttaagcagggttgagtatcttgtcctggatgaatcagataaactgtttgagcttggcttggtgaagcagattgatgccgtggtcaaagcatgctcaaatccctcaataatacgctcattgtttagtgctactttacctgattttgttgaagagcttgctcgcacaataatgcatgatgctgttcgagtcatcattggcaggaagaattctgcttctgaacttataaagcaaaaactggtgtttgctggaaatgaagaggggaagcttcttgctcttcgtcaaagctttgcagagagtttgaatccaccgattcttctctttgtccaaagcaaggaacgtgcaaaggagctctacacggaactggcatttgatgacattagagttgatgttatccatgctgatttgtcccaatcacagcgagaaaatgctgtggatgacttcagagccgggaaaacttgggttttgattgcaactgatgttattgctcgtggtatggatttcaaaggcattaactgtgtgattaattatgactttccagattctcctgctgcatatattcacaggattggtcgttctggcagagcaggaaggacaggagaggctattacyatttacacagaagatgatgttccatttttgcggaacattgcaaatgtgatggcagcttctggctgtgaggttccgtcttggattatggccttgcccaaactgaagtggaagaagcatcggccccaaagagattctatatccacaaagccaaaagatcagaaagaagtcgaggactcgggggcttggraycatgtccaagttcyggatctttgtgtggatcattcccagatcaaaatgatcagcraagtggcaactggccaattacagtga

SEQ ID NO: 65591 - protein, 554 aa, Vitis vinifera
  misc_feature (111)..(111): The Xaa at location 111 stands for Asn, or Lys.
  misc_feature (533)..(533): The Xaa at location 533 stands for Leu, or Pro.
  misc_feature (547)..(547): The Xaa at location 547 stands for Glu, or Lys.
MEKGTSFLFSGITFDKKKFAADFSRFKEKKESDDLVESGKSEAEEGARPVKKRKRKATVADPVEGFNVFKTSKSSAQGIQQNDQEKSELSQAKKELNRQIERDALLRKKHXIHISGNNVPSPLENFSELSSRYGCESYLLHNLAELGFKEPTPIQRQAIPGRECFACAPTGSGKTLAFVCPMLMKLKHASKDGIRAVILCPTRELAAQTARESKKLAKGKKFYIKLLTKELLRSGDISKLPCDILISTPLRLRSAIRKKKLDLSRVEYLVLDESDKLFELGLVKQIDAVVKACSNPSIIRSLFSATLPDFVEELARTIMHDAVRVIIGRKNSASELIKQKLVFAGNEEGKLLALRQSFAESLNPPILLFVQSKERAKELYTELAFDDIRVDVIHADLSQSQRENAVDDFRAGKTWVLIATDVIARGMDFKGINCVINYDFPDSPAAYIHRIGRSGRAGRTGEAITIYTEDDVPFLRNIANVMAASGCEVPSWIMALPKLKWKKHRPQRDSISTKPKDQKEVEDSGAWBHVQVXDLCVDHSQIKMISXVATGQLQ

SEQ ID NO: 65592 - DNA, 1476 bp, Vitis vinifera
  CDS (1)..(1476)
  misc_feature (159)..(159): r is g or a
  misc_feature (507)..(507): r is g or a
  misc_feature (642)..(642): y is t or c
  misc_feature (648)..(648): s is g or c
atgcatgcgcgaggaaggtacccacccggcatacacggtggtggccgtggcggcggaatggggaccggaaaccctagcggccccaatcctaattttcagtatcggaaccctaaccagcaacagtacgttcaaaggaatgtagggcagagttaccagcartttcagcagcagaatcagcagcagtggttgaggaggaatcaggcaggggctgattcggctgtggatgaagtggagaagactgtgcagtcggaggccgtcgattcgagttcacaagattggaaggcacggctaaagataccaccacctgatacacgctacaggacagaggatgtaacggccactaagggaaatgaatttgaggattattttctgaaacgtgagctgcttatgggcatatatgagaagggatttgaaagaccatctcccattcaggaagagagtattccaattgctctaactggaagcgatattcttgctagagctaaaaatggaactggaaaaacagcrgcattttgcattcctgccttggaaaaaattgatcaagataacaatgtgattcaagttgttatacttgttccaacacgagaattggctcttcaaacatcacaagtgtgtaaggagcttgggaaacatctgaaaatycaagtsatggttaccactggtggcaccagcttaaaagatgatatcatgcgtttatatcaaccagttcatttgcttgtaggaactcctggaagaatactagatctttcgaagaagggtgtgtgcattttgaaagattgttccatgcttgttatggacgaggctgataagcttttgtcgccagagtttcaaccttcgatagagcaactgattcattttatgcccttgaatcgtcaaattttgcttttttcagctacctttccagttactgttaaggattttaaagatagatatctccaaaaaccttatattattaaccttatggatgagctcactctcaagggtattactcaatattatgcttttgtcgaagaaagacagaaagttcactgcctaaatactcttttctctaagcttcaaatcaaccaatccatcattttctgcaactcggtgaatcgagtggaactgttggccaagaagattacagaacttggctattcttgcttctatatccatgcaaagatgctgcaagatcatcgcaatagagtatttcatgacttccgtaatggagcgtgcagaaatcttgtctgtactgatctctttacacgagggatagatatccaagccgtcaatgttgttattaattttgattttcctaagaactcagaaacatatctgcacagagttggtcgatcaggaaggtttgggcaccttggattggctgtgaatttgatcacctatgaggaccggtttaacttgtataggattgagcaagaacttgggactgaaataaagcaaattccaccgcatatagatcaggctatttactgtcggtga

SEQ ID NO: 65593 - protein, 491 aa, Vitis vinifera
MHARGRYPPGIHGGGRGGGMGTGNPSGPNPNFQYRNPNQQQYVQRNVGQSYQQFQQQNQQQWLRRNQAGADSAVDEVEKTVQSEAVDSSSQDWKARLKIPPPDTRYRTEDVTATKGNEFEDYFLKRELLMGIYEKGFERPSPIQEESIPIALTGSDILARAKNGTGKTAAFCIPALEKIDQDNNVIQVVILVPTRELALQTSQVCKELGKHLKIQVMVTTGGTSLKDDIMRLYQPVHLLVGTPGRILDLSKKGVCILKDCSMLVMDEADKLLSPEFQPSIEQLIHFMPLNRQILLFSATFPVTVKDFKDRYLQKPYIINLMDELTLKGITQYYAFVEERQKVHCLNTLFSKLQINQSIIFCNSVNRVELLAKKITELGYSCFYIHAKMLQDHRNRVFHDFRNGACRNLVCTDLFTRGIDIQAVNVVINFDFPKNSETYLHRVGRSGRFGHLGLAVNLITYEDRFNLYRIEQELGTEIKQIPPHIDQAIYCR

SEQ ID NO: 65594 - DNA, 1242 bp, Lepeophtheirus salmonis
  CDS (1)..(1242)
atgtcgaattcggacagaagatcccctgtggacgagaatgaacgagaatttagtcgtcctggtgcagatgatggcgacacaaacgacatcatcgagtgcaactggttcgagatttgcgaatcattcgacgatatgaatctaaaggaagatctccttcgtggcatttattcatttggttttgagaagccatctgcaattcaacaaagagcgattgttccatgcatcaaaacaagagatgccattgctcaagcccaatcaggaacgggtaaaactgcgactttttcgatcgccatccttcagaagatcgatatctccatgaataggactcaagctcttattttagctcctacccgagaattggctcaacaaattcaaaaagtggtcctctctcttggagattttttgaaggccacttgttatgcctgcattggcggtcgttcaatctcgagtgacatccgtgctctggaacatggacctcatatcgttgttggaacacctggaagagtattcgacatgattactcgagaacatcttcgtactgaaaacatcaagatgttcgtcctcgatgaggccgatgagatgttaagtagaggatttaaggagcaaatctatgacgttttccgtcatttaaaccaagatatccaagttgttcttatgtcggctaccatgcctgacgacgtcttggatgtcaccaaaagatttatgagagatcccattcgaatccttgtccgtaaagaggaattgaccttggaaggtattcttcagttctatgtgtttgtagagaaggaagaatggaagctctcaactctctgcgatttgtatgagactctaaccattactcaagctgtcatcttttgtaatacccgcaggaaagtttgctggcttacagagaaaatgggtttaaaacactttacttgttcttccatgcacggtgaaatgtcacaagaggaacgtgaagtgattatgcgtgaatttagaagtggatcgtcacgtgtattaatcactacagatttgttagctcgtggtatcgatgtgcagcaaatttccttggttatcaattatgatttgcctgtcaacaaggaaaactatattcacagaattggtcgtggtggccgtttcggtcgtaagggtgttgctattaactttatcacagaaggtgatagaatggctcttcaagatattgaaaaacattatcatacccagatcgaggagatgccgaaagatgtagcgaatcttatataa

SEQ ID NO: 65595 - protein, 413 aa, Lepeophtheirus salmonis
MSNSDRRSPVDENEREFSRPGADDGDTNDIIECNWFEICESFDDMNLKEDLLRGIYSFGFEKPSAIQQRAIVPCIKTRDAIAQAQSGTGKTATFSIAILQKIDISMNRTQALILAPTRELAQQIQKVVLSLGDFLKATCYACIGGRSISSDIRALEHGPHIVVGTPGRVFDMITREHLRTENIKMFVLDEADEMLSRGFKEQIYDVFRHLNQDIQVVLMSATMPDDVLDVTKRFMRDPIRILVRKEELTLEGILQFYVFVEKEEWKLSTLCDLYETLTITQAVIFCNTRRKVCWLTEKMGLKHFTCSSMHGEMSQEEREVIMREFRSGSSRVLITTDLLARGIDVQQISLVINYDLPVNKENYIHRIGRGGRFGRKGVAINFITEGDRMALQDIEKHYHTQIEEMPKDVANLI

SEQ ID NO: 65596 - DNA, 1245 bp, Zea mays
  CDS (1)..(1245)
atggcaggaatggcacctgagggttctcagttcgatgctaagcactatgattctaagatgcaggagctgctgagcaccggtgagactgaggagttcttcacttcatatgatgaagtttttgagagttttgatgatatgggcctccaagagaatcttctgagaggcatttatcgttatggttttgagaagccatctgcaattcagcagagaggaattgttcccttctgcaagggtcttgatgtcattcagcaagcacaatctggtacaggaaagacagcaaccttctgttctgggatcttgcagcagctggactatggcctggttgaatgccaggccctggtccttgctcccacccgtgagcttgcacagcaaatcgagaaagtcatgcgcgcgcttggtgattaccttggtgttaaggtccatgcatgtgtgggaggaacatccgtccgtgaggaccaaaggattcttggcagtggtgtgcatgttgttgttggtacacctggtcgtgtgtttgatatgctgcgcagacagtccctccgccctgataacatcaagatgtttgttctagatgaagctgatgaaatgctttctcgtggtttcaaggatcagatttacgacatcttccagcttctcccagccaagattcaggttggagtcttctctgctaccatgccccctgaggcccttgagattacccgcaagttcatgaacaagccagtgagaatcctcgtgaagagagatgagctgactcttgagggtatcaagcagttctatgtgaatgtggataaggaagactggaagctggacacactgtgtgacctgtacgagacccttgccatcacccagagtgtcatctttgtcaacacccgccgcaaggtggactggctcactgacaagatgaggagcagggaccacactgtttctgccactcatggtgacatggaccagaacactagagacatcatcatgagggagttccggtctggctcctcccgtgtgctcatcaccaccgacctgcttgctcgtggtattgatgttcagcaggtgtccctggtcatcaactatgatctccccacccagccagagaattacctgcatcgcattggtcgtagtggtcgtttcggtaggaagggtgttgccatcaactttgtgacccgcgacgacgagcggatcgtgttcgacatccagaagttctacaacgtgttgattgaggagctgcctgccaacgtcgctgaccttctgtga

SEQ ID NO: 65597 - protein, 414 aa, Zea mays
MAGMAPEGSQFDAKHYDSKMQELLSTGETEEFFTSYDEVFESFDDMGLQENLLRGIYRYGFEKPSAIQQRGIVPFCKGLDVIQQAQSGTGKTATFCSGILQQLDYGLVECQALVLAPTRELAQQIEKVMRALGDYLGVKVHACVGGTSVREDQRILGSGVHVVVGTPGRVFDMLRRQSLRPDNIKMFVLDEADEMLSRGFKDQIYDIFQLLPAKIQVGVFSATMPPEALEITRKFMNKPVRILVKRDELTLEGIKQFYVNVDKEDWKLDTLCDLYETLAITQSVIFVNTRRKVDWLTDKMRSRDHTVSATHGDMDQNTRDIIMREFRSGSSRVLITTDLLARGIDVQQVSLVINYDLPTQPENYLHRIGRSGRFGRKGVAINFVTRDDERIVFDIQKFYNVLIEELPANVADLL

SEQ ID NO: 65598 - DNA, 1224 bp, Pisum sativum
  CDS (1)..(1224)
atggcgacaacttctgtggtgccggcaaatcgtgggcgaacggttatctccaatgaggatatggactttgagacgacggaaggtgtgaaggcgattgcgaccttcgaagggatggggataaaagaagatttgctgcgtggaatctacgcatacggtttcgagaaaccatcggcgattcaacagcgtgccgttgcgcctatcattcagggacgtgatgttattgctcaagctcaatctggaaccggaaagacgtccatgattgcgcttactgtttgccaggttgttgatacatccgtcagagaagtgcaagctttaattgtgtctccaacaagagaattggccacacagactgaaaaagttatattggctattggagatcatattaatatacaagcacatgcttgcattggaggcaaaagtgtgggagaagatattaggaaacttgagcatggagttcacgtggtgtctggaactcctgggcgagtctgtgacatgataaaaaggagaacattgcgtacaagagctatcaagttactagttctggatgagtctgatgaaatgttgagcagaggatttaaagatcaaatttatgatgtgtatagatatctcccacccgatcttcaggtttgcttgatttctcgtacgctacctcatgaaattctggagatgacaaacaagtttatgacagatccagtgaggatccttgtcaaacgtgatgaattgacattggagggcatcaagcaattttttgttgcggttgaaaaggaggattggaagtttgatactctgtgtgtgatctttatgatactctcaccatcactcaagctgttatattctgtcaacaccaagcgaaaggtggactggttaactgaaaaaatgcgtaacaataatttcactgtctcatcaatgcacggtgacatgcctcaaaaagaaagagatgcaattatgggagaatttcgtgctggaacaacccgagtattgataacaactgatgtttgggctcgtggccttgatgtacaacaggtttctctagttattaattatgaccttccaaataatcgagagctgtacattcatcggattggtcggtctggacgttttggacgaaagggtgttgcaataaattttgttaaaagcgacgatatcaagatcttgagagatattgagcagtattatagtacccagattgatgagatgccaatgaatattggtgatcttatataa

SEQ ID NO: 65599 - protein, 407 aa, Pisum sativum
MATTSVVPANRGRTVISNEDMDFETTEGVKAIATFEGMGIKEDLLRGIYAYGFEKPSAIQQRAVAPIIQGRDVIAQAQSGTGKTSMIALTVCQVVDTSVREVQALIVSPTRELATQTEKVILAIGDHINIQAHACIGGKSVGEDIRKLEHGVHVVSGTPGRVCDMIKRRTLRTRAIKLLVLDESDEMLSRGFKDQIYDVYRYLPPDLQVCLISRTLPHEILEMTNKFMTDPVRILVKRDELTLEGIKQFFVAVEKEDWKFDTLCVIFMILSPSLKLLYSVNTKRKVDWLTEKMRNNNFTVSSMHGDMPQKERDAIMGEFRAGTTRVLITTDVWARGLDVQQVSLVINYDLPNNRELYIHRIGRSGRFGRKGVAINFVKSDDIKILRDIEQYYSTQIDEMPMNIGDLI

SEQ ID NO: 65600 - DNA, 1236 bp, Vibrio alginolyticus
  CDS (1)..(1236): transl_table=11
atgccattttctaagcttggtttaagcgcatcgattactgatgcagtaaaagcgctaggttatgaaaaaccgacctctatccagcaaaaagccattccaatcgtactgcgtggtagcaacttaattgccgcagcacaaacggggacaggtaaaacggccagttttgttctaccaatcttagaaaagcttagtcaaggcgaaacgcaacgtaaaaaacgcgctcgcgctattatccttacgcccacacgcgaacttgcgcttcaggttcatcaaagcattgaagcttatggtaaaaacttaccactgcgctcaatggcgatgtttggtggcgtggaatatgcgccgcagaagcaagcgctgattgaaggcgtagatattgtggtgagcactccaggacgtctgattgatttatacggccagcgtgcgatccattttgatgaagtggaaatgctggtattggacgaagccgataagatgcttgatatgggctttatcgactcgatcgataagatcatcgattgcatgccagaagatgttcaaagtttgctgttctcggctacgttgtcgaacccagttcgtgatttggccaaaaacgcgattgtagatcctgaagagattacgattgcaaaacacagcgcatctaagtcgaacatcaagcaatggatcaccaccgtcgataaagacatgaagtcatcgcttttgagccacatgctgaatgaaaacgactggtcgcaagtgctgatctttattgaaacaaaacacggtgcggccaaattggttagccagcttgagaagcgcggtattgtggctgaagcgttccacagtggtcgcaatcagcgtgttcgtcaggaactgattgagaagttcaaggcgggtgaaattcagtatctggttgcaactggcgttgccgcgcgtggtattgatatcgacaacttaccagtagtgattaactacgatttaccattccctgcggatgagtacgtacaccgcatcgggcgtactggccgtgctggcgcgcaaggtgaagcgatctctttggtatcgaaggatgatttcaaaaacctgtgcatgattgaaagccgtctgggtcacttgcttgagcgtgttgaaatcgaaggttttgctccaagaaagccagtgccgatttcgattttgaattacgtacctaagaataagcgtaaaccacaagacaatcgcccgcgtcgtgagaattctgaacaacgtgacgcaaaatag

SEQ ID NO: 65601 - protein, 411 aa, Vibrio alginolyticus
MPFSKLGLSASITDAVKALGYEKPTSIQQKAIPIVLRGSNLIAAAQTGTGKTASFVLPILEKLSQGETQRKKRARAIILTPTRELALQVHQSIEAYGKNLPLRSMAMFGGVEYAPQKQALIEGVDIVVSTPGRLIDLYGQRAIHFDEVEMLVLDEADKMLDMGFIDSIDKIIDCMPEDVQSLLFSATLSNPVRDLAKNAIVDPEEITIAKHSASKSNIKQWITTVDKDMKSSLLSHMLNENDWSQVLIFIETKHGAAKLVSQLEKRGIVAEAFHSGRNQRVRQELIEKFKAGEIQYLVATGVAARGIDIDNLPVVINYDLPFPADEYVHRIGRTGRAGAQGEAISLVSKDDFKNLCMIESRLGHLLERVEIEGFAPRKPVPISILNYVPKNKRKPQDNRPRRENSEQRDAK

SEQ ID NO: 65602 - DNA, 1632 bp, Ostreococcus tauri
  CDS (1)..(1632)
atgccgccgaagaagcgcgcgacggcggaggcggcggtggagaacgatgaggaggaagaactgctggattacgacgacgtcgcgaacgccgcggggacgaacgcgccgggcgacgccgtggacgacaccgcggacggaacgacggcgaagaaggggtacgtcgggattcactccacgggattccgtgatttcttgttgaaacccgagttgctgcgagcgatcgtcgattgcgggttcgagcacccgagcgaggttcaacacgagtgcattccgcaggcgatcttggggatggacgtgctgtgtcaggcgaagagtgggatgggtaagacggcggtgttcgtcatcaccgtcctgcaacaactcgaaccgacgcacggagaggtcggggcggtgattttgtgtaacacgcgagagttggcgtatcaaatttcgcacgaattcgagcgattctcgacgtttctcggggacgtgacgacggcggtcgtgttcggagggattcccatcaatcaacagagggaacaattgaagttgaacccgccgaacatcgtcgtcgggacgccggggaggttgaaggcgctcgcgaacgacgggacgctcaacctgaagaagtgcgcgcacttcgtcctggacgagtgcgacaagatgttggaagagctcgacatgcgctcggacgtgcaggaaattttcaaggcaacaccgcacgacaaacaagtgatgatgttcaccgcgacgctttccaaggagctccgcgcgttgtgcaagaagtttatgaatgatcccatggagatcttcgtcgacgacgagaccaagctcacgcttcacggtttggtgcagcactacgtcaagctcgaggaggcggaaaagaaccgcaagttgaacgatctgttggactccctcatgttcaaccaggtcgtcatcttcgtctcgagcgtatcgcgttgcaaagccttggacagactcctgcgagagtgcaactttccgtcaatcggcattcacggcgacatgaagcaagaggagcgtttggcgtgctacaagtccttcaaggatggcgacaagcgtatcttagtcgcaactgatctcgtcgctcgcgggatcgacatcgagcgcgtgaatatcgtgatcaactacgatatgccctccagcgcggacacgtacttgcaccgcgtcggtcgcgccggccgcttcggtacgaagggcctcgccgtcaccttcgtcgcctcctccgaggacaccgatgtcctggcttctgtgcacgagcgctttgagaccaatccacgtacatgccgagctaggagtacgacggacgcgaatcgacgtcttctcaccgtcgtcgctcgccacgcttctcacccccgctcgggcgcgttgaaacaaacaaacataacaactactcatcacgcttcgagcacgctcgatcccaaccgtcgcatcgttctcgcgtcgccgcgactacacgtcgcgtttgatcttcgccgcgcgctcgccgggcgcgcccgcgaacaccctcacccgcacaatccgactcgccatgtcgcgagacggtctcctcgacgcccccatcgacgcatcatcgtcgtccaccttcctctcccgcgtcgtcgccgtcgtctcgccgtctcgtcgcggccgtaa

SEQ ID NO: 65603 - protein, 543 aa, Ostreococcus tauri
MPPKKRATAEAAVENDEEEELLDYDDVANAAGTNAPGDAVDDTADGTTAKKGYVGIHSTGFRDFLLKPELLRAIVDCGFEHPSEVQHECIPQAILGMDVLCQAKSGMGKTAVFVITVLQQLEPTHGEVGAVILCNTRELAYQISHEFERFSTFLGDVTTAVVFGGIPINQQREQLKLNPPNIVVGTPGRLKALANDGTLNLKKCAHFVLDECDKMLEELDMRSDVQEIFKATPHDKQVMMFTATLSKELRALCKKFMNDPMEIFVDDETKLTLHGLVQHYVKLEEAEKNRKLNDLLDSLMFNQVVIFVSSVSRCKALDRLLRECNFPSIGIHGDMKQEERLACYKSFKDGDKRILVATDLVARGIDIERVNIVINYDMPSSADTYLHRVGRAGRFGTKGLAVTFVASSEDTDVLASVHERFETNPRTCRARSTTDANRRLLTVVARHASHPRSGALKQTNITTTHHASSTLDPNRRIVLASPRLHVAFDLRRALAGRAREHPHPHNPTRHVARRSPRRPHRRIIVVHLPLPRRRRRLAVSSRP

SEQ ID NO: 65604 - DNA, 1215 bp, Ostreococcus tauri
  CDS (1)..(1215)
atggcgcgaggtgacgacgacgaccgggtggtggatcgcgatgaacacgagaacgtgtcgtttgaggtgtccaagggaatcgcgagacacgcgacgttcgatgcgatgggaattcgtgaggatttgttgagaggtttgtactcgtacgggtttgaaaagccgagcgcgattcaacagcgcgcggtggtgccgatcatttcgggtagagatgtgatcgcgcaggcgcagagtggaacggggaagacgtctatgatttcgctggcgctgtgtcagatgctggacacgacgtcgagggaggtgcaggggttggtgctgtcgccgacgagagagttggcggtgcagacggagaagacggcgctcgcgctcgggaactttatgaacgtgcaagtgcacgcgtgcatcgggggtaggtcgatcggtgaggacatcagaaagctagattacggctgtcacatcgtgagcgggacgccggggcgtgttttcgacatgatcaagaggcgtaacttgcgaacgcgcgggataaagattttggtcctggacgaggcggacgaaatgttgaacaaggggttcaaggaacaaatttacgacgtgtacagataccttccgccggagacgcaggtggtcctagtgagtgccacgctaccgaatgaggttttggagatgaccgggaagttcatgactgatccgctgcgcatcttggtgaagagagacgagctcacgctagagggtatcaagcagttttttgtcgccgtcgagcgcgaggagtggaaattcgatactctgtgcgacttgtacgataccctgaccatcacccaggctgtgatcttctgcaacacgaagaagaaagtggattggctgacagagaagatgcgtcaaaacaactttactgtctctgcgatgcacggcgacatgcctcaaaaggagcgcgaagagatcatgaatgaattccgcggcggaaccacgcgcgtgttgataaccaccgacatgtgggcgcgcggtatcgatgttcagcaagtatccttggtgatcaactacgatttgccgggaaatcgtgaaaactacattcatagaatcggtcgctcgggtcgttatggtcgcaagggtgtggccatcaatttcgtgaaggaggaggacgtccgagcgttgcgcgacatcgagcaatattattccacgcaaattgatgagatgccgatgaacgtggctgatatgatttag

SEQ ID NO: 65605 - protein, 404 aa, Ostreococcus tauri
MARGDDDDRVVDRDEHENVSFEVSKGIARHATFDAMGIREDLLRGLYSYGFEKPSAIQQRAVVPIISGRDVIAQAQSGTGKTSMISLALCQMLDTTSREVQGLVLSPTRELAVQTEKTALALGNFMNVQVHACIGGRSIGEDIRKLDYGCHIVSGTPGRVFDMIKRRNLRTRGIKILVLDEADEMLNKGFKEQIYDVYRYLPPETQVVLVSATLPNEVLEMTGKFMTDPLRILVKRDELTLEGIKQFFVAVEREEWKFDTLCDLYDTLTITQAVIFCNTKKKVDWLTEKMRQNNFTVSAMHGDMPQKEREEIMNEFRGGTTRVLITTDMWARGIDVQQVSLVINYDLPGNRENYIHRIGRSGRYGRKGVAINFVKEEDVRALRDIEQYYSTQIDEMPMNVADMI

SEQ ID NO: 65606 - DNA, 1479 bp, Ostreococcus tauri
  CDS (1)..(1479)
atgtccgcgccctgggcctcggacgagaccacggatttacccccgcccccgcccgggttcgaagacgtccgcgcgggcgcgcacggcgacgccgtggacgcgatcgcggattcactgcgacgaaccaccgacgtgggcgcgcgcgctggggtggtcgacgccccggatctcgcgctcaagagcgatggcttgcgggaagaacacgcgggggaggtgcggaagacgatcgtcgatccgtccacgccgtactcgagcgcgaagacgttcgaggatctgggcctgagcgcggagctcctgcgggggttgtacggggagatgaagtttgaaaagccgtcgaagattcaggcggagacgctgccgttgatcctgatgccgccgcataggaatttgatcgcgcaggcgcataacgggagtgggaagacgacgtgctttacgttggggatgctgagccggattgatccggcggtgaagacgccgcaggggttgatgatttgcccgacgcgcgagctggtggtgcaaaacgtgagcgtgatggaacgcatggggaagtacaccgggataacgatcgcgagcacggcggatccgaagtgggataacacgaatcgtaacaagattgtggatcaggcggtgatcgggacgccggggaaaattttgcgctggatgcgagagcgacaactggcgtgtaacaacatgaagatcctcgtcttcgacgaagcggatcacatgatggccaccgatgggcatcgcgttgatagcacgaagatcttgaagcatctttccatgagcgccaaggcgtggcaggtcttgctctttagcgccacgtttaacgaggcggtgaagagctttgcgacgaaagtcgtgcccaacgcaaaccaaatcttcatcccggccaccgagctttcgctcgatgtcatcaagcagcatcgcgtcgtggtgaactccgtggacgccaaagacgtgttgctcaaggagaagatcttcccgttgtgcgataagattggtcaaaccatcattttcgttcgcacgcgcgagggcgcgcgcagactccacgcgtcgatgaacgcaagcggatacaagtgcactgtcatcgagggacagatggaacatagcgatcgcgaccgagtcgtgaaagagttccgtgacggcttgaccaaaattctcatcgccaccgacgtgctctccagaggtttggacgtgagcacggtgacgctcgtgatcaactacgacatgcccgtggagttccataacccgcgctcgccaaattacgagacataccttcaccgcatcggtcgcagcgggcgcttcggtaaaaagggcgcagcgttcaacctcatcctgggcgactctgaacgcgcgatttgcgatcagattgagttacacttcaatcacaagattcccgaggtgcacttcaacgacgacgtgacatttgaaaaagtgttggaagacgccggcctgatgtccaaggaagaggctctttag

SEQ ID NO: 65607 - protein, 492 aa, Ostreococcus tauri
MSAPWASDETTDLPPPPPGFEDVRAGAHGDAVDAIADSLRRTTDVGARAGVVDAPDLALKSDGLREEHAGEVRKTIVDPSTPYSSAKTFEDLGLSAELLRGLYGEMKFEKPSKIQAETLPLILMPPHRNLIAQAHNGSGKTTCFTLGMLSRIDPAVKTPQGLMICPTRELVVQNVSVMERMGKYTGITIASTADPKWDNTNRNKIVDQAVIGTPGKILRWMRERQLACNNMKILVFDEADHMMATDGHRVDSTKILKHLSMSAKAWQVLLFSATFNEAVKSFATKVVPNANQIFIPATELSLDVIKQHRVVVNSVDAKDVLLKEKIFPLCDKIGQTIIFVRTREGARRLHASMNASGYKCTVIEGQMEHSDRDRVVKEFRDGLTKILIATDVLSRGLDVSTVTLVINYDMPVEFHNPRSPNYETYLHRIGRSGRFGKKGAAFNLILGDSERAICDQIELHFNHKIPEVHFNDDVTFEKVLEDAGLMSKEEAL

SEQ ID NO: 65608 - DNA, 1278 bp, Ostreococcus tauri
  CDS (1)..(1278)
atgcagggatacgggtacggacacccgccgcaagggtacgcgcaagcgccggcgccggcgcagcagcaaaatggaaactggaaggacacgctcgcgattccggcgaaggacacgcggtatcgcacggaggacgtcacggctacgaagggtaatgagttcgaagattacttcttgaagagagaactcctgatggggatctttgagaagggtttcgagagaccttcgccaattcaggaggagtcgatcccgatcgcgctcacaggacgggacattctcgcgcgggcaaaaaatgggacgggtaagacggctgcgttcagtattcccatcctcgaaaaggtagacaccagtaaaaatatcattcaagctgtgattttggtacccacgcgagagttggcgctgcaaacgagtcaagtttgcaaagagcttggaaagcacttaggggtcgctgtcatggtgactacgggaggtacatccctaaaggacgacatcatgcgcttacaccaaccagtgcacgttgtcgtcgccacccccggtcgtctcgtcgacctggcgagtaagggcgtagccaagctgggccaagccacgatgctggccatggatgaggcagacaagctcttgtcccctgagttccaacccgttattggtcaagtcatcaacttcatggccaagaaccgacaaattctactctactccgcgacgttcccagtgaccgtcaaggacttcaaggataagtacttgcgcaagccgtacgtcattaacctcatggaggagctcactctgaagggtatcacccaatactatgcgtttgtcgaagaaaggcaaaaggttcactgcctcaacacgctctttagcaagctccaaatcaaccaatccatcattttctgcaacagcgttactcgtgttgagttactggctagaaagatcacggagctcggatattcatgcttctacattcacgccaaaatgattcaggcgcaccgtaaccgtgttttccacgatttccgcaacggcgcatgccgtaacttggtgtcgtcggatctcttcactcgtggtatcgacattcaatccgtcaacgttgtcatcaactttgacttcccgaagaactctgagacgtacttgcacagagttggtcgatctggccgtttcggtcacttgggtatcgctgtgaacctcatcacgtacgacgaccgaatgaacttgttccgcatcgaacaagagctcggcacggagattcaacaaattccgtctcaaattgatccgtctaagtactgccgctag

SEQ ID NO: 65609 - protein, 425 aa, Ostreococcus tauri
MQGYGYGHPPQGYAQAPAPAQQQNGNWKDTLAIPAKDTRYRTEDVTATKGNEFEDYFLKRELLMGIFEKGFERPSPIQEESIPIALTGRDILARAKNGTGKTAAFSIPILEKVDTSKNIIQAVILVPTRELALQTSQVCKELGKHLGVAVMVTTGGTSLKDDIMRLHQPVHVVVATPGRLVDLASKGVAKLGQATMLAMDEADKLLSPEFQPVIGQVINFMAKNRQILLYSATFPVTVKDFKDKYLRKPYVINLMEELTLKGITQYYAFVEERQKVHCLNTLFSKLQINQSIIFCNSVTRVELLARKITELGYSCFYIHAKMIQAHRNRVFHDFRNGACRNLVSSDLFTRGIDIQSVNVVINFDFPKNSETYLHRVGRSGRFGHLGIAVNLITYDDRMNLFRIEQELGTEIQQIPSQIDPSKYCR

SEQ ID NO: 65610 - DNA, 1299 bp, Callinectes sapidus
  CDS (1)..(1299)
atgtccgacaaatacgaccaccaaaaggatggggaaccaagtagggatgaggagtggggctcgggtggaggcggatccacccccagcggcggcggtggagacaacaaggactacgatggccctgctggcatggaagtcgatggagtcattgaatcctcctggactgaggtggccacaagctttgatgacatgaacctggatgaagctctattgagaggcatctatgcttatggttttgagaagccatcagccatccagcagagggccatcctgccctgcatcaggggtcacgatgccatcgcccaagcccagtccggtactggcaagacggccaccttctcaatctccatcctgcagaggattgacgtgaagtcaaacgaaacgcaggcgctcatcctggcccccactagggagctggcccagcagatccagaaggtggtgctggccttgggtgactacatgaacgtcacttgccacgcctgcattggcggcaccaacctgcgggaggacatgcggcgcctggagatgggcgtgcagatcatcgtgggaacgcccggccgcgtgtacgacatgatcaaccgcagagtactgaatcccaaacatataaagatgttcgtgctagatgaagccgacgagatgttgtcgcgagggttcaaggatcagatctacgatgtgttccgcttcctgcccagcgaggtgcaggtggtgctcctctcggctaccatgccgtccgacgtcatggatgtgacgaccaagttcatgcgtgaccccatcaccatcttggtcaagaaggaggagctcaccctagaaggtatcaagcagttttatgtgaacgttgagaaggaggactggaagctggagacactctgtgatctgtacgagactctcaccatcactcaggctgtgatcttctgcaacacccgtaggaaggtggattggctcactgacaagatgcaccagagggacttcacggtgtctgccatgcacggtgacatggaccagaaggagcgtgacgtcattatgcgtgagttccgttctggctcctcccgtgtgctgattacgactgacttgctggcccgtggtattgatgtgcagcaggtgtcgctggtcatcaactatgacctgcccaccaacagggagaactacatccacaggattggtcgaggtggacgtttcggccgaaagggcgttgccatcaactttgtgacctctgaagacactcgaattctccaggacattgaggaacactacaggacctccattgaagagatgcccatgaacgtggctgatttgatttaa

SEQ ID NO: 65611 - protein, 432 aa, Callinectes sapidus
MSDKYDHQKDGEPSRDEEWGSGGGGSTPSGGGGDNKDYDGPAGMEVDGVIESSWTEVATSFDDMNLDEALLRGIYAYGFEKPSAIQQRAILPCIRGHDAIAQAQSGTGKTATFSISILQRIDVKSNETQALILAPTRELAQQIQKVVLALGDYMNVTCHACIGGTNLREDMRRLEMGVQIIVGTPGRVYDMINRRVLNPKHIKMFVLDEADEMLSRGFKDQIYDVFRFLPSEVQVVLLSATMPSDVMDVTTKFMRDPITILVKKEELTLEGIKQFYVNVEKEDWKLETLCDLYETLTITQAVIFCNTRRKVDWLTDKMHQRDFTVSAMHGDMDQKERDVIMREFRSGSSRVLITTDLLARGIDVQQVSLVINYDLPTNRENYIHRIGRGGRFGRKGVAINFVTSEDTRILQDIEEHYRTSIEEMPMNVADLI

SEQ ID NO: 65612 - DNA, 1332 bp, Spiroplasma citri
  CDS (1)..(1332): transl_table=4
atgaattttaatacattaaatttatacccagcattacagcgaatgattgctaaaatgggttatactaacctaactgaaatccaagaaaaagctatcccagttgctcttaatagtcaagatattattggtaaaagtcatacgggtactggtaaaaccgtagcttttattgtgccaattttgcaaaacttaaatacacacttaaaacaaccacaagcgattattttatgtccaacccatgaattagcaagtcaaataattgaacaggttcgaaaatttgcaacttatttagaaggagtaaatgcaaccttaatttgtggtggttcacatattcaacgtcaaatttatgctttacgaaaaagcaatattattgtgggaactccggggcgaattgctgatcatattaatcgtaaaacattgcgattagataaaattaaaacaattgttttagatgaagctgatgaaatgttaaaaatgggatttaaaactgaccttgataaagtatttcaaaatgctcctaataaatatcaaacattattattttccgcaacaatgccaaaacaagtattagaaattgctaataactatcaaactaatcccgttgaaattgttgttacaaaaaatgttattgaacaaaataatattagccagcattatgttaacgcaatatcttatcataaggaagatgttttaatagcattatataaacatttgcaaccaaaacgaagcattatattttcaaatacaaaagtttttactaataaaattgctgaaatgttaacaaataatggtattccttgttgcatcattaatggtgataaaagtcgttatgaacgaggacaggcaatgcgtttatttcgtgatggtaaagtacgagttatggttgccactgatgttgcagcacgaggaattgatattgataatattgattatgttattaattatgatattccaacagaacgagaaagttatattcatcgaattggtagaacagcacgtgctggtgctactggtgtagcgatatcaattgtttcaaatcgtaatgatttaagagaaattcagcatttaggtgcatatcaaaagaaaaagattgagttattagatattacaacatatgatttaaaacaaaaacctcaagaaagaaaaaattttagcactaatcataaaaaatcagcttttaacaaaaaaaacaatagttttaaatatgaggattcatatttagataataaaaagaaccaaaatgcaaaaaagaaatttaatactcaaggtaataaaaaatgaaagcaaaaaaagcaaaaatttgataaatctaattttacttttaatagaatttaa

SEQ ID NO: 65613 - protein, 443 aa, Spiroplasma citri
MNFNTLNLYPALQRMIAKMGYTNLTEIQEKAIPVALNSQDIIGKSHTGTGKTVAFIVPILQNLNTHLKQPQAIILCPTHELASQIIEQVRKFATYLEGVNATLICGGSHIQRQIYALRKSNIIVGTPGRIADHINRKTLRLDKIKTIVLDEADEMLKMGFKTDLDKVFQNAPNKYQTLLFSATMPKQVLEIANNYQTNPVEIVVTKNVIEQNNISQHYVNAISYHKEDVLIALYKHLQPKRSIIFSNTKVFTNKIAEMLTNNGIPCCIINGDKSRYERGQAMRLFRDGKVRVMVATDVAARGIDIDNIDYVINYDIPTERESYIHRIGRTARAGATGVAISIVSNRNDLREIQHLGAYQKKKIELLDITTYDLKQKPQERKNFSTNHKKSAFNKKNNSFKYEDSYLDNKKNQNAKKKFNTQGNKKWKQKKQKFDKSNFTFNRI

SEQ ID NO: 65614 - DNA, 2331 bp, Chironomus tentans
  CDS (1)..(2331)
atgaataattatgcaaacgaaaatggcacgggtctagaacagcaggttgctggtctggacttgaatgaacgaaaaagttcaacaaagtatattcctcctcatttaagaggcgaaatttctgattcgttatcgtccaattctaacgataatcaaggagaaaacctcagggataattacaacaatcgtagcggaggtgaacgcgattttaataatcgaaataataataatcgtcgctacaacaataataacggtaacaatttcaatcaacgagacaattatcctccacgtcaaggagcaggaggaagtgactttaacagcggctataataataactcgaattacagcaacaacaactataataataatcgttatcaaaacggagagtcaggagaacgcggtggatcaaataattggggtggccgcggaggatcgcgtacatttaatcgctcacaaggagccgattcgcgttttagcggtccgccgccaacgcaacagccaccacaacaacaacaacaaaaactcgatcaacaagatagtcaagatgaacccgtcaatacacgttggcaagaaccgccacaacagcaacaagatgatcgtttcggaagatcaaacaataatggcggcggatttggtggaaaatggaatcaacgtgctccagagattgattacactataccgttaccacgtgatgaacgtgttgaacaggagttgtttggtaccgcgaatacgggtatcaattttagcaaatacgaagacattcccgtggaggcgacgggacagcaagttcctgaacacattacgtcttttgatgacatcaagttgacggaaattatacgcacgaatataaagatggcaagatacgacaaaccaactccggtacaaaaatatgccataccaatcatactgtctggacgtgatctcatgtcatgcgctcaaactggctctggcaaaacggctgcatttctcgttccgatattaaatcgaatgttagaacaaggagcaagcatgaatcctgcttcaaatcgtccttatcagcgtcgtaagcaatatcctttgggcttggttcttgcacctacgcgcgagttggctacacaaatttatgaagaagcgaaaaagttttcttatcgttcacgcatgcgtccagctgttttgtatggcggtaataatactagcgagcaaatgcgtgaacttgaccgtggatgtcatttgattgttgcaacgcccggtcgtcttgatgacattattaaccgtggaaaaattggattggagaatttacgttttctcgttttggatgaagcagatcgtatgttggacatgggtttcgagccacagattcgtcatattattgagaatcgagacatgccaccaactggacaacgtcaaacattgatgttctcggcaacatttccgaaaaatatccaagaattggcaagtgatttcctgtcaaattacattttcttggccgtcggacgtgtcggatcgacatccgagaatattacacaaacaattttgtgggttaatgagaatgaaaagcgctcatatttattagacttgttgagtcgattacgtgaaggatcaccagactattctcccgatagcttaacattgatctttgttgagacaaagaaaggtgctgatgcactcgaggaatttttgtatcagaataagcatcctgttacatcaattcatggcgatcgtagtcaacgtgaacgtgaagatgcattaaaatgcttccgttcaggtgattgtcctatattggttgctacagctgttgccgctcgtggacttgatattccacatgttaagcacgtcattaattatgatttgccatcggatgttgaagaatatgttcacagaattggacgtactggtcgtatgggaaatttgggaattgctacaagcttctttaacgaaaagaatcgaaatattgtctcggatttggttgaattattaattgagacgaatcaagaattgccgagtttcctagaagaaatggctaatgatcgttatggaggtcctagacgaagtaataattctcgtggcggtggaaatcgttatggaggtggaactgcatttggctcacgtgattatcgtcagcctcaaagcaatcaacgttatggaggaaatagtggtggcggcggaagaggaggaagcgatagtggtagtggaaatagtggcggaaatcgatatggaggaggtggaaataatcgttcaagtggatatggaaacagtgacggtggatatcgcaatggaggcggaaattatggtggaaattataacagttatggaaacaatcatgcaagttccggaccagattggtgggaagattaa

SEQ ID NO: 65615 - protein, 776 aa, Chironomus tentans
MNNYANENGTGLEQQVAGLDLNERKSSTKYIPPHLRGEISDSLSSNSNDNQGENLRDNYNNRSGGERDFNNRNNNNRRYNNNNGNNFNQRDNYPPRQGAGGSDFNSGYNNNSNYSNNNYNNNRYQNGESGERGGSNNWGGRGGSRTFNRSQGADSRFSGPPPTQQPPQQQQQKLDQQDSQDEPVNTRWQEPPQQQQDDRFGRSNNNGGGFGGKWNQRAPEIDYTIPLPRDERVEQELFGTANTGINFSKYEDIPVEATGQQVPEHITSFDDIKLTEIIRTNIKMARYDKPTPVQKYAIPIILSGRDLMSCAQTGSGKTAAFLVPILNRMLEQGASMNPASNRPYQRRKQYPLGLVLAPTRELATQIYEEAKKFSYRSRMRPAVLYGGNNTSEQMRELDRGCHLIVATPGRLDDIINRGKIGLENLRFLVLDEADRMLDMGFEPQIRHIIENRDMPPTGQRQTLMFSATFPKNIQELASDFLSNYIFLAVGRVGSTSENITQTILWVNENEKRSYLLDLLSRLREGSPDYSPDSLTLIFVETKKGADALEEFLYQNKHPVTSIHGDRSQREREDALKCFRSGDCPILVATAVAARGLDIPHVKHVINYDLPSDVEEYVHRIGRTGRMGNLGIATSFFNEKNRNIVSDLVELLIETNQELPSFLEEMANDRYGGPRRSNNSRGGGNRYGGGTAFGSRDYRQPQSNQRYGGNSGGGGRGGSDSGSGNSGGNRYGGGGNNRSSGYGNSDGGYRNGGGNYGGNYNSYGNNHASSGPDWWED

SEQ ID NO: 65616 - DNA, 1242 bp, Medicago truncatula
  CDS (1)..(1242)
atggcaggtttagctccagaaggttcgcaatttgataccaagcagtttgacactaagatgaatgaattgctttccactgaaggacaagaattcttcacctcatacgatgaagttcatgaaacttttgatgcaatgggattgctagaaaatcttctgagaggcatatatgcttatggttttgagaagccatctgcaatacagcaaaggggaattgttcctttcatcaagggtctcgatgtgattcagcaggctcagtcaggaaccggaaagacagcgacgttctgttctggaattttgcagcagcttgattatggtttggttcagtgccaggctttggttttggccccaacaagggagctggcacagcagattgagaaggttatgagagcacttggtgactaccttggtgttaaggttcatgcttgtgttggtggcactagtgttcgtgaggatcagcgtattctccaaactggtgtccatgttgttgttggtactcctggacgtgtgtttgacatgctgcgaagacagtctcttcggtcagattgcattaaaatgtttgttttggatgaagctgatgaaatgctttcacgtggtttcaaggaccagatctacgacatcttccagttgctgccacccaaaattcaggttggagtgttctctgctacaatgcctccagaggctctggagatcacaaggaagttcatgaataagccagtgagaattctggtaaagcgtgatgaattgacccttgagggtatcaagcagttctacgtgaatgttgacaaggaagagtggaaactagagacattgtgtgacctttacgagactctggctatcactcagagtgtcatttttgtgaacacaaggcgcaaggtggactggctcactgacaagatgcgaggcagagaccatactgtctcagccacccatggagacatggaccaaaacactcgtgatatcatcatgcgtgaattccgctctggctcttctcgagttctcattaccactgaccttttggcccgtggtattgatgttcagcaagtgtctctggtcataaattatgatttgcctacccaacctgaaaactatctccatcgtattgggcgaagtgggcgttttggaagaaaaggtgttgctatcaactttgtcacattggaagatgcaagaatgctggctgatattcagaagttctataatgtgatcgtagaggaattgccttcaaatgttgccgatctactctga

SEQ ID NO: 65617 - protein, 413 aa, Medicago truncatula
MAGLAPEGSQFDTKQFDTKMNELLSTEGQEFFTSYDEVHETFDAMGLLENLLRGIYAYGFEKPSAIQQRGIVPFIKGLDVIQQAQSGTGKTATFCSGILQQLDYGLVQCQALVLAPTRELAQQIEKVMRALGDYLGVKVHACVGGTSVREDQRILQTGVHVVVGTPGRVFDMLRRQSLRSDCIKMFVLDEADEMLSRGFKDQIYDIFQLLPPKIQVGVFSATMPPEALEITRKFMNKPVRILVKRDELTLEGIKQFYVNVDKEEWKLETLCDLYETLAITQSVIFVNTRRKVDWLTDKMRGRDHTVSATHGDMDQNTRDIIMREFRSGSSRVLITTDLLARGIDVQQVSLVINYDLPTQPENYLHRIGRSGRFGRKGVAINFVTLEDARMLADIQKFYNVIVEELPSNVADLL

SEQ ID NO: 65618 - DNA, 1551 bp, Medicago truncatula
  CDS (1)..(1551)
atgaacaataacaatagagggagatatccacctgggattgggttaggacgaggtagtggtggtggtggtttgaactcaaacccgaacaatgcaaacgccgggtttcaacagagaccacattatcaacaacaacagtatgtgcagaggcacctgatgcaaaatcagaatcagcatcagcaacactatcagcatcatcaacagaatcaacaacagtatcagcagcagaatcaacagcagcaacaacaacagtggctgaggaggaaccagttgggtggtggtaccgacaccaatgttgtcgaggaggttgagaagactgtacagtctgaaacaaatgaccctagttcacaagattggaaggaaaaactaaagcttccaccagctgatacacgctataggacagaggacgtgacagcaactaagggaaatgagtttgaggattactttttgaagcgtgagctgctaatgggaatatatgagaaggggtttgaaaggccttcccctatccaagaagaaagcattccaattgcccttactggcagtgacattcttgctagggctaaaaatggaacaggcaaaacagctgcatttagcattcctgcattggaaaaaattgatcaagataacaatattattcaagttgttatactcgttccaacacgagaattggctctgcaaacatctcaagtgtgtaaagagcttggaaagcatttacaaattcaagttatggtcacaacaggtggtaccagcctgaaagatgacattatgcgtttatatcaacctgttcatctgctagttggtactcctggaagaatattggatcttgcgaagaagggtgtctgtgttctgaaagattgttctatgcttgtcatggatgaggctgataaacttctctccccagagttccagccttcaatagagcagctgattcaatttcttcccccaacccgtcaaatcctaatgttttcagctacatttcctgttactgtaaaggacttcaaagatagatatcttcgtaaaccgtatatcattaaccttatggatgagcttactctgaagggtattacacaattttatgcatttgtggaggagaggcagaaagtccactgcctaaatactcttttttctaagctgcaaataaaccaatccatcatcttctgcaattcggtgaatcgagttgaactccttgctaagaaaatcacagaactagggtattcatgtttctatatacatgcaaagatgttgcaagaccaccgtaatagagttttccacgacttccgcaatggtgcatgcaggaatctcgtttgtactgatcttttcactcgaggaatagatatccaagcagtgaatgttgttattaattttgattttcccaagaactcagaaacatatctgcacagggttggtcgatccgggaggtttgggcaccttggtttagcagtgaacttgataacatatgaggatcgcttcaatctgtataggattgaacaagaacttggcactgaaataaaacaaattccgccattcattgaccaggctgtatactgtcggtga

SEQ ID NO: 65619 - protein, 516 aa, Medicago truncatula
MNNNNRGRYPPGIGLGRGSGGGGLNSNPNNANAGFQQRPHYQQQQYVQRHLMQNQNQHQQHYQHHQQNQQQYQQQNQQQQQQQWLRRNQLGGGTDTNVVEEVEKTVQSETNDPSSQDWKEKLKLPPADTRYRTEDVTATKGNEFEDYFLKRELLMGIYEKGFERPSPIQEESIPIALTGSDILARAKNGTGKTAAFSIPALEKIDQDNNIIQVVILVPTRELALQTSQVCKELGKHLQIQVMVTTGGTSLKDDIMRLYQPVHLLVGTPGRILDLAKKGVCVLKDCSMLVMDEADKLLSPEFQPSIEQLIQFLPPTRQILMFSATFPVTVKDFKDRYLRKPYIINLMDELTLKGITQFYAFVEERQKVHCLNTLFSKLQINQSIIFCNSVNRVELLAKKITELGYSCFYIHAKMLQDHRNRVFHDFRNGACRNLVCTDLFTRGIDIQAVNVVINFDFPKNSETYLHRVGRSGRFGHLGLAVNLITYEDRFNLYRIEQELGTEIKQIPPFIDQAVYCR

SEQ ID NO: 65620 - DNA, 2262 bp, Medicago truncatula
  CDS (1)..(2262)
atggcttccataacctcaatcggtgcttccaccgcatgcaaacttccctctctcgaactctacaaaaaacacaaactcacttccattcccacttcctccgttaaattccacttttccgacggcaacaaatcccgccacatcaaccgtctcgccaatttcaactcctctgataggtttcttccttccgccgttgctactcccaattcttcatcttcttcacttctcagtgacgaagcatttaaaggattaggctctagtttcgacggagaatctgaagatgaagattttccgtcacgaactacttctattaacgctgatgaacttgacatttctaaactcgatttgccttcgcagcttgttgattcgctacgtgaccgtgggattactcaactttttcctattcagagagcggtgttagtacctgcactagaaggcagagatattattgctcgtgcgaagactggaacagggaaaacattggcttttggaattcctattatcaatggtttagatgatggtcaagattccggtccttacagtcgcaggcgtcttcctagagctttggtacttgcacctaccagggagttagcaaagcaagtggagaaggagataaaagaatctgcaccttatctcaaaactgtttgtatatatggaggtgtttcttatgttactcaacagagtgcactttcgcgtggtgttgatgtggttgttggaacgcctggtaggctgattgacctcatcaatgggaacacacttaagttgagtgaagttgagtatttggtactcgacgaagctgatcagatgcttgctgttgggtttgaagaggatgtagaagtcattttggaaaagcttccagcaaagaggcagagcatgcttttttctgcaaccatgcctagttgggtgaagaaattggccaggaaatacttgaacaatccgttgacaattgatttggttggtgatgaagaagaaaagcttgctgaagggataaaactatatgctatatcggccacttccacttcaaagcgaaccattctttctgatcttattaccgtttatgcaaagggtgggaagactatagtttttacgcagacaaaaagagatgctgatgaagtatcattggcattaacaaatagtatcacttctgaagcactgcatggtgatatatctcagcaccagagagaaagaacattgaatggtttcagacaaggaaaatttacagtgcttgttgcaactgatgttgcatctcgtggacttgatattcccaatgttgatttgattatccattatgagcttcccaatgatcccgagacttttgtacatcgctctggccgtactggccgtgcaggaaagctaggtactgccattctgatgttcacaggtagccagaggagaacagttagatcccttgagcgtgatgtaggttgtaaatttgaatttgttaacgcgccgtctgtggaagatgttctggagtcatctgctgagcaagttgttgtcacacttaatggagttcatccagagtctattgcatttttcaccccaactgcacagaaactgattgaagaaaaaggaacaactgcccttgcagctgcactggcacagatgagtggattctcccaacctccgtcttcccggtctcttatcacccacgaacagggatgggttacattgcaattaactcgagattcagaaaattctcaaagatatttttcagcaagatcagtcactgggtttctttctgatgtatattccaaagctgctgatgaagttggaaaagtccatttaattgcggatgaaagggttcaaggagccgtttttgatcttccagaggacattgctaaagagttacttgacaaggacataccagctggaaacactatttctaaagtcaccaagttacctcctttgcaagatgatgggcctccaagtgatttctatgggaagttttccgatagagaacgaaataaccgaagaggaggttctagggatgggagaggttttagatcctcacggggatgggatggaggccgaggctctgatgatgattttggtgactcgtctaggaggggtggcagaagttataaatctggcaacagctggtccaaaccagaaagaagcagtagggatgattggctaattggaggcagacaatcgagcagatcttcttcatcaccgaacagaagctttgcagggacctgttttacttgtggggaatctgggcatcgagcgtcggactgtccaaacaagcgaggcgactttttttaa

SEQ ID NO: 65621 - protein, 753 aa, Medicago truncatula
MASITSIGASTACKLPSLELYKKHKLTSIPTSSVKFHFSDGNKSRHINRLANFNSSDRFLPSAVATPNSSSSSLLSDEAFKGLGSSFDGESEDEDFPSRTTSINADELDISKLDLPSQLVDSLRDRGITQLFPIQRAVLVPALEGRDIIARAKTGTGKTLAFGIPIINGLDDGQDSGPYSRRRLPRALVLAPTRELAKQVEKEIKESAPYLKTVCIYGGVSYVTQQSALSRGVDVVVGTPGRLIDLINGNTLKLSEVEYLVLDEADQMLAVGFEEDVEVILEKLPAKRQSMLFSATMPSWVKKLARKYLNNPLTIDLVGDEEEKLAEGIKLYAISATSTSKRTILSDLITVYAKGGKTIVFTQTKRDADEVSLALTNSITSEALHGDISQHQRERTLNGFRQGKFTVLVATDVASRGLDIPNVDLIIHYELPNDPETFVHRSGRTGRAGKLGTAILMFTGSQRRTVRSLERDVGCKFEFVNAPSVEDVLESSAEQVVVTLNGVHPESIAFFTPTAQKLIEEKGTTALAAALAQMSGFSQPPSSRSLITHEQGWVTLQLTRDSENSQRYFSARSVTGFLSDVYSKAADEVGKVHLIADERVQGAVFDLPEDIAKELLDKDIPAGNTISKVTKLPPLQDDGPPSDFYGKFSDRERNNRRGGSRDGRGFRSSRGWDGGRGSDDDFGDSSRRGGRSYKSGNSWSKPERSSRDDWLIGGRQSSRSSSSPNRSFAGTCFTCGESGHRASDCPNKRGDFF

SEQ ID NO: 65622 - DNA, 1323 bp, Trifolium pratense
  CDS (1)..(1323)
atggaggaagaaaataatgaaatgaaatcatttaaggatctgggcttacctgaggaattggtggaagcttgtgacaatttgggctggaagactccgctaaagattcaaatagaagcaattccccttgcactacaaggaaaagatgtaattggacttgcccaaacgggttctggtaagactggagcttttgctcttcctatattgcatgcactcttacaagcaccacgcccaaaccatttctttgcttgtgtgttgtctcccacaagggagcttgctattcaaatttctgaacagtttgaagctttaggttctggaattggtgtcaagagtgctgtgcttgttggagggattgacatggtacaacaatccatcaagatagcaaagcatcctcatattattgttgggactcctggacgtgtcttggatcacctaaaaaacaccaaaggattttctctcagtaaactaaaatacttggtcttagatgaggcagacaggctgttgaatgaggattttgaggaatcacttaatgagattttaggaatgatccctcgtgagcggaggactttccttttttctgctacgatgacgaagaaggtcgagaagctccaaagggtttgtttaaggaatcctgtgaagattgaagcatcaaccaagtattctaccgtggatacactgaagcaacagtatcgcttcttgccagcaaaacgtaaggattgctacctcgtatacattctcactgaaatggctggaagtacatcaatggtgttcacccggacatgtgatgcaactcggcttcttgctttgattcttaggaatctcggtttgaaagccatcccaattaacggtcatatgagtcagccaaagcgacttggagccttgaataagttcaaatctggggattgcaatattctcctttgtaccgacgtagctagtaggggactggatattccagcagtagatatggtgattaactatgacattcccacaaactccaaagattatatacatcgtgtgggaaggactgctcgggcagggcgttccggggttgccatttcccttgtaaaccaatatgagctagagtggtacattcagatagagaagcttataggcaagaagctaccagagtatcctgcacaagaagaggaagttttgcttttagaagagcgtgttagtgaggccaaaagattagctgcaacgaaaatgaaggaaagtggagggaagaagaaacggaggggtgaaggagattcgggagatgatgaggatattgacaaatactttggcctgaaagacagaaaatcgtcgaagaagtttagaagaaaatga

SEQ ID NO: 65623 - protein, 440 aa, Trifolium pratense
MEEENNEMKSFKDLGLPEELVEACDNLGWKTPLKIQIEAIPLALQGKDVIGLAQTGSGKTGAFALPILHALLQAPRPNHFFACVLSPTRELAIQISEQFEALGSGIGVKSAVLVGGIDMVQQSIKIAKHPHIIVGTPGRVLDHLKNTKGFSLSKLKYLVLDEADRLLNEDFEESLNEILGMIPRERRTFLFSATMTKKVEKLQRVCLRNPVKIEASTKYSTVDTLKQQYRFLPAKRKDCYLVYILTEMAGSTSMVFTRTCDATRLLALILRNLGLKAIPINGHMSQPKRLGALNKFKSGDCNILLCTDVASRGLDIPAVDMVINYDIPTNSKDYIHRVGRTARAGRSGVAISLVNQYELEWYIQIEKLIGKKLPEYPAQEEEVLLLEERVSEAKRLAATKMKESGGKKKRRGEGDSGDDEDIDKYFGLKDRKSSKKFRRK

SEQ ID NO: 65624 - DNA, 1971 bp, Aspergillus oryzae
  CDS (1)..(1971)
atgttgggcgctttccgccgcaacggcgttgcccatgcgctgcgcgcttctgctccacgatctctttcggccagagtgacaccccagcagctacaatggcgtccaccggtcttctctgcagtctcgcatgtgccccgctcgcttttccatgcatctcgagtctctttcactgccgttgcggaagctcaggcccagaatgctgaggttgaccaggatggtcgtctgaccgattttaagcagctggcggatcagggattggttgaccccatcattattcgtaccattaacaagaacatgggcattaagacgatgacggatgttcagagcatgacaattcaagaaactctgcaagggcacgacgtattggctcaagcaaagactggaactggaaaaacacttgccttcctcctccccgtagtgcaaaacatcttgaaggatccaaccgtcaaaaaacgttcttacaggcgttcaggctcaggggcctcgtcggcagatatccgtgccatcgttatttccccaacccgtgaacttgcggagcagatcgctacagaagcgagaaagatagcgtctggtaccgggattgtggtgcaatcggccgtcggtggcactcgtaagactgaaggcctgcgtcggatccagagagaaggctgtcacttgttggttggtacgcctggccggctcaaggatattctttccgatccggagagtggggttgaggctcctaagttgtccagctttgttctcgatgaggcagatcgcttgctagatgatggtttcgctcctgagattttcgacatccaacgcctactccctgacccgatgaaagtcgaccgtcagacgctcatgttctcggctactgtcccgaaggaagtcttgtccatggttcaccaaaccatgaaacccgatttcagaactgtccaaactgtcaaggatgatgaagtgcctactcatttcgctgttcctcagaaggttgttacgctcgatggcttccagaatgccctgcccgctattctcgagctggctaagaattatcaagcacacatggctaacgaccgcaatgctcggcctttcaaggccattgtttactttaactccaccatgcaagtgaatttggcccatcaagtcttcaaaaagttgctcaacaaccccgatgaccgccggagtggccatcctttgaacagaatgcacataatggagctccactcgcgtctgagccaaagtcggagaacgcttacttccgacttcttccggaacagccgttctggtattcttttctcatccgacgtgacggcgagaggcttggatttcccggacgtcactcatgtcatccaggttggagctcctcgtgcccgtgacacctacattcaccgtatcggacgtactgggcgagcaaacaaggaaggcgagggatggcttctcctccatcctggagaaaacggttgggtccagaaaaagttgggagaccttcctatcgagaaagaccactcgttggccacggccgtcacgaatatgcgccaggaagtgggcgatgaggtttccccgtccgctgcggagtctgtggcgcaagtcaaagctgctatggagcaggtccccgaagacatccgggaacacgcattcaagtctcaattgggcggtctgctatcgatcttctcccgtccgagagatatggttctcgccatgaacgagctcgctgtgcatgggtattacctgcctgggccaccagcgatttcccctggcatggcccagaacctcggcgtggccgacgtaagggaagcaaatatttccgggcgtcgttttggctcccctagaagcccgcgtggaccatcccgtgattcatctcgcggtgccagccacttcaggggtggccgtgacaggggtggccgtgactaccgcgaaggcaaccgcgaagagcgcagatacgactccaaccgccgcggttctaaccgctgggacaacagagaccgctattga

SEQ ID NO: 65625 - protein, 656 aa, Aspergillus oryzae
MLGAFRRNGVAHALRASAPRSLSARVTPQQLQWRPPVFSAVSHVPRSLFHASRVSFTAVAEAQAQNAEVDQDGRLTDFKQLADQGLVDPIIIRTINKNMGIKTMTDVQSMTIQETLQGHDVLAQAKTGTGKTLAFLLPVVQNILKDPTVKKRSYRRSGSGASSADIRAIVISPTRELAEQIATEARKIASGTGIVVQSAVGGTRKTEGLRRIQREGCHLLVGTPGRLKDILSDPESGVEAPKLSSFVLDEADRLLDDGFAPEIFDIQRLLPDPMKVDRQTLMFSATVPKEVLSMVHQTMKPDFRTVQTVKDDEVPTHFAVPQKVVTLDGFQNALPAILELAKNYQAHMANDRNARPFKAIVYFNSTMQVNLAHQVFKKLLNNPDDRRSGHPLNRMHIMELHSRLSQSRRTLTSDFFRNSRSGILFSSDVTARGLDFPDVTHVIQVGAPRARDTYIHRIGRTGRANKEGEGWLLLHPGENGWVQKKLGDLPIEKDHSLATAVTNMRQEVGDEVSPSAAESVAQVKAAMEQVPEDIREHAFKSQLGGLLSIFSRPRDMVLAMNELAVHGYYLPGPPAISPGMAQNLGVADVREANISGRRFGSPRSPRGPSRDSSRGASHFRGGRDRGGRDYREGNREERRYDSNRRGSNRWDNRDRY

SEQ ID NO: 65626 - DNA, 2064 bp, Botryllus primigenus
  CDS (1)..(2064)
atgtttgaggatgacaactgggacgatggtgattttgggggtgtaacaaccagcaataagcaatcatcaggatcgtttggtgggggattcggatcttacaatggtgctggtgactcgaattactctcagagtcgatcaggtggaaatcgctcgtcaagctgttacaagtgtggtgaagagggtcacatgtcgcgggattgccccaatggtggaggcagttctcgtccgaagggctgtttcaagtgtggagaggaaggccatatgtcccgggattgcccaaatggaggaggggattctcgtcctaaaggctgtttcaagtgtggggaagaaggccatatgtcgcgggattgccctaacggtggaggggattctcgtccaaagggctgtttcaagtgtggagaggaaggtcacatgtcacgtgattgccctaatggtggagagggcgggtctagaagtcagggggatcggcagaaaggatctggttgtttcaagtgtggggaggaggggcatttttcacgggaatgtccaaaggctgatggagaggaaggagtccggcctgagccctacatcccaccaccacctcctgaagatgaggaggcgatttatgcttcgactcaaactggtatcaacttcagtaaatatgatgccattcctgttgaggtgtctggtgaaaatcctccggacggcattgcctcatttgacagtgctaacttgccggagactattcgagaaaatgtgaataaagctcggtacacgaagcctaccccagtgcaaaagtacagcattccaatcattaacgcgggtcgtgatttgatggcgtgcgctcagactggatcgggaaagaccgctgcctttttgctacctgtccttgctggaatattccgaagtggtctgaaagcagacagcttttcagaaaagcaaactccgcaggcaattgttgtcggaccgacaagggaattggtcagtcaaattttcactgaggctaggaaatttgctcgaaacagcgtcgttcaacctgtagttgcgtatggtggtacctccgtgcaaagtcagcttcgagatttgagccgcggatgcaatatcctgatcgcaacgccagggagattgttggatttcatcaatcgaggaaaagtaggctgtgactgcgtcgaatatttgatcctagatgaagcggatcgcatgttggatatgggctttgaaccggagatccgaaagctgttgggatcaccaggaatgccagataaaaactccaggcatactctgatgtttagcgctactttccctgacgagattcagaaattggcgcatgaattcatgagggaagacttcctgtttcttactgttggacgagtgggtggagcttgttcggatgtcactcaaactcttctccaagtggagaatgctgataaacgtgagaaactgatggagctccttgttgatgttccggaaacagcagcaaggactttggtttttgttgatacgaagagaaatgcggattttctcgcgacttttttgtcacaagaaggtctgcctactactagtatccatggagacaggcagcagagagaaagggaaatagcattgactgatttcaagaagggcaaatgcccgatattgattgcaacttctgtggctgctcggggtctcgatattcccaaagtggaacacgtgataaattacgatttgccgtcagaaattgatgaatatgttcatcgcattggacgcacgggacgatgcggcaatcttggatctgcgacctctttctacagcgatgacaagaacgcggcgttggcaaggtcgttggtgaaggtattgtctgacgcgcaacaggaggtacccgattggctagaatcttgtgcggaaggagctgtcgggactcactttggacccaaaggcgggaaatttggtgcaagagataccagatccggcggtggtgggggtggacaagcgtctcgtcaaatgggtgattatgattacaatgatggcagttctaaagtgaacggcggggggtcccaagctcctgcttcaggcggcttcgatgatgatgatgatagctgggattag

SEQ ID NO: 65627 - protein, 687 aa, Botryllus primigenus
MFEDDNWDDGDFGGVTTSNKQSSGSFGGGFGSYNGAGDSNYSQSRSGGNRSSSCYKCGEEGHMSRDCPNGGGSSRPKGCFKCGEEGHMSRDCPNGGGDSRPKGCFKCGEEGHMSRDCPNGGGDSRPKGCFKCGEEGHMSRDCPNGGEGGSRSQGDRQKGSGCFKCGEEGHFSRECPKADGEEGVRPEPYIPPPPPEDEEAIYASTQTGINFSKYDAIPVEVSGENPPDGIASFDSANLPETIRENVNKARYTKPTPVQKYSIPIINAGRDLMACAQTGSGKTAAFLLPVLAGIFRSGLKADSFSEKQTPQAIVVGPTRELVSQIFTEARKFARNSVVQPVVAYGGTSVQSQLRDLSRGCNILIATPGRLLDFINRGKVGCDCVEYLILDEADRMLDMGFEPEIRKLLGSPGMPDKNSRHTLMFSATFPDEIQKLAHEFMREDFLFLTVGRVGGACSDVTQTLLQVENADKREKLMELLVDVPETAARTLVFVDTKRNADFLATFLSQEGLPTTSIHGDRQQREREIALTDFKKGKCPILIATSVAARGLDIPKVEHVINYDLPSEIDEYVHRIGRTGRCGNLGSATSFYSDDKNAALARSLVKVLSDAQQEVPDWLESCAEGAVGTHFGPKGGKFGARDTRSGGGGGGQASRQMGDYDYNDGSSKVNGGGSQAPASGGFDDDDDSWD

SEQ ID NO: 65628 - DNA, 1245 bp, Pennisetum americanum
  CDS (1)..(1245)
atggcaggaatggcaccggagggttcccagttcgatgctaagcactatgattctaaaatgcaggagctgctgagcactggtgagactgaggaattcttcacctcatatgatgaggtttttgagagctttgatgacatgggccttcaagagaaccttctgagaggcatttatgcttatggttttgagaagccttcagcaattcagcagagaggaattgtgcctttctgcaagggccttgatgtcattcagcaagcccaatctggtacaggaaagacagcaactttctgttctggtatcttgcagcagctcgactatggcctggttgaatgccaggccttggtccttgctcccacccgtgagcttgcacagcagattgagaaagtcatgcgcgcacttggtgactacctgggtgtgaaagttcatgcatgtgtgggtggaacttcagtccgtgaggaccaaaggattcttgccagtggcgtgcatgttgttgttggtacacctgggcgtgtctttgacatgttgcgtaggcagtcactccgtcctgatcacatcaagatgtttgtcctggatgaagctgatgagatgctttctcgtggtttcaaggatcagatttatgacatcttccagcttctcccagcaaagattcaggttggagtcttctctgctacaatgcctccagaggctcttgagattacccgcaagttcatgaacaaacctgtgagaattcttgtgaagagagatgagctcacccttgagggtatcaagcagttctatgtgaatgtggagaaggaagactggaagctggacacactatgtgacctgtacgagacccttgccatcacccagagtgtcatcttcgtcaatacccgtcgcaaggtggactggctcactgacaagatgaggagcagggaccacactgtttctgccactcacggtgacatggaccagaacactagggacatcatcatgagggagttcaggtctggttcatcccgtgttctcatcaccaccgacctgcttgcccgtggtattgatgttcagcaggtgtccctggtcatcaactatgatctccccacccagcctgagaactaccttcatcgcattggtcgtagtggtcgtttcggtaggaagggtgttgccataaactttgtgacccgtgatgatgacaggatgcagtttgacatccagaggttctacagcgtggtgattgaggagctgccgaccaacgttgctgaccttctctga

SEQ ID NO: 65629 - protein, 414 aa, Pennisetum americanum
MAGMAPEGSQFDAKHYDSKMQELLSTGETEEFFTSYDEVFESFDDMGLQENLLRGIYAYGFEKPSAIQQRGIVPFCKGLDVIQQAQSGTGKTATFCSGILQQLDYGLVECQALVLAPTRELAQQIEKVMRALGDYLGVKVHACVGGTSVREDQRILASGVHVVVGTPGRVFDMLRRQSLRPDHIKMFVLDEADEMLSRGFKDQIYDIFQLLPAKIQVGVFSATMPPEALEITRKFMNKPVRILVKRDELTLEGIKQFYVNVEKEDWKLDTLCDLYETLAITQSVIFVNTRRKVDWLTDKMRSRDHTVSATHGDMDQNTRDIIMREFRSGSSRVLITTDLLARGIDVQQVSLVINYDLPTQPENYLHRIGRSGRFGRKGVAINFVTRDDDRMQFDIQRFYSVVIEELPTNVADLL

SEQ ID NO: 65630 - DNA, 1701 bp, Zea mays
  CDS (1)..(1701)
atgaacccgtatgatctccgcttcgctgacccctcatcctaccacgacaggcgcagcgacttgaccgtggctcctacgttcgctccgccgcctcccgtggctgcggcgaacctgaacccttacgccgccgcctacccgcctctgcctgtgcccgttcccgtgcccgcggcccccgcgggcggcgactaccagcgctacgggcagggaggcagaggccgtggtggcggtggcagaggcggtggaggagggtacggaggtggcggcagaggaggaggtcgcgggagggacgggcttgactcgctcgccctccctaagccggactttcggagcctgataccggtcgagaaaaacttttacgtggagtgtccctccgtccagcaatgtcggaggggatgtggcgcagtaccgccgcctcgggatatcaccatcggccgggatgtgcccaagccggtagatacttcaggaagccaacttcccagattactgcatgcaagctattgccaatctggatttgtggagccaacacctattcaatctcaaggttggcctatgttgaagggtagggacctgattggtatcgctcaaacaggctcagggaaaacattatcttatctgttacctgggctggttcatgttggtgcccagcctcggctagaacaaggcgatggcccaattgtattaattctcgctcccacaagagaactggctgttcaaatacaggaagaatctacaaaatttggatcatattcaagaactagaagcacatgtgtctatggtggtgcacctaagggtccacaaatacgggaccttagaagaggagttgaaattgtcattgcaactcctggccggttgattgatatgctggaagctggtcacacaaacctacgtagagtgacataccttgtgttggatgaggctgaccggatgctagatatggggtttgagccccaaattcggaaaatagtagcacagatccgcccagacaggcaaaccttgtactggagtgccacatggcctagagaagttgaagccttagcaagacagtttctacaaaatccttacaaggtaatcataggctcacctgaacttaaagctaatcattccatacaacaaattgttgaagttatttcagatcacgagagtatccaagactcagtaaagctcttgtctgatctaatggatgggagccgtatcttgatattccttcaaacaaaaaaggattgcgataagatcacccggcagcttagaatggatgggtggccagcattatctatacatggtgataaagctcaagctgaacgggactatgttcttgcagagtttaagagcggcaagagccccataatggctgccacagatgtggcagcacgtggtcttgatgtgaaggacataaagtgtgtgataaattatgattttccaacaactcttgaagattatattcacaggataggtcgaactggccgtgctggtgctagcggaactgcatttacttttttcacacacgcaaatgcaaagttctcaaggaatctagtgaagattctgcgagaagctggccaagtcgtgaatcctgccttagaatccatgtccaggtcttcgaactcaacgggaggaggcaatttccggtcgagaggcagaggtgggtttggtaaccgccatatgtctggatcaaatacctttcttggaggaagaaggccatattga

SEQ ID NO: 65631 - protein, 566 aa, Zea mays
MNPYDLRFADPSSYHDRRSDLTVAPTFAPPPPVAAANLNPYAAAYPPLPVPVPVPAAPAGGDYQRYGQGGRGRGGGGRGGGGGYGGGGRGGGRGRDGLDSLALPKPDFRSLIPVEKNFYVECPSVQQCRRGCGAVPPPRDITIGRDVPKPVDTSGSQLPRLLHASYCQSGFVEPTPIQSQGWPMLKGRDLIGIAQTGSGKTLSYLLPGLVHVGAQPRLEQGDGPIVLILAPTRELAVQIQEESTKFGSYSRTRSTCVYGGAPKGPQIRDLRRGVEIVIATPGRLIDMLEAGHTNLRRVTYLVLDEADRMLDMGFEPQIRKIVAQIRPDRQTLYWSATWPREVEALARQFLQNPYKVIIGSPELKANHSIQQIVEVISDHESIQDSVKLLSDLMDGSRILIFLQTKKDCDKITRQLRMDGWPALSIHGDKAQAERDYVLAEFKSGKSPIMAATDVAARGLDVKDIKCVINYDFPTTLEDYIHRIGRTGRAGASGTAFTFFTHANAKFSRNLVKILREAGQVVNPALESMSRSSNSTGGGNFRSRGRGGFGNRHMSGSNTFLGGRRPY

SEQ ID NO: 65632 - DNA, 1242 bp, Helianthus annuus
  CDS (1)..(1242)
atggcgggcgtagcaccagagggatcccaattcgatgctagacagtttgactctaaaatgaatgatttgctttcggccgatggacaggattttttcacatcgtatgatgaagtttatgatagcttcgatgctatgggtctgcaagagaatcttttgaggggcatatacgcatatggttttgagaaaccatcggcaattcagcaaaggggaatcgtaccattcaccaagggtctcgatgttattcaacaagcacaatctggaaccggaaaaaccgccaccttttgctcaggcatcctccaacaactcgattacaatgtagtcgaatgccaggctttggttttagcaccgactcgtgaacttgcacagcaaatcgagaaagtcatgcgggccctcggtgattaccttggtgttaaggtccatgcttgtgttggtgggaccagtgttcgtgaggatcaacgtatcctctcagccggggtccacgtcgttgttggtacacccggccgtgttttcgacatgttgcgcagacagtcccttcgttctgataacatcaaaatgtttgttcttgatgaagctgatgaaatgctttcacgaggttttaaagatcagatctacgatatcttccagttgttgccgtcaaaggttcaggtcggagtgttttcggcaacaatgccaccggaagctttagaaatcactagaaagttcatgaacaaaccggtgaggattctcgtaaagcgtgacgaactcactttggaaggtatcaaacaattctacgtgaacgtggagaaagaagagtggaagctcgaaaccctttgtgacctttacgagacactagcaatcacgcaaagtgtcatctttgtgaacacacgaaggaaggttgactggttgaccgacaagatgagaagccgtgaccacaccgtctcagccacacatggtgacatggaccagaacacacgtgacatcatcatgcgtgagtttcggtccggctcttctcgtgttctcatcaccactgatttgctggcgcgtggtattgatgttcaacaagtttcacttgttataaactatgatcttccgacccaaccggaaaattaccttcatcgtatcgggcgtagtggacgatttggaagaaaaggtgtggcgattaactttgtgacacttgacgatgagaagatgcttggtgacatccagaagttttacaatgttgtcgttgaggagctgccgtccaacgttgctgatctgatttag

SEQ ID NO: 65633 - protein, 413 aa, Helianthus annuus
MAGVAPEGSQFDARQFDSKMNDLLSADGQDFFTSYDEVYDSFDAMGLQENLLRGIYAYGFEKPSAIQQRGIVPFTKGLDVIQQAQSGTGKTATFCSGILQQLDYNVVECQALVLAPTRELAQQIEKVMRALGDYLGVKVHACVGGTSVREDQRILSAGVHVVVGTPGRVFDMLRRQSLRSDNIKMFVLDEADEMLSRGFKDQIYDIFQLLPSKVQVGVFSATMPPEALEITRKFMNKPVRILVKRDELTLEGIKQFYVNVEKEEWKLETLCDLYETLAITQSVIFVNTRRKVDWLTDKMRSRDHTVSATHGDMDQNTRDIIMREFRSGSSRVLITTDLLARGIDVQQVSLVINYDLPTQPENYLHRIGRSGRFGRKGVAINFVTLDDEKMLGDIQKFYNVVVEELPSNVADLI

SEQ ID NO: 65634 - DNA, 2277 bp, Crassostrea gigas
  CDS (1)..(2277)
atggaggttgtgaatggatttggtcgcggtggatttggaagaggagcatcatcgtcatctgatgcttcaggaggggccggcaggggttttggtcggggtgtactccgtgcaggcttcacagtgaatggaaatgacgatgtatcaaacggcatggccgacatgtcgctcaacaaaccaggcggaatggccaatggatttggaaagtcagacaataactccagcagtggcggttttggaaataagtcggacagtaacaacaacaatggaagtagagggggatttggaggagggtcctcaggtggaggatttggaggagggtcctcgggtggaggatttggatccaaaaaggagggtggatttgggggcgggggatttggatcaaagaacgatggcgaatcttctggatttggaggaggatttggcggtggagacagacctccaaggggaggcggatttggagggggaggaggatcaggatgcagaaattgtggagaagagggacactttgccagagagtgtccagaaccccgcaaaggtggtggtgacaagggatgcagaaattgtggggaagagggacactttgtcagagagtgtccagaaccccgcaaaggtggtggaggtggtggtgacaggggatgcagaaattggggggaagaaggacattttgctagagagtgtcccaatcccaagaaagaaggaggtggaggaggaggcgggaagtgtttcaaatgtcaggaggaaggacacatggccagggactgtcctaatgctcccccacaggatcctgacagacctgcaccttatgtgcctcctgctccatccgaggacgaagctgaaatcttcaaagttattcaaaaggggataaactttgacagttacgataaaattcctgtggaggtgacaggaagagatccaccctcttcaataaaaaactttgatgaagctgggttgtatgaaaagttcctggaaaacgtgcgtaaagcccagtatgagaagcccactccggtccagaagtactccattccgatagtgatggcaggccgagatctgatggcctgtgctcaaacaggctccggaaaaacggctgccttcttgctgccggtcctcactggaatgatgaagaatggaatcagtggcagtagtttctccgaggtccaggaaccacaagccctggtggtggctcctaccagagagttggccgtccagatctttatggatgctcgaaaatttgcccatggcaccatgctgagagctgtagtgttgtatggggggacatcggtgggataccaactcagacaggttgaacagggaactcacatcttagtgggtaccccaggacggttgattgatatcatcggcaaaggaaagatcagcctctcaaagttaaagtacctaattttggatgaagctgacagaatgttggatatgggtttcggtccagacatccgtaaacttgtggaggagttgggaactcctcctaaaacagagagacagactctcatgttctctgctacattccccgaggagattcagaaaatggctggggatttcctgaacgactaccttttcctgactgtcggtcgggtgggtggtgcttgcactgacgtgacccagacagtgtatgaagtcgatagacaggagaagaggtcacgattgtgtgacatcctcacagagacgggttcagagaaaactttggtttttgtggaacaaaaacgaaatgcagatttcttggcatcttatttgtcccaaaatggatttccaaccaccagtattcatggagatcgactccaagctgaaagggaagaagctctgcgcgatttcaagcttgggaaagctccagttttaattgctacatcggtggcagctcggggattagacatccctctagtcaaacatgtcatcaactacgatctcccccagtccattgatgaatatgtccacagaattgggagaacggggcgctgtggaaatcttggcaaggccatcagtttctactctaatgacactgatggtgctctggctaaacctctggttaggatcctctcggatgcgatgcaggaagttccttcctggctggaggagtattccaagtcaagtatgccaggagctgggtatgccgatgtcggcgccaagttcggaggacgagacatccgaaaaaaccaaccacggacgagagagacccacaagggtgagggtggctaccctcttggtgctggtggatccgttatggtgggatcaggtggtgcacgggaagaagacgaagaaaactgggattaa

SEQ ID NO: 65635 - protein, 758 aa, Crassostrea gigas
MEVVNGFGRGGFGRGASSSSDASGGAGRGFGRGVLRAGFTVNGNDDVSNGMADMSLNKPGGMANGFGKSDNNSSSGGFGNKSDSNNNNGSRGGFGGGSSGGGFGGGSSGGGFGSKKEGGFGGGGFGSKNDGESSGFGGGFGGGDRPPRGGGFGGGGGSGCRNCGEEGHFARECPEPRKGGGDKGCRNCGEEGHFVRECPEPRKGGGGGGDRGCRNWGEEGHFARECPNPKKEGGGGGGGKCFKCQEEGHMARDCPNAPPQDPDRPAPYVPPAPSEDEAEIFKVIQKGINFDSYDKIPVEVTGRDPPSSIKNFDEAGLYEKFLENVRKAQYEKPTPVQKYSIPIVMAGRDLMACAQTGSGKTAAFLLPVLTGMMKNGISGSSFSEVQEPQALVVAPTRELAVQIFMDARKFAHGTMLRAVVLYGGTSVGYQLRQVEQGTHILVGTPGRLIDIIGKGKISLSKLKYLILDEADRMLDMGFGPDIRKLVEELGTPPKTERQTLMFSATFPEEIQKMAGDFLNDYLFLTVGRVGGACTDVTQTVYEVDRQEKRSRLCDILTETGSEKTLVFVEQKRNADFLASYLSQNGFPTTSIHGDRLQAEREEALRDFKLGKAPVLIATSVAARGLDIPLVKHVINYDLPQSIDEYVHRIGRTGRCGNLGKAISFYSNDTDGALAKPLVRILSDAMQEVPSWLEEYSKSSMPGAGYADVGAKFGGRDIRKNQPRTRETHKGEGGYPLGAGGSVMVGSGGAREEDEENWD

SEQ ID NO: 65636 - DNA, 1242 bp, Pisum sativum
  CDS (1)..(1242)
atggcaggccttgcacccgaggggtcacaatttgatgctgggaaatttgatgccagaatgaatgacttaatggctggtgatggaaatgagttctacactatttctgacgaggtttgtgaaagttttgatgctatgggcttgcaagagaatctcctcaggggcatttatgcttatggttttgaaaagccatctgccattcagcaaaggggaattgttcctttctgcaagggacatgatgttattcaacaggctcagtctggaactggaaagacggcaactttctgctctggtgttctgcagcaacttgactacaatgtgacccagtgccaggccttggttttggccccaactcgtgagcttgctcaacaaattgagaaggttatgcgggcccttggagactatctaggtgttaaggtgcatgcttgtgtgggaggtacaagtgttcgtgaagatcaacgcattctatcaagtggtgtccatgttgtggttggtactcctggtcgtgtgtttgatatgttgcgcagacagtccctccacccggattacatcaagatgtttgtgttggatgaggctgatgaaatgctctctagaggtttcaaagatcagatctacgatatatttcagcttctgccaggtaagattcaagtaggagttttctctgctacaatgcctcctgaggcacttgaaatcacaaggaagtttatgaacaaacctgtgaggatccttgtgaagcgggatgagctcaccttggagggtattaagcagttttatgtcaatgttgagaaagaggaatggaagctggacacactctgtgatctttacgagacattagcaatcactcagagtgtcatttttgttaacactagaaggaaagttgattggttgactgacaagatgcgaagccgagaccatacagtctcagctactcacggagacatggatcagaataccagggacattattatgcgtgaattccgttctgggtcttcacgtgttttgataactaccgatcttttggcacgtggtattgatgtacaacaggtgtctctggttatcaattttgatctccctacacagcctgagaactatctccaccgtattggtcgtagtggaaggtttggtagaaaaggtgttgccattaactttgtcaataaggaagatgaagcaatgctgcaagatatccagaagttttacaacgtgttagtcgaggagctgccatcaaatgtcgctgagctcctctga

SEQ ID NO: 65637 - protein, 413 aa, Pisum sativum
MAGLAPEGSQFDAGKFDARMNDLMAGDGNEFYTISDEVCESFDAMGLQENLLRGIYAYGFEKPSAIQQRGIVPFCKGHDVIQQAQSGTGKTATFCSGVLQQLDYNVTQCQALVLAPTRELAQQIEKVMRALGDYLGVKVHACVGGTSVREDQRILSSGVHVVVGTPGRVFDMLRRQSLHPDYIKMFVLDEADEMLSRGFKDQIYDIFQLLPGKIQVGVFSATMPPEALEITRKFMNKPVRILVKRDELTLEGIKQFYVNVEKEEWKLDTLCDLYETLAITQSVIFVNTRRKVDWLTDKMRSRDHTVSATHGDMDQNTRDIIMREFRSGSSRVLITTDLLARGIDVQQVSLVINFDLPTQPENYLHRIGRSGRFGRKGVAINFVNKEDEAMLQDIQKFYNVLVEELPSNVAELL

SEQ ID NO: 65638 - DNA, 1242 bp, Pisum sativum
  CDS (1)..(1242)
atggcaggagttgcaccagagggttctcagtttgatgctaagcaatttgataccaaaatgaatgagttactcaccactgaaggacaggacttctacacattttatgaggaggtttatgatagttttgatgctatgggcttgcaagagaatcttctcagaggaatttatgcatatggttttgagaagccatcagctattcagcaaaggggaatagttccattttgcaagggacttgatgttatacaacaggctcagtctggaacgggaaagaccgctaccttctgctctgggattctgcagcaacttgactacagtgtaacagaatgccaggccttggtcttggcaccaacacgtgagcttgctcagcagattgagaaggttatgcgggcacttggagattatctaggtgtgaaggtgcatgcttgtgtgggagggaccagtgttcgtgaggaccaacgtattctgtcaagtggtgttcatgttgttgtaggtacccctggtcgtgtatttgacatgctgcgcagacagtcgcttaggccagattacatcaagatgtttgtattagatgaggctgatgaaatgctttctcgtggttttaaagaccagatctacgatatattccagctgttgccatctaagattcaagtgggggttttctctgccacaatgcctcctgaggcgcttgagatcacaagaaagttcatgaacaaacctgtgaggattcttgtgaagcgtgatgagcttaccttggagggtattaagcaattttatgtcaatgttgataaagaggaatggaagcttgacacactctgcgatctttatgagacattggctatcacccagagtgtcatttttgtgaacaccagacggaaagttgattggctaactgacaagatgcgaagccgtgaccatacagtctcagcaacacacggagacatggaccagaatactagagatattattatgcgggaattccgttctggatcttcccgtgttttaataactactgatcttctggctcgtggtattgatgtgcagcaagtgtctttagttataaattatgatctccccacacaacccgaaaactatctccatcgtattggtcgtagtggaaggtttggtaggaaaggtgttgcaattaactttgtcacgaaggatgatgaaagaatgctgggtgacatccagaagttctacaatgtgttgattgaggagcttccttccaatgtggctgaacttctgtga

SEQ ID NO: 65639 - protein, 413 aa, Pisum sativum
MAGVAPEGSQFDAKQFDTKMNELLTTEGQDFYTFYEEVYDSFDAMGLQENLLRGIYAYGFEKPSAIQQRGIVPFCKGLDVIQQAQSGTGKTATFCSGILQQLDYSVTECQALVLAPTRELAQQIEKVMRALGDYLGVKVHACVGGTSVREDQRILSSGVHVVVGTPGRVFDMLRRQSLRPDYIKMFVLDEADEMLSRGFKDQIYDIFQLLPSKIQVGVFSATMPPEALEITRKFMNKPVRILVKRDELTLEGIKQFYVNVDKEEWKLDTLCDLYETLAITQSVIFVNTRRKVDWLTDKMRSRDHTVSATHGDMDQNTRDIIMREFRSGSSRVLITTDLLARGIDVQQVSLVINYDLPTQPENYLHRIGRSGRFGRKGVAINFVTKDDERMLGDIQKFYNVLIEELPSNVAELL

SEQ ID NO: 65640 - DNA, 1266 bp, Yersinia pestis
  CDS (1)..(1266): transl_table=11
atgtcatttgattctctcggcctaaacgccgacatcctgcgtgctgttgaagagcagggctaccttgtgccgacgccaattcaacgtcaggcaatccctgtagtactggaaggccgcgatttgatggccagtgcgcaaacgggtacgggtaaaaccgctggtttcaccttgccgctattgcaactgcttagccaagatcaacaacccattaagggccgccgtccggtacgagcattgattttgacgccaacccgtgagctggccgcgcagattgacgaaaacgtacagagttatagcaaatacctgaaacttcgctcactggtggtatttggtggcgttagcattaatccgcagatgatgaaattgcgtggtggcgtcgatattttagtcgcgacacctggccgtttactggatctggaacatcaaaacgcggttgatttgtccaaaattgaaattttagtattggacgaagctgaccgtatgctggatatgggctttattcacgatatccgccgtgtattagccaaattaccggctaaacgtcagaatttgctgttctctgccaccttctctgatgagattaaagggctggccagcaaattgttgcacaacccagcctctgttgaagtggctcgccgtaatacggcgtcagagcagatcgcccaaagcgttcactttgtcgataaaaaccgtaagcgtgagctgttgtctcagatgattggcgaaggtaactggcagcaagtgctggtgtttaaccgcactaagcacggcgcgaaccatttagctgaacagttaaataaagacggcattactgcggcggcaatccacggtaataaaagtcagggcgcacgtactcgtgcactggccgattttaaagacggtaaaatccgtgtgttggtcgcgacggatatcgctgcccgtggtctggatatcgaccagttacctcacgtggttaactatgaattgccaaacgttccggaagattacgttcaccgaattggccgtactggccgcgcggaacggaccggggaagcgatttcactggtttgtgtcgatgaacataaactgctgcgtgatattgaacgtttattaaaacgtgaaattccacgtatcgcacttgatggctatgagccggatccaagcattaaagctgatccaattcaaaatggccgtcagggccgtggtgcacaacgtccaggaatgggccgtggcagcagcgcgggtcgtccgcagaatgggggcggtgcatcaggtgcgcggggatag

SEQ ID NO: 65641 - protein, 421 aa, Yersinia pestis
MSFDSLGLNADILRAVEEQGYLVPTPIQRQAIPVVLEGRDLMASAQTGTGKTAGFTLPLLQLLSQDQQPIKGRRPVRALILTPTRELAAQIDENVQSYSKYLKLRSLVVFGGVSINPQMMKLRGGVDILVATPGRLLDLEHQNAVDLSKIEILVLDEADRMLDMGFIHDIRRVLAKLPAKRQNLLFSATFSDEIKGLASKLLHNPASVEVARRNTASEQIAQSVHFVDKNRKRELLSQMIGEGNWQQVLVFNRTKHGANHLAEQLNKDGITAAAIHGNKSQGARTRALADFKDGKIRVLVATDIAARGLDIDQLPHVVNYELPNVPEDYVHRIGRTGRAERTGEAISLVCVDEHKLLRDIERLLKREIPRIALDGYEPDPSIKADPIQNGRQGRGAQRPGMGRGSSAGRPQNGGGASGARG

SEQ ID NO: 65642 - DNA, 1419 bp, Chironomus tentans
  CDS (1)..(1419)
atggcagacacgtggacgaaagctgctgagaatcaggagcaacaagaaattcaaaaattgaacgagaatattaataatgtgacaattagtaatgatgctaaaccacctgcagcagttaaagaggaagatttagatgaagtcaatcccgccgatgcttcattattgatgaaaataatccgtaaaggattgatcgagaccaaaaccgacttagatattcagcgtaaggatccgaattcgcctctttattccgtcaaaactttcgaagctcttcatttaaaacctgagttacttcgcggtgtttatgctatggggtataataatccttcaaaaatccaagaaacggcattaccgacattgattgctgatccaccacaaaatatgatcgcacaatcgcagtcaggaactggaaaaacggcagcttttacattagcaatgctcacgagagtcgatacagcaaaagatttccctcaagttttgtgcctaagtccaacttatgagcttgcaattcaaacgggagaagtagcagctcgaatggcaaagttttgcccagaaattcgcatccgttatgctgttcgcggagaagatatcgctagaggaaccaaattgactgatcatgttatcattggaacgccaggaaaagtacttgattggtcgctaaaattccatgcatttgatttatccaaaattactgttttcgtcttggacgaagctgatgttatgatcgcacaacaaggacatcaagatcaatgcattcgtttacataagcatctctctaaaaaatgtcaaatgatgttgttcagtgcaacgtatgagaagaaagttatggaatttgctgaatatatcgttccgtccccaattacgattcgcttgaagaaggaggaagaagtattggacaacataaagcagtattacgtgcgatgcccaaatcaagatatcaaatatcaagccattgctaatatttatggtgtcataacaatcggtcaggcaatcattttttgtcatacacgcaaaactgctggttggctggctagcaaaatggcacaagagggacactctgttggcgttttatccggggaattgactgtagagcaacgattggctgttttagatcgtttccgtgaaggacatgaaaaggtcctgattacaacgaatgtcctgagccgtggcatagatattgaacaggttaatattgttgtaaatttcgatctgccagttgaccaaactggtcgtgctgattgtgagacatatctccatcgtattggacgtactggacgctttggcaagcatggaattgccatcaacttggttgattcggagcaatcaatgaaagtttgtcgtgatattgaaagacattttggcaagaagatcatgttgcttgatgctgaaaattctgatgaaattgaaaagattggatcataa

SEQ ID NO: 65643 - protein, 472 aa, Chironomus tentans
MADTWTKAAENQEQQEIQKLNENINNVTISNDAKPPAAVKEEDLDEVNPADASLLMKIIRKGLIETKTDLDIQRKDPNSPLYSVKTFEALHLKPELLRGVYAMGYNNPSKIQETALPTLIADPPQNMIAQSQSGTGKTAAFTLAMLTRVDTAKDFPQVLCLSPTYELAIQTGEVAARMAKFCPEIRIRYAVRGEDIARGTKLTDHVIIGTPGKVLDWSLKFHAFDLSKITVFVLDEADVMIAQQGHQDQCIRLHKHLSKKCQMMLFSATYEKKVMEFAEYIVPSPITIRLKKEEEVLDNIKQYYVRCPNQDIKYQAIANIYGVITIGQAIIFCHTRKTAGWLASKMAQEGHSVGVLSGELTVEQRLAVLDRFREGHEKVLITTNVLSRGIDIEQVNIVVNFDLPVDQTGRADCETYLHRIGRTGRFGKHGIAINLVDSEQSMKVCRDIERHFGKKIMLLDAENSDEIEKIGS

SEQ ID NO: 65644 - DNA, 1350 bp, Spisula solidissima
  CDS (1)..(1350)
atggcttcagtgaaagtggatcacgccataaaccattctagtcccgctacaaatgatctcaaaggcgatgcccatgatcaaggttggaagacgaagttgacggttccacctaaggacactagggtcaaaacttctgatgttacaaatacaaaaggaaatgaatttgaggacttctgtctcaaaagagatttactcatgggcatatttgaaaaaggttgggaatccccatcaccaattcaggaagcgagcattccaattgccctcactggtagggacattttggccagagcgaaaaatggtactggaaaaacaggagcctatgcaattccaatattagaaaggatcgacaatacaaaagatgaagtacaagctatgtgcatagtcccaactagagaattggcattgcagaccagtcagatacttattgaactttccaaacatattggggccaagataatggtgaccacaggtggcacaaatcttaaagatgacattatgagattgtatgaaccagttcatgctatagtagcaactccaggtcgaatcttggatttaatgaataaaaacctggtgaagattgggaaatgtggcattcttgttctagatgaggctgacaagttgttatcacaagattttaaaggcatgttggatagcatcattagtcatctaccaaacgacagacaaattctactctactctgcaacctttcctttatcagtggaacagttcatgagaaagtatttacaaagtccctatgagattaaccttatggatgagctaacattgaagggtgtgacacaatactatgcttttgtgcaggaaaaacaaaaagtgcattgcttgaatacattgttttctaagttgcaaattaaccagtccattatattttgcaactcaacacagcgtgtagaattacttgccaaaaagatcactgaattgggttactcttgtttctatattcatgcacgtatgaatcagcagcatagaaatagagttttccatgactttagacaaggattatgtagaaatcttgtctgttctgacttgtttacaagaggtattgacatccaagcagtgaacgttgtgattaattttgactttcctaagcatgctgaaacctacttgcatagaattggtcgatctggaagatacggacatttgggtatcgctatcaaccttataacttatgatgataggttctcgctgcataagatagaaagtgagctaggaacggagatcaaaccaatccccaagaacattgacaaggctctatacgtcgccgagttccactgcgaacctgatgatgatgacgatcgcgtccagaaaactaacggtgcaccaaaagcatag

SEQ ID NO: 65645 - protein, 449 aa, Spisula solidissima
MASVKVDHAINHSSPATNDLKGDAHDQGWKTKLTVPPKDTRVKTSDVTNTKGNEFEDFCLKRDLLMGIFEKGWESPSPIQEASIPIALTGRDILARAKNGTGKTGAYAIPILERIDNTKDEVQAMCIVPTRELALQTSQILIELSKHIGAKIMVTTGGTNLKDDIMRLYEPVHAIVATPGRILDLMNKNLVKIGKCGILVLDEADKLLSQDFKGMLDSIISHLPNDRQILLYSATFPLSVEQFMRKYLQSPYEINLMDELTLKGVTQYYAFVQEKQKVHCLNTLFSKLQINQSIIFCNSTQRVELLAKKITELGYSCFYIHARMNQQHRNRVFHDFRQGLCRNLVCSDLFTRGIDIQAVNVVINFDFPKHAETYLHRIGRSGRYGHLGIAINLITYDDRFSLHKIESELGTEIKPIPKNIDKALYVAEFHCEPDDDDDRVQKTNGAPKA

SEQ ID NO: 65646 - DNA, 1425 bp, Solanum lycopersicum
  CDS (1)..(1425)
atgagtcgctacgatagccgtccggcggaccctggctcttaccgtgaccgtcgcagtgattcaggcttcggtgggggctcaaattataggtcatcatcatcgagcaggagagattccgagggtaaggagtcaccacggaaggttaatttggatgatttgcctccatttgagaagaatttctatgttgaatcaccatccatagcagcaatgactgaaggtgaggtggaagagtatagacgacgacgggagatcactattgagggccgtgatgtgcccaagcctataaagtcctttcatgacgtaggatttccagattatgtcttgcaagaaatcgaaaaagctggcttcactgaacctacacctattcaagctcaaggttggcctatggccttgaagggtcgtgatctcattggcatagcagaaacagggtctgggaagacaattgcttatctattgcctgcaattgtgcacgttaatgcccagcccattttagatcatggagatggtccaattgtcttagtgttagccccaactcgtgaacttgctgttcagattcaacaagaagctactaagtttggtgcatcatcgcggattaagaatacctgcatttatggtggggttccaaaggggccccaagttcgtgatcttcagaaaggtgttgaaattgttattgccacacctggaaggttgattgatatgttagaatctaatcatacaaatcttcgaagagtgactatcgtgctggatgaggctgaccgcatgctagacatgggttttgaacctcagatccgcaaatgtatctcagatacgccagatcgtcaaacgctgtattggagtgccacatggccaaagaacgtaaatcacgtatcgtcagcatgtggaaatcgtctcggagaccagaagtataataaattagtaaagttgctggaagatattatggatggtagtcggattttaatattcaggacgctaaaagggtgtgaccaagtaactcggcagctccggatggatggttggccggcactttctattcatggtgataagagtcaagcagaaagagattgggtcctttcagaattcaaagctggaaagtctcctataatgacagctacagacgttgctgctcgaggtctagatgtgaaggatgtaaagtttgtaatcaactatgattttcctggatcattggaggactatgttcaccgaattggtagaacgggaagagctggtgcctcagggacagcatacacattctttactgcagcgaatgctaggtttgcgaaggaccttgttaacattcttgaggaggccggacagaaagtcagtcctgaattggcaaaaatgggacgtggtgctcctccccctcctggtcacggagggtttcgagaccgtggaaggggttatggaggcaataagcagtggagctag

SEQ ID NO: 65647 - protein, 474 aa, Solanum lycopersicum
MSRYDSRPADPGSYRDRRSDSGFGGGSNYRSSSSSRRDSEGKESPRKVNLDDLPPFEKNFYVESPSIAAMTEGEVEEYRRRREITIEGRDVPKPIKSFHDVGFPDYVLQEIEKAGFTEPTPIQAQGWPMALKGRDLIGIAETGSGKTIAYLLPAIVHVNAQPILDHGDGPIVLVLAPTRELAVQIQQEATKFGASSRIKNTCIYGGVPKGPQVRDLQKGVEIVIATPGRLIDMLESNHTNLRRVTIVLDEADRMLDMGFEPQIRKCISDTPDRQTLYWSATWPKNVNHVSSACGNRLGDQKYNKLVKLLEDIMDGSRILIFRTLKGCDQVTRQLRMDGWPALSIHGDKSQAERDWVLSEFKAGKSPIMTATDVAARGLDVKDVKFVINYDFPGSLEDYVHRIGRTGRAGASGTAYTFFTAANARFAKDLVNILEEAGQKVSPELAKMGRGAPPPPGHGGFRDRGRGYGGNKQWS

SEQ ID NO: 65648 - DNA, 2397 bp, Drosophila melanogaster
  CDS (1)..(2397)
atgagtaatgctattaaccaaaatggcacaggtctagagcagcaagttgctggtctggacttgaatggcggctctgctgactacagcggccccataaccagcaagacttccactaactcggtcaccggtggtgtgtatgtgcccccgcaccttcgtggtggtggtggcaataacaacgcagcggacgcagagagccagggccaaggacagggccagggtcagggcttcgactccagatccgggaatccgcgccaggagactagggaccctcaacagtcgcgcggaggcggaggcgaataccgcagaggcggcggcggtggtggtcgcggcttcaatcgccagagcggcgactacggttacggaagcggcggcggaggacgacgtggaggcggtggacgtttcgaggacaactacaacggtggtgaattcgattcgcgtcgcggcggtgactggaatcgcagcggcggaggcggcggaggaggtcgaggatttggacgcggaccatcgtaccgcggcggtggcggcggaagcggtagcaacctcaacgagcagactgccgaggatggccaggcacagcagcagcagcagccgcgcaacgatcgttggcaggagccagaacgtcctgccggattcgatggcagcgagggcggacagtctgccggcggcaacagaagctacaacaatcgcggcgagcgcggaggcggcggttacaacagccgctggaaggagggcggcggctcaaacgtcgactacacaaagctgggcgcccgagatgagcgcctggaggtggagctgttcggcgtgggcaatacgggaatcaattttgacaaatacgaggatatacccgtggaggcgacgggccagaatgtgcccccgaacatcacatcgttcgatgatgtgcagctgacggagattatccgcaacaacgtggccttagcacgttatgacaaaccgacaccggtgcagaagcacgccattccgatcattatcaatggccgggatctaatggcctgcgcccagactggatccggcaagacggccgccttcctggtgccgattctcaaccagatgtacgagctgggacatgtgcccccgccgcaaagcacccggcagtacagccggcgcaagcagtatccgttgggtctggtgctggcgccgacccgcgaactggccacccagatctttgaggaggccaagaagttcgcctatcgctcccggatgcgcccggcagtgctgtacggcggaaacaatactagcgagcagatgcgcgagctggaccgcggttgccatctgattgtggccacacccggtcgcctagaggacatgatcacacgcggaaaggtgggactggagaacattcgattccttgtactggatgaggctgatcgtatgttggacatgggtttcgagccgcagatccgtcgcatcgtcgaacagctaaacatgccgccaaccggacagcgccagacgcttatgttctcggccacattccccaagcagatccaggagttagccagcgatttcctcagcaactacattttcttggccgttggtcgtgtgggctccacatctgagaacattacgcagacaatcctgtgggtctatgaacccgacaagcgctcgtatctgctggatctgctctcgtctatccgcgatggccccgaatacaccaaagacagcctaacactgatctttgtggagactaagaagggtgcagactcgctggaggagttcctgtaccagtgcaatcatcccgtcactagcatccacggtgatcgcacgcagaaggagcgcgaggaggcactgcgctgcttccgatcgggcgactgccccatcctggtggccacagccgtggccgctcgtggcctggacattccgcacgttaagcacgttattaactttgacctgccctcggatgtggaggagtatgtccaccgtatcgggcgtaccggacgtatgggtaatcttggtgtggccacctcctttttcaacgaaaagaaccgcaacatttgctccgatctcttggagctgctgatcgaaacgaagcaggagatccccagtttcatggaggatatgagttcggatcgcggacatggcggagccaagcgggctggacgaggcggtggtggacgttatggtggcggcttcggctccagggattaccgtcaaagctctggcggcggcggtggcggacgcagtggaccgccaccacgtagcggtggttccggatcaggaggcggcggcggcagttaccgcagcaatggaaactcgtacggcggcaattcgggcggcggtggatactatggcggcggcgccggtggtggctcctatggcggctcctacggcggcggcagtgcctcgcactcttcgaacgcacccgactggtgggctcaatga

SEQ ID NO: 65649 - protein, 798 aa, Drosophila melanogaster
MSNAINQNGTGLEQQVAGLDLNGGSADYSGPITSKTSTNSVTGGVYVPPHLRGGGGNNNAADAESQGQGQGQGQGFDSRSGNPRQETRDPQQSRGGGGEYRRGGGGGGRGFNRQSGDYGYGSGGGGRRGGGGRFEDNYNGGEFDSRRGGDWNRSGGGGGGGRGFGRGPSYRGGGGGSGSNLNEQTAEDGQAQQQQQPRNDRWQEPERPAGFDGSEGGQSAGGNRSYNNRGERGGGGYNSRWKEGGGSNVDYTKLGARDERLEVELFGVGNTGINFDKYEDIPVEATGQNVPPNITSFDDVQLTEIIRNNVALARYDKPTPVQKHAIPIIINGRDLMACAQTGSGKTAAFLVPILNQMYELGHVPPPQSTRQYSRRKQYPLGLVLAPTRELATQIFEEAKKFAYRSRMRPAVLYGGNNTSEQMRELDRGCHLIVATPGRLEDMITRGKVGLENIRFLVLDEADRMLDMGFEPQIRRIVEQLNMPPTGQRQTLMFSATFPKQIQELASDFLSNYIFLAVGRVGSTSENITQTILWVYEPDKRSYLLDLLSSIRDGPEYTKDSLTLIFVETKKGADSLEEFLYQCNHPVTSIHGDRTQKEREEALRCFRSGDCPILVATAVAARGLDIPHVKHVINFDLPSDVEEYVHRIGRTGRMGNLGVATSFFNEKNRNICSDLLELLIETKQEIPSFMEDMSSDRGHGGAKRAGRGGGGRYGGGFGSRDYRQSSGGGGGGRSGPPPRSGGSGSGGGGGSYRSNGNSYGGNSGGGGYYGGGAGGGSYGGSYGGGSASHSSNAPDWWAQ

SEQ ID NO: 65650 - DNA, 1824 bp, Nicotiana sylvestris
  CDS (1)..(1824)
atggccgttgtaactgcatcttccgctggtccaagttatgcgccagaagaccctaccctccccaaaccatggaaaggcctagttgatggtaccactggattcatctacttctggaatccagagaccaacgatacccaatatgagaggcctgttccctcttcccatgcagtgtctgctccagcacataagtcatctgtatttgtaagttcatctgttgaaaagccttctcaaggtcaacgctatgatgcagacggtggacacaacagaggtagcaataacaagattgcaagaagcagttctgatcgttttcatgatggaacatctgtccatgaaggctatggttctctaggtgtaggaagtgacatatctcaagaatcctactgccgccgcaatgaaatctctgttacgggaggtgatgttcctgcacctttgacatcatttgaagcgactgggtttccttcagagattgtgagggagatgcatcaagctgggttttcggctcctactccaatacaggcacaatcctggcccattgcccttcagggccgtgatatagtggctattgcgaagactgggtctggcaaaactctgggttacttgatgcctgcctttattcatctacaacagcgtcgcaagaatcctcaattaggcccaactattttggtactatcaccaacaagagaattagccacacagatacaagctgaagcagtgaagtttgggaaatcgtcaaggatatcttgcacgtgtctgtatggaggtgcaccaaaaggtcctcaactacgggagcttagtaggggtgtagatattgttgtcgccactcctggtcgtttgaacgacatcttggagatgagaagagttagccttggtcaagtttcttacttggtgttagatgaagcggatcgtatgttggacatgggatttgaacctcagataaggaagattgtgaaggaggtgcctgtgcagaggcaaacattgatgtatacagctacatggccgaagggggttcgtaagattgctgctgatctattggttaattcagttcaagttaatattggaaatgttgacgagcttgttgcaaacaagtctatcacgcagcacattgaagtcgtgctgccgatggagaaacaacggcgagtagaacaaatcttgagatccaaagaaccagggtcaaaaatcattattttctgttcaacaaagaaaatgtgcgaccaactatctcgcaatcttactcgcaattttggagcagctgcaattcatggggataaatctcagggtgagagggattatgtattaagccagtttcgtgcaggcaggtctcctgtgcttgtggctactgatgttgctgcccggggtttggacatcaaagatatcagggtggtgataaactatgacttcccaactggaatagaagattatgttcacagaattggtagaacaggccgggcaggagcatctggtctggcctacacatttttctccgaccaggattctaagcatgctttagatcttgttaaagttttagaaggtgcaaatcaatgtgtgccaactgagctacgtgatatggcttctcgcggtggtggtatgggaagggctaggaatcactggggttctggcccaggtggacgtggaggacgtggtggaccctataattccagctatgttggacggaatggaggacatggttatgaccggggatcacgtgacagtgacagatatggtcatggtacctacaatgcggatgctccacggaagcgcagtcgtagcagaagccccaatataggttcaggatggagtggtaaaaagagccgatttactgattga

SEQ ID NO: 65651 - protein, 607 aa, Nicotiana sylvestris
MAVVTASSAGPSYAPEDPTLPKPWKGLVDGTTGFIYFWNPETNDTQYERPVPSSHAVSAPAHKSSVFVSSSVEKPSQGQRYDADGGHNRGSNNKIARSSSDRFHDGTSVHEGYGSLGVGSDISQESYCRRNEISVTGGDVPAPLTSFEATGFPSEIVREMHQAGFSAPTPIQAQSWPIALQGRDIVAIAKTGSGKTLGYLMPAFIHLQQRRKNPQLGPTILVLSPTRELATQIQAEAVKFGKSSRISCTCLYGGAPKGPQLRELSRGVDIVVATPGRLNDILEMRRVSLGQVSYLVLDEADRMLDMGFEPQIRKIVKEVPVQRQTLMYTATWPKGVRKIAADLLVNSVQVNIGNVDELVANKSITQHIEVVLPMEKQRRVEQILRSKEPGSKIIIFCSTKKMCDQLSRNLTRNFGAAAIHGDKSQGERDYVLSQFRAGRSPVLVATDVAARGLDIKDIRVVINYDFPTGIEDYVHRIGRTGRAGASGLAYTFFSDQDSKHALDLVKVLEGANQCVPTELRDMASRGGGMGRARNHWGSGPGGRGGRGGPYNSSYVGRNGGHGYDRGSRDSDRYGHGTYNADAPRKRSRSRSPNIGSGWSGKKSRFTD

SEQ ID NO: 65652 - DNA, 2790 bp, Aspergillus oryzae
  CDS (1)..(2790)
atgcctcatcgcgcagcgtcgccagcggcgtccgaaaatgagttcgatatcacaaatgctcttttccagaatgacagcgattccgacaacgatacgtctttaaaacagacaaagcggccacagaaggcggctccacctcaagcgcttgatttccttggaggagatattgacgacgacgaagatgacgaggcattcatcgcagggcaacaggcttcagccaacaggaaggcttctaatcttaaaggtcgtaccgtcaaaaagggaggtggtttccaagcaatgggattgaatgcgcacctgttgaaagccattacccggaagggtttctctgttccgactcctattcagcgcaagactattcccgtgattatggacggtcaggatgtagttggtatggcgcgtactggatccggaaagaccgctgctttcgttattcccatgatcgagaagttgaagagccacagtaccaaggttggagcccgtggactaattctatcgccgtccagagagttggctttgcagaccctgaaagttgtgaaggagcttggaaagggcacggatttgaagtcggttcttctcgttggtggtgatagtttggaggaacagttcagtttgatggccggtaatcctgatatcgtgattgcgacacccggacgtttcctgcatttgaaggtcgagatgaatttggacttgtcgagcattcgttacgttgtgtttgacgaagctgatcgattgttcgagatggggtttgctgatcagcttacggaaattttgtacggccttcctgcgaaccgacagactctgttgttctctgcgacgttgcctaaatcgctggtggaattcgcccgtgctggcttacaggagcctactcttattcgtctagataccgaaagtaagatctcgccggatcttgaaaatgtcttcttctccgtcaagtcatcagagaaggaaggtgctttgcttcacatcctccacgaggtcattaagatgcccactggcccgactgaggctgcgcagcgtcagaaggagcagggtgatggcaagaatttcaagaatttcaagaaaaggaagcgaggggatgacaaggccatcaattttcaggagtctcccacaaagtattcgaccattgtttttgcggcgacgaagcatcatgtggattacttatattctttgcttcgcgaggccgggtttgcggtttcctatgcctacggttccttagaccagactgctcgaaagattcaagtccagaacttcagagcgggtctttcaaatatcctggttgttacagatgttgcggccagaggtattgatattcctattcttgctaacgttatcaactacgacttcccatctcaaccaaagatctttgttcaccgtgtcggccgtacggctcgtgcgggccgaaagggctggagttacagcttggtccgggacgcagatgccccctatatgcttgatttgcaactgttccttggaaggagacttgtcattggccgtgagcatggtgaccaggttaactttgccgaagatgtagtggtcggcagcttgcctagggatggcctgtccacaagctgtgaatgggttacaaaggtactggaaaatgaagccgacatctacagtcaacggaccattgctggaaagggagagaagctctatatgcgaacccgaaactcggcttctcttgaaagtgctaagcgagcaaaacaggttgtatcttccgacaactggacagccgtacatcctcttttcaatgaccaaggaagtcaaatggaattagagcgtgagaagatgcttgcacggattggaggctaccggccgcaggaaaccatctttgaggtgcacaaccgacgcaacggcaagcacgaaggcgatgaagccatcgacactattaagagaatccggactaccgttgattacaagaagaagaaacgggagatggctgagaaacagtcagactttgtggaggatgcatccagcggaaacaaaggagaagctaacgaaactgaggagacgggcgcccagccagatgaagatgaggaggatattggcgaaggcgtgcccgataacatgtcgatggcgtccgagtcagatcttgaggttaccttctcctcgtataacggcggcaaggcaaagaaggacagcgcagcatctttccaaaaccccgaatacttcatgtcctacaccccctccagtacaaacttggctgaagacagggcgtatggtgtgcacactggtaccaatgccaactttactcaagcctcccgcagtgccacaatggatctgcttggtgatgagggtgctcgcgggttcgccgaaccccgtaccatgatgcgctgggacaagcggcacaagaagtacgtgtcacgccagaatgatgaagatggttccaagggaacacatcttgttaagggtgaatctggtgccaaaattgcttccaccttccgtagcggacgattcgacgcatggaggaagggcaagcgtcttggccgtatgccacgtgtgggtgaggaagagactccagctctcgtccatgacctcaatactgctatgaggagacgacgcttccagcaccggaaggaacaggcgccgaaggcggctgaccgcctgcgtggcgactacgagaagatgaagaagaagggcgaagcggccaagcagcgccagctgtccaaggccggaggcgcggctgcaggtggcaagagcgagctgaaatctacagatgatatccgactggcaaggaagctgaagcagcagaggagagagaagaatgctcggccgtcgaggaagaaatga

SEQ ID NO: 65653 - protein, 929 aa, Aspergillus oryzae
MPHRAASPAASENEFDITNALFQNDSDSDNDTSLKQTKRPQKAAPPQALDFLGGDIDDDEDDEAFIAGQQASANRKASNLKGRTVKKGGGFQAMGLNAHLLKAITRKGFSVPTPIQRKTIPVIMDGQDVVGMARTGSGKTAAFVIPMIEKLKSHSTKVGARGLILSPSRELALQTLKVVKELGKGTDLKSVLLVGGDSLEEQFSLMAGNPDIVIATPGRFLHLKVEMNLDLSSIRYVVFDEADRLFEMGFADQLTEILYGLPANRQTLLFSATLPKSLVEFARAGLQEPTLIRLDTESKISPDLENVFFSVKSSEKEGALLHILHEVIKMPTGPTEAAQRQKEQGDGKNFKNFKKRKRGDDKAINFQESPTKYSTIVFAATKHHVDYLYSLLREAGFAVSYAYGSLDQTARKIQVQNFRAGLSNILVVTDVAARGIDIPILANVINYDFPSQPKIFVHRVGRTARAGRKGWSYSLVRDADAPYMLDLQLFLGRRLVIGREHGDQVNFAEDVVVGSLPRDGLSTSCEWVTKVLENEADIYSQRTIAGKGEKLYMRTRNSASLESAKRAKQVVSSDNWTAVHPLFNDQGSQMELEREKMLARIGGYRPQETIFEVHNRRNGKHEGDEAIDTIKRIRTTVDYKKKKREMAEKQSDFVEDASSGNKGEANETEETGAQPDEDEEDIGEGVPDNMSMASESDLEVTFSSYNGGKAKKDSAASFQNPEYFMSYTPSSTNLAEDRAYGVHTGTNANFTQASRSATMDLLGDEGARGFAEPRTMMRWDKRHKKYVSRQNDEDGSKGTHLVKGESGAKIASTFRSGRFDAWRKGKRLGRMPRVGEEETPALVHDLNTAMRRRRFQHRKEQAPKAADRLRGDYEKMKKKGEAAKQRQLSKAGGAAAGGKSELKSTDDIRLARKLKQQRREKNARPSRKK

SEQ ID NO: 65654 - DNA, 2547 bp, Schizosaccharomyces pombe
  CDS (1)..(2547)
atgtccggattccagacgtccgacgaggtcgatatatcaaattctttaaaagcttttcctgttgatattgctactgataatcaaaaagataagcacgaaaatgttggtgaaaatgtgagcgatgaagatgatggtaattatattgcctcgaagcttttggagtctaacaggaggacgaagggaaaaaaggggaatggaaaggcttctaatttccaatcgatgggattgaatcaaactttacttcgagcaatatttaagaagggttttaaagctcctacgccgattcagcgcaaaacgattccccttttattggaaggtcgtgatgttgtaggtatggcacgtactggatcaggtaaaactgcagcttttgttatacctatgattgagcatttgaagtccactctagcaaactctaatactcgcgccttaattctctcgccaaatcgagaacttgctcttcagactgtgaaagtcgtcaaagacttttctaaaggtacggatcttcgatctgtcgctatcgtcggtggcgtcagtctagaggagcaatttagtttgctatccggaaaacccgatattgtggtcgcaactcctggaagatttctacatttaaaggtggaaatgaaattggagttgagttcaatcgagtatgtcgttttcgatgaggccgatagactttttgaaatgggttttgctgctcaattgacagagattttacatgctttgccgacttctcgtcaaactcttctcttctctgccacacttccacgtactcttgttgattttgcaaaggctggacttcaagacccggttcttgtacgccttgatgtagaatccaaggtttccgcggatctacaaagtgcctttttttctgttaaaaccgctgaacgcgaagctgctctcttatgtatactacaagatatcattaagcttcctctaaaagataacgtgcgcccaagagaaataggaaatgtcaataatccgaagaaaagaaaacgtgcattagaattagcgcttaaaggaagtgaatctggatcaccagattctactctagtatttgttcctacaaaacatcatgtcgagtatgtttctgagttacttgttcaagcaggatattcggtttcaaaaatttacgggtctttggaccaagaagcgcgtctcaatgaaattaataattttcgacttggaaaaacaaatttactagtcgttacagacgtagcttctcgtggtattgacatcccattacttgctaatgttattaattatgatttccctcctcaaccaaaagtttttgttcaccgtgtaggacgtacagctcgagcaggacgcactggctgggcgtattcattggttagagcagaagatgctggttatttattagacttacaactatttttaaaccgacctttagttacatcctcgaagcaggttaaaactgactcggattgtgattttacaaaacagattgttttgggatcattaccccaagaacttgttgctgagctactagaatgggtacaaagaatagtttcgagagacgttgagctacagcaactttccaacgttgctgcaaggggtgagaaactatattttcgcacaagagctacttgtagtgctgagagtgctaaaagagctaaggaattggttgatagcaagggctggagttccaacaatccattatttggagatgtatcggtaattgaggccgaggagaaatatgctgaattgctttcaaaagtttcttcttatcggccatcagaaacagtatttgaaatcggtcagcgtggtcacttaaagacagaagctgcagaaatcatgcggaaaagaagaaacaaagtaaaaccaaaaggaataaaatctgaagttgcatctgataaaatcactgacagttctcctggtaatatgtcagaagcttcagagtcagagcttgaagaggtatttaaaaatcctaaggagttatcaaaaaagaagacaactgattttaaagataaagagtattatatgtctcattacgctccaaaggaatctattcaagaaactggctatgctataaattctggtgaaaattttactaccgcagctcgtcatgctattctcgatttaacaaatgacgaaggaattgaacaatcaaggaaggggggacaacgttgggatccaaagaaaaagaaatttgttaatataattaacgacgaagacgggtccaaagggtctcccaagataattcgtggcgaaagcggcgtgaaattgcctgcaacatatcgtagtggtcgttttgatgaatggaaagcatctaaagcattcggtgccaacgattctcctatacgggaaaataagcgatataaacataataagttacagactccaaaaccagctgataagttccgtgataactatcacaaacaaaataaacgtaatagagaggctaaagaaagaggaataggtattaaggtgaacagtgagcttaaatcagctgttgaaattagaaaggcgcgtgagctcaaagagaaacgacttgccaaaaacaatcggccgtcaaaaaagcatcgataa

SEQ ID NO: 65655 - protein, 848 aa, Schizosaccharomyces pombe
MSGFQTSDEVDISNSLKAFPVDIATDNQKDKHENVGENVSDEDDGNYIASKLLESNRRTKGKKGNGKASNFQSMGLNQTLLRAIFKKGFKAPTPIQRKTIPLLLEGRDVVGMARTGSGKTAAFVIPMIEHLKSTLANSNTRALILSPNRELALQTVKVVKDFSKGTDLRSVAIVGGVSLEEQFSLLSGKPDIVVATPGRFLHLKVEMKLELSSIEYVVFDEADRLFEMGFAAQLTEILHALPTSRQTLLFSATLPRTLVDFAKAGLQDPVLVRLDVESKVSADLQSAFFSVKTAEREAALLCILQDIIKLPLKDNVRPREIGNVNNPKKRKRALELALKGSESGSPDSTLVFVPTKHHVEYVSELLVQAGYSVSKIYGSLDQEARLNEINNFRLGKTNLLVVTDVASRGIDIPLLANVINYDFPPQPKVFVHRVGRTARAGRTGWAYSLVRAEDAGYLLDLQLFLNRPLVTSSKQVKTDSDCDFTKQIVLGSLPQELVAELLEWVQRIVSRDVELQQLSNVAARGEKLYFRTRATCSAESAKRAKELVDSKGWSSNNPLFGDVSVIEAEEKYAELLSKVSSYRPSETVFEIGQRGHLKTEAAEIMRKRRNKVKPKGIKSEVASDKITDSSPGNMSEASESELEEVFKNPKELSKKKTTDFKDKEYYMSHYAPKESIQETGYAINSGENFTTAARHAILDLTNDEGIEQSRKGGQRWDPKKKKFVNIINDEDGSKGSPKIIRGESGVKLPATYRSGRFDEWKASKAFGANDSPIRENKRYKHNKLQTPKPADKFRDNYHKQNKRNREAKERGIGIKVNSELKSAVEIRKARELKEKRLAKNNRPSKKHR

SEQ ID NO: 65656 - DNA, 1665 bp, Aspergillus oryzae
  CDS (1)..(1665)
atgtcttacaacggtggctatcagcgcgaccagcgcgactcctaccgaaacggtggtggtggtggatactcgaatggctactccaacggcaacagcaacggctactctggtggtggtagtggtggtggctatggaggtggctacggcggtggtggctacggcggcggctatggcggtagaggtggtggcgccggtggtggtgaccggatgtccaacctcggcgctggcttgaagaagcaagaatgggatctggattctctacccaaatttgagaagtctttctacaaggagcaccccgatgtcgccaaccggtctcagcgcgatgttgatgagttccgtaagaagtttgagatgtctgtgcaaggaaaaaacattcctcgccccgtcgagaccttcgacgaggctggcttcccccaatacgtgctgagcgaggttaaggctcagggtttcgaacgccctaccgctattcagtctcagggatggcccatggctctctctggtcgtgatgtcgttggtattgccgagaccggttccggaaagaccctgtcctactgtcttcctgctattgtccacatcaacgctcagccccttcttgctcctggtgacggccctatcgttctcgtcctcgcccctacccgtgaattggcagtccagatccaggccgaaatcactaagttcggaaagtcgtctcgcattcgcaacacttgtgtgtatggtggtgtccccaagggtccccagatccgtgacttgagccgcggcgtcgaggtctgcattgctactcccggtcgtctcattgatatgctcgaggctggccgcactaacctccgccgtgtcacttaccttgttcttgacgaggccgaccgcatgctggacatgggtttcgagccacagatccgcaagattatctcccagattcgccctgaccgtcagacttgcatgtggtccgccacgtggcccaaggaagtccgtcagcttgcttcggatttcctcaatgattacatccaagtcaacatcggttccatggacctgtccgctaaccaccgtatcacgcaaatcgtcgaggtcgtgtcagactttgaaaagcgcgataagatgatcaagcaccttgagaagattatggagaaccgcggcaacaagtgtctcattttcactggtactaagcgtatcgccgacgaaatcactcgcttcctccgtcaggacggatggccagcactttctattcacggtgacaagcaacaacaagaaagagattgggtcttgaacgagttcaagacgggcaagagcccaatcatggtggctactgatgtggcttcccgtggtatcgatgttcgcgacattactcatgtgctgaactatgactaccccaacaactcggaagactatgttcaccgtatcggtcgaactggtcgtgccggtgccaagggtaccgccatcactttctttaccactgacaactctaagcaggctcgtgacttggtcactatccttactgaggctaagcagcagattgacccccgtctcgccgagatggttcgctacagcggtggtggcggcggtggccgtggcggctatggtcgctggggtggccgtggtggtggtcgtggccgcggcggcaactacactgcttccaatgccgctccccttggaggcaaccgccgttggtaa

SEQ ID NO: 65657 - protein, 554 aa, Aspergillus oryzae
MSYNGGYQRDQRDSYRNGGGGGYSNGYSNGNSNGYSGGGSGGGYGGGYGGGGYGGGYGGRGGGAGGGDRMSNLGAGLKKQEWDLDSLPKFEKSFYKEHPDVANRSQRDVDEFRKKFEMSVQGKNIPRPVETFDEAGFPQYVLSEVKAQGFERPTAIQSQGWPMALSGRDVVGIAETGSGKTLSYCLPAIVHINAQPLLAPGDGPIVLVLAPTRELAVQIQAEITKFGKSSRIRNTCVYGGVPKGPQIRDLSRGVEVCIATPGRLIDMLEAGRTNLRRVTYLVLDEADRMLDMGFEPQIRKIISQIRPDRQTCMWSATWPKEVRQLASDFLNDYIQVNIGSMDLSANHRITQIVEVVSDFEKRDKMIKHLEKIMENRGNKCLIFTGTKRIADEITRFLRQDGWPALSIHGDKQQQERDWVLNEFKTGKSPIMVATDVASRGIDVRDITHVLNYDYPNNSEDYVHRIGRTGRAGAKGTAITFFTTDNSKQARDLVTILTEAKQQIDPRLAEMVRYSGGGGGGRGGYGRWGGRGGGRGRGGNYTASNAAPLGGNRRW

SEQ ID NO: 65658 - DNA, 1623 bp, Cryptococcus neoformans
  CDS (1)..(1623)
atgtcttacggtggcggctacggcggcggtggttacggtggtggctacggcggcggcggtggtggtggtggctacggtggtggcggcggcggctacggcggtggctacggtggtggtggttacggtggcggtttcggtggtgaccgaatgggcaaccttggtcagggcttgcacaacattgactggcaaaaccagtctctcgccaaatttgagaagaacttctacgtccaggacccccgagtcactgctcgttccgatgctgaggtcgaagccttccgtgccgagaaggaaatgaagatccaaggcaagaacgtgcctcgacccatcaccacctttgaggaggccggtttccccgactacatcatgtccgagatccgacgaatgggcttcactgctccttcttctatccagtgccaggcttggcctatggccttgtccggtcgtgaccttgtcgccattgccgagactggttctggtaagaccatctctttctgccttcctgcaatggtccacatcaacgcccagcccctccttgcccctggtgacggtcctattgttcttatccttgctcctacccgagagctcgctgttcagatccagaccgaagctaccaagtttggtcaatcttcccgaattaggaacactgccatttacggtggtgctcccaagggccctcaaatccgagacctccagcgaggtgtcgagatctgtgtcgccactcctggtcgattgatcgacatgctcgagactggcaagaccaacctcaagcgtgttacttatctcgttatggacgaagccgaccgaatgctcgacatgggtttcgagccccagatccgaaagattgtttctcagatccgacctgaccgacagactctcttgttctctgccacttggcccaaggaggtccaacgtctcgccatggacttcctccacgactttatccaggttaacattggttctcttgaccttactgccaaccacaacgttgcccagcacgtcgaagtctgcactgactttgacaagcgaagcaaacttctcagccacttggagaagatttctcaggagaacggcaaggttcttatcttcgttgctaccaagagggtcgccgatgacttgaccaagttcttgagaatggacggctggcctgcccttgctatccacggtgacaaacaacaagctgagcgtgactgggttcttgccgaattcaagtctggccgaagccccatcatgcttgccactgacgttgcttctcgaggtctcgatgtccgagacattggttacgttatcaactatgacttccccaacaattgtgaagattacattcaccgaatcggccgaactggtcgtgccggtcgaaagggtacttcttacacttacttcaccatggacaactccaaagctgctcgtgaactcgtccagattttgagagagtccaaggctgacatccctcccgagcttgaggagatggccatgtacggcggtcgaggtggcggtggtggtcgaggccgaggtggccgtggcggtggccgaggtggttacggtggtggtggtggccgaggcggctacagctctggcgccaactcttacggtggcggtggcggtggctactctagcaggtggtaa

SEQ ID NO: 65659 - protein, 540 aa, Cryptococcus neoformans
MSYGGGYGGGGYGGGYGGGGGGGGYGGGGGGYGGGYGGGGYGGGFGGDRMGNLGQGLHNIDWQNQSLAKFEKNFYVQDPRVTARSDAEVEAFRAEKEMKIQGKNVPRPITTFEEAGFPDYIMSEIRRMGFTAPSSIQCQAWPMALSGRDLVAIAETGSGKTISFCLPAMVHINAQPLLAPGDGPIVLILAPTRELAVQIQTEATKFGQSSRIRNTAIYGGAPKGPQIRDLQRGVEICVATPGRLIDMLETGKTNLKRVTYLVMDEADRMLDMGFEPQIRKIVSQIRPDRQTLLFSATWPKEVQRLAMDFLHDFIQVNIGSLDLTANHNVAQHVEVCTDFDKRSKLLSHLEKISQENGKVLIFVATKRVADDLTKFLRMDGWPALAIHGDKQQAERDWVLAEFKSGRSPIMLATDVASRGLDVRDIGYVINYDFPNNCEDYIHRIGRTGRAGRKGTSYTYFTMDNSKAARELVQILRESKADIPPELEEMAMYGGRGGGGGRGRGGRGGGRGGYGGGGGRGGYSSGANSYGGGGGGYSSRW

SEQ ID NO: 65660 - DNA, 1488 bp, Encephalitozoon cuniculi
  CDS (1)..(1488)
atgatgcacagagggtatggcggagacagaagaggatttcgaccatcgtttagatctgatagaaacagcagatacgcgccgcggacaaggcgggagccacagaggtatgatcccatgcccgagcttgctcctgttgagttccagaagaatttctaccaggaggcagagtcgataagcaggatgacgccttctgaggtttcctcgtttaggaagacaaacgagatgatagtcaagggcacgaatgttccgcatccgattcagaagtttgaggaggcggggttttcaagcgaggttgtctcttcgcttgtggagaagggattcagcgagccgactgccattcaggggcagggatggccgatggctctgagcggaagggatatggttgggattgcacagacggggtctggaaagacactgagttttattctacctgcgctggtgcatgcaaaggaccagcagcccctcagaagaggagacgggcctattgtgcttgtgctggcgcccaccagggagcttgtgatgcagatcaagaaggttgtggacgagttctgcgggatgttcaatctgagaagcactgccgtgtatggaggagcgtcatcgcagccacagatcagggcgctgcacgagggtgcagaggtggttattgcaacccctgggagactgattgatctccacgaccagggacatgcgccgcttagcagggtgacatttcttgtgcttgacgaggccgatcggatgcttgacatgggctttgagccgcagctccggaagattattccaaagacaaatgcaaacaggcagactctgatgtggagcgcaacatggcctcgggaggtccgagggctggcagagagctacatgaatgaatacatccaggtggttgttgggaacgaggagcttaagacaaacagcaagatcaaacagatagtcgaggtgtgcagcggaagagagaaagaggacaagctgattggtgttctcgacaacttcaagggggacaaggtcattgtgttctgcaacatgaagagaacctgcgacgaccttgagtatgtgctgaacaggtctgggtatggggctgcagcgcttcatggagacaagtcgcagaacatccgagacaaggttctcgacgacttcagaagtggaagaaggccgatactgattgccacggaggttgcaggaaggggacttgacgtgaacgacgtcaagcttgtgatcaacttcgactttccaggatcctgcgaagactatgtgcacaggattggaagaactgcaaggggaaacaccaaagaagggatatcgcacacgttctttacagtcggtgacaaggcaaatgcacgggagctgatccggatgctcagggaggccaaccaaacagtcccctctgatcttgaggacatggtgagggtatcaaacgatagatatgggtctagaagcaccagacacggatacgactacagaggaagagctggccgattcccttacagaggatga

SEQ ID NO: 65661 - protein, 495 aa, Encephalitozoon cuniculi
MMHRGYGGDRRGFRPSFRSDRNSRYAPRTRREPQRYDPMPELAPVEFQKNFYQEAESISRMTPSEVSSFRKTNEMIVKGTNVPHPIQKFEEAGFSSEVVSSLVEKGFSEPTAIQGQGWPMALSGRDMVGIAQTGSGKTLSFILPALVHAKDQQPLRRGDGPIVLVLAPTRELVMQIKKVVDEFCGMFNLRSTAVYGGASSQPQIRALHEGAEVVIATPGRLIDLHDQGHAPLSRVTFLVLDEADRMLDMGFEPQLRKIIPKTNANRQTLMWSATWPREVRGLAESYMNEYIQVVVGNEELKTNSKIKQIVEVCSGREKEDKLIGVLDNFKGDKVIVFCNMKRTCDDLEYVLNRSGYGAAALHGDKSQNIRDKVLDDFRSGRRPILIATEVAGRGLDVNDVKLVINFDFPGSCEDYVHRIGRTARGNTKEGISHTFFTVGDKANARELIRMLREANQTVPSDLEDMVRVSNDRYGSRSTRHGYDYRGRAGRFPYRG

SEQ ID NO: 65662 - DNA, 1665 bp, Kluyveromyces lactis
  CDS (1)..(1665)
atgagtttcggcggtggaagagatcatcaatttaacagaaacaacatgggcagcactcatggtgacttccgtggtagcagaggttctgacagaaacagctacaacagaggtaatgacttccgcggtggccgtagctttggtcgtggtccatctcgtgataccagagttgatttggtcgctccaaactgggacgaagaactaccaaatttgccagttttcgaaaagaatttttaccaagaacatccagatgttgctcaaatgagtgaaagtgaagttatcgaatttagaaaggaaaacgaaatgaccatttctggtcatgacgttccaaaacctatcagaagttttgatgaagctggtttcccatcttatgtcttggatgaagttaagcaagaaggtttcgccaaaccaactggtattcaatgccaaggttggcctatggctttgtctggtagagatatgattggtgtcgctgcgaccggttccggtaagaccttatcatactgtttaccaggtatcgttcatattaatgctcaacctttgctatctccaggtgatggtccaattgttttggtattggctccaaccagagaattagctgttcaaattcaaaaagaatgttccaaatttggtgcttcctctagaattagaaacacttgtgtctatggtggtgttccaaagtctcaacaaatcagagatttacagagaggtgtagaaatcctgattgctactccaggtagattgattgacatgttggaaattggtaagacaaacttgaaaagagtcacttaccttgtcttggatgaagctgatagaatgttggatatgggtttcgaacctcaaatcagaaaaattgtcgatcaaattagacctgatagacaaactttgatgtggtccgctacttggccaaaggaagttaaacaattggcaagtgactatttgcatgatccaattcaagttcaaattggttctttggaattgtctgcatcccacacaatcactcagatcgtcgaagtccttactgatttcgaaaagagagatagattggccaagcatttggaaaccgcttctcaagatcaagactccaagatcatcatttttgcttccactaagagaacttgtgatgagatcacttcttatttgagaactgaaggctggccagctttggccattcacggtgacaaggctcagaacgagcgtgattgggttttggctgagtttaggtccggtagatctcctatcatggtagcaactgatgttgctgctagaggtattgacgtcaagggtattaattacgttatcaattacgatatgccaggcaacatcgaagattatgtgcatagaattggtagaactggtagagccggttctactggtactgccatctccttcttcactgaaggcaataaatctctgggtgctgctttgatcaagattatgagagaagctaaacaagatattccagaagaactaagaagatacgacaggggtcaatacggccaacatccaagatatggtggcggccgtggtggtcgtggctttggtggtggccgtggtggccgtggctttggtggccgtggtgatggtggttacggtggtggtggttacggtggtggccgtggcggcttcggtggaaacagatccagagaccaaggctggagacgttag

SEQ ID NO: 65663 - protein, 554 aa, Kluyveromyces lactis
MSFGGGRDHQFNRNNMGSTHGDFRGSRGSDRNSYNRGNDFRGGRSFGRGPSRDTRVDLVAPNWDEELPNLPVFEKNFYQEHPDVAQMSESEVIEFRKENEMTISGHDVPKPIRSFDEAGFPSYVLDEVKQEGFAKPTGIQCQGWPMALSGRDMIGVAATGSGKTLSYCLPGIVHINAQPLLSPGDGPIVLVLAPTRELAVQIQKECSKFGASSRIRNTCVYGGVPKSQQIRDLQRGVEILIATPGRLIDMLEIGKTNLKRVTYLVLDEADRMLDMGFEPQIRKIVDQIRPDRQTLMWSATWPKEVKQLASDYLHDPIQVQIGSLELSASHTITQIVEVLTDFEKRDRLAKHLETASQDQDSKIIIFASTKRTCDEITSYLRTEGWPALAIHGDKAQNERDWVLAEFRSGRSPIMVATDVAARGIDVKGINYVINYDMPGNIEDYVHRIGRTGRAGSTGTAISFFTEGNKSLGAALIKIMREAKQDIPEELRRYDRGQYGQHPRYGGGRGGRGFGGGRGGRGFGGRGDGGYGGGGYGGGRGGFGGNRSRDQGWRR

SEQ ID NO: 65664 - DNA, 1647 bp, Magnaporthe grisea
  CDS (1)..(1647)
atgtcttacggcggtggtggctacggcggtcgcaacggcggcggttacggtggtggtcgcgatggtggttactcgaacggacacggctcccacggcggtggctacggcggcggtggcggcggtggctatggaggtggtggtggtggttacggcggcggcggcggcggcggcttcggaggtggtggtgaccgcatgtctaacctaggcgcaggccttcagaagcaggactgggatatcaacgccctccccaagttcgagaagcacttctacaaggagcaccccgatgtcaccaacaggtcgcaggccgaggttgacaagttccgtcgcgagcactctatggccgtgcagggtagcgatgtgcccaagcctgtcgagacgttcgacgaggctggcttcccgcgctacgtaatggacgaggtcaaggcgcagggcttccctgcacccactgccattcagtctcagggctggcccatggctttgagtggtcgtgatgtcgttggtatcgctgagacgggatcgggcaagactcttacgtattgtcttcccgccatcgtgcacatcaacgctcagccgctcttggcacccggtgacggacccatcgtcctgatccttgcccccactcgagagctcgctgttcagatccaggctgaaatcagcaagttcggaaagtcgtcgcgcattagaaacacgtgcgtctacggtggtgtgcccaagggcccccaaatccgtgacttgtctcgtggcgtcgaggtctgcattgcaacccccggtcgtctgattgacatgctcgagtctggcaagaccaacttgcgccgggtcacatacctcgtcctcgacgaggccgatcgcatgcttgacatgggtttcgagccccagatccgcaagatcattggccagatccgccccgatcgtcagactctgatgtggtcggctacctggcccaaggaggtccgcaacatggctgctgacttcctgcaagactttatccaggtcaacattggttccctggatctttcagcaaaccaccgtatcacacagattgtggaagttgtgtcagagtctgagaagcgtgaccgcatgatcaggcacatggagaaggttatggacggaaaggacagcaagaacaagattctcatcttcgttggcacaaagcgtgttgcagacgaaatcaccaggttcctgcgacaggatggctggcccgcgctttcgatccacggtgacaagcagcagaacgagcgtgactgggtcctcgaccagttcaagacgggcaagagccccatcatggttgccaccgacgttgcgtcgcgtggtattgacgtgcgcaacattactcatgtgctcaactatgactaccctaacaactcggaggactacatccaccgtatcggtcgtacaggccgtgctggtgcgaagggaaccgcaattaccttcttcaccactgagaactctaagcaggctcgtgatctacttggcgtcctgcaggaggccaagcaagagatcgaccctcgtcttgcagagatggccaggtacggcggcggcggtggcggcggtaggtacggcggataccgcggccgcggcggtcgccaccatggcggtggtggccgtggtgccaacgacctgcccatgggaggtaaccgacgctggtag

SEQ ID NO: 65665 - protein, 548 aa, Magnaporthe grisea
MSYGGGGYGGRNGGGYGGGRDGGYSNGHGSHGGGYGGGGGGGYGGGGGGYGGGGGGGFGGGGDRMSNLGAGLQKQDWDINALPKFEKHFYKEHPDVTNRSQAEVDKFRREHSMAVQGSDVPKPVETFDEAGFPRYVMDEVKAQGFPAPTAIQSQGWPMALSGRDVVGIAETGSGKTLTYCLPAIVHINAQPLLAPGDGPIVLILAPTRELAVQIQAEISKFGKSSRIRNTCVYGGVPKGPQIRDLSRGVEVCIATPGRLIDMLESGKTNLRRVTYLVLDEADRMLDMGFEPQIRKIIGQIRPDRQTLMWSATWPKEVRNMAADFLQDFIQVNIGSLDLSANHRITQIVEVVSESEKRDRMIRHMEKVMDGKDSKNKILIFVGTKRVADEITRFLRQDGWPALSIHGDKQQNERDWVLDQFKTGKSPIMVATDVASRGIDVRNITHVLNYDYPNNSEDYIHRIGRTGRAGAKGTAITFFTTENSKQARDLLGVLQEAKQEIDPRLAEMARYGGGGGGGRYGGYRGRGGRHHGGGGRGANDLPMGGNRRW

SEQ ID NO: 65666 - DNA, 1593 bp, Pichia stipitis
  CDS (1)..(1593): transl_table=12
atgaacaactacaacaacggtgactacaaaggtggcagagaacaacacttcggtggaaacaacaactacaaccgcggttatggtggaaacggtggattcggtggaaaccgttacaacgagagagttgaactcaccaccccagactgggacttggaatcgttgccaaagttcgaaaagaacttctacactgaacacccagatgttgctgcccgtagtgacaaagacattgctgccttcagaaacgaacaccagatgagctgtttgggctcagacattcctcatcccatcactactttcgatgaggctggattcccagaatacgtgttgaacgaagtcaaggcacagggtttcccttctccaactgccattcaatgtcagggttggcccatggctctttctggtagagacatggtgggtattgctgctactggttcgggtaagaccttatcgtactgtttgcctgctattgtccacatcaacgctcagcccttgttgagccctggtgatggtcctgttgtgttggttttggctcctaccagagaattggctgttcagattcagcaagaatgctccaagttcggatcttcttccagaatcagaaacacctgtgtctatggtggtgcaccaaagggtcaacagatcagagacttggccagaggtgttgaaattgtcattgccactccaggtagattgatcgatatgttggaaatgggtaagaccaacttgaagagagtaacctatttggttttggatgaagccgacagaatgttggatatgggtttcgaacctcaaatcagaaagattgtcgaccagatcagaccagaccgtcaaaccttgatgtggtccgccacttggccaaaggaagttcaaaacttggctagagactacttgcaagaccctatccaagtcagaattggttccttagaattggctgcctctcatactatcacccaagttgttgaagttatttcggaatacgaaaagcgtgacagattggtaaagcacttggaaaccgctaccaccgagaaggagtccaaggtgttgatcttcgcctccaccaagaagacttgtgatgaagtcacttcgtacttgagagctgacggatggcccgcattggctatccacggtgacaagcaacagagtgaaagagactgggtcttgagagaattcaagaccggtaaatcccctatcatggtggctactgatgttgctgccagaggtattgatgtcaagggtatcaatttcgttatcaacttcgacatgccaggtaacattgaagattacgtccacagaatcggtagaaccggaagaggtggtgccactggtactgctgtttctttcttcaccgatggtaacaacaagcttggtggtgatttgtgcaaaatcatgagagaagctaagcaaaccattcctccagaattacagagattcgacagaaagagtttcggtgcccacattagatacggtggtggacgtggtggtcgtggtggctacggccgtggacgtggtggttacggtggacgtggtggttatggtcaaagaaactaccaaactggatccaaccaggctcctttgtccaaccgtcgtttttaa

SEQ ID NO: 65667 - protein, 530 aa, Pichia stipitis
MNNYNNGDYKGGREQHFGGNNNYNRGYGGNGGFGGNRYNERVELTTPDWDLESLPKFEKNFYTEHPDVAARSDKDIAAFRNEHQMSCLGSDIPHPITTFDEAGFPEYVLNEVKAQGFPSPTAIQCQGWPMALSGRDMVGIAATGSGKTLSYCLPAIVHINAQPLLSPGDGPVVLVLAPTRELAVQIQQECSKFGSSSRIRNTCVYGGAPKGQQIRDLARGVEIVIATPGRLIDMLEMGKTNLKRVTYLVLDEADRMLDMGFEPQIRKIVDQIRPDRQTLMWSATWPKEVQNLARDYLQDPIQVRIGSLELAASHTITQVVEVISEYEKRDRLVKHLETATTEKESKVLIFASTKKTCDEVTSYLRADGWPALAIHGDKQQSERDWVLREFKTGKSPIMVATDVAARGIDVKGINFVINFDMPGNIEDYVHRIGRTGRGGATGTAVSFFTDGNNKLGGDLCKIMREAKQTIPPELQRFDRKSFGAHIRYGGGRGGRGGYGRGRGGYGGRGGYGQRNYQTGSNQAPLSNRRF

SEQ ID NO: 65668 - DNA, 1653 bp, Schizosaccharomyces pombe
  CDS (1)..(1653)
atgtcttacagagataacgaatatagtggaaattacaatggaaaagaggatggctataacagcagaggtcgttatggtggcggataccgcaataactatagtcgtggcggcggtcgtggaggtttcaatgatggcgcttcttatggctacgatcaacgaggacaaggaagaaatttttacgagtcagatggtcccggtgctaatttggtaaagaaggattggaaaaatgaaactttgattccgtttcaaaaagatttttataaagaacatgaaaatgttcgcaatcgttcagacgctgaagtcaccgaataccgtaaagaaaaagaaattgtcgtgcatggattaaatgttcctaaacctgttacgacatttgaagaggctggttttcctaactatgtactaaaggaagtcaaacaattggggttcgaagctcctactcctatccaacaacaagcatggccgatggctatgtctggtagagatatggtaggcatttcagctacgggttctggtaagacactttcttattgtcttcctgctatcgtacatattaatgcccaaccactactttctccaggcgatggtccaattgtactcgttcttgctccaacgcgtgaattagctgtccaaattcagcaagaatgtactaaatttggcaaatcatcccgaattcgcaacacatgtgtgtatggtggtgtccctcgtggtccacaaattcgtgacctaattcgcggtgtcgaaatttgcattgcaacacctggtcgtttattggatatgttagactctaacaaaaccaacttacgtcgtgtgacctatttagtgctggatgaagccgaccgaatgcttgatatgggttttgaacctcaaattagaaagattgttgatcaaattcgaccagaccgtcaaactgtcatgttttctgcaacatggccaaaagaagttcaacgtcttgctcgtgactatttgaatgactacattcaagtaactgtcggctctttggatttggcagcttctcataacattaagcaaatcgtagaagttgttgacaatgctgataaaagagctcgtcttggaaaggatatcgaagaggttttgaaggatagggataacaaagttcttatttttacaggcacaaaacgtgttgctgatgacattactcgcttccttaggcaagatggttggcctgcccttgccattcatggtgataaagctcaagacgagcgtgactgggtactcaatgagttccgtactggcaagtctccgattatggttgctactgatgttgcttctagaggaatagatgttaagggtattacacatgtctttaactatgatttccctggaaatacggaagactacgttcatagaattggacgtactggtcgtgctggagctaaaggtaccgcatatacctatttcacttcggataatgctaagcaagctcgtgaacttgtttccattctctctgaagccaagcaggacattgatcctaagcttgaggaaatggcccgctattcaagcggtggtcgtggtggtaactaccgccgtggcggctatggtcgtggtggtttccgtcgtggaggaggttatggaaaccgtaataggggttttaccggaagtaattctgccccccttgcgcgttcacgttggtga

SEQ ID NO: 65669 - protein, 550 aa, Schizosaccharomyces pombe
MSYRDNEYSGNYNGKEDGYNSRGRYGGGYRNNYSRGGGRGGFNDGASYGYDQRGQGRNFYESDGPGANLVKKDWKNETLIPFQKDFYKEHENVRNRSDAEVTEYRKEKEIVVHGLNVPKPVTTFEEAGFPNYVLKEVKQLGFEAPTPIQQQAWPMAMSGRDMVGISATGSGKTLSYCLPAIVHINAQPLLSPGDGPIVLVLAPTRELAVQIQQECTKFGKSSRIRNTCVYGGVPRGPQIRDLIRGVEICIATPGRLLDMLDSNKTNLRRVTYLVLDEADRMLDMGFEPQIRKIVDQIRPDRQTVMFSATWPKEVQRLARDYLNDYIQVTVGSLDLAASHNIKQIVEVVDNADKRARLGKDIEEVLKDRDNKVLIFTGTKRVADDITRFLRQDGWPALAIHGDKAQDERDWVLNEFRTGKSPIMVATDVASRGIDVKGITHVFNYDFPGNTEDYVHRIGRTGRAGAKGTAYTYFTSDNAKQARELVSILSEAKQDIDPKLEEMARYSSGGRGGNYRRGGYGRGGFRRGGGYGNRNRGFTGSNSAPLARSRW

SEQ ID NO: 65670 - DNA, 1659 bp, Yarrowia lipolytica
  CDS (1)..(1659)
atgtcttacggtgacgattacaacaacaacgaccgaggctacggcggcggacgaggcttcggcggaggccgaggtggccgaggtggttcccgaggcggtcgaggcggcttcggtggcgatcgaggtttcggaggtgaccgaggcggctacggcggcggaggctaccaggacaacgactttggcaacctgcccaagcaggactgggaccttgagaagctccctcagtttgagaagaacttctacaaggaggaccctgctgtcactgagcgaaccgacgaggaggtcactgccttccgaaaggagaaccagatgaccctgcacggagacggtatccctaagcccgtgaccaactttgacgaggctggtttccccccttacgtcctcaaggaggtcaagcagcagggtttcgagaagcccactgccattcagtgccagggatggcccatggccctgaccggacgagatgtcattggtatcgcttccaccggttccggtaagactctgtcttactgcctgcccgccattgtccacatcaacgcccagcccatgctgtcccacggtgacggacccatcgtcctggtcctcgcccccacccgagagctggctgttcagattcagcaggagtgctccaagttcggcaagtcttccaagattcgaaacacctgtgtctacggaggtgttccccgaggccagcagattcgagaccttgcccgaggtgtggagattgtcattgccactcccggccgacttctcgatatgctcgagtccggaaagactaaccttcgacgagtgacctacctggttctcgatgaggccgaccgaatgctcgatatgggtttcgagcctcaaattcgaaagattgtcgaccagattcgacccgaccgacagaccctcatgtggtctgctacctggcccaaggaggtccagcgactggcccacgactacctcaaggaccagattcaggtcaacattggttctctggagttgtctgcctctcacaacatcacccaggttgtggaggtctgcaccgagtacgagaagcgagaccgacttgtcaagcacctcgagaccgtcatggagaacaaggagtccaagtgtctgattttcaccggcaccaagcgtgtcgctgacgacattaccaagttcctgcgacaggacggctggcctgctctcgccattcacggtgacaagcagcagcaggagcgagactgggttctcaacgagttccgacagggcaagagccccatcatggttgccaccgacgtggcttcccgtggtattgatgtcaagggtatcaacttcgttatcaactacgactacccctccaactccgaggactatgtccaccgaatcggtcgaactggtcgagccggcaccaagggtaccgcttacacctacttcaccgaggacaaccgaaagcaggcccgagaccttctcgtcatcctgcgagaggccaagcagcatatcgaccccaagctggaggagatgggcggtggccgaggtggccgaggaggctggggaggccgaggcggtcgaggcggccgtggcggccgtggtggttaccgacgaggtggctacggcggcggtggctatggtggaggacgaggttccgacatcaccggctccaactccgctcctctttccaactcccgatggtag

SEQ ID NO: 65671 - protein, 552 aa, Yarrowia lipolytica
MSYGDDYNNNDRGYGGGRGFGGGRGGRGGSRGGRGGFGGDRGFGGDRGGYGGGGYQDNDFGNLPKQDWDLEKLPQFEKNFYKEDPAVTERTDEEVTAFRKENQMTLHGDGIPKPVTNFDEAGFPPYVLKEVKQQGFEKPTAIQCQGWPMALTGRDVIGIASTGSGKTLSYCLPAIVHINAQPMLSHGDGPIVLVLAPTRELAVQIQQECSKFGKSSKIRNTCVYGGVPRGQQIRDLARGVEIVIATPGRLLDMLESGKTNLRRVTYLVLDEADRMLDMGFEPQIRKIVDQIRPDRQTLMWSATWPKEVQRLAHDYLKDQIQVNIGSLELSASHNITQVVEVCTEYEKRDRLVKHLETVMENKESKCLIFTGTKRVADDITKFLRQDGWPALAIHGDKQQQERDWVLNEFRQGKSPIMVATDVASRGIDVKGINFVINYDYPSNSEDYVHRIGRTGRAGTKGTAYTYFTEDNRKQARDLLVILREAKQHIDPKLEEMGGGRGGRGGWGGRGGRGGRGGRGGYRRGGYGGGGYGGGRGSDITGSNSAPLSNSRW

SEQ ID NO: 65672 - DNA, 1641 bp, Saccharomyces cerevisiae
  CDS (1)..(1641)
atgacttacggtggtagagatcagcaatataacaagactaactacaagtctagaggtggcgacttccgcggtggaagaaactctgatagaaactcttacaatgacagaccacaaggcggtaactaccgtggtggtttcggtggtcgttccaattacaaccaaccccaggaattgatcaaaccaaactgggatgaagaattacccaaattgccaactttcgaaaagaatttctatgttgaacacgaaagtgttcgcgacagatcggacagtgagattgctcagttcagaaaggaaaatgaaatgactatttccggacacgatattccaaagccaatcaccactttcgatgaagctggtttcccagactacgttttgaatgaagtgaaggctgaaggatttgacaaaccaactggcattcaatgtcagggttggccaatggctttatctggtagggacatggttggtattgctgccactggttccggtaagactttgtcttattgtttaccaggtattgttcatatcaacgctcaaccattattggctccaggcgatggaccaattgttttggttttggctccaactagagaattggctgttcaaattcaaacagaatgttccaagtttggtcatagttccagaatcagaaatacctgtgtctacggtggtgttccaaaaagtcaacaaatcagagatttatctcgtggctctgaaattgttattgctactccaggtcgactaattgatatgctagagattggtaagactaatttgaagagagtcacttacctggttcttgatgaagctgatagaatgttagatatgggttttgaacctcaaatcagaaagattgttgatcaaatcagacctgatagacaaaccttgatgtggtctgccacttggccaaaggaggtgaagcaactagccgctgattacttgaatgatccaattcaagttcaagttggttctctagaactatctgcctcccataatattactcagatcgtcgaagttgtttctgatttcgaaaagagagatcgtttgaacaagtacttagaaacagcctctcaagacaacgaatacaagacattaatctttgcttctacgaaaagaatgtgcgatgatatcaccaagtatctaagagaagatggatggcccgccttggctattcatggtgacaaagaccaaagagaacgtgactgggttctacaagagtttagaaacggtagatccccaattatggttgctactgatgtggccgccagaggtatcgatgtcaaaggtatcaattacgttatcaactacgatatgccaggtaacattgaagattatgttcacagaatcggtagaactggtagagcaggtgctactggtactgctatatctttcttcaccgaacaaaacaaaggtttaggtgctaaattaatctctatcatgagagaagctaatcaaaatattcctcccgaattattgaaatacgacaggagatcttatggtggcggtcacccaagatacggtggtggccgtggtggtcgtggcggctatggccgtagaggtggttacggtggtggccgtggtggttacggcggtaacaggcagagagatggtggctggggtaacagaggtcgttcaaactattga

SEQ ID NO: 65673 - protein, 546 aa, Saccharomyces cerevisiae
MTYGGRDQQYNKTNYKSRGGDFRGGRNSDRNSYNDRPQGGNYRGGFGGRSNYNQPQELIKPNWDEELPKLPTFEKNFYVEHESVRDRSDSEIAQFRKENEMTISGHDIPKPITTFDEAGFPDYVLNEVKAEGFDKPTGIQCQGWPMALSGRDMVGIAATGSGKTLSYCLPGIVHINAQPLLAPGDGPIVLVLAPTRELAVQIQTECSKFGHSSRIRNTCVYGGVPKSQQIRDLSRGSEIVIATPGRLIDMLEIGKTNLKRVTYLVLDEADRMLDMGFEPQIRKIVDQIRPDRQTLMWSATWPKEVKQLAADYLNDPIQVQVGSLELSASHNITQIVEVVSDFEKRDRLNKYLETASQDNEYKTLIFASTKRMCDDITKYLREDGWPALAIHGDKDQRERDWVLQEFRNGRSPIMVATDVAARGIDVKGINYVINYDMPGNIEDYVHRIGRTGRAGATGTAISFFTEQNKGLGAKLISIMREANQNIPPELLKYDRRSYGGGHPRYGGGRGGRGGYGRRGGYGGGRGGYGGNRQRDGGWGNRGRSNY

SEQ ID NO: 65674 - DNA, 1497 bp, Emericella nidulans
  CDS (1)..(1497)
atggcaaaacgagagcaccaagatcagactggcgatagcagaccaagcaaaaaatctaaaggcacgaaagacacgaaaaaaaacactgaagtttcgccgccttattttcaatcccctgctcttgataatgttcctcaaacagaaattgataaatttctttctgaccattccatcaagataacggatgcctcagcagataaaccgtctctgcgcccaattatctcattttcattcttaccccccagcaataaagacctctacgctccgttagatggtttcgcctcgccgaccgctatccagtcggcaacatggccacttctgtttgcaggccgcgatgtcataggaattgcagagactggaagtgggaagactcttgcatttggtctaccgtgtctaaagaaggtgcttgatttgaagaccaaacaaaaatcatgcagaccacttgcagttgttatctccccgacaagagagctcgcaatgcagatttatgaccaacttgtgaagttcgcggaaaaagtggatattcaagtcgcctgcatatttggcggtgtcaagaaagacgaacagcgtgaagctttgaagtctgcagctgtggttgttgcaactcctggaaggttgaaagaccttcagaatgacggctctttggatttaggcagggtcaaatatcttgtcctagatgaagcagaccgtatgctagataaaggatttgagcaagacatcaaggatatcatctctcctatgccagtgtcaaaacgtcaaactgttatgttcacagcaacctggcctcctattgtcaggaaccttgcctctacatttatgacttctccagtcacggtcaccatcggtggtgacccgtctgcagatccacgtgcaaacagcaggattaaacaggttgtcgaagtggtaaaaccacacgagaaagagcaaagactagtgcaaattctgaacaggcatcagcgtggaactcctgataaagtgctcgccttctgcctttacaagaaggaggctatgcgggtcgagagactccttcgaaccaagggcttcaaggtagcgggtatacacggcgatttaagccagcaagaaagatttagaagcctcgaggcctttaaatcaggtgcggccaccgttctcgttgcaactgatgtcgcggctcgcggccttgacatacctcatgtgaaactggtcgtaaatgtcacttttccgctcactgtggaggactatgttcatcgaattggccgcaccggtcgcgctggggctgatgggcatgctataaccctgtttacggaaactgataaggcccagtctggcgcattgatcaatgttctgaaagcggctaatcaagaggtgcccgaagctctactcaagttcggctccaccgtcaagaagaagcagcatgacgcatatggcgccttcttcaaggatgttgagccgggaaaggcggctaccaagattcctacggatcttcgatcagtgtttgcccttgtgcaagatgattga

SEQ ID NO: 65675 - protein, 498 aa, Emericella nidulans
MAKREHQDQTGDSRPSKKSKGTKDTKKNTEVSPPYFQSPALDNVPQTEIDKFLSDHSIKITDASADKPSLRPIISFSFLPPSNKDLYAPLDGFASPTAIQSATWPLLFAGRDVIGIAETGSGKTLAFGLPCLKKVLDLKTKQKSCRPLAVVISPTRELAMQIYDQLVKFAEKVDIQVACIFGGVKKDEQREALKSAAVVVATPGRLKDLQNDGSLDLGRVKYLVLDEADRMLDKGFEQDIKDIISPMPVSKRQTVMFTATWPPIVRNLASTFMTSPVTVTIGGDPSADPRANSRIKQVVEVVKPHEKEQRLVQILNRHQRGTPDKVLAFCLYKKEAMRVERLLRTKGFKVAGIHGDLSQQERFRSLEAFKSGAATVLVATDVAARGLDIPHVKLVVNVTFPLTVEDYVHRIGRTGRAGADGHAITLFTETDKAQSGALINVLKAANQEVPEALLKFGSTVKKKQHDAYGAFFKDVEPGKAATKIPTDLRSVFALVQDD

SEQ ID NO: 65676 - DNA, 1581 bp, Pichia stipitis
  CDS (1)..(1581): transl_table=12
atggttgaggaacataagaacaaaaagagaagacaggaagacggccctgctgacgtacctgaaaagaaggtgaaagtaagcaagtctgaaaagaaggacaagaaagaaaagaaggaaaagaaggagaagaaggaaaaaaaggagaagaaagagaagaaagagaagaaagagaagaaggaaaagaaaaagaagtacgagcacaccgccaccatctctggctctgcccaatcttctcaaggctacactcagtctgaatcgctcactaacttaccacaatctgaaatcgatagcttcttagctaccaatgaagtcactattgaagatcctcacagtttgaacttgagaccattgttgtcatttgaccagatacagttgaactccaagatcagcgcagtagtgaacaagtttcccacgccaaccccaatccagtctgtcgcatggccatacttgttgagtggaaaagatgtcattggtgtagctgaaaccgggtctggtaaaacctttgccttcggtgttccagccatcaacaacattttgactttaggtaagtctggcttgagtgtgttgtgtatttctccaaccagagaattggcctcgcaaatctacgacaacttagtcgatttgaccagtaacactaatgtcaagtgtgtttgtgtttatggtggtgttcccaagcatgaccaagtcaagaacttaaagaatgccaacgtcgtcgttgctactccaggtagattattggatttgatcgaagatggtgccgtcaacttgggcactgtagattacttggttttggatgaagctgatagaatgttggaaaccggattcgaagatgccatcaaggctatcattggtggaaccaagaaggaaaacagacagacattgatgttcactgctacctggccacaagaagtcagaaagttggcatctacgttcatgaatcaacctgtcaaggtcagcattggtgacagagatgagttggctgccaacaagagaatcacccaaatcgttgaagtcatcgaaccttttgacaaagagaaaaagttgttgggcttattgagacaatatcagtctggatccaagaagaatgacaaggtgttgatttttgcattatacaagaaggaagctacgagaatcgaagggttgttgagaagaaactcctacaacgttgctgcaattcacggagacttgtcgcagcagcagagaaccaatgcattgaactctttcaagaagggtgagtcgagtttgttgttggccacggatgttgcagccagaggtttggatattcccaacgtcaaggtggtcatcaacttgaccttccccttgactgtagaagactacgttcatagaatcggtagaaccggtagagctggtcaaactggtactgcccatactcttttcaccgaacatgaaaagcatttgagtggtgccttgatgaatattttgagaggtgccaaccagccagttccagatgaattattaaaattcggaggtcacaccaaaaagaaggctcattccgcttacggtgccttcttcaaggacgtggacatgacgaagactgccaaaaagatcaagtttgattag

SEQ ID NO: 65677 - protein, 526 aa, Pichia stipitis
MVEEHKNKKRRQEDGPADVPEKKVKVSKSEKKDKKEKKEKKEKKEKKEKKEKKEKKEKKEKKKKYEHTATISGSAQSSQGYTQSESLTNLPQSEIDSFLATNEVTIEDPHSLNLRPLLSFDQIQLNSKISAVVNKFPTPTPIQSVAWPYLLSGKDVIGVAETGSGKTFAFGVPAINNILTLGKSGLSVLCISPTRELASQIYDNLVDLTSNTNVKCVCVYGGVPKHDQVKNLKNANVVVATPGRLLDLIEDGAVNLGTVDYLVLDEADRMLETGFEDAIKAIIGGTKKENRQTLMFTATWPQEVRKLASTFMNQPVKVSIGDRDELAANKRITQIVEVIEPFDKEKKLLGLLRQYQSGSKKNDKVLIFALYKKEATRIEGLLRRNSYNVAAIHGDLSQQQRTNALNSFKKGESSLLLATDVAARGLDIPNVKVVINLTFPLTVEDYVHRIGRTGRAGQTGTAHTLFTEHEKHLSGALMNILRGANQPVPDELLKFGGHTKKKAHSAYGAFFKDVDMTKTAKKIKFD

SEQ ID NO: 65678 - DNA, 1737 bp, Schizosaccharomyces pombe
  CDS (1)..(1737)
atgcaattttgttttaggattttaatattgtatatatcgttaagcatagataacaattacttggttactacgttaatatctctgaaggaaaatgtttttttgcatatttttactctaacctttctcttcaaagctttccttttaaaaatggcgaaacgatcagtggaagagttaaaaagatcggcggatgaagaagcttctgttaagcgaaaggagaagaaatcaaagcatgagcataagaagcataaaaaagataagccctctgccgacaaggatagaatttcaaaaaaggataaaaagaaatcaaagaaaggaaaatcaaaaactaaagaagaatcgatagaaatcaatgcggaagagggagcaaaaatcgcacaacccgcgatcggctcagctaacgcttctaatcataatgatgaagaagcgtatgaccgttacattaagaagcataatatttcttttgcggatcctaaatcctctgaaaatttacttccaattcttcagttcgatgaactagacgtttcagctaagttacgcgagggtttaaagaattataaggaacctacgcctattcaagctgctacttggccttatttactagctgggagagacgtggtaggaattgctgaaaccggttctggtaagactgttgcattcggaattcctgctttgcaatacctcaatggtttgtcagataacaagtctgtccctcgtgttttggtagttagtcctactcgagaattagccattcaaacgtatgaaaacctcaatagtcttattcaaggtaccaacttaaaagctgtggttgtttatggcggcgcccctaaatcggagcaagcgagggctgccaagaacgccagtgtcattattggtacccctggtcgtttgttggatctgattaacgatggctcgattgattgttctcaagttggttaccttgttttagatgaggcagatcgtatgcttgacactggattcgaacaagatatccgtaacatcatcagccataccccagatcccactcgtaatggatccagacaaactgtctttttcagtgctacttggcctgaatccgttcgcgctcttgctgctacctttttaaaggatcccgttaaaatcactattggaagtgatgaactagctgcttcccaaaatatcacacagattgttgaaattctggatgacccaagaagcaaggagagaatgcttgataatcttctcagaaagcatctttcttctggagggaaagacgataaaatcctcatatttgttttgtacaaaaaagaagcagctagagttgaaggtaccttggctaggaaatataacgtggtgggcattcatggtgatatgtcccagggagcccgattacaagcattaaatgactttaagtctggaaaatgtcccgtactagtagcaactgacgttgccgcccgaggtttggacattcctaaagtgcaacttgtgattaatgttactttccccttgactatagaagattatgttcatagaatcggacgtactggccgtgccaacacaaaaggtactgctattacatttttcactccacaagacaagtcacatgctggtgagcttgttaatgttcttcgtcaagccaaacaagatattcctgaaggactattcaagtttggaacagctgtcaagcccaaacttaatgcttacggaagtcgtgtagtcgacgttcctgtaaaggctgctactaagattgtttttgactaa

SEQ ID NO: 65679 - protein, 578 aa, Schizosaccharomyces pombe
MQFCFRILILYISLSIDNNYLVTTLISLKENVFLHIFTLTFLFKAFLLKMAKRSVEELKRSADEEASVKRKEKKSKHEHKKHKKDKPSADKDRISKKDKKKSKKGKSKTKEESIEINAEEGAKIAQPAIGSANASNHNDEEAYDRYIKKHNISFADPKSSENLLPILQFDELDVSAKLREGLKNYKEPTPIQAATWPYLLAGRDVVGIAETGSGKTVAFGIPALQYLNGLSDNKSVPRVLVVSPTRELAIQTYENLNSLIQGTNLKAVVVYGGAPKSEQARAAKNASVIIGTPGRLLDLINDGSIDCSQVGYLVLDEADRMLDTGFEQDIRNIISHTPDPTRNGSRQTVFFSATWPESVRALAATFLKDPVKITIGSDELAASQNITQIVEILDDPRSKERMLDNLLRKHLSSGGKDDKILIFVLYKKEAARVEGTLARKYNVVGIHGDMSQGARLQALNDFKSGKCPVLVATDVAARGLDIPKVQLVINVTFPLTIEDYVHRIGRTGRANTKGTAITFFTPQDKSHAGELVNVLRQAKQDIPEGLFKFGTAVKPKLNAYGSRVVDVPVKAATKIVFD

SEQ ID NO: 65680 - DNA, 1758 bp, Ustilago maydis
  CDS (1)..(1758)
atgacgactagcgcgacagaaaaagcgcttgaggatcgcgccaagtcgctgcacaagaaggagaagaaggcttctgccaaggccgcagctgccgccggggcctccgcttcaacaagcctcgaggggtctccttcgccagcttcccccgcaaagaaggacaagaaagacaagaaggataagaaggacaagaagcgttccgcagatgacgctgacgctgatgacgacgagaaggcagccaaaaagcgcagaaaggaggagaagaaggctaaaaaggctgcggccaagtcgggtgccgctacttcactagaatctactcctgcagcttcaccagctccggcagcgtcttcatccgcttcagccgcatcattcacaccaaccaaccctgccgcggctcgcgccttcgtcgagtcgcacaacatcaccatcgaggcgcccgaagagtctaacgagcgtccgccgctgcctatggttgacttccgcgaactcgacggcaaggtcgatgcagccgttaagaagactctcgattcacaaggcttctctactcccacacccattcaggcttgctgctggccagtcctattgcagaacaaggatgtagtgggcatcgccgagacgggttcgggcaagacgtttgctttcggtttgccagcattgcaacacttggttacgaagcacaaagttctggacagtggaaagaagaaggccaaaggtgcgcaggtcaacgttctcgttatcgctcccacacgagagctggccattcagacagaggagaatatggccaaactgggcaagtcgatggggattggcatgatctgcttgtacggtggtgtttcaaagcaggagcaagttcgcctgctcaatcaatcccctccggttcgcatcgtggttggcactcccggtcgtgtcttggacatggcaagagacggctcgctggacctgtctggcgttacatacttggtcttggacgaggctgaccgcatgctagataagggtttcgagcccgacattcgtgccatcatcggcatgtgcaaatcacgcgaggaaggccgtcacacttccatgttctccgccacatggccacctgccgtccgcggtctcgccgagtcgttcatgaacggtcctgtccgcgtcacagtgggatctgacgagctttctgccaaccgtcgcgtcgagcagactgtcgaagttcttgctgatggctacgccaaagaacgaagacttaacgatttcctgcgttccgtcaatgctcaacgatccaaggacaagatcctcattttcgccctgtacaagaaggaagcgcaacgtatcgaacaaacgctgcgtcgtggcggattcaaggtttctggtatccacggtgatttaggacagaacgagcgtatcgcctcgctcgaacggttcaagtcggctgaaacgcctcttctggtcgctaccgatgttgctgcacgaggccttgacattcccaacgtggagcacgtcgtcaactacaccttcccacttaccattgaagactacgttcaccgtatcggtcgaactggacgaggtggaaagactggaaagagtctcactttcttcaccgagatggacaaggcacacgctggtgagctcatcagggtgctcaaagatgccgatcaaaaagtgccagatgcactgaccaagtttcctaccaccatcaagaagaagacacactcgagttacggtgaccacttcaaggagcttgtaccaggcaaggccaagaagatcacttttgacgacgattag

SEQ ID NO: 65681 - protein, 585 aa, Ustilago maydis
MTTSATEKALEDRAKSLHKKEKKASAKAAAAAGASASTSLEGSPSPASPAKKDKKDKKDKKDKKRSADDADADDDEKAAKKRRKEEKKAKKAAAKSGAATSLESTPAASPAPAASSSASAASFTPTNPAAARAFVESHNITIEAPEESNERPPLPMVDFRELDGKVDAAVKKTLDSQGFSTPTPIQACCWPVLLQNKDVVGIAETGSGKTFAFGLPALQHLVTKHKVLDSGKKKAKGAQVNVLVIAPTRELAIQTEENMAKLGKSMGIGMICLYGGVSKQEQVRLLNQSPPVRIVVGTPGRVLDMARDGSLDLSGVTYLVLDEADRMLDKGFEPDIRAIIGMCKSREEGRHTSMFSATWPPAVRGLAESFMNGPVRVTVGSDELSANRRVEQTVEVLADGYAKERRLNDFLRSVNAQRSKDKILIFALYKKEAQRIEQTLRRGGFKVSGIHGDLGQNERIASLERFKSAETPLLVATDVAARGLDIPNVEHVVNYTFPLTIEDYVHRIGRTGRGGKTGKSLTFFTEMDKAHAGELIRVLKDADQKVPDALTKFPTTIKKKTHSSYGDHFKELVPGKAKKITFDDD

SEQ ID NO: 65682 - DNA, 1599 bp, Yarrowia lipolytica
  CDS (1)..(1599)
atgggcaaacgagatcgaactgaagacgacgaggttgtcaccaagaaggtgaagctcgacaagaaggacaagaaggaaaagaaggaaaagaaggacaagaaggacaagaaggacaagaaggacaagaaggataagaaggataagaaggagaagaaggaaaagaaggaaaagaaggaaaagaaggaggaggtctctgatgaggaggaggtcgctgaggagaagcccaagatgacttacactgcctcggctaacaccatcaagtcttctggcgagtacactcagtgtgacgatcttactaacgtttctcagtccaccattgacaactacttcaaggagcacaccatcaccattgagggtgagcagatgcgacctacgatggagtttagccacgtgactctggatcctcgaatcaccaaggttctcaccaagttccctcgacccactcccatccaggctgtttcttggccctaccttttggctggtaaggatatggttggtgttgccgagactggttccggtaagaccttcactttcgccgtgcctgctcttgagcacgttcttagcacctctggaggcaagggcgttcgagttcttgttgtttctcccacccgagagctggccatgcagatctacgacaacatcaaggagttgtgtgatgttgttggtctgcatgccgtctgtgtttatggcggtgtccccaaggagcagcagcgaagcgacctcaagcgagcttctttcgtcattgctactcccggtcgtctctgtgatctcatcgacgagggctcttgtgatctctccaaggtttcctaccttgttcttgatgaggctgaccgaatgctcgagaagggtttcgaggaagatatcaagaagatcattggttccacccgacccaccggccgacagaccgtcatgttctccgccacctggcccccggaggtccggaagctcgctgagggcttcatgaagacccccaccaaggtgatgattggagaacgagacgagctggctgccaacaagcgaatcacccagtctgtcgaggtgcttgacccccgagccaaggagggccgtcttctcgatctgctgcgtcagtacgccaatgacgacttcaagattcttattttcgctctgtacaagaaggaggccactcgagtggagaacaccctgactcgacgaggctacggagtcgctgctattcacggagatctatctcagcagcaacgaaccaaggctctcgacgagttcaagaagggcgagaagaacattctgctggctactgatgtcgctgctcgaggtctggatatccccaacgtcaagcttgtcattaacctgaccttccctctgaccgtggaggactacgttcaccgaatcggtcgaactggtcgtgccggaaagaccggacaggccattaccctgttcaccgagcacgagaagcatctgtctggtgctctgatcaacgttctgcgaggagccgaccagcccgttcccgacgagctgctcaagtttggcggccacaccaagaagaaggagcatggtgcctacggagcattcttcaaggacgtggacatgaccaagaaggccaagaagatcactttcgactaa

SEQ ID NO: 65683 - protein, 532 aa, Yarrowia lipolytica
MGKRDRTEDDEVVTKKVKLDKKDKKEKKEKKDKKDKKDKKDKKDKKDKKEKKEKKEKKEKKEEVSDEEEVAEEKPKMTYTASANTIKSSGEYTQCDDLTNVSQSTIDNYFKEHTITIEGEQMRPTMEFSHVTLDPRITKVLTKFPRPTPIQAVSWPYLLAGKDMVGVAETGSGKTFTFAVPALEHVLSTSGGKGVRVLVVSPTRELAMQIYDNIKELCDVVGLHAVCVYGGVPKEQQRSDLKRASFVIATPGRLCDLIDEGSCDLSKVSYLVLDEADRMLEKGFEEDIKKIIGSTRPTGRQTVMFSATWPPEVRKLAEGFMKTPTKVMIGERDELAANKRITQSVEVLDPRAKEGRLLDLLRQYANDDFKILIFALYKKEATRVENTLTRRGYGVAAIHGDLSQQQRTKALDEFKKGEKNILLATDVAARGLDIPNVKLVINLTFPLTVEDYVHRIGRTGRAGKTGQAITLFTEHEKHLSGALINVLRGADQPVPDELLKFGGHTKKKEHGAYGAFFKDVDMTKKAKKITFD

SEQ ID NO: 65684 - DNA, 1572 bp, Saccharomyces cerevisiae
  CDS (1)..(1572)
atgacaaaggaagaaatcgcagacaagaagagaaaggttgtagatgaggaggtaattgaaaaaaagaagagtaagaaacacaaaaaggataagaaagacaagaaggaaaagaaggataaaaagcataaaaagcataagaaggagaagaagggtgagaaggaagtggaagtaccagagaaagaatctgaaaagaaacctgaacctacttctgcagtggctagtgagttttatgttcagagtgaagcactaaccagtcttccacaatctgatattgacgaatatttcaaggaaaatgaaattgctgttgaggattctctggatctagccctacgtccgctattatcatttgattatctttctttagactcttccattcaagcagaaatttccaaatttccaaaaccaacgcctattcaagccgtagcctggccatatttgttatctggtaaagatgttgttggtgttgctgagaccggttctggtaaaacatttgctttcggtgttccagctatcagccatttaatgaacgatcaaaagaaaaggggcatacaggttctagtcatttccccaactagagaacttgcttcccaaatttatgataatctgattgtattaactgacaaggttggtatgcagtgttgttgtgtttatggtggtgttccaaaggatgagcaaagaattcagttaaaaaagtcacaagtggtggttgctacacctggtagattattagacctattgcaggaaggatctgttgacttatctcaagttaattacttagtattagacgaggcagacagaatgttggaaaaaggttttgaagaagacatcaagaatattatcagagaaactgatgcgtccaaaagacaaactctaatgtttaccgctacctggccaaaggaagtccgtgaattagcttccacgttcatgaacaacccaatcaaagtatctattggtaacacggaccaactaactgctaacaaaagaattacacagattgttgaagtggtggacccacgtggaaaagaaagaaagttattggaactgttgaaaaagtaccactctggtccaaaaaagaatgaaaaggtcttgatttttgctctttataagaaggaagctgctcgtgttgaaaggaatttgaaatataacgggtataacgtcgcagctatccatggtgatttgtcccagcaacaaagaacgcaagcattgaatgagttcaaaagcgggaagtctaacttgttactggccaccgacgttgcagcaagaggtttagatataccaaatgttaagacagttattaatttaactttcccattgactgtggaggattatgtccatagaatcggtagaactggtagagctggtcaaacaggcacagcacacactctgttcactgaacaagaaaagcatttggctggtggactggttaacgttttgaatggtgccaatcaacctgttcctgaagatttgataaagttcggtactcacactaagaagaaggaacatagcgcttatggttcattctttaaggacgtcgatttgactaagaaaccaaaaaaaattactttcgattag

SEQ ID NO: 65685 - protein, 523 aa, Saccharomyces cerevisiae
MTKEEIADKKRKVVDEEVIEKKKSKKHKKDKKDKKEKKDKKHKKHKKEKKGEKEVEVPEKESEKKPEPTSAVASEFYVQSEALTSLPQSDIDEYFKENEIAVEDSLDLALRPLLSFDYLSLDSSIQAEISKFPKPTPIQAVAWPYLLSGKDVVGVAETGSGKTFAFGVPAISHLMNDQKKRGIQVLVISPTRELASQIYDNLIVLTDKVGMQCCCVYGGVPKDEQRIQLKKSQVVVATPGRLLDLLQEGSVDLSQVNYLVLDEADRMLEKGFEEDIKNIIRETDASKRQTLMFTATWPKEVRELASTFMNNPIKVSIGNTDQLTANKRITQIVEVVDPRGKERKLLELLKKYHSGPKKNEKVLIFALYKKEAARVERNLKYNGYNVAAIHGDLSQQQRTQALNEFKSGKSNLLLATDVAARGLDIPNVKTVINLTFPLTVEDYVHRIGRTGRAGQTGTAHTLFTEQEKHLAGGLVNVLNGANQPVPEDLIKFGTHTKKKEHSAYGSFFKDVDLTKKPKKITFD

SEQ ID NO: 65686 - DNA, 2472 bp, Aspergillus clavatus
  CDS (1)..(2472)
atggcgcccaccactggcccgcgcaacaccaaaaatgcgaagccggccgttcagcgatcgaagacgctgaaacgcaagcgtggacaggaagagctgtcgtccctcattcagcgggtcgaagggctcgatctcaaggaatccttcgaatcgttctccgatctgccgttgtcggaaccgactctctccggactcacttcatcgcactttaaaactctgaccgacatccagtcccgtgcgatcagtcacgcgctcaagggccgcgatgtcctcggagccgcaaagaccggcagcggaaagacgctggcgtttctcgtaccggtgctcgagaacctgtaccgcaggcagtgggccgagcatgatggtctgggcgctttgattctatcgccgacccgcgaactcgccattcagatcttcgaggtgttgcggaaaatcggccgctaccacacattttctgccggcctggttattggcgggaagagtttgcgcgaggagcaggagagattgggacgcatgaatattttggtgtgcacgcctggtcggatgctgcagcatctggatcagacggcgctgttcgacacatataatctgcaaatgctggtcctggacgaggcggaccgtatcttggatctgggcttccagcagactgtggatgccatcgtggggcatcttccgaaggagcgacagacactgcttttcagcgccacgcagacgaagaaggtttcggacctggctcgcttgagtctccgggacccggagtacgtggctgtccatgagactgcatctacggccacgcctgctaaacttcagcaacattatgtgatcgcccctcttccgcagaagctcgacatcctgtggagtttcattcggagcaacctcaagtcgaagacgatggtcttcttttcctcaggcaaacaagtgcgatttgtctacgaatcctttcgccatatgcaacccggtatccccctgatgcatctccacggtcgccagaagcagggtggacgattagatattatgaccaatttctctcaggcgaaacactgtgttcttttctctacggatgtcgccgctcgtggtctggacttcccggccgtcgactgggtcatccagatggactgccctgaagatgcggatacgtacatccaccgagtgggtcgaacggcgcggtatggacgagacggtcgtgcggtactgttccttgatcctagcgaagaggagggtatgttgaaacgtctggagcagaagaaagtccccatcgagaagatcaacatcaaagcaaacaagcagcagagcatcaaggatcagctgcagaacatgtgtttcaaggaccctgaactgaaatacattggtcagaaggcgtttatttcctatgtcaagtcggtctatatccagaaggacaaggagattttcaagctcaaggagttgaaattagacgaattcgcgtctagcctgggtcttcctggtgcgccacggatcaagttcatcaagggagatgacacgaagcagcgcaagaacgcccctcgcgccgcggctcatctatccagcgacgatgaagcaggttccgacgccgaggagggcgagccgaagaccaagaagaaggaggagccacaggtgcggaccaagtatgaccgcatgttcgagcggcggaatcaagacgtgctggcggagcactactcgaaactcatcaatgacgacggaacgatggtggcaccgcccaacgcgggtgctggtgctgatgcggacgaggatgatgacttcctctctgtcaagcgtcgtttcgatgtcggtgacgagaccctgggcatgtccagcgacgacagcgacgaggaagacgacgacgacgacgagacgtctccgaagaaggaaaccaaggtggtgcacatcgatggcaaggaagccttggttattgattcgaaacggcgcgagaagctcctcaagtcgaagaagaagctactcaaattcaagggcaagggcaccaagctggtctacgacgacgaaggcaacgcgcacgaggtgtacgagctggaagacgaagaccagttcaaggcccgcggcgacgccaaggagcaaaaggccaaattcctggaggaggaggcggaacgcacgcgtctggcggatttggaggacaaggagatcgccaagcagaagcgtcgcgagaagaaggagaagcgcaaggctcgcgagcgcgaactgcttgccgaggccgaggacgaggaggagactgtggttcaactacctccgtacgagggggatcacgacatggacggtgggttctccgcctccgaggaggaggaggaggcagctcgccccagcaagaagcccaaggtcaagttcgccgaaccggacgagagcgacaagggatcggagccctggtacaagaagagcaaacggaccgacgacaagggaggctcccaggcccctcagattcaaacattggaggatctggagtctcttgccagcggcctgctcggctag

SEQ ID NO: 65687 - protein, 823 aa, Aspergillus clavatus
MAPTTGPRNTKNAKPAVQRSKTLKRKRGQEELSSLIQRVEGLDLKESFESFSDLPLSEPTLSGLTSSHFKTLTDIQSRAISHALKGRDVLGAAKTGSGKTLAFLVPVLENLYRRQWAEHDGLGALILSPTRELAIQIFEVLRKIGRYHTFSAGLVIGGKSLREEQERLGRMNILVCTPGRMLQHLDQTALFDTYNLQMLVLDEADRILDLGFQQTVDAIVGHLPKERQTLLFSATQTKKVSDLARLSLRDPEYVAVHETASTATPAKLQQHYVIAPLPQKLDILWSFIRSNLKSKTMVFFSSGKQVRFVYESFRHMQPGIPLMHLHGRQKQGGRLDIMTNFSQAKHCVLFSTDVAARGLDFPAVDWVIQMDCPEDADTYIHRVGRTARYGRDGRAVLFLDPSEEEGMLKRLEQKKVPIEKINIKANKQQSIKDQLQNMCFKDPELKYIGQKAFISYVKSVYIQKDKEIFKLKELKLDEFASSLGLPGAPRIKFIKGDDTKQRKNAPRAAAHLSSDDEAGSDAEEGEPKTKKKEEPQVRTKYDRMFERRNQDVLAEHYSKLINDDGTMVAPPNAGAGADADEDDDFLSVKRRFDVGDETLGMSSDDSDEEDDDDDETSPKKETKVVHIDGKEALVIDSKRREKLLKSKKKLLKFKGKGTKLVYDDEGNAHEVYELEDEDQFKARGDAKEQKAKFLEEEAERTRLADLEDKEIAKQKRREKKEKRKARERELLAEAEDEEETVVQLPPYEGDHDMDGGFSASEEEEEAARPSKKPKVKFAEPDESDKGSEPWYKKSKRTDDKGGSQAPQIQTLEDLESLASGLLG

SEQ ID NO: 65688 - DNA, 2409 bp, Aspergillus niger
  CDS (1)..(2409)
atggctccgatcaacggttcccgcaatggcaaacactcaaagcctcagcgcggcggtaacctgaagcgcaagcgtgtccaagaagatttgaactctctcatcaagaaggtcgaggatctggatgtcaaggaaaccatcgaacaatttaccgatctgcccttgtctgaacccaccgcgtccggacttgcctcgtcccactacaagacgttaaccgatattcaatcccgtgcgatcagccatgcgctcaagggccgcgatattctcggtgccgcaaagacgggaagcggcaaaacgctagccttcctgattcccatcctggaaaacctataccgcaaacagtggtcagagcacgatggattgggtgccctggttctgtctcccacccgcgaactcgcgattcagatcttcgaagtcctccgcaaagtcggtcgctatcatacgttctccgccggtctggttattggtgggaagagtctgcgggaggagcaggagagactgggacggatgaatattctggtgtgtacgcctggacgcatgctgcagcacttggatcagacttctttcttcgagacgcacaacctgcagatgctcgtgttggatgaggcggatcgcatcttggatatgggtttccagaagactgtggacgctattatcggccatcttcccaaggagcgccagactctacttttcagtgccacacagacgaagaaggtgtcggacttggctcgactgagcttgcaggatcccgaatatgtggctgttcatgaggcggcctcctccgctacgccgtccaagcttcagcaacattacgtcgttacgcccctcccgcagaaactcgatgttctatggagttttattcggagcaacctgaagtccaagacgatcgttttcctgtcatcaggaaagcaggtgcgttttgtctacgaatccttccgtcacatgcaacccggtgtcccgttgatgcaccttcacggacgtcagaagcagggtggtcgactcgatattactaccaagttctcctcggcccaacatgcagttctgttcgccaccgatgttgctgcgcgtggtctggactttccggccgtcgactgggtcatccaactggactgtcctgaagatgccgatacctatattcaccgtgttggtcgtacagctagatacgagcgcgatggtcgtgccgtgctgttcctggatcctagtgaggagaagggcatgttgaagcgtttggagcagaagaaggtccaggtcgaacgcatcaacgtcaaggccaacaagcaacagagcattaaagatcagctgcaaaacatgtgcttcaaggatcccgaattgaagtatctgggccagaaggcctttatttcctacgctaagtcggtctacgtccagaaggacaaggagatcttcaacatcaaggagctgaagctggatgaatttgcgggcagcttgggacttccgggtgcacctcgcatcaagttcattaaaggtgatgataccaaggagcggaagaacgcgccccgtgctacggcatacctgtccagcgatgacgagtctgacgaagagggtgaaaagaagaagactaagaaggatgagacgcaggtgcggacgaagtatgaccgcatgtttgagcgtcggaaccaggacgtgttggccgaccattaccacaagctcattaacgacgacggcacgatggtggaaactaataaggctactgaggatgcggatgaagacgacgacttcttgtccgtcaagcgtcgctacgaggccggtgacaaggatctggatgtcggaggatctagctcggaggatgaggaggatgcggacggaacggagaagaagggagccaaggtggtccatctcgatggcaaggaggccctggtcattgactcgaaacgccgcgagaagctgctcaagtcgaagaagaagcttctcaagttcaagggcaagggcacgaagcttatctacgatgatgagggcaatgctcacgagctgtacgaaatggaggacgaagaacagttcaaggccaagggcgacgccaaggagcagcaggcgaagttcctggcggaggaagcggagcgcactcggcaagcggatttggaggacaaggaagtcgccaagcagaagaagcgcgagaagaaggagaagcgcaaggcccgcgagcgcgagcttcttgccatggaggaagaaggaggggatttggtccagatcccgtacaaggagggcgggctcgcttcggacgaagacgaggaggtactccggcccagcaagaaggcgcgagtctcctttgcagacgaagcaagcgaggaggagcccaaacccaagaaggccaagaagtctcaaccagctggcaaagcaccggagcagatcgagactctggaagatctggagtcgctggccgctggcttgctggggtga

SEQ ID NO: 65689 - protein, 802 aa, Aspergillus niger
MAPINGSRNGKHSKPQRGGNLKRKRVQEDLNSLIKKVEDLDVKETIEQFTDLPLSEPTASGLASSHYKTLTDIQSRAISHALKGRDILGAAKTGSGKTLAFLIPILENLYRKQWSEHDGLGALVLSPTRELAIQIFEVLRKVGRYHTFSAGLVIGGKSLREEQERLGRMNILVCTPGRMLQHLDQTSFFETHNLQMLVLDEADRILDMGFQKTVDAIIGHLPKERQTLLFSATQTKKVSDLARLSLQDPEYVAVHEAASSATPSKLQQHYVVTPLPQKLDVLWSFIRSNLKSKTIVFLSSGKQVRFVYESFRHMQPGVPLMHLHGRQKQGGRLDITTKFSSAQHAVLFATDVAARGLDFPAVDWVIQLDCPEDADTYIHRVGRTARYERDGRAVLFLDPSEEKGMLKRLEQKKVQVERINVKANKQQSIKDQLQNMCFKDPELKYLGQKAFISYAKSVYVQKDKEIFNIKELKLDEFAGSLGLPGAPRIKFIKGDDTKERKNAPRATAYLSSDDESDEEGEKKKTKKDETQVRTKYDRMFERRNQDVLADHYHKLINDDGTMVETNKATEDADEDDDFLSVKRRYEAGDKDLDVGGSSSEDEEDADGTEKKGAKVVHLDGKEALVIDSKRREKLLKSKKKLLKFKGKGTKLIYDDEGNAHELYEMEDEEQFKAKGDAKEQQAKFLAEEAERTRQADLEDKEVAKQKKREKKEKRKARERELLAMEEEGGDLVQIPYKEGGLASDEDEEVLRPSKKARVSFADEASEEEPKPKKAKKSQPAGKAPEQIETLEDLESLAAGLLG

SEQ ID NO: 65690 - DNA, 2391 bp, Aspergillus oryzae
  CDS (1)..(2391)
atggctccttcaaacggtccccgtagcggcaagaatgcgaaatcctctcatactttgaaacgcaagcgcgcgcaagatgatttgtcgactcttactcagcgggttgaggatctcgatatcaaggaaacctacaagtccttttccgatctccctctgtctgaaccgactgcttccggactagcttcgtcgcattttaaaaccctcaccgatattcagtctcgtgcgattggccatgcgttgaagggtcgggatatattgggtgccgcgaagaccggtagcggcaagacgctcgcttttctcatcccggttctcgagaacttgtaccgcaagcaatggtctgagcatgatggactgggagctctgatcctatctccgactcgtgaactcgccattcagatcttcgaggttcttcgcaaaatcggtcgctatcatacattctcagccggcttgattattggtgggaagagcttgaaggaggaacaggaaagattgggaagaatgaatatcttggtttgcacaccgggtcgtatgctacagcatttggaccagacggctatgttcgatgtgttcaacctgcagatgctggtcttggacgaagcggatcgtatcctggacatgggtttccagaaaaccgtggatgctattgttggtcatctacccaaagagcggcagacattacttttcagtgctacccagacgaaaaaggtgtcggatcttgcccggttgagcttacaggatcccgagtacgtggctgttcacgaaacagcatcttccgcaaccccatctacacttcagcaacactatgtcgttacccccttatcacagaaacttgatgttctgtggagttttattcgcagtaacttgaaagccaaaacgattgtcttcctgtcttccggaaagcaggtgcgattcgtttacgaatccttccgccatttacaacctggtatccctttgatgcatcttcatggccggcagaagcagggtggacgactggatatcacagcaaagttctcacaagcaaaacatgcagtcctattttcaactgatatcactgctcgtggtttagattttcccgctgttgactgggtcattcaaatggattgccctgaagatgccgacacttacattcatcgagttggacggacagcccgatatgagcgtgatggtcgtgcagtgttgtttttggatcctagcgaggagtcaggaatgttgaagcgccttgagcaaaagaaggttccgattgaacgcatcaatatcaaggccaacaagcagcagagtattagggaccagttgcaaaatatgtgctttaaagacccggagcttaagtacctgggacaaaaggcgtttatctcctacgttaagtcagtctatgtccagaaggataaggaagtcttcaagcttaaggaactcaagctagaagactttgcttccagtcttggtcttccaggtgctccccgtatcaagttcatcaagggagacgacactaaagagcgcaaaaacgcatcgcgggcgacggcctacttgtcgagtgacgatgattctgatgaaggcggcgagaagaagagcaaaaaggatgagaagcaagtccggaccaagtatgaccgtatgttcgagaggcgcaaccaagacgtcttggccgaccactactcgaaacttatcaacgatgacggcacattggttgaccccagtaagaccgcaagtgctgccgacgatgctgacgaggatgatgacttcctgtctgttaaacgtcgcttcgacgctggagatgaggacttgggcggtaactctgaagaggagttagagcagaagggtgttaaagtggttcaactcgatggcaaggatacattggtcattgattcgaaacgtcgggagaagctactcaagtcgaagaagaagctgctcaaattcaaaggaaagggaacaaaacttatttacgacgacgagggcaacgcgcacgaattgtacgaaatggaggacgaagaagacttcaaggcccgtggagatgccaaggagcaacaagcccggttcttggcagaggaaaccgagcggacacgcacggccgatatggaggacaaggaggtggccaaacaaaaacggcgggagaagaaagagaaacgcaaggctcgggagcgtgagttgcttgccgaggaggaagccgaggaagctgtggcgcagctggctccatacaaggaggacgacgagttttctgcatcagacagggaggacgacgcacctcgccccagcaagaagcaaaaggttcgtattgcagagcccgaagagagcaaagaagagccctggtacaagaagagcaagaaaccggccgcgaaggctcccgagcaaatccagactttggaggatttggaatctttggcgactggattgcttgggtaa

SEQ ID NO: 65691 - protein, 796 aa, Aspergillus oryzae
MAPSNGPRSGKNAKSSHTLKRKRAQDDLSTLTQRVEDLDIKETYKSFSDLPLSEPTASGLASSHFKTLTDIQSRAIGHALKGRDILGAAKTGSGKTLAFLIPVLENLYRKQWSEHDGLGALILSPTRELAIQIFEVLRKIGRYHTFSAGLIIGGKSLKEEQERLGRMNILVCTPGRMLQHLDQTAMFDVFNLQMLVLDEADRILDMGFQKTVDAIVGHLPKERQTLLFSATQTKKVSDLARLSLQDPEYVAVHETASSATPSTLQQHYVVTPLSQKLDVLWSFIRSNLKAKTIVFLSSGKQVRFVYESFRHLQPGIPLMHLHGRQKQGGRLDITAKFSQAKHAVLFSTDITARGLDFPAVDWVIQMDCPEDADTYIHRVGRTARYERDGRAVLFLDPSEESGMLKRLEQKKVPIERINIKANKQQSIRDQLQNMCFKDPELKYLGQKAFISYVKSVYVQKDKEVFKLKELKLEDFASSLGLPGAPRIKFIKGDDTKERKNASRATAYLSSDDDSDEGGEKKSKKDEKQVRTKYDRMFERRNQDVLADHYSKLINDDGTLVDPSKTASAADDADEDDDFLSVKRRFDAGDEDLGGNSEEELEQKGVKVVQLDGKDTLVIDSKRREKLLKSKKKLLKFKGKGTKLIYDDEGNAHELYEMEDEEDFKARGDAKEQQARFLAEETERTRTADMEDKEVAKQKRREKKEKRKARERELLAEEEAEEAVAQLAPYKEDDEFSASDREDDAPRPSKKQKVRIAEPEESKEEPWYKKSKKPAAKAPEQIQTLEDLESLATGLLG

SEQ ID NO: 65692 - DNA, 1359 bp, Encephalitozoon cuniculi
  CDS (1)..(1359)
atgcggcccatgaagttcgaggatttaaagatcgaccaaagaattgagaaaggactcagggaaaacggatttgtaagcatgaaggaggtccaacaaaaagtcatccctatggcattagaaggccacgacataattgggtcgtcgcaaacaggaacggggaaaactcttgcatttctagttccaactctacagagactagtaagtctcgggtggggaggaggagatggccttgggtgcttggtaatcaccccaacacgtgagctggctttgcaaatatttgatgtcctcagtcggattgcgaagtatacagtattgagcactgggttgattatggggggtcttgaagcggaggacgagcttctgaaagtaaaccagatgaacattcttgtgtgcactcctggaagacttctccagcatctacaagaaaacccttatttgagcactgcaaatgtccagatattgattcttgatgaagcagacaaaatgatcgagatggggtttaaggaggtcctagaagacatactcgagtacattccccagaagaagcaaaccctgttgttctcagcaacaccaaaggcctcaaccgctagaatcctaaagctagaagacccgaggatcatctcgatatacaaagaagaaggatttccgtcgcagctgcgtcagtacttctacatgatgaggacgggagacaaaatcaattatctgcacacatttatcggaagcaacccagaagtgaagggaattgtattcttcagcacctgcaaggaggttaagtttcactgtcttctgtttgagagacttaagctccgtaacaggatcttttgcctcagtggcgggatgtcgcaaaagcagaggatagatgtattcaaaaggtttgtgaaagagaaaaatggaattctgttctgtaccgacctgggctctagaggactagacttcccaaaggtcgatgtggtcatacagtatgattgcccgtgcaacgttgaaacgtatgtccatcgtgttggaagaacggctagaaacagcgagaggggagagtcctatgtgtatctcgtgcatggggaagaaaagcttcttacagatattcagaagaaagggtggattaaaaagcaggaaggcatggaggataaaggcatttctgaggagattacggaagggcctggggtccagattagatgcatcaataatatggttaagaggcttgtgaggtcaagtaaggagcttaacgaatactgcagaaagtatcttgtgacatacgagaagtttctcaccttcagcagtaagagatactctgaaggcgtgataaggaaaatcccagcactatacgaacacttcggggtttcacgggaccagagccattaa

SEQ ID NO: 65693 - protein, 452 aa, Encephalitozoon cuniculi
MRPMKFEDLKIDQRIEKGLRENGFVSMKEVQQKVIPMALEGHDIIGSSQTGTGKTLAFLVPTLQRLVSLGWGGGDGLGCLVITPTRELALQIFDVLSRIAKYTVLSTGLIMGGLEAEDELLKVNQMNILVCTPGRLLQHLQENPYLSTANVQILILDEADKMIEMGFKEVLEDILEYIPQKKQTLLFSATPKASTARILKLEDPRIISIYKEEGFPSQLRQYFYMMRTGDKINYLHTFIGSNPEVKGIVFFSTCKEVKFHCLLFERLKLRNRIFCLSGGMSQKQRIDVFKRFVKEKNGILFCTDLGSRGLDFPKVDVVIQYDCPCNVETYVHRVGRTARNSERGESYVYLVHGEEKLLTDIQKKGWIKKQEGMEDKGISEEITEGPGVQIRCINNMVKRLVRSSKELNEYCRKYLVTYEKFLTFSSKRYSEGVIRKIPALYEHFGVSRDQSH

SEQ ID NO: 65694 - DNA, 2208 bp, Schizosaccharomyces pombe
  CDS (1)..(2208)
atgcctaagaatcgtactggaaggagtagagaagcccgtgaaaaaaagagaaaagaagaagaagaagaaattgaagaacttaactctcaaattgaagcactttctgaaactgttgatcattttgcagagttacctcttactcaacctacaaaaagtgcattgaaaaatgcacattttataacactaactgagattcaaaaacaatgtattccttcagcacttaagggccgtgatattttaggtgctgcgaaaacaggaagtggaaaaaccttagcctttatcgtccctttgattgaaaatttatatcgaaaaaaatggacctctcttgatggtttgggagcattggtcatttcgcctacgagagaattggcaattcagacattcgaaacgttggtaaaaataggccgtctacattccttttcggctggtctgattattggaggaaataattataaagaagaaaaagaacgtctttctcgtatgaatatccttgtctgtacacctgggagattgttacaacacattgatcaagctgtaaattttgatacttcaggtttacaaatgttgatattagacgaagctgatagaatccttgatatgggatttcgcactacgctagatgccattgtttccagccttcctgttcatcgtcagactatgctgttttctgccactcagacaaaatctgttaaagacttggctaggttgtcgcttcaaaatcctgatttcatttcagttcacgaaaatgatacatcgagtacccctagtaacctcaaccagttttatcttactgttccattaaccgagaaactggatattctgtttggtttcattcgtacgcatctaaagtttaagacaattgttttcttgtcttcttgtaagcaagtccgttttgtgtatgaaacttttcggcgcatgcgacccggtatttcacttttacatttgcacggaaaacagaagcaaacaactagaacggaggttactgctaagtttacatcttctcgtcacgttgttttgttctgcaccgacattgtcgctcgtggattggatttcccagctgtagattgggttattcaattggatgcgcctgaagatgttgatacttatattcatagagttggacgtacagctcgttataatagaagcggaaatgctctattgcttctacttccttccgaagaagcttttttgaagcgtctggaatcgaaaaaaatagctgttgaaagaattaatgttaaagatgggaagaaaactagcattcgtaatcaattacaaaacctttgttttaaagataatgacataaagtacatcggtcaaaaagccttcatctcttatcttcgctctatttatcttcagaaagataaagatgtgtttcaacttgacaaacttcctgttgaagcatttgctgattctcttggtttgcccgggactccaaaaatcacgtttggtaaattgaaaaatcattctcaatctcagaaagactacaactcctccacttctttagattcatcagaagaatctgaggttgatgttgaaaataaacagaatgtgcgtaccaaatatgatcgtatttttgaaagaaaaaatcaagacgttttagctgctcataggcaaaggcttgtggaggtcaactcagacgaagatgacggtgacttcctgcaagtgaagcgtgttgatcatgacttaccagaggaaactggagagaggtttaatgcaaattcaaaaagaaaagagaaaatggcgtcatctaagaaggctatgcttaagtataaaaagagcgcagataaagtttactttgacgatgaagggaacgcaattcccttctatgccatgaatactgaggatacttttcaaaaagctggtgatcctgctgctttgattgcttcacatctggcagaagaacgtaaagctttagaaaaggctgacattactgataaggaaacagtccgtcagaagcagttggaaaagaagcgaagacgccaagaacttgaaagaataactcaacaagatgcgactcctgatgagtacgtaccggaggggcctattgtcgctttcgtggatgacgaacttcctgaaacatctaaaaagcaaaagaagtggtttgaggacaatgatgaacgagaccatggaggcattgttgaagttgaaaacttgaattccttagaagatcaagaagcacttgctctaaagttgatgggcgcagcttag

SEQ ID NO: 65695 - protein, 735 aa, Schizosaccharomyces pombe
MPKNRTGRSREAREKKRKEEEEEIEELNSQIEALSETVDHFAELPLTQPTKSALKNAHFITLTEIQKQCIPSALKGRDILGAAKTGSGKTLAFIVPLIENLYRKKWTSLDGLGALVISPTRELAIQTFETLVKIGRLHSFSAGLIIGGNNYKEEKERLSRMNILVCTPGRLLQHIDQAVNFDTSGLQMLILDEADRILDMGFRTTLDAIVSSLPVHRQTMLFSATQTKSVKDLARLSLQNPDFISVHENDTSSTPSNLNQFYLTVPLTEKLDILFGFIRTHLKFKTIVFLSSCKQVRFVYETFRRMRPGISLLHLHGKQKQTTRTEVTAKFTSSRHVVLFCTDIVARGLDFPAVDWVIQLDAPEDVDTYIHRVGRTARYNRSGNALLLLLPSEEAFLKRLESKKIAVERINVKDGKKTSIRNQLQNLCFKDNDIKYIGQKAFISYLRSIYLQKDKDVFQLDKLPVEAFADSLGLPGTPKITFGKLKNHSQSQKDYNSSTSLDSSEESEVDVENKQNVRTKYDRIFERKNQDVLAAHRQRLVEVNSDEDDGDFLQVKRVDHDLPEETGERFNANSKRKEKMASSKKAMLKYKKSADKVYFDDEGNAIPFYAMNTEDTFQKAGDPAALIASHLAEERKALEKADITDKETVRQKQLEKKRRRQELERITQQDATPDEYVPEGPIVAFVDDELPETSKKQKKWFEDNDERDHGGIVEVENLNSLEDQEALALKLMGAA

SEQ ID NO: 65696 - DNA, 2223 bp, Yarrowia lipolytica
  CDS (1)..(2223)
atgaagaaacgagccgatcctcgtaaaatcaaacgagaggaacacaaacagaagctctccaagctgcaggagcgcgtcgacaactttggagaggacgaggccgacaaggaggtgtccaagtttgaggagctgcccttgtctgaggctactattgagggtctaaaaaattcacattatgtcacctgtaccgatgttcagaagcgggccatccctcccgctctgcaaggccacgatctgcttggagcagcgcgtaccggaagtggtaagactctggcgtttctggtgcctgtgttggagtgcctgtttcgaaacaagtggagtgatgtggatggtttaggagccctggttattagtccgactcgagaactggcggtccagattttccaggttctgcgaaaaatcggccgttgtcacagcttctctgctggtttggttattggaggaaaggacgttgccatggaggctgaccgactggccaagctgaacattctcatttgtacacccggacgactgttacaacacatggaccaaactagcgggtttgatctttctaacgtgaagatgctggtgctggacgaggccgatcgaatcctcgatatgggtttcaagaagaccatggatgccattttggaaaacctgcctgtggacagacagactctgcttttcagcgcaacacagaccaagagcgtcagtgatctggcccgtttgtcactcgccgaccccaagtacatctccgccaacccggacaccacttccagcacacccaagaacctcgaacagaactatgtctgcgtggagctgcaagacaagctggacacactgtggggtttcctgagaacacacaccaagttcaagatcatcgttttcttcagttcatcaaaacaggtgcgatacgtctacgagaccttccgaactctgcagcccggtatccccctgttgcatttgcatggcaagcagaaacaaggagcacgaatggatgttgtttccaaattctccaaggcctcttcttcgtgtctgtttgctaccgatatcgtcgctcgaggtatcgacttcccggctgttcactgggttgttcaggtcgattgccccgaagatgccgctacctatatccatcgagtcggccgaagtgcacgatttggaaagtctggaaaggcactgctgttcctgacccccactgaggagcccgccatgatccagcggctcgaagccaagcatatccccatcaacaaactgacgatccgaccgaacaagaagaagtccatcaagaaccagctgcaggctctgtgtttcaagtcgccggaaatcaagtacctgggtcagaaggccttcatttcgtactacaagtcgattttcatccagaaggacaaggagattttccagtttgaaaagatccccagcgaggcctttgcggagtctctgggtctgcctggtgcaccacagatcaagctcggaaagagtgctgagaagatgaaggaagaagccaacgccaagaagaaccagtcgcgggctctgcagaagctcatgcgggccggcgatgacggagtggtgtctgacgatgagaaggaagtacgaactaagatggacagaatgtttgagaggaagaaccagaacgtcctgtcggaccattatctcaacatggtcaagggagacgccgacgaggatgaggagactggagattttatgacggtcaagcgtcaggaccacaaccttgagtctgatgatgacgaggatatcgccaacctgcccacttctaagcgagcggccaagcaggcattatccaagaagcagtcgctcaaaaacaagggtctgggaaccaagacactatttgacgacgagggagcgccacatgctctctacgagtttgatgacgaggaggatttcaaggctgcaggacccgtcgagagccaggtcaaggaatttgttgaccgagaaaccaaggatatggaggaagctgatgtcggtgacaaggagctggtcaagcagaagcgagctgagaagaagcgaaagcgaaaggagatcgagcgacttcgagaactcgacgagtatgacgaggagtccgaggaagagggagactccgaggaggaacaggccgccaagaagcccaagtggttccagcgggatgagtcttcggacgaggaggaggatgatggcgtgctggaggttgaggagcccaccactctggaggatctggagagcctcacttccaagctgcttaaaaagtaa

SEQ ID NO: 65697 - protein, 740 aa, Yarrowia lipolytica
MKKRADPRKIKREEHKQKLSKLQERVDNFGEDEADKEVSKFEELPLSEATIEGLKNSHYVTCTDVQKRAIPPALQGHDLLGAARTGSGKTLAFLVPVLECLFRNKWSDVDGLGALVISPTRELAVQIFQVLRKIGRCHSFSAGLVIGGKDVAMEADRLAKLNILICTPGRLLQHMDQTSGFDLSNVKMLVLDEADRILDMGFKKTMDAILENLPVDRQTLLFSATQTKSVSDLARLSLADPKYISANPDTTSSTPKNLEQNYVCVELQDKLDTLWGFLRTHTKFKIIVFFSSSKQVRYVYETFRTLQPGIPLLHLHGKQKQGARMDVVSKFSKASSSCLFATDIVARGIDFPAVHWVVQVDCPEDAATYIHRVGRSARFGKSGKALLFLTPTEEPAMIQRLEAKHIPINKLTIRPNKKKSIKNQLQALCFKSPEIKYLGQKAFISYYKSIFIQKDKEIFQFEKIPSEAFAESLGLPGAPQIKLGKSAEKMKEEANAKKNQSRALQKLMRAGDDGVVSDDEKEVRTKMDRMFERKNQNVLSDHYLNMVKGDADEDEETGDFMTVKRQDHNLESDDDEDIANLPTSKRAAKQALSKKQSLKNKGLGTKTLFDDEGAPHALYEFDDEEDFKAAGPVESQVKEFVDRETKDMEEADVGDKELVKQKRAEKKRKRKEIERLRELDEYDEESEEEGDSEEEQAAKKPKWFQRDESSDEEEDDGVLEVEEPTTLEDLESLTSKLLKK

SEQ ID NO: 65698 - DNA, 2313 bp, Saccharomyces cerevisiae
  CDS (1)..(2313)
atggccaaaaaaaatagattgaacacaactcaaagaaagactttacgtcaaaaggaagatgagtacatcgaaaacttgaaaaccaaaattgatgagtatgaccctaagataaccaaggccaagtttttcaaagatctccccattagcgatcccacattaaaaggtttaagagaatcatcctttataaaacttactgagatccaagccgattctattcccgtgtccctgcaaggtcatgatgtattggcggccgcaaagacaggttccggtaagacattagcatttttagttccagtaattgaaaagctataccgcgaaaaatggaccgaattcgatgggttaggtgcccttatcatatctccaacaagagagttggctatgcaaatatatgaggttttgacgaaaataggtagtcacacttcattttcagctgggttagttatcggtggtaaagatgttaaattcgaactagaaaggatatcaaggattaacattcttatcggtacacctggtcgtattttacaacatttagatcaagccgtaggtctaaatacttccaatttgcagatgcttgttcttgacgaagctgatagatgtttagacatggggtttaaaaaaactctggatgccatcgtaagcacattgtcaccatctagacaaacacttttattttcagcgactcaatcacaatctgttgcagacttggctaggctttccttgacagattataaaaccgttggtacacatgatgtgatggatgggtcggttaacaaagaagcatctactccagaaactttgcaacaattctacattgaagttcctttggcagataaattggatatccttttcagttttataaaatcacatttaaaatgcaaaatgatcgttttcttatcaagttccaaacaagtgcattttgtctatgagacatttaggaagatgcagcctggtatttctttaatgcatttacacggtagacagaaacaacgtgctaggacagaaactttggacaaattcaatcgtgctcaacaggtgtgtctttttgctaccgatgtcgttgctagaggtattgactttcctgcagtcgattgggttgttcaagtggattgtccagaggacgttgatacatatatccacagagtcggtagatgtgctcgttacggtaaaaagggtaaatctttaatcatgttgactccacaagagcaggaagcgttcctaaaaagacttaacgctagaaagatcgaaccaggcaaacttaatataaaacagtcaaaaaagaaatccattaaaccacaattgcagtcattattattcaaggatccagaactaaaatatctaggacaaaaggcttttatatcgtacgtgagatctatatatgtgcaaaaggacaaacaagttttcaaattcgatgagttaccaacagaagaattcgcttattctcttggtttaccaggggccccaaaaatcaaaatgaagggtatgaagaccattgagcaggccaaagaaagaaagaatgctccaagacagctagctttcttatcaaaagcaaatgaagatggtgaagtaattgaagataagtcgaaacaaccaagaacaaaatatgataaaatgtttgaacgtaaaaatcaaaccatcttaagtgaacactatttgaatataacgaaggctcaagcacaagaagacgaggatgacgatttcatttctgtcaagcgtaaagatcatgaaataaatgaagctgagttaccagctctaactcttccaacttcaaggcgagcacagaagaaagcgctttcaaagaaggcatctctggcctccaagggtaacgctagcaaattaatatttgatgatgaaggcgaagcccatccagtttatgaacttgaagatgaagaagaatttcataagagaggtgatgcggaggtacaaaagacagaatttttaactaaagaatctgcagtaatggcagacattgacaatattgataagcaggtggctaaagaaaaaaaacaagagaagaagagaaaaagactagaagccatgagaagggaaatggaggctgctatggaagaagaaatttctggagatgaagaagaagggaagacagtagcatatttaggaacaggaaacttgagcgatgatatgagcgacggtgatatgcctgactcggaaggccacttgaaaaagaaagctagaactgttgactattcccacggccacaatccatccaattcagttgatgatgacattattgaagtggaagaaccacaaactttggaggatttggaatctttgacagctaaattaatccagggttaa

SEQ ID NO: 65699 - protein, 770 aa, Saccharomyces cerevisiae
MAKKNRLNTTQRKTLRQKEDEYIENLKTKIDEYDPKITKAKFFKDLPISDPTLKGLRESSFIKLTEIQADSIPVSLQGHDVLAAAKTGSGKTLAFLVPVIEKLYREKWTEFDGLGALIISPTRELAMQIYEVLTKIGSHTSFSAGLVIGGKDVKFELERISRINILIGTPGRILQHLDQAVGLNTSNLQMLVLDEADRCLDMGFKKTLDAIVSTLSPSRQTLLFSATQSQSVADLARLSLTDYKTVGTHDVMDGSVNKEASTPETLQQFYIEVPLADKLDILFSFIKSHLKCKMIVFLSSSKQVHFVYETFRKMQPGISLMHLHGRQKQRARTETLDKFNRAQQVCLFATDVVARGIDFPAVDWVVQVDCPEDVDTYIHRVGRCARYGKKGKSLIMLTPQEQEAFLKRLNARKIEPGKLNIKQSKKKSIKPQLQSLLFKDPELKYLGQKAFISYVRSIYVQKDKQVFKFDELPTEEFAYSLGLPGAPKIKMKGMKTIEQAKERKNAPRQLAFLSKANEDGEVIEDKSKQPRTKYDKMFERKNQTILSEHYLNITKAQAQEDEDDDFISVKRKDHEINEAELPALTLPTSRRAQKKALSKKASLASKGNASKLIFDDEGEAHPVYELEDEEEFHKRGDAEVQKTEFLTKESAVMADIDNIDKQVAKEKKQEKKRKRLEAMRREMEAAMEEEISGDEEEGKTVAYLGTGNLSDDMSDGDMPDSEGHLKKKARTVDYSHGHNPSNSVDDDIIEVEEPQTLEDLESLTAKLIQG

SEQ ID NO: 65700 - DNA, 1470 bp, Aspergillus fumigatus
  CDS (1)..(1470)
atggcttcagaacagccagtcgaagccgccccaacgggcggttctctcgccgatcgcatcacgaaacccgatgaatcaaacacttccgaaacacctgcgcccatcggcgatcagacagatggcgctcccgcgcaacttggtggctccgacctccacgagccggagtacaacgttgaggtcaagctcagcgatctacaagccgaccctaacaacccactctactctgtcaagaactttgaggaccttggactggaccctcgaattctgaaagggctgtcgagcatgaacttccgcaagccttcaaagatccaagaacgcgccttgcctctactgttgaacaaccctcccaagaacttggtcggccaatcccagtccggtaccggaaagaccgccgctttcgttctgaacgctttgagtcgtgtcgacttgtcgacggagcaaatgcagaagactcctcaggcattgattttggcccctacgcgagagcttgcccgtcagattcttggcgtcgtccaagtcatgggtcagttcgttgacggactcatcattggcgcagccgtcccgaccgatagagacagccgtcctaaaagactggagtgctccattgtcgttggcactcctggaaccgtaggggacatgattaaaaggcgtacctttattcccaacaagctcaaggtgctcgtgcttgacgaggccgacaacatgctcgaccagcaaggtctcggtgatcagtgcatccgtgttaaagctcttctgccgcgggatattcaggtcgtcctattttcagccactttcccagaacacgttcatcaatatgcctcgaagtttgcacctaatgcgaacgagattacacttcagcacgaagaattgactgttgagggaatcaagcagctttaccttgactgtgcggatggagaggacaagtacagaacccttgttcaactttatggactacttacagtcggatcgtccattattttcgttcagactcgtgcagcagctcaagaaatcgagagacgaatgacggctgaaggacacaccgttgtatcattgactggtgagagagacccgtcagtacgcgacgcaatcatcgatcagttccgcagaggcgaagccaaggtcttgatcgcgaccaatgttcttgctagaggaattgacgtttccactgtctctatggttatcaactatgatatcccggaactccatcaacccaacgtgcctggacggcaggcagattttcagacgtacttgcaccgtatcggtcgtacgggtcggttcggtcgtgtcggtgtctctatctcattcgtgtcgaaccgcgaggaatgggaaatgctcaaccagattcagacatacttcaactgtgagatccagcgcgttgataccaaagactgggatgaggtggaggatattatcaagaaaaccatcaagaactcgcgcgccaacccaaaattcgccggcgggaaggactag

SEQ ID NO: 65701 - protein, 489 aa, Aspergillus fumigatus
MASEQPVEAAPTGGSLADRITKPDESNTSETPAPIGDQTDGAPAQLGGSDLHEPEYNVEVKLSDLQADPNNPLYSVKNFEDLGLDPRILKGLSSMNFRKPSKIQERALPLLLNNPPKNLVGQSQSGTGKTAAFVLNALSRVDLSTEQMQKTPQALILAPTRELARQILGVVQVMGQFVDGLIIGAAVPTDRDSRPKRLECSIVVGTPGTVGDMIKRRTFIPNKLKVLVLDEADNMLDQQGLGDQCIRVKALLPRDIQVVLFSATFPEHVHQYASKFAPNANEITLQHEELTVEGIKQLYLDCADGEDKYRTLVQLYGLLTVGSSIIFVQTRAAAQEIERRMTAEGHTVVSLTGERDPSVRDAIIDQFRRGEAKVLIATNVLARGIDVSTVSMVINYDIPELHQPNVPGRQADFQTYLHRIGRTGRFGRVGVSISFVSNREEWEMLNQIQTYFNCEIQRVDTKDWDEVEDIIKKTIKNSRANPKFAGGKD

SEQ ID NO: 65702 - DNA, 1623 bp, Candida albicans
  CDS (1)..(1623): transl_table=12
atgtcaagtgagaaggtaaaaagagtggaagcagatgcaactgatttattagccagtctttcaatagacaaaagtggcgaaaaacttgaagaaatcaaaaagggatcaacacctgatccttctgatttattgggtggtctttcattaaaagaaggtgattccaaaaaacctgaagaaaagaaagaagttgttgaagaacctgaaaacaaagaaattaacgacgataagaaagatgaagacaaaaaagatgaatcaaaagatgaagttaaggacggagatggagccaaagaggaaaccaaggaggaagtcaaagaagaatccaaagaagaacctaaagaacctaaagaacctaaagaaccagctactaatttaattaaatcatcttatgaagttaaagttaaattagctgatattcaagctgatcctaactcaccattatattcggttaaatcatttgaagaattagggttgtcaccagaattattaaaagggttatacgccatgaaattcaataaaccttccaagattcaagaaaaggcattaccattgttactttcaaacccaccaagaaatatgattggtcaatcacaatcaggtactggtaaaaccgctgcattttcattgacaatgttatcaagagttgatccaaccataaaaatgcctcaatgtctttgtttatcaccaactagagaattagcaaggcaaactttagaagtcattaccactatgggtaaatttaccaatattactactcaattagtcgtacctaatgccattccaagaggttcatcagttaatgcccaagtattagttggtacaccagggattgctattgaccttataagaagaagacaattaaatcttagcaaaatgaaagttttcgttttggatgaagccgataatatgttggaagcacaaggattgggtgatcaagctattagagttaaaaaagctttacctagaggagttcaattggtattattttctgccactttcccaactgaagttcgtgaatatgctgaaagacttgtacctgatgctaattctttagaattgaaacaggaagaattgaatgttgatggtatcaaacaattatatatggattgtcgttccgaacaacataaatttgaagttttatgtgaattatacgggttattgaccattggttcatcaattatatttgttgaaaagaaagaaactgccgatgtattgtatggtaaaatgaaaaaagaaggtcatactgtatctgttttgcatggtggtttagataatacagacagagatagattaatcgatgatttccgtgaaggtagatccaaagttttaatcacaaccaatgttttggctagaggtattgatattgcatctgtttccatggtggttaattatgatatgccaactgataaatatggcaaaccagatccatcaacttatttgcatagaattggtagaactggtagatttggtagagttggggtatctatttcatttattcatgatagaagatcatatgacattttgatggccattaaagcatattttggtaatgttgaaatgactagagttccaacagatgattggggtgaagtggaaaaaattgttaaaaaagttattaaaagttaa

SEQ ID NO: 65703 - protein, 540 aa, Candida albicans
MSSEKVKRVEADATDLLASLSIDKSGEKLEEIKKGSTPDPSDLLGGLSLKEGDSKKPEEKKEVVEEPENKEINDDKKDEDKKDESKDEVKDGDGAKEETKEEVKEESKEEPKEPKEPKEPATNLIKSSYEVKVKLADIQADPNSPLYSVKSFEELGLSPELLKGLYAMKFNKPSKIQEKALPLLLSNPPRNMIGQSQSGTGKTAAFSLTMLSRVDPTIKMPQCLCLSPTRELARQTLEVITTMGKFTNITTQLVVPNAIPRGSSVNAQVLVGTPGIAIDLIRRRQLNLSKMKVFVLDEADNMLEAQGLGDQAIRVKKALPRGVQLVLFSATFPTEVREYAERLVPDANSLELKQEELNVDGIKQLYMDCRSEQHKFEVLCELYGLLTIGSSIIFVEKKETADVLYGKMKKEGHTVSVLHGGLDNTDRDRLIDDFREGRSKVLITTNVLARGIDIASVSMVVNYDMPTDKYGKPDPSTYLHRIGRTGRFGRVGVSISFIHDRRSYDILMAIKAYFGNVEMTRVPTDDWGEVEKIVKKVIKS

SEQ ID NO: 65704 - DNA, 1440 bp, Chaetomium globosum
  CDS (1)..(1440)
atggcggacctggcgagccgcatcacgaaacccagcgacgaacccgtcgatgcggttgcccccgctcccaccgccaccacgggtgagggcaatggtaccgaagagccggtagatgatggcgtcaacaaaggcctggttgaaacgacatatgatgtcgaggtcaaattgagcggccttcaagctgacgatgaaagcctgctttattctggcgtcgcctccttcgaagagctcggccttgccaagtcgatcaatgacggtctgctggccatgaacttcaagaagccctcgaagatccaggagaaggcgctgccgctcatgcttagcaatccgccccgcaacatgatcgcccagtcgcaatcgggcaccggcaaaacggccgccttcgttctcacggttctctcccgcgtcgatctaaccaagcctacacagccccaggcgctgttactagcacccagcagagagctcgcgcgccagattcaaagcgtcatccagacaatcggccagttctgcgagaacctgaacgtcgaggctgccattcccggctccatctcgcgcgagacgggtgtccgggcgaatgtcgtggtgggaactccgggcaccgtcatggacctgattcgccgccgccaattcgacgtgtctcagttgaagatcatggttatcgatgaggccgacaacatgctggaccagcagggtatgggcgaccagtgcgtccgagttaaggggatgctcccgaaggatatccagactcttctgttctcggctacgtttccggaaaaagttatgatctttgcacggaagtatgctaccaacgcccacgagatcaaacttcgtcacacggatctcacagtcaagggtatctcccaaatgtatatggattgcccggacgagagcaagaagtacgacattctctgcaagctttacggcctcatgacgattggctcgtcggtcatctttgtcaggacgcgcgagagcgccagcgagatccagcggcgcatggaggcagacgggcacaaggtttcggcactccacggtgcgcacgagggccagaaccgagacgcccttctcgacgatttccggtcaggccgttccaaggtgctcatcaccaccaacgtcctggcgcgcggcatcgacgtgtccagcgtgtccatggtgatcaactacgatatcccgatgaaaggacccggagacaaggagcccgatatggagacgtacctccaccgtattggccgcaccgggcgcttcgggcgtgttggtgtcagtattagcttcgtctatgaccgcaagagctacgacgcgctatccaagattgccgaccattacggcctcgacctagtccagctagccccggatgattgggatgcgacggaaacgaaggtgcaggaggtcatcaagtcgagccgggcgcgccctgactatgtgcccaatgcgggcgacaaataa

SEQ ID NO: 65705 - protein, 479 aa, Chaetomium globosum
MADLASRITKPSDEPVDAVAPAPTATTGEGNGTEEPVDDGVNKGLVETTYDVEVKLSGLQADDESLLYSGVASFEELGLAKSINDGLLAMNFKKPSKIQEKALPLMLSNPPRNMIAQSQSGTGKTAAFVLTVLSRVDLTKPTQPQALLLAPSRELARQIQSVIQTIGQFCENLNVEAAIPGSISRETGVRANVVVGTPGTVMDLIRRRQFDVSQLKIMVIDEADNMLDQQGMGDQCVRVKGMLPKDIQTLLFSATFPEKVMIFARKYATNAHEIKLRHTDLTVKGISQMYMDCPDESKKYDILCKLYGLMTIGSSVIFVRTRESASEIQRRMEADGHKVSALHGAHEGQNRDALLDDFRSGRSKVLITTNVLARGIDVSSVSMVINYDIPMKGPGDKEPDMETYLHRIGRTGRFGRVGVSISFVYDRKSYDALSKIADHYGLDLVQLAPDDWDATETKVQEVIKSSRARPDYVPNAGDK

SEQ ID NO: 65706 - DNA, 1488 bp, Coccidioides immitis
  CDS (1)..(1488)
atggcgtctgaaaacacaacagaaacacccagtgtaccagctggcgggccacttgcagctcggatctccagaccagagggcgatgccaacccaccttctaccgaggcagagaagccggccgctgaggatgattccggaaaaggcccttcgatcccacaagtggacggagcttcagaggatcagcgtggctctgaattacaggattccgaatttgacgtcaatgtcaagctgagcgatttgcaagcggatccgaataaccccctctattccatcaagtcgtttgaggagctaggcctagcggaacctattcaaatggggctgtccaagatgaacttccgtcgtccttccaagattcaggagagagccttaccgcttctcatggcaaaccctccgacaaacatgatcgcccaatcgcaatctggtaccggaaagacagcagcgttcgttttgaatatccttagtcgcctcgagttgaccccggagaagcagaaatccccccaagccttagttcttgcaccgagtcgagaactggcaagacaaattgttggagtcattcaagcaatgggaacatttgtcgaaggactctttgtggcgaccgctgttcccatggaaatgaatcgcaatcaaagggtcgaagcatccatagtcgttggcacgcctggaactgttcaagacctcattaagaagagactattcaacacacagcatctcagagttttggtcttggatgaggcagacaatatgttggatcagcaaggtcttggtgatcaatgcattagagtgaaaagtttgctgccaagaacaattcaggtcgtcctgttttccgcaaccttccctgactttgttgttcggtatgcacataaattcgcgccgaattcaaaccaactgacgcttaaacacgaggaacttaccgttgaaggcattaaacaactctacttggattgtgaatcagatgagcataagtatgaaattttggttaagttctatggactgcttacaattggatcttctatcatttttgtcaagacacgtgcttcagctgcggagatcgagcgacgtatggtggcagaaggtcatacagtagtttctttgaccggtggtatcgaaggacaaaagcgcgatgaaatcatcgatcgcttccgcaatggcacagcgaaggtcctcataacgaccaatgttttagctcgaggaattgacgtgtccactgtttcaatggttatcaactatgatattccggaactacaccttcctggggcagctcgccgcatggcggatgcacaaacctaccttcaccgcatcggacgtactggccgcttcggacgcgttggtgtggccgtgtcattcgtttctaaccaggaggaatggcaaatgctccaggatatccagaaatacttcagcaccaacatcgagcgcgttgatacccgagattgggacgatgtggagaagaaggtcaagaaaataattaagccttctgccgttgcccgttaa

SEQ ID NO: 65707 - protein, 495 aa, Coccidioides immitis
MASENTTETPSVPAGGPLAARISRPEGDANPPSTEAEKPAAEDDSGKGPSIPQVDGASEDQRGSELQDSEFDVNVKLSDLQADPNNPLYSIKSFEELGLAEPIQMGLSKMNFRRPSKIQERALPLLMANPPTNMIAQSQSGTGKTAAFVLNILSRLELTPEKQKSPQALVLAPSRELARQIVGVIQAMGTFVEGLFVATAVPMEMNRNQRVEASIVVGTPGTVQDLIKKRLFNTQHLRVLVLDEADNMLDQQGLGDQCIRVKSLLPRTIQVVLFSATFPDFVVRYAHKFAPNSNQLTLKHEELTVEGIKQLYLDCESDEHKYEILVKFYGLLTIGSSIIFVKTRASAAEIERRMVAEGHTVVSLTGGIEGQKRDEIIDRFRNGTAKVLITTNVLARGIDVSTVSMVINYDIPELHLPGAARRMADAQTYLHRIGRTGRFGRVGVAVSFVSNQEEWQMLQDIQKYFSTNIERVDTRDWDDVEKKVKKIIKPSAVAR

SEQ ID NO: 65708 - DNA, 1641 bp, Cryptococcus neoformans
  CDS (1)..(1641)
atgagcgacgcacaggcccctcctgcctcgacctcgtgggccgatatggttgacgaggatgaaaaacaaaaacaggaacaaaacatgagcaaccagaacgacggatggggagagactgcgacagagaccagtgcccctgctcctcctcctgcttccgcacccgtcagcagcagtaacaacgacggctggggtgaaccggcgcctagtgctcccgcagacaacgggtgggccgacgctggagcttccaacggcggtagcggtgcgaacaacaacgacggatggttcgatgctcctgtacctccgtcttctcaacctccaaagaaggaggcttccgacatccaactgcaagacgacactgaaggtttgattactaacaccttccaggtcgaggtcaaacttgccgatctccaaggcgaccccaactctcctctttactctgtccagtctttcaaggagcttaatcttcacgaagatctcatgaagggtatcattgccgctggtttccaaaaaccttccaagattcaagagaaggctcttcctttgctcctctccaatccccctcgaaacctcatcgggcaaagtcagtctggtactggtaagactgctgccttcaccctcaacatgttgagccgagtcgatcctaccatccccacccctcaagccatctgtatcgctccttcccgagaacttgcccgtcagattcaagaagttatcgaccaaatcggtcaattcactcaagtcggcactttccttgccatccctggctcttggtctcgtaattcccgaatcgacaagcagatcctcatcggtacccctggtacccttgtggatatgttgatgaggggctcaagaattttggatcctaggatgattagggtgttggttcttgacgaggctgacgagttgatcgcccagcaaggtttgggtgaacagactttcaggatcaagcaactccttcctcccaacgtccaaaatgtccttttctctgctactttcaacgatgacgttcaagagttcgccgaccgattcgctcccgaagccaacaagattttcttgaggaaggaagatattactgttgatgcgatcaggcagctttaccttgaatgtgacagcgaggatcagaagtatgaagccttgtctgccctatacgactgcttggtcatcggacaaagtatcgtcttctgcaagcgaaaagtcaccgccgaccacattgctgaacgtcttatttccgaaggtcatgccgttgcctctctccacggtgacaagctctcccaagaacgtgatgctatcctcgacggcttcaggaatggtgagaccaaggttctcatcactaccaacgttattgctcgaggtatcgatatccctgctgtgaacatggtcgttaactatgacgtgcccgacctgggacctggcggtaatggtccggacatcgagacctacatccaccgtatcggtcgaactggtcgattcggccgaaagggttgttctgtcatcttcacccacgactaccgatccaagtccgacgttgagcggatcatgaacactctcggaaagcctatgaagaagattgatgccaggagtacgacagatatcgagcagttggagaaggctttgaagttggctatgaagggaccggcgtaa

SEQ ID NO: 65709 - protein, 546 aa, Cryptococcus neoformans
MSDAQAPPASTSWADMVDEDEKQKQEQNMSNQNDGWGETATETSAPAPPPASAPVSSSNNDGWGEPAPSAPADNGWADAGASNGGSGANNNDGWFDAPVPPSSQPPKKEASDIQLQDDTEGLITNTFQVEVKLADLQGDPNSPLYSVQSFKELNLHEDLMKGIIAAGFQKPSKIQEKALPLLLSNPPRNLIGQSQSGTGKTAAFTLNMLSRVDPTIPTPQAICIAPSRELARQIQEVIDQIGQFTQVGTFLAIPGSWSRNSRIDKQILIGTPGTLVDMLMRGSRILDPRMIRVLVLDEADELIAQQGLGEQTFRIKQLLPPNVQNVLFSATFNDDVQEFADRFAPEANKIFLRKEDITVDAIRQLYLECDSEDQKYEALSALYDCLVIGQSIVFCKRKVTADHIAERLISEGHAVASLHGDKLSQERDAILDGFRNGETKVLITTNVIARGIDIPAVNMVVNYDVPDLGPGGNGPDIETYIHRIGRTGRFGRKGCSVIFTHDYRSKSDVERIMNTLGKPMKKIDARSTTDIEQLEKALKLAMKGPA

SEQ ID NO: 65710 - DNA, 1434 bp, Emericella nidulans
  CDS (1)..(1434)
atggcatctgacgcgccaactggcggctctctcgccgaccgcatctcgaaccccgcagagaccactgaacccgtcgccgacaaggcccaactggatggtgctgcatctaaccagggtggctcggatctcgcagagccggagtacaatgtcgaggttaagctcagcgatcttcaagccgaccccaacaaccccctctattcagtgaagaatttcgaagatctgggactagatccgcgcatacttcaaggactgtccgctatgaacttccgcaaaccttccaaaatccaagagcgagccctacctctgttgatgggcaaccctcctaagaaccttgtcggtcaatctcagtccgggactggtaaaacagctgcatttgtcctaaacatcctcagccgcttggacctgagctccgaacaggctcagaagacgccgcaggctctgatccttgcgccaacgcgagaattggcccgtcagattgttggtgttatacaggtcatgggaaagttcctggatgggctacacattggcaccgctgttccggctgatacgaatgcgcgcccaactcggatggaagcttcggtcgttgtgggcacacctggaaccgtcatggatatgatcaaaaagcgtatcatggtggccgcgaaactcaaggtcattgtcttggacgaggcagataacatgctcgaccagcaagggttgggtgaccagtgcattcgggtgaaagccctgttgcccagggacatccaagtcgttcttttctccgctacgttccctgcccacgtacaccagtatgcttctaaattcgcccctgcggccaacgaacttactctgcagcacgaggagttgacggtggagggtatcaaacaactgtatcttgactgcgctagcgaggaggacaagtatagaactcttgtgcaactctacgggttacttaccgtcggctcgtcaatcattttcgtcaagacacgtgcatccgccgtggagattgagaggcggatggtcgccgagggccacactgtcgcttctttgaccggtggtattgagggttcacagcgtgaccagattatcgaccaattccgcgccggccatgccaaggttctcatcaccaccaacgtgctcgctcgtggtattgatgtttccaccgtgtccatggtcatcaactacgacatccccgaactccatcaaccccccaaccgcccacgccaggccgatttccagacctatctccaccgtatcggtcgtacaggacgattcggtcgtgtgggtgtctcaatctcctttgtctcaaatcgcgaagagtgggaaatgctcaaccaaattcagaaatatttcaacacggatatccagcgtattgacacaaaggactgggatgaggtcgaagacattatcaagaaaacgatcaagaatacccgcgctcaggctggtttccgatga

SEQ ID NO: 65711 - protein, 477 aa, Emericella nidulans
MASDAPTGGSLADRISNPAETTEPVADKAQLDGAASNQGGSDLAEPEYNVEVKLSDLQADPNNPLYSVKNFEDLGLDPRILQGLSAMNFRKPSKIQERALPLLMGNPPKNLVGQSQSGTGKTAAFVLNILSRLDLSSEQAQKTPQALILAPTRELARQIVGVIQVMGKFLDGLHIGTAVPADTNARPTRMEASVVVGTPGTVMDMIKKRIMVAAKLKVIVLDEADNMLDQQGLGDQCIRVKALLPRDIQVVLFSATFPAHVHQYASKFAPAANELTLQHEELTVEGIKQLYLDCASEEDKYRTLVQLYGLLTVGSSIIFVKTRASAVEIERRMVAEGHTVASLTGGIEGSQRDQIIDQFRAGHAKVLITTNVLARGIDVSTVSMVINYDIPELHQPPNRPRQADFQTYLHRIGRTGRFGRVGVSISFVSNREEWEMLNQIQKYFNTDIQRIDTKDWDEVEDIIKKTIKNTRAQAGFR

SEQ ID NO: 65712 - DNA, 1467 bp, Gibberella zeae
  CDS (1)..(1467)
atggccgatcttgcgagccgcattacgaaacccgacgaggtcgctgccgagactcccgccgagactcctgccgagaccgcacccgctgcttctggtgagcttggccaggccgatggcaacatcgaagacttgggtggctccggcctccaagagcctgaatgggatgttgaagtttccctcagcgaactccagaacaatgaagccacaccgttccattctgccactacctggcaagacctgggccttcgtgaggacctactgaagggtctcctctctctcaacttcttgaagccctccaaggtccagggcaagtctctccccctgatgctcagcgaccccccacgaaacatgctggcgcagtcacagtctggtactggcaagaccgctgccttcgtcaccgcgatattgtcgcgtgtcgacttcagcaagcccgaccagccccaagcactggctcttgcgcccagtcgagagcttgcccgacagattgaaggagtcatcaacgccatcggacgtttcgttgagaacaagaaggttgctgctgcaatcccaggcgttctgcctcgtggagagcccgtcagagctagtgtcattgtcggtactccaggtacagtgatggacattatccgacgccgacagctggacatctctcagctccgcgttctcgtcctggatgaggccgataacatgcttgaccagcagggcctaggcgatcagtgcctgaaggtcaagaatatgctccctaaggagattcaggtgctccttttctccgccactttccccgagaacgtcatgaagtatgccggcaagtttgcacccaacgcgcatagcctcaagttgcagcgcagtgagcttaccgtcaagggaatctctcaaatgttcattgactgccctgacgacaacatgaagtatgacattctttgcaaactttatggtttgatgacgatcggccagtcggtcatttttgtcaagactcgagatagcgccagcgagatcgagagacgaatggtcgcagatggccacaaagtctctgccctccacgccgcttttgatggagctgagcgagataacctcttgaccaagttccgtcaaggcgagaacaaggttctcattaccaccaacgtcctggcccgtggtatcgatgtttccagtgtatccatggtcatcaactatgatattcccatgaaggggcgaggcgacaccgaacccgatgctgagacctaccttcaccgtattggccgaactggtcgatttggccgtgtcggcgtcagtatcagcttcgtttacgataagaaaagcttcgatgccttgagcaagattgccgaaatgtacggtattgacttagtcaagctggacactgaagactgggatgaggccgaggagcgtgtgaaggaggtcatcaagaagaatagagctcaagcctcatacgcccccagtgcgactgagcctaaggctgccgcgggtgcttag

SEQ ID NO: 65713 - protein, 488 aa, Gibberella zeae
MADLASRITKPDEVAAETPAETPAETAPAASGELGQADGNIEDLGGSGLQEPEWDVEVSLSELQNNEATPFHSATTWQDLGLREDLLKGLLSLNFLKPSKVQGKSLPLMLSDPPRNMLAQSQSGTGKTAAFVTAILSRVDFSKPDQPQALALAPSRELARQIEGVINAIGRFVENKKVAAAIPGVLPRGEPVRASVIVGTPGTVMDIIRRRQLDISQLRVLVLDEADNMLDQQGLGDQCLKVKNMLPKEIQVLLFSATFPENVMKYAGKFAPNAHSLKLQRSELTVKGISQMFIDCPDDNMKYDILCKLYGLMTIGQSVIFVKTRDSASEIERRMVADGHKVSALHAAFDGAERDNLLTKFRQGENKVLITTNVLARGIDVSSVSMVINYDIPMKGRGDTEPDAETYLHRIGRTGRFGRVGVSISFVYDKKSFDALSKIAEMYGIDLVKLDTEDWDEAEERVKEVIKKNRAQASYAPSATEPKAAAGA

SEQ ID NO: 65714 - DNA, 1410 bp, Kluyveromyces lactis
  CDS (1)..(1410)
atggcacagctaagcaaagaagccagtgatttgatggctcgtttgaacatcaaagaacctgcaaaaaaggcatctgaggacaatgacacaacatctgaaactaaggttgagaaggaagatgctaaagagactaaagctgaagaaccagcaaacaaggttattaactctgaatacgaagtgaaggttaatcttgccgatttgcaggcagatgcaaactcaccattgtatagtgtaaagtcttttgaagagcttggtctatctgaggagcttttgaaagggttgtatgcaatgaagttccaaaagccatctaagattcaagagaaagctttaccattattgattagagatcctccacataacatgattgcacaatcacaatctggtacgggtaagacggcagcattttcattgacaatgttgactcgtgtagatccaaatgtcaattcaacacaggccatctgtctatcaccagcgagagaattggctagacaaactttagaagttatccaagaaatgggtaaatttactaagacttcttcacaattagtggttccggattcattcgaaagaaataagccgataactgcaaacatagttgtcggtacacctggtacagttctcgatttgattcgtagaaaaatgttaaacttgggatcaatcaaagtcttcgtgttggatgaagcagataatatgttagacaaacaaggtctaggtgatcaatgtatccgtgtgaagaaatttttacccaagacatgtcaattagtgttgttctctgccacttttgatgacggggtacgtcaatatgccaagaagatcatcccaactgcagtttctttagaattacaaaagaatgaggtcaacgttagtgccatcaaacaattgttcatggactgtgacaacgaagaacacaaatacacaatattatctgaactttatggtctattaaccattggttcttccattattttcgtgaaaacaaagcaaactgccaacttgctatatgcaaaacttaaaaaggagggccaccaggtatcaatcttgcatggtgacttacaaagtcaagatagagatagattgatcgatgacttcagagagggtagatccaaggtcttgatcacaacaaacgttttagctcgtggtatcgacataccatccgtttccatggtcgtcaattacgatctccctacactacctaatggacaagcagacccttcaacctatgttcatagaatcggtcgtaccggtagatttggccgtaccggtgtggctatttcattcattcacgacaagaaatcgttcgaagtactatcggctatacaaaagtactttggtgatatcgaaattactaaagtcccaaccgatgatctggatgaaatggaaaccatcgttaaaaaagctttaaaggcctag

SEQ ID NO: 65715 - protein, 469 aa, Kluyveromyces lactis
MAQLSKEASDLMARLNIKEPAKKASEDNDTTSETKVEKEDAKETKAEEPANKVINSEYEVKVNLADLQADANSPLYSVKSFEELGLSEELLKGLYAMKFQKPSKIQEKALPLLIRDPPHNMIAQSQSGTGKTAAFSLTMLTRVDPNVNSTQAICLSPARELARQTLEVIQEMGKFTKTSSQLVVPDSFERNKPITANIVVGTPGTVLDLIRRKMLNLGSIKVFVLDEADNMLDKQGLGDQCIRVKKFLPKTCQLVLFSATFDDGVRQYAKKIIPTAVSLELQKNEVNVSAIKQLFMDCDNEEHKYTILSELYGLLTIGSSIIFVKTKQTANLLYAKLKKEGHQVSILHGDLQSQDRDRLIDDFREGRSKVLITTNVLARGIDIPSVSMVVNYDLPTLPNGQADPSTYVHRIGRTGRFGRTGVAISFIHDKKSFEVLSAIQKYFGDIEITKVPTDDLDEMETIVKKALKA

SEQ ID NO: 65716 - DNA, 1452 bp, Neurospora crassa
  CDS (1)..(1452)
atggctgatctcgccagccgcatcaccaagcccgacgaggctccggctgccgcccccgaggctgcgcccgtgtctgcccctgcgtccgaagagcccaaggcccccgagaacgagacctccatcgaggagagccagagcaaccttgtcaagaacgagtacgaagtcgagattaagttgagcgatcttcagaatgacaccgaaagtcctctctactccgtcagctcgttcgatgagttgggtctccccgaggctgtcaaccgcggtctgctcgccatcaacttcaagaaaccttccaaggtccaggagaagtgccttcctctcatgctctccgaccctccccgcaacatgattgcccagtctcaatccggtactggaaagactgccgctttcgtccttaccgttctctcccgcatcgacctgtccaagccccaccagcctcaggcccttctgcttgctcccagcagagagcttgcccgccagatccagaccgttgtccagaccatcggtcagttctgcgagaatttgattgtcgaggctgctattcccggtgccatctcgcgcgagacgggtgttagaggcagcgtcgtcgtgggaactccgggaactgtcatggaccttgtcaagcgcaggcagttcgatatctcgcagttgaaggttcttgttattgacgaggccgacaacatgcttgaccagcagggtctgggtgaccagtgtgtccgcgtcaagaacatgctccccaagaccattcagatcctccttttctctgcgacgttcccagacaaagttttgagattcgccgagcgcttcgcacccaacgccaaccagatgaagctcaagcataaggagcttacggttaaaggtatttcgcagatgttcatggactgtcctaccgagaaggacaagtacgacattctttgcaagctgtatggtctcatgaccattggttcttccgtcatcttcgtccggacgagagagacagccaacgagatccagaagcgcatggaagcagatggtcacaaagtttcggcccttcacggcgcctacgaaggccaaagccgtgatgttcttctcgatgaattccgctccggacgttccaaggtcctcatcaccaccaacgttctggcacgtggtattgatgtttccagtgtgtccatggtcattaactacgacattccgatgaagggacctggcgaaagggagccggacgcagagacataccttcaccgtattggtcgtaccggtcgtttcggtcgtgttggtgtctcgatcagctttgtccacgaccgtaggagcttcgaagcgctctcccagatcgctcagttctacggaatcgaccttatccagctgaatcccaacgacctggatgataccgagaggaaggtgcaagaagttatcaagtcgagcagggcccaagcggagtacgttcccagcgctactgattcggccgtttag

SEQ ID NO: 65717 - protein, 483 aa, Neurospora crassa
MADLASRITKPDEAPAAAPEAAPVSAPASEEPKAPENETSIEESQSNLVKNEYEVEIKLSDLQNDTESPLYSVSSFDELGLPEAVNRGLLAINFKKPSKVQEKCLPLMLSDPPRNMIAQSQSGTGKTAAFVLTVLSRIDLSKPHQPQALLLAPSRELARQIQTVVQTIGQFCENLIVEAAIPGAISRETGVRGSVVVGTPGTVMDLVKRRQFDISQLKVLVIDEADNMLDQQGLGDQCVRVKNMLPKTIQILLFSATFPDKVLRFAERFAPNANQMKLKHKELTVKGISQMFMDCPTEKDKYDILCKLYGLMTIGSSVIFVRTRETANEIQKRMEADGHKVSALHGAYEGQSRDVLLDEFRSGRSKVLITTNVLARGIDVSSVSMVINYDIPMKGPGEREPDAETYLHRIGRTGRFGRVGVSISFVHDRRSFEALSQIAQFYGIDLIQLNPNDLDDTERKVQEVIKSSRAQAEYVPSATDSAV

SEQ ID NO: 65718 - DNA, 1503 bp, Pichia stipitis
  CDS (1)..(1503)
atgtccgctgaaaagagagttgaagcagatgctgctgagttactttcttcactttccttgggagagagtcctgcagaaaaaaaagatgaaaagactgaagaagtgaagaaagaagaagctaagtctgaagaactcaacaaggttgtagagaagacggaagaaaaggtcaaggaggcaaatgcagaggacgctaagcccgaagagctcaaggaggttggcaaggaagaaaatgaagaaccaaaaactaacttgatccaatcgacttatgaagtaaaagtcaaattggctgacatacaagcagatcccaattctccattgttttcagtaaaatcctttgaagagttgggtttgactccagaattgttaaaggggttgtatgccatgaaattcaacaagccctccaaaattcaagaaaaagcattgccgttattaatctccaatcctcccagaaatatgattggtcaatcccaatcaggtactggtaagactgccgctttttcgttgactatgttgtccagagtggatcccaaggtgcctctgacacagtgtctctgcttggctcctacgagagagttggccagacaaactttggaagtaatttctactatgggaaaattcaccaacatcaccacgcagcttattgtaccagatgctttaccgagaggtctgtccaccaatgcccatattatagtaggtacacctggtattgtgatggatttgattagaaggaagcaaatcaacgttaacggagtaaaggtttttgtcttagacgaagctgataacatgttggatgctcaaggattaggtgatcagtgtgttcgtgtcaagagaacattgccgaagacgacccaattggttttgttctctgctactttccctactaaagttcgtcagtacgctgaaaagtttgtgcccaacgccaattcgttagagttaaagcaagaagagttaaatgtagacggaatcaagcagttgtacatggactgtgactcggaaaagcacaagttcgaagttttgtgtgagttgtatggtttgttaactattggttcttctatcatttttgtagagagaaaagatactgccaacttgttgtatgccaagatgaaagctgagggtcatgcttgttccattttacatggtggtttagagactagcgaaagagataggttgatcgatgatttccgtgaaggaagatccaaggttttgataacaaccaacgtcttagccagaggaatagatatcgcttctgtttccatggtggttaactatgacttgcccaccgacaaggacggcaacgctgatccatccacttatttgcatagaattggtagaactggtagatttggtagagtcggtgtttccatttccttcatatacgacaagagatcatacgagatcttgatgaagatcaaagactacttcggcaatgtggaaatgaccagagtccctaccgatgattgggatgaagttgaaaagattgtcaagaaggttatcaagagctga

SEQ ID NO: 65719 - protein, 500 aa, Pichia stipitis
MSAEKRVEADAAELLSSLSLGESPAEKKDEKTEEVKKEEAKSEELNKVVEKTEEKVKEANAEDAKPEELKEVGKEENEEPKTNLIQSTYEVKVKLADIQADPNSPLFSVKSFEELGLTPELLKGLYAMKFNKPSKIQEKALPLLISNPPRNMIGQSQSGTGKTAAFSLTMLSRVDPKVPLTQCLCLAPTRELARQTLEVISTMGKFTNITTQLIVPDALPRGLSTNAHIIVGTPGIVMDLIRRKQINVNGVKVFVLDEADNMLDAQGLGDQCVRVKRTLPKTTQLVLFSATFPTKVRQYAEKFVPNANSLELKQEELNVDGIKQLYMDCDSEKHKFEVLCELYGLLTIGSSIIFVERKDTANLLYAKMKAEGHACSILHGGLETSERDRLIDDFREGRSKVLITTNVLARGIDIASVSMVVNYDLPTDKDGNADPSTYLHRIGRTGRFGRVGVSISFIYDKRSYEILMKIKDYFGNVEMTRVPTDDWDEVEKIVKKVIKS

SEQ ID NO: 65720 - DNA, 1512 bp, Schizosaccharomyces pombe
  CDS (1)..(1512)
atgtcaactacactgggacaggaaagcaaaactgactgggctagtttggactctgatgaagaggttcaaagaattagtgataaagtcaatcagttaaatacttcagaaaataaaaatgaagatcaaaaagcaacaaatttaagtgacagattaggtccaaaaatcactgagaatgttgatgcaaaatctgagcaagacaaagcgaccaacacgattgcagaggacgccaatacgaagcaatctgaaaatgatgaatctaatttaataccaaataaaaacgaggttcgtgtaaaattagcagatctacaggctgatccaaactcacctcttttttctgttaaaagttttgaagagttggagctcaagcccgaattattaaagggaatttattcaatgaaattccaaaaaccctcaaaaattcaagagaaggcgcttccacttttactctcaaatcctcctcgcaatatgatcggacaatcacaatccggaactggtaaaaccgctgcatttgcattaacgatgctttctcgtgttgatgcttctgttcccaaacctcaagctatctgcctcgctccttctcgtgaattggcccgtcagattatggatgtcgtgacggagatgggcaaatatactgaagtaaaaacagcttttggtattaaagactccgtccctaaaggtgcaaaaatcgatgctcaaattgtaatcggaacgcctggcactgtgatggatttgatgaagagaagacagcttgacgctcgcgatattaaagtattcgtgttagatgaggcagacaacatgttagatcagcaaggattaggagatcaatctatgcgtatcaagcaccttcttcctagaaacactcagattgttcttttcagtgctaccttttcggaacgcgttgaaaagtacgctgaacgttttgctcccaatgctaatgaaattcgtctgaagactgaggagctttctgttgagggaatcaagcagttgtatatggattgccaaagtgaagaacataaatataatgttttagtggaattatatgggttattgactattggtcaatcaattatattttgtaagaaaaaggataccgctgaagaaattgctaggcgtatgactgcagatggacacactgttgcttgtcttaccggtaatctggaaggtgcacaacgtgacgctattatggattcattccgagtaggtacttcaaaggttttggttactacgaatgtaattgctcggggtatcgacgtatcgcaagtcaacttggttgtaaactatgatatgcctttagatcaagcaggaagacccgatccacaaacatatcttcaccgtataggtcgtaccggtaggttcggccgtgttggagtaagtatcaattttgttcacgataaaaagagttgggaagaaatgaacgccattcaagaatacttccaacgtcccatcacgcgagtgcctacagatgactacgaagagcttgaaaaagttgtcaagaatgcacttaaaatgtaa

SEQ ID NO: 65721 - protein, 503 aa, Schizosaccharomyces pombe
MSTTLGQESKTDWASLDSDEEVQRISDKVNQLNTSENKNEDQKATNLSDRLGPKITENVDAKSEQDKATNTIAEDANTKQSENDESNLIPNKNEVRVKLADLQADPNSPLFSVKSFEELELKPELLKGIYSMKFQKPSKIQEKALPLLLSNPPRNMIGQSQSGTGKTAAFALTMLSRVDASVPKPQAICLAPSRELARQIMDVVTEMGKYTEVKTAFGIKDSVPKGAKIDAQIVIGTPGTVMDLMKRRQLDARDIKVFVLDEADNMLDQQGLGDQSMRIKHLLPRNTQIVLFSATFSERVEKYAERFAPNANEIRLKTEELSVEGIKQLYMDCQSEEHKYNVLVELYGLLTIGQSIIFCKKKDTAEEIARRMTADGHTVACLTGNLEGAQRDAIMDSFRVGTSKVLVTTNVIARGIDVSQVNLVVNYDMPLDQAGRPDPQTYLHRIGRTGRFGRVGVSINFVHDKKSWEEMNAIQEYFQRPITRVPTDDYEELEKVVKNALKM

SEQ ID NO: 65722 - DNA, 1371 bp, Ustilago maydis
  CDS (1)..(1371)
atgagcgaaagcaaagacaagaccacggcaccagccgccgacagcaacgtcaacgagattgcgtcgggcatctctggactcttgtctagcaaggatgttgccgagtcgaatctgcgcgagtcatcgcacgaggttcaggtgacactcgccgatcagcaggcggatccgaattctcccttgtactcggccaagagcttcgaagcgcttggcttgcacgagaatctactcaagggcatctacgccatgaagtatcagaagccgtccaagatccaagaaaaggcactgccgctgctcctccagaacccaccgaaaaacatgatcggccagtcgcaatcaggaaccggaaaaacggccgccttcatccttaccatgctctcgcgcatcgactatgacctccaaaagccacaagccattgcattggcgccatcgcgagagctggctcgtcagatcatggacgtggcacgcaccatgtccaagtttaccaatgtaaccacgtgcctctgcttgccagacgaggtgaagcgtggcgaaaagatcacggcgcagctcatcattggtacaccaggcaagacattcgacatgatcaagagcaagggtatagatacggccgccattaaggtattcgtgctcgacgaggccgacaacatgctcgaccagcagtcactgggtgaacagtcaatccgtgtcaagaacacgatgcccaagtcatgtcagctggtactgttctcggccacgttccctaccaacgtgtacgactttgcggtccgcatcgcaccgggagccaacgagatccgactcaagcaggaagagctgtcggtagaaggcatcaaacagttctacatggactgcaaggatgaagaccacaagtacgaagtgcttgtggaactgtacaacctgctcaccatcggacagagcatcatcttctgcgccaagcgcgaaaccgccgaccgcatcgcgcaaaagatgacgcaggagggacacaaggtcgactcgctccacggtcgactcgagacggccgaccgagaccgcaccatcgatgcgttccgcgatggcaagagcaaggtgctcatctcgaccaacgtcattgcacgtggtattgacattcagcaggtgacgctggtgatcaactacgatatgccgctgacgcagacgggcgaagcagacgccgagacgtatctgcaccgtatcggacggacgggtcgattcggtcgcaagggtgtctcgatcaactttgtgcacgaccagcagagttggtcgtacatggaccagatcgaaaaggcgctcaagtgccagatcacccgtgtcgcaaccaacgacctcgaggagatggaatacacgatcaaggaagcgctcaagcagattggcaaatga

SEQ ID NO: 65723 - protein, 456 aa, Ustilago maydis
MSESKDKTTAPAADSNVNEIASGISGLLSSKDVAESNLRESSHEVQVTLADQQADPNSPLYSAKSFEALGLHENLLKGIYAMKYQKPSKIQEKALPLLLQNPPKNMIGQSQSGTGKTAAFILTMLSRIDYDLQKPQAIALAPSRELARQIMDVARTMSKFTNVTTCLCLPDEVKRGEKITAQLIIGTPGKTFDMIKSKGIDTAAIKVFVLDEADNMLDQQSLGEQSIRVKNTMPKSCQLVLFSATFPTNVYDFAVRIAPGANEIRLKQEELSVEGIKQFYMDCKDEDHKYEVLVELYNLLTIGQSIIFCAKRETADRIAQKMTQEGHKVDSLHGRLETADRDRTIDAFRDGKSKVLISTNVIARGIDIQQVTLVINYDMPLTQTGEADAETYLHRIGRTGRFGRKGVSINFVHDQQSWSYMDQIEKALKCQITRVATNDLEEMEYTIKEALKQIGK

SEQ ID NO: 65724 - DNA, 1467 bp, Yarrowia lipolytica
  CDS (1)..(1467)
atgagtgaccaggtttccgatatgcttgagaagctggagcttcagaaggaaaagaaccaggccgccgccaccgaggccaaggtcgaggaggtgaaggaggatgataagaaggatgtcaaggaggagcttaatgaagatgataagaaggtggccaaggaggacgacaaaaaggaagacgccaaggaagagtccaaggaggatgccgaggaaaacaacttgatccagacggaatacgaagtgcgagtgaagctggccgatctccaggcagaccccaattcacccctgtactctgccaagcgatttgaggatctggggctggacgagaacctgctcaagggtctgtacgccatgaagttcaacaagccctccaagatccaggagaaggctcttcctcttctgctgtccgacccccctcacaacatgatcggccagtctcaatctggtaccggtaagacaggagccttttcgctgaccatgctgagccgagtggaccccaatctcaaggccgttcagtgcatttgtcttgctccctctcgagagctggctcgtcagaccctggatgtggttgatgagatgaagaagttcaccgatatcactacacatctcattgttcctgagtctaccgaacggggccagaaggtgacctcccagatcctggtgggaactcctggatctgtggcaggtctgctacagaagaagcagattgatgccaagcatgtcaaggtgtttgttctggacgaggctgacaacatggtcgactcctctatgggctccacctgtgctcgaatcaagaagtacctgccctcctcgacccaggtggtgctgttttctgccaccttccccgagtctgtgctcgatttggctggcaagatgtgccccaaccccaacgagatccgtctcaaggccaacgagctcaacgtggacgccatcacccaactgtacatggactgcgaggatggcgaggagaagttcaagatgctggaggagctgtactccatgctgacaattgcatcgtcggtcattttcgtcgctcagcggtccaccgcaaacgctctctaccagcgaatgtcgaagaacggtcacaaggtgtcactgctgcactcagatctgtctgttgacgagcgagaccgactcatggatgacttccgatttggtcgatctaaggttctcatttctaccaacgttattgcccgaggtatcgatatcgccaccgtctccatggtcgttaactacgatctccccacggacaagaacggtaagcccgatcccgagacttacctacaccgaatcggacgaaccggacgcttcggtcgatccggagtgtccatctcctttgtgcacgacgaggccagcttcgaggttctcgactccatccagcagtctctcggtatgacccttacccaggttcccaccgacgacattgatgaagttgaggagattatcaagaaggccatcaagggtaaatag

SEQ ID NO: 65725 - protein, 488 aa, Yarrowia lipolytica
MSDQVSDMLEKLELQKEKNQAAATEAKVEEVKEDDKKDVKEELNEDDKKVAKEDDKKEDAKEESKEDAEENNLIQTEYEVRVKLADLQADPNSPLYSAKRFEDLGLDENLLKGLYAMKFNKPSKIQEKALPLLLSDPPHNMIGQSQSGTGKTGAFSLTMLSRVDPNLKAVQCICLAPSRELARQTLDVVDEMKKFTDITTHLIVPESTERGQKVTSQILVGTPGSVAGLLQKKQIDAKHVKVFVLDEADNMVDSSMGSTCARIKKYLPSSTQVVLFSATFPESVLDLAGKMCPNPNEIRLKANELNVDAITQLYMDCEDGEEKFKMLEELYSMLTIASSVIFVAQRSTANALYQRMSKNGHKVSLLHSDLSVDERDRLMDDFRFGRSKVLISTNVIARGIDIATVSMVVNYDLPTDKNGKPDPETYLHRIGRTGRFGRSGVSISFVHDEASFEVLDSIQQSLGMTLTQVPTDDIDEVEEIIKKAIKGK

SEQ ID NO: 65726 - DNA, 1449 bp, Saccharomyces cerevisiae
  CDS (1)..(1449)
atgagtgatacaaagagagatccggccgatttactagcttctttaaagattgataatgagaaagaggatacaagtgaagtttcaacaaaagagactgttaagtcccaaccagaaaagactgctgattcgatcaagcctgcagaaaaattagttccaaaagttgaggaaaaaaaaacaaaacaggaggatagtaatttaatcagctcagaatatgaagttaaggtcaaacttgctgatatccaggctgacccaaattctccattgtacagtgctaaatcttttgatgaattaggattagcaccagaactactaaaggggatatatgctatgaaatttcaaaaaccatccaaaattcaagaaagggcgctgccattattattacataatccgcctaggaacatgattgctcagtctcaatcaggtacaggtaaaactgccgccttttctttaacgatgctaacaagagtaaacccagaagacgcatctccacaggcaatttgcttagccccctccagagaactggccagacaaacactagaagtcgttcaggaaatgggtaagttcacaaaaataaccagtcagttaattgttcccgattcttttgagaaaaacaagcaaattaatgctcaagtgattgttggtacgccgggcactgttcttgacctaatgcgtagaaaattgatgcagctacagaaaattaaaatttttgttttggatgaagccgataacatgttggatcagcagggtctaggtgaccagtgtattcgtgttaagagatttttacccaaggatactcaacttgttttgtttagtgctacttttgccgatgcagttaggcagtacgcaaagaagatcgttccaaatgctaatactttagaattacaaacaaatgaagttaatgttgatgccatcaaacaactatacatggactgcaaaaacgaagcagataagtttgatgttttaactgagctatatggtttaatgacaattggatcttccattatttttgttgcaaccaaaaaaaccgcaaacgttttatatgggaaattgaaaagtgaaggtcatgaagtttctatcttgcatggtgatttacagacacaagaaagagacagattaatagacgacttcagagagggtagatccaaagttttgattactactaatgtcctggcccgtggtattgatattcctactgtctcaatggttgtcaactatgatcttccaacgcttgctaacggacaagcagatccagctacttacattcacagaatcggtagaaccggtagattcggcagaaaaggtgttgccatttcctttgtacatgacaaaaattctttcaatattttatctgcaattcagaaatacttcggtgatatagaaatgactcgtgttccaacggatgattgggatgaagtcgaaaaaatagttaagaaagtgttaaaggattag

SEQ ID NO: 65727 - protein, 482 aa, Saccharomyces cerevisiae
MSDTKRDPADLLASLKIDNEKEDTSEVSTKETVKSQPEKTADSIKPAEKLVPKVEEKKTKQEDSNLISSEYEVKVKLADIQADPNSPLYSAKSFDELGLAPELLKGIYAMKFQKPSKIQERALPLLLHNPPRNMIAQSQSGTGKTAAFSLTMLTRVNPEDASPQAICLAPSRELARQTLEVVQEMGKFTKITSQLIVPDSFEKNKQINAQVIVGTPGTVLDLMRRKLMQLQKIKIFVLDEADNMLDQQGLGDQCIRVKRFLPKDTQLVLFSATFADAVRQYAKKIVPNANTLELQTNEVNVDAIKQLYMDCKNEADKFDVLTELYGLMTIGSSIIFVATKKTANVLYGKLKSEGHEVSILHGDLQTQERDRLIDDFREGRSKVLITTNVLARGIDIPTVSMVVNYDLPTLANGQADPATYIHRIGRTGRFGRKGVAISFVHDKNSFNILSAIQKYFGDIEMTRVPTDDWDEVEKIVKKVLKD

SEQ ID NO: 65728 - DNA, 1383 bp, Drosophila melanogaster
  CDS (1)..(1383)
atgggtgactgggctaaaaaatcagaggaccaggaggtttctaagctggtcgacaaacttaacctagactctaaatctggagaagaaaccgatttcgacgtcgctgatccagctgaaacaagtctcctcataaaaatactaggaaaggggctggtgaacacaaagctatctctcgaccttcaacaaaaaaatccgaattcacccttacattccgtgaaaacatttgaagccttacacctaaaagcatctctgttaaagggaatttacgcaatggggtttaatactccatcaaaaattcaagaaacagcgttgccaactcttctcgcagatccaccgcaaaatatgatagcacaaagccagtctgggacaggcaaaacagccgcatttgtattggccatgcttagccgagtcaacgtttgtttaaatcatcctcaggttctgtgtttatcccctacgtacgagttggcaattcaaactggagaagtggctgcgcgaatgggacaattttgtcgggaaataaagctaagatttgcagtacgcggagaagaggttgatcgcagtaaaaaaattgaagaacacattttgattggcaccccaggaaaacttttggattggggaataaaatttcgtttatttgatatgaagaaaatatccgtttttgtattggatgaagcagatgtaatgatagccacccaaggtcatcatgatcaatgcattcgaatacacaaaatgctgaatccacattgccaaatgttgtttttctctgctacttatggtaaagaggttatggactttgctcggctgattgttgcagatcccacaataataagattaatgcgtgaagaggaatcacttgaaaacataaagcaatattatgttaagtgtaaaaatgaagaaggaaaatataatgcgattcaaaatatttacggttgcataagcgttggtcaagctataatattttgccatacaaaaagaactgctgcttggcttgcagcaaaaatgacgtcggatggtcattctgttgctgttcttaccggggatttaacagttgtgcaaagacttgatgttttagatcgtttccgttcaggacttgagaaggtgcttatcactacaaatattttatcaagaggcattgatattgaacaattacaagttgtagtcaatttcgatttgcccgtagaccttgatgggatggctgactgtgaaacttatttacatcgaataggacggactgggaggtttggaaagtctggaatcgccataaatcttataacggatgagaagaccatgaaagtgtgttccgatatcgaaaaacatttcaacaaaaaaattgaagtgttaaataccgatagtgccgatgatatagaaaaaattggtacatag

SEQ ID NO: 65729 - protein, 460 aa, Drosophila melanogaster
MGDWAKKSEDQEVSKLVDKLNLDSKSGEETDFDVADPAETSLLIKILGKGLVNTKLSLDLQQKNPNSPLHSVKTFEALHLKASLLKGIYAMGFNTPSKIQETALPTLLADPPQNMIAQSQSGTGKTAAFVLAMLSRVNVCLNHPQVLCLSPTYELAIQTGEVAARMGQFCREIKLRFAVRGEEVDRSKKIEEHILIGTPGKLLDWGIKFRLFDMKKISVFVLDEADVMIATQGHHDQCIRIHKMLNPHCQMLFFSATYGKEVMDFARLIVADPTIIRLMREEESLENIKQYYVKCKNEEGKYNAIQNIYGCISVGQAIIFCHTKRTAAWLAAKMTSDGHSVAVLTGDLTVVQRLDVLDRFRSGLEKVLITTNILSRGIDIEQLQVVVNFDLPVDLDGMADCETYLHRIGRTGRFGKSGIAINLITDEKTMKVCSDIEKHFNKKIEVLNTDSADDIEKIGT

SEQ ID NO: 65730 - DNA, 1332 bp, Aspergillus oryzae
  CDS (1)..(1332)
atggactacgctatttgtccaaggacgaaacttaacggcttcagaacaacactcaatgtttcgccctggttggtgggctctttgacgactatggcggttagaaagcctacggccattcaaaaagcttgtataccggagattttgaagggaagagattgcattggaggtagccggacaggttcaggaaagacaattgcctttgcggttcctatcttgcagaaatgggcgcaagatccgtttggtattttcgcggttgtgttaactcccacaagagaacttgcgttacagatctacgaacaaattaaggcgatctcggcaccacagagcatgaagccacttctcatcaccggaggaacagatatgcgctcccaagcactcgctctctcacagcggccccatgttgtgattgcgactcccggccgactcgcagaccacatcaatacatctggtgaagatacggtgtgtggactgaagcgcgtccgcatggtcgttcttgatgaagccgatcgacttctggctcctggtccgggaagcatgcttcctgatgtagaaacctgtctatctgccctcccaccgtccagcgaacgccaaacgctcctgttcaccgcaacattgacccccgaagtgcgcgcactcaagtccatgcctcgcgctgagaacaaaccgccggtctttgttacggagatttcgaccgagaataacggcgcaatccctccaaccctcaaacaaacctacctcaaggtccccatgacgcaccgcgaggccttcttacacgtgctcttgtctacggaaaggaactccactaagccggctattatcttctgcaaccacactaagaccgccgatctcctggaacgaatgctccgccgtctttcccatcgagtcacctcactccacagtcttctaccccagtccgaacgtaactctaacctagcgcgtttccgtgcttccgctgcccggatcctggtagcgaccgacgtcgcgtctcgtggtctggatatcccgtcggtcagtctggtgatcaactttgatgtaccgcgcaatccggacgactatgtccaccgtgtcggtcgtaccgcccgtgcgggacgccatggtgaagcggttaccctagttggacaacgagatgtgcaactggtgctagcgattgaggagcgagtggaacggcggatggaggaatggagtgaggagggtgtcagcattgaaggacgggtggtgcgcggcggcgtgctcaaggaagttggagaggctaaacgagaagcctctggagagatcgaggagggtcgcgacgtgttagggcggaagcggaataagctgaagaaggtccggtag

SEQ ID NO: 65731 - protein, 443 aa, Aspergillus oryzae
MDYAICPRTKLNGFRTTLNVSPWLVGSLTTMAVRKPTAIQKACIPEILKGRDCIGGSRTGSGKTIAFAVPILQKWAQDPFGIFAVVLTPTRELALQIYEQIKAISAPQSMKPLLITGGTDMRSQALALSQRPHVVIATPGRLADHINTSGEDTVCGLKRVRMVVLDEADRLLAPGPGSMLPDVETCLSALPPSSERQTLLFTATLTPEVRALKSMPRAENKPPVFVTEISTENNGAIPPTLKQTYLKVPMTHREAFLHVLLSTERNSTKPAIIFCNHTKTADLLERMLRRLSHRVTSLHSLLPQSERNSNLARFRASAARILVATDVASRGLDIPSVSLVINFDVPRNPDDYVHRVGRTARAGRHGEAVTLVGQRDVQLVLAIEERVERRMEEWSEEGVSIEGRVVRGGVLKEVGEAKREASGEIEEGRDVLGRKRNKLKKVR

SEQ ID NO: 65732 - DNA, 1611 bp, Coccidioides immitis
  CDS (1)..(1611)
atggcacccagaatagagaggcacacgggaccagaggaggaccgcgaagaggaaatacacagtcaccaatcacccagtgtgtcaggagacgatgacggcgtcgagatctcagaacgacctccgaagcgacgccgcctgtcagattccgaatcctcagaagatgaccctttcgtgcctcagcaaccgctcccaaccctatcgcgcataaagaagaagtcggatttatccgctgccaaaggacctgatcgaaacgccgaccagcccgaccccgttacggccaaagatgcattcgctatgggtcttcagtcgatggactcgtccttctcttcgttgggcctcgcgccttggttggttggctcgctatctgcaatggcgattaggcggcccacagcgattcaaagagcgtgtattccggagatattgaaagggagggattgtattggtgggagtcgaacgggttcgggaaagacagttgcgtttgcggcgcctatattgcatcggtggagtgaggatccgtttgggatatttgcggttgtgttgactccgacgagagagctggcgcttcagatatttgagcagtttaaagctatttctgctccgcagtcacttaaacctgttttgattaccggaggcagcgagatgcgtccgcaggctatcgctctatcaacgagaccgcatgttgtcatcgctaccccgggacgtctagcagaccacataaagacctctgggcaggatacaatatatgggcttaatcgggtacggatggtcgttctcgacgaagctgacagacttctggccagtggaccgggaagcatgctccccgacgtggaaacctgtctatcagcgctgccaccatcgacgtcacgacaaacattactcttcacggccacggtaactcaggaagttcgtgcccttaaatctatgccacgacccaaagaccgactacccatcttcgtcacggaaatctccaccgaaaataacacgactatcccgcccaccctaaaacaatgctatctccaagttcccatgacccatcgcgaagcattccttcatgttcttttatccaccgacgccaatagttctaagccagcaatcattttctgcaaccggacgaaaaccgcggatctactggaccgcttattacgccgattaggccaccgagtgacttctctacacagtttgctaccccagtccgaacggacatccaaccttgcgcggtttcgcgcttcagccgccaggcttttggtcgccacagatgtggctgcacgtggcttagatatcccgtctgttggcctggtggtaaattttgatgttccgcgcaatcctgatgattacattcaccgagttggtcgaactgctcgtgcggggagagaaggtgaagcaattacgctagttggccaacgagacgtgcagctcgttctagccattgaggaaagggttgggaggcagatggtagcttgggaggaggaaggcgtgagtatcgaaggaagaatagtaagaggaggcttgttgaaagatgtcggaggagcaaaacgggaagctcttggagagattgaagaagggagagacgtgcttggtcgtagggtgaggaaattgaaaaagacccgctga

SEQ ID NO: 65733 - protein, 536 aa, Coccidioides immitis
MAPRIERHTGPEEDREEEIHSHQSPSVSGDDDGVEISERPPKRRRLSDSESSEDDPFVPQQPLPTLSRIKKKSDLSAAKGPDRNADQPDPVTAKDAFAMGLQSMDSSFSSLGLAPWLVGSLSAMAIRRPTAIQRACIPEILKGRDCIGGSRTGSGKTVAFAAPILHRWSEDPFGIFAVVLTPTRELALQIFEQFKAISAPQSLKPVLITGGSEMRPQAIALSTRPHVVIATPGRLADHIKTSGQDTIYGLNRVRMVVLDEADRLLASGPGSMLPDVETCLSALPPSTSRQTLLFTATVTQEVRALKSMPRPKDRLPIFVTEISTENNTTIPPTLKQCYLQVPMTHREAFLHVLLSTDANSSKPAIIFCNRTKTADLLDRLLRRLGHRVTSLHSLLPQSERTSNLARFRASAARLLVATDVAARGLDIPSVGLVVNFDVPRNPDDYIHRVGRTARAGREGEAITLVGQRDVQLVLAIEERVGRQMVAWEEEGVSIEGRIVRGGLLKDVGGAKREALGEIEEGRDVLGRRVRKLKKTR

SEQ ID NO: 65734 - DNA, 1362 bp, Schizosaccharomyces pombe
  CDS (1)..(1362)
atgtcagaacatacaagaaaatcattctctgatttaggaatatcgccatggcttatcgatacgctaaaagcacttgcaatatatgaacctacagatattcaggaaggagtaattgctcagattttagaaggacgtaattgtattggaggtgctaaaacaggttctggtaaaactgctgcttttgctttgcctattattgaaaaatggtctaaggatccatcaggaatatttgctcttattttgacaccaaccagagaacttgcaatacagattgatgaacaatttgctgctttaggtgctaatcttaatttaaagcatgcgctcatcgttggaggcatggatatgatacgacaatctattgatttatcgaaacggccccatgttgttgtagctactcctggtcgcctagctgacttgattagaagtaatggtgaagaaacgatagccggactacgtcgaataaaatttttggtaatggacgaagccgaccgtttgttgtctcctacctttgctgatgacttggatgattgcttttctgttcttccagcctctgaagatcgtcaaacgcttttgtttactgcaactgttactgatgctattcgtcagctcaaatatcagccacagaaaaataataagcctcccctttggttatacgaagttgaaactgataacatttccgtaccttctactttgcagcaaagttacatatttgtttcctcacaagtacgagaagcttatttggtgcatttgttaacgattcctgagaacgctaaaaagtctgcaattatctttgtaaatcggactcgcactgctgaattgatatattctattcttcgattgctcgagcttcgtgtcaccgaacttcattcagaaatggtacaacgtgaaaggatcaattcacttggacggtttcgtgcggaagctgcaaaaattttggtagccactgacgttgcaagcagaggtttggatattccttctgtgcaactagtaattaacttcgaccttcctcgtgacccagacgactatattcaccgagtaggtcgtacagctcgtgctggacgcagtggcgagtccatttccattgtaacggagagagatgttgatttagtccatgctattgaggatcgagtaggaactaagctttctgaatatgaacacgtgtcagagaataagatgcttgaatacatcaaggaagttacggacgctaaacgccaggcttctcttgagatgatcgataggggatttggtgaaaggagacagaagcgaaacgagaaaaggctgatggccaatggtatttctaataaattaaaaaattctggacgcaaaaagaaagcgaagaatactttatctacggaaaagtag

SEQ ID NO: 65735 - protein, 453 aa, Schizosaccharomyces pombe
MSEHTRKSFSDLGISPWLIDTLKALAIYEPTDIQEGVIAQILEGRNCIGGAKTGSGKTAAFALPIIEKWSKDPSGIFALILTPTRELAIQIDEQFAALGANLNLKHALIVGGMDMIRQSIDLSKRPHVVVATPGRLADLIRSNGEETIAGLRRIKFLVMDEADRLLSPTFADDLDDCFSVLPASEDRQTLLFTATVTDAIRQLKYQPQKNNKPPLWLYEVETDNISVPSTLQQSYIFVSSQVREAYLVHLLTIPENAKKSAIIFVNRTRTAELIYSILRLLELRVTELHSEMVQRERINSLGRFRAEAAKILVATDVASRGLDIPSVQLVINFDLPRDPDDYIHRVGRTARAGRSGESISIVTERDVDLVHAIEDRVGTKLSEYEHVSENKMLEYIKEVTDAKRQASLEMIDRGFGERRQKRNEKRLMANGISNKLKNSGRKKKAKNTLSTEK

SEQ ID NO: 65736 - DNA, 1329 bp, Yarrowia lipolytica
  CDS (1)..(1329)
atgtctttcaccgatctaggcttgccagagtggctaaatgagtctctctcaaacatggctatcaccaagccttccgctattcagaaagcctgtatcccccagatcatgaagggaaaggactgcattggaggagctcgaactggtagtggtaagactatcgcatttgctgctcccatgctggctgaatggtccaaggatccctgtggtatttttggtctagttctgacccctactcgagaactagccatccagatagcggagcagtttacagctcttggagccaacatgaacattcgagtcgcgctcatctacggtggagttgatatggtcaagcagagtctggaacttcaaaagatgccccatttcgtcattgccacacctggtcgtctggctgatcatattcgaagcagtggtgaggataccatccgaggattccgacgggttagatatgtagttatggatgaggctgatcgactgctgactcctggcttcgttcctgaccttaaaacttgcatggaccttctccccgatccttcaaagcgtcagactttgttgttcacagccactgttaccgacgctgttagagctctgaaggacagaaccggtgagaagggaccgccattcatccacgagattgcatcagacattgccgtgcctagcactcttacccagtcatatctattcctacctggttacgtacgagaagcctacctgtgggctatcctcactcatccagataacgagaagaagtctgccatcatcttcgtcaaccgaactcagactgcagagaccctgagacgaatgctcatggctctggacgttaagactgcctctcttcattctgagatgcgacagcaggagcgagtcaacgctctaggacgattccgagcccaagcagcccgagttcttgtggccactgatgttgcttctcgaggtcttgatatccctactgtggagatggtcatcaactttgaccttccagcagatgctgacgattacattcatagagtcggtcgaactgcccgtgcaggacgaaagggccagtctgtctctcttgtcactgaacgagatgtaactcgtgtgacgaacatcgaagagagagtgggtaccaagatggagaagtacgatctgatcgaagacgacaaggtcgttgaggagtatctcacccctgcatccactgccaagagacaggccgttctggacatggaggccgagaactttggtgagcgaaagcgaatccagagaaagaaggcaggactggacgttgacatgaagtccaagaacaaaaagcccaagcgtgtagccaagggcaaatctgacaagaaataa

SEQ ID NO: 65737 - protein, 442 aa, Yarrowia lipolytica
MSFTDLGLPEWLNESLSNMAITKPSAIQKACIPQIMKGKDCIGGARTGSGKTIAFAAPMLAEWSKDPCGIFGLVLTPTRELAIQIAEQFTALGANMNIRVALIYGGVDMVKQSLELQKMPHFVIATPGRLADHIRSSGEDTIRGFRRVRYVVMDEADRLLTPGFVPDLKTCMDLLPDPSKRQTLLFTATVTDAVRALKDRTGEKGPPFIHEIASDIAVPSTLTQSYLFLPGYVREAYLWAILTHPDNEKKSAIIFVNRTQTAETLRRMLMALDVKTASLHSEMRQQERVNALGRFRAQAARVLVATDVASRGLDIPTVEMVINFDLPADADDYIHRVGRTARAGRKGQSVSLVTERDVTRVTNIEERVGTKMEKYDLIEDDKVVEEYLTPASTAKRQAVLDMEAENFGERKRIQRKKAGLDVDMKSKNKKPKRVAKGKSDKK

SEQ ID NO: 65738 - DNA, 1296 bp, Saccharomyces cerevisiae
  CDS (1)..(1296)
atggcagactttaaatctttaggtctttcaaaatggcttacggaatccttaagagctatgaaaattactcagccaaccgctatccaaaaggcttgtattcccaaaatcttagaaggaagagattgtattggtggtgccaagactggttctggtaaaactattgcatttgcagggcctatgctgactaaatggtccgaagatccgtcagggatgtttggagtggtcttgaccccaaccagagagttagccatgcaaattgccgaacaatttactgcacttggtagcagtatgaacattcgcgtgtcagttatagttggtggtgaaagcatcgttcagcaggcattggatttacaaaggaagccgcactttattattgccacgcctggacgtctggcacatcatatcatgagcagcggagatgataccgttggagggctaatgagagctaaatatttagttctagatgaagccgatattttgctaactagcacgtttgccgatcatttagcaacatgtataagtgctctacctcccaaggataagagacaaacacttctattcactgcaactataacggaccaagtaaagtcgttacaaaatgcaccagtgcagaaagggaaacccccattgttcgcttaccaagtagaaagtgtagataatgtggctattccatcgacgttgaaaatagagtatatcttggttccagaacacgtcaaagaagcatatttgtaccaattattaacatgcgaggaatatgagaataaaaccgctataatatttgtaaatagaacaatgaccgcggagatccttagaagaaccctgaagcagttggaagtgagggtagcgtcgttgcactctcaaatgccccaacaggaaagaacaaattccttacatagatttcgagctaacgctgcaagaatcctcatcgctacagatgtagcatccagaggtttggatatcccaactgttgagcttgtagtgaattacgatataccttcagacccagatgtattcatccatagatctggtcgtacggcccgtgctggcagaattggtgacgccatatcattcgttacccagcgagatgtttctaggatacaggccattgaggaccgtatcaacaagaagatgacagagacaaacaaggtacacgataccgctgtaataagaaaagccttgaccaaggtaaccaaggcgaagagggaatcgctgatggcaatgcaaaaggaaaacttcggtgagagaaaaagacagcaaaagaagaagcaaaatgacgggaaaagtttgcgctcttga

SEQ ID NO: 65739 - protein, 431 aa, Saccharomyces cerevisiae
MADFKSLGLSKWLTESLRAMKITQPTAIQKACIPKILEGRDCIGGAKTGSGKTIAFAGPMLTKWSEDPSGMFGVVLTPTRELAMQIAEQFTALGSSMNIRVSVIVGGESIVQQALDLQRKPHFIIATPGRLAHHIMSSGDDTVGGLMRAKYLVLDEADILLTSTFADHLATCISALPPKDKRQTLLFTATITDQVKSLQNAPVQKGKPPLFAYQVESVDNVAIPSTLKIEYILVPEHVKEAYLYQLLTCEEYENKTAIIFVNRTMTAEILRRTLKQLEVRVASLHSQMPQQERTNSLHRFRANAARILIATDVASRGLDIPTVELVVNYDIPSDPDVFIHRSGRTARAGRIGDAISFVTQRDVSRIQAIEDRINKKMTETNKVHDTAVIRKALTKVTKAKRESLMAMQKENFGERKRQQKKKQNDGKSLRS

SEQ ID NO: 65740 - DNA, 1818 bp, Aspergillus oryzae
  CDS (1)..(1818)
atgaagagaaagctcgacgcaaacgatgttccctccccggaggccgcagacaaaaaggaaaagaaggaggaggacgacgccgacttcgagagccttaacttggatccgcgattgcgccaagctctgatcaaagagaaatttaccaagcccacacttgttcaagcgaaggcgattcctttggcgctggagggcaaggatattttggctcgtgcgaagaccggatctggcaagactgccgcatatgtacttcccatcctgcagactattcttcagaagaaagctaccgatccttcatttaaagcgaccacaggcctcatcctcgtccctactcgagagcttgcggaacaggtccagaatgttgttaccactttcgctgccttttgcggaaaggacgtgcgctcggtgaatctgacacaaaaagtctcagatgcagtccagcgcactatgctggctgattaccccgacctggttgtttcgacgcccgctcgtgttgtcaccaatctcggcagctccgctttgtccctggagaacttgacccatcttgtaatcgatgaggcggacctggttctgtcgtacggatacgaggaggacatcaatgctttggcaaaggctattccacgcggtgtgcagactttcctcatgagtgctacactcactgacgaggtggataccctgaagggtttgttctgtcggagtcctgtaaccttgaaattagaagacaaggatgaccagggtgccggtgtcagtcagtttgttgtcagatgtgcggaggacgagaaattccttctaacctatgtcatcttcaagcttcaactgatcaaaggaaaggttatcatattcgtggacgatgtcgaccgttgttatcgtgtgaagttgttcctcgaacaattcggaattaagagttgcgttctgaactcagaattgcctattaactcccgtatacacgttgtacaggagttcaacaagggtgtctacgatatcctcatcgccgcagacgagcaagaggtaataggagcccggaagtcgaagaaatcgaaagaaaccgaggaggcaggctcaagcgacgaggatgagggagagccagaagataagtctaagcgccgcaaggtatcagggaaagagaaggattacggaatttcccgcggcattgacttccaaaatgttgcttgcgttctgaacttcgaccttccctccacttccaaatcctacacacaccgaatcggccgtaccggaagagctggcaagaccggcatggcgctatcattcgtcattcccaaggaccaacacggaaaacacaggcccacctccaccgcaacctcgaagcatgatgagtccgtcctcgccaagatcgtcaagcggcaaggcaagctcggccacgaggtgaaaccctaccacttcgaaatgaagcaagtcgaagccttccggtatcgtatgaccgacgctctccgtgccgtaacacgactcgccgtgcaggaagcccgagcccgagaaatccgtcaagagctgatcaagagcgagaagctcaagcgccacttcgaagaaaaccccgaagagctgcgtcagctgcgccacgatgacgagctgcgctccgcacgtgtccaacctcacctcaaacacatcccagagtacctgatgcccgccaagggtaagaaaggtctctccagtggagacgtcggcttcgtgagtttcagaaaacaaaacgagaaccgcatcaggaaagccagagagaagaatcgcggtaagggcaatggccggaaatttgccggagtgaagaagaaggtagatccgttgaagacgtttaaccggggccggaagtaa

SEQ ID NO: 65741 - protein, 605 aa, Aspergillus oryzae
MKRKLDANDVPSPEAADKKEKKEEDDADFESLNLDPRLRQALIKEKFTKPTLVQAKAIPLALEGKDILARAKTGSGKTAAYVLPILQTILQKKATDPSFKATTGLILVPTRELAEQVQNVVTTFAAFCGKDVRSVNLTQKVSDAVQRTMLADYPDLVVSTPARVVTNLGSSALSLENLTHLVIDEADLVLSYGYEEDINALAKAIPRGVQTFLMSATLTDEVDTLKGLFCRSPVTLKLEDKDDQGAGVSQFVVRCAEDEKFLLTYVIFKLQLIKGKVIIFVDDVDRCYRVKLFLEQFGIKSCVLNSELPINSRIHVVQEFNKGVYDILIAADEQEVIGARKSKKSKETEEAGSSDEDEGEPEDKSKRRKVSGKEKDYGISRGIDFQNVACVLNFDLPSTSKSYTHRIGRTGRAGKTGMALSFVIPKDQHGKHRPTSTATSKHDESVLAKIVKRQGKLGHEVKPYHFEMKQVEAFRYRMTDALRAVTRLAVQEARAREIRQELIKSEKLKRHFEENPEELRQLRHDDELRSARVQPHLKHIPEYLMPAKGKKGLSSGDVGFVSFRKQNENRIRKAREKNRGKGNGRKFAGVKKKVDPLKTFNRGRK

SEQ ID NO: 65742 - DNA, 1785 bp, Kluyveromyces lactis
  CDS (1)..(1785)
atggctcaaacaagcgcttcccagggatacattgatgattcttcttctttcgattcgttccacttggattcacgtttatcacaagccatccgcagtatcggcttcaaacaccctactttgatccaatccagtgcgataccattagctcttcaagagaaaagggatatcatagcgaaagctagtaccggctctggtaaaactttagcatatttgataccagtgattcaaacaattttagatcataagaaggcagatcagaatgatgaaggtgccactctaggggtaatattggtcccaactagagaattggctcagcaagttttagaagttgttgaaaagctcattgttttctgttctcaagaaattaaatgcttaaatctttcatcgggtaatgtatcgggaaacttattgaaatctttacttaccgaaaatccagaaatattgatagctacgccggccaagttagtagatttactagatgcgcaagatgttaatattgacaggttgaagttcttggttatcgatgaagttgatttggtgttaactttcggataccaagaggaccttacgaagatttcagaacgcttaccattgagaaagagtttacaaactttcttgatgagtgccactctaaatgacgatatccaacacttgaagcagcaattctgccgttcaccagcgattttgaaacttaatgacgacgaagtcaacaaagatcaaacaaagcttattcaatattatgtgaaggttggagaatttgataagttcctattgtgttatgtgattttcaaactgggactaattaagggtaagacattaatcttcgttaacaatatcgatagaggatacagactaaagctagttttagaacagtttggtattaaatcttgcattttgaacagtgaactgccagcaaattcaagacagcatatcgtagaagaattcaacaagaacgtttatcaactgttaatagctacagacgatactgaatatatcaaagaagaagacgaagacttagaatcagaaaaaactgaggatggtttagttgaggttgtcgatgattccactgttactacgaaagacaatgcaaagaaacaaaagaagccaaagctaaacgtggagaaagacaaagaatatggtgtatctcgcggtgtggacttcaaaaatgttgcctgtgtattaaactttgatctaccaaccactgcaaaatcgtatgtacatagaattggtagaacagctcgtgcagggaagtcaggaatttctatttcttttgttgttcctttgaaggaattcgggaagcataaaccatctatgatcaagagtgctaagaaggatgaaaagatactaggcagaattataaaacaacaggctaaattaggctttgaactacagccttacaactttgatatcaaacaggtcgaaggtttccgttatagaatggaagacggtttccgtgcagtaactcaggttgctattagagaggcaaggataaaggagttaaaacaggaacttttggcaagtgagaaactaaagagacattttgaagagaatcctcatgacttagagagtttgagacatgacaaggagttacatcctgctcgtgtacaacagcatttaaaaagagttccggactatcttttaccagaaactgctaggaaagataataagaagatcggtttcgttccattccacaaaaattcgcatagaaagaacggaagagtggttaagaagaaggggaatgtccaaagaaagggtaaatctgatcctttgaaaagcttcaaatag

SEQ ID NO: 65743 - protein, 594 aa, Kluyveromyces lactis
MAQTSASQGYIDDSSSFDSFHLDSRLSQAIRSIGFKHPTLIQSSAIPLALQEKRDIIAKASTGSGKTLAYLIPVIQTILDHKKADQNDEGATLGVILVPTRELAQQVLEVVEKLIVFCSQEIKCLNLSSGNVSGNLLKSLLTENPEILIATPAKLVDLLDAQDVNIDRLKFLVIDEVDLVLTFGYQEDLTKISERLPLRKSLQTFLMSATLNDDIQHLKQQFCRSPAILKLNDDEVNKDQTKLIQYYVKVGEFDKFLLCYVIFKLGLIKGKTLIFVNNIDRGYRLKLVLEQFGIKSCILNSELPANSRQHIVEEFNKNVYQLLIATDDTEYIKEEDEDLESEKTEDGLVEVVDDSTVTTKDNAKKQKKPKLNVEKDKEYGVSRGVDFKNVACVLNFDLPTTAKSYVHRIGRTARAGKSGISISFVVPLKEFGKHKPSMIKSAKKDEKILGRIIKQQAKLGFELQPYNFDIKQVEGFRYRMEDGFRAVTQVAIREARIKELKQELLASEKLKRHFEENPHDLESLRHDKELHPARVQQHLKRVPDYLLPETARKDNKKIGFVPFHKNSHRKNGRVVKKKGNVQRKGKSDPLKSFK

SEQ ID NO: 65744 - DNA, 1788 bp, Schizosaccharomyces pombe
  CDS (1)..(1788)
atggaaaaatctggtggaatacgtgaagagagttctgaaaaaactttttcggactttaatttagatcctagattgcaaagagccattcataaatgtgaatttgaaaaacctacttcagtccaaagcgaaacaatccctttagcattagaaggaaaagacttggtagctcaagcaagaactggttctggtaagacggctgcttatttgattcccattttggaattactgttgaagcaaaaacaaatcgatgaaaatcaacgtggaatttttgctttgcttttagttcctacaagagaattggctcaacaagtatacaatgtattggaaaaacttactgctttttgcagcaagcatattagatttatcaatgttgcgacgaatagctctgataccgtacaacgtcctcttcttctcgatcttcctgatattgtaattgcaacacctagtcgttgtgttgttcatgtcgcatctggtgtacttccattggataagttaaaattccttgtaatcgatgaagccgatttaatgctctcttttggatataacgaagacatgaaaacccttagtaggtcccttccccgtggtactcaatccttcttaatgtctgccacactttccaagaacattgcatccttacaaaagttagtttgtcggaatccgtttatcttagcagtaaaggataaagaagcaagtggaaagttaactcagtacgttgttaaatgctctgagcaagacaagtttttgctagcgtacatccttctcaaactcagattaattaaaggaaaaatcttgatttttgtgaacgaaataaaccgatgctaccgactaaaactttttttggagcagtttggtctgaagagcttagtgctcaactctgagcttcctgtaaactcccgtttacacatcttagaacaatataataaaggcttgtatcaaatcattattgctactgatgaaagtggaatgatgggtgaaatagaagaattggaaaataatgttgattttgtcgaagaagaagtaatttctactgatcagccaactttagataaaatgaaggatcaggagaatgcagatgtcaatgatgaatccattttagctgctgcaaaggacaaatccaagaaaaagaaaagagttaaacaagataaggagtatggtgttgctcgtggtcttgattttgaaaatgtggcttgtgttctaaattttgatatgcctagtaacacaaaatcttatatccatcgaatcggcagaacagcaagagctggaaaacctggaaccgctatgtcttttgtagtgcccaaatcagaggttggcaaacataagcctacgagtctggaatcctgtaaaaaagatgagtccgttttacgtcgcttagaaaaaaagcaaattagcctacaaccttactcatttgataagaatcaaattgatgctttccgctatcgtatggaagatgctcttcgtgctgttactaccgttgctgtttcagccgcaagagctgctgaattgaaacaggaattacttatttcagagaagttgaaatcttactttgctgaaaatccagatgagttactatcattaactcacgatactgtttccagtgttcgccttggtcacacccagagacatctccgtcatgttcctgaatatttattaccaaaaggaatgcaagccgttaacaaggacattggctttgtaccatttaaaaagaacaataggcgaaaggtatttaaatctagaaagaatcctaagcatcggcacgaccctttacgctctatgaagcgtaaatcttaa

SEQ ID NO: 65745 - protein, 595 aa, Schizosaccharomyces pombe
MEKSGGIREESSEKTFSDFNLDPRLQRAIHKCEFEKPTSVQSETIPLALEGKDLVAQARTGSGKTAAYLIPILELLLKQKQIDENQRGIFALLLVPTRELAQQVYNVLEKLTAFCSKHIRFINVATNSSDTVQRPLLLDLPDIVIATPSRCVVHVASGVLPLDKLKFLVIDEADLMLSFGYNEDMKTLSRSLPRGTQSFLMSATLSKNIASLQKLVCRNPFILAVKDKEASGKLTQYVVKCSEQDKFLLAYILLKLRLIKGKILIFVNEINRCYRLKLFLEQFGLKSLVLNSELPVNSRLHILEQYNKGLYQIIIATDESGMMGEIEELENNVDFVEEEVISTDQPTLDKMKDQENADVNDESILAAAKDKSKKKKRVKQDKEYGVARGLDFENVACVLNFDMPSNTKSYIHRIGRTARAGKPGTAMSFVVPKSEVGKHKPTSLESCKKDESVLRRLEKKQISLQPYSFDKNQIDAFRYRMEDALRAVTTVAVSAARAAELKQELLISEKLKSYFAENPDELLSLTHDTVSSVRLGHTQRHLRHVPEYLLPKGMQAVNKDIGFVPFKKNNRRKVFKSRKNPKHRHDPLRSMKRKS

SEQ ID NO: 65746 - DNA, 1635 bp, Yarrowia lipolytica
  CDS (1)..(1635)
atgactacccccgacctggaggataagtccttcgactcgttcggccttgatgacagactgttgtccggcctggctgcctgcgacatgaagcagcccactctcattcagaacacaaccattcctctggctctggacaagggcgtggatatcacagccaaggccgtcactggtagtggcaagacggtggcctacttgctgcccatcttcgagctgatgctgagagctgagaaagagaaacgggatatccagactgctctgattgtggttcccacgcgagagttgtgtgagcaggtgtccaaggtgatcaccaagctgacccaattttgcccccatctcaagtctctcaacgtgactcagcagctcggagacgacgttatttcttctctgttggaagagaagcccagcatcattgtcggaacaccctcgaggctgctaaaatacgccaaggagatggactgctccaaggtcggttatctggtcatcgacgaggcagatctgctgctatcctacggctacaaggaggatcttatcgagctgtcggagatgctccccaagactaagcataccttcatcatgtctgcaacactcaacaaggagtccgatctgatgaagcagcagttctgcagaagcactgtggctagtgttgcagtcaccgctgctgaggaggagagaaaactgctgcagtactacgtcaagtgcagcgagagagataagtttctgctggcctacgtcatgtttaagctgcagctggtcaagggcaagaccattgtctttgtcaacgagattgatcgatgctaccgattgcgtctgttcctggagcagtttggaatcaaggcctgtgttctcaactccgagctgcccatcgcctctcgtcttcatattgtggagcagttcaacaagggtgttttcaacttgctgatctgtaccgacgaggccaacaagctggctgaggctagtaaatctgcatccaagcagaccaaggaggtgtccagagcccatgagtactcttcaactcgaggtcttgatttcatgaacgtggcttttgtgctcaactttgatctgcctctttctagccgagcatatgtccaccgagtgggccgaactgctagagccaacaaggccggtaccgcactgtcttttgttgtgcctgccgaccaatggggcaaggataaggtggccaagctggatactgctaagcgagatgagaaggtgctcaagaagatcatcaagaaccaggagtcacagaacatggaaatcaagccctattcgttcgacatgaagcaggtggagggcttccgataccgaatggacgacgctttccgagccgtcacaaccgtgggtgttcgagaggcccgagtcaaggagatcaagaccgagttgctcaactccgagcgcctggctcgacatttcgacgaaaaccccgacgatctgaaggctcttcgacacgacaaggagctccacacatccaaggtccaagcacacatgaagcgggtgcccgactacttgttgggacgaaagggtaagctggatcctaatgtgtttgtgccattcagaaaggatgataacaaaatccacaagaagtataccaagaagaagaagggcggcgatcccctcaagttcaagaagcgaaaatag

SEQ ID NO: 65747 - protein, 544 aa, Yarrowia lipolytica
MTTPDLEDKSFDSFGLDDRLLSGLAACDMKQPTLIQNTTIPLALDKGVDITAKAVTGSGKTVAYLLPIFELMLRAEKEKRDIQTALIVVPTRELCEQVSKVITKLTQFCPHLKSLNVTQQLGDDVISSLLEEKPSIIVGTPSRLLKYAKEMDCSKVGYLVIDEADLLLSYGYKEDLIELSEMLPKTKHTFIMSATLNKESDLMKQQFCRSTVASVAVTAAEEERKLLQYYVKCSERDKFLLAYVMFKLQLVKGKTIVFVNEIDRCYRLRLFLEQFGIKACVLNSELPIASRLHIVEQFNKGVFNLLICTDEANKLAEASKSASKQTKEVSRAHEYSSTRGLDFMNVAFVLNFDLPLSSRAYVHRVGRTARANKAGTALSFVVPADQWGKDKVAKLDTAKRDEKVLKKIIKNQESQNMEIKPYSFDMKQVEGFRYRMDDAFRAVTTVGVREARVKEIKTELLNSERLARHFDENPDDLKALRHDKELHTSKVQAHMKRVPDYLLGRKGKLDPNVFVPFRKDDNKIHKKYTKKKKGGDPLKFKKRK

SEQ ID NO: 65748 - DNA, 1440 bp, Bacillus subtilis
  CDS (1)..(1440): transl_table=11
atgagtcattttaaaaactatcaaatcagtcatgacattttacgagcattggaaggactgggatatacagaaccgaccaaggtgcagcagagtgtgatccccgctgcccttgaacgaaaggatcttgtcgtcaaatcacagacaggaagcgggaaaacggcttcgttcgggattcctctctgtgagctggcgaattgggatgaaaacaagccgcaggcgcttattttaacaccgacccgtgagcttgcggtgcaagtaaaggaagatatcacgaacatcggacgatttaaacggatcaaagcgacagccgtatttggaaaatcctcctttgataaacaaaaagctgagcttaagcaaaaaagccacattgttgtcggcacgccgggacgtgttctggatcatatcgaaaaaggcacgctgccgttggatcgtctctcttatttggtcattgatgaagcggatgagatgctgaatatgggcttcattgagcaggtggaggcgattatcaagcatctgccgactgagcgtacgacgatgctgttttcagcgacgcttccgcaggatatcgagaagctgagccgtcaatatatgcaaaaccccgagcatatcgaggtcaaagcggccggcctaaccacaagaaatattgaacatgcggtgattcaagtaagagaagagaataagttttcattgctgaaagatgtgctgatgacggagaatcccgacagctgcatcattttctgccgaacgaaggagcacgtcaatcagctgaccgatgaattggatgacttgggatatccatgcgataaaattcacggcggaatgattcaggaagaccgattcgacgtcatgaatgaatttaaacgtggcgagtaccgttacttagtggcgacggatgtcgccgcgcgcgggattgatattgaaaatatctcccttgtcatcaactatgatctgccgcttgaaaaagaaagctatgtccaccgcacgggccgaacgggacgcgcagggaacaaaggaaaggccatttcgtttgtcacggccttcgaaaaacggtttttagccgacattgaagaatatatcggatttgaaatcccaaaaatagaagcaccttctcaagaggaagtggcaaggaagaaaccagaatttctagctaaactgaatgaccgtccggaaagcaaaaaggacaaaagcgaagagctgaataaagacattatgaagctgtattttaacggcggaaagaaaaagaaaatcagagccgttgattttgtaggaacgattgccaaaattgacggtgtgtcagctgacgacatcggcatcatcacgatcatggataacgcctcatacgttgagattttaaatggtaaaggccctcatgttctcaaagtgatgaagaacacaaccgtcaaagggaaacagctgaaggtgaataaagcgaataaatga

SEQ ID NO: 65749 - protein, 479 aa, Bacillus subtilis
MSHFKNYQISHDILRALEGLGYTEPTKVQQSVIPAALERKDLVVKSQTGSGKTASFGIPLCELANWDENKPQALILTPTRELAVQVKEDITNIGRFKRIKATAVFGKSSFDKQKAELKQKSHIVVGTPGRVLDHIEKGTLPLDRLSYLVIDEADEMLNMGFIEQVEAIIKHLPTERTTMLFSATLPQDIEKLSRQYMQNPEHIEVKAAGLTTRNIEHAVIQVREENKFSLLKDVLMTENPDSCIIFCRTKEHVNQLTDELDDLGYPCDKIHGGMIQEDRFDVMNEFKRGEYRYLVATDVAARGIDIENISLVINYDLPLEKESYVHRTGRTGRAGNKGKAISFVTAFEKRFLADIEEYIGFEIPKIEAPSQEEVARKKPEFLAKLNDRPESKKDKSEELNKDIMKLYFNGGKKKKIRAVDFVGTIAKIDGVSADDIGIITIMDNASYVEILNGKGPHVLKVMKNTTVKGKQLKVNKANK

SEQ ID NO: 65750 - DNA, 1374 bp, Escherichia coli
  CDS (1)..(1374): transl_table=11
atgaccgctttttctaccctgaatgttttgcctcccgcccaactcacgaaccttaatgagttgggttatttaaccatgacgccggtgcaggccgccgcgcttccggcgatccttgccggaaaagatgttcgcgtgcaggcgaaaaccggcagcggcaaaacggcggcttttggcctcggcttgttacagcaaattgatgcgtcgctatttcaaacccaggctttagtgctgtgtcctacgcgtgaactggcggatcaggtggcaggtgaattgcgtcggctggcgcgttttctgccaaataccaaaattttgacgttgtgcggtggtcaaccgttcggtatgcagcgtgattcgttgcaacatgcgccgcatattatcgtggcaacgccggggcgtttgctggatcacctgcaaaaaggcacggtatcactggatgcgttgaatacgctggtgatggatgaggccgaccgcatgctggatatgggatttagcgatgccattgatgatgtcatccgttttgcgcctgcatctcgacagacgcttctgttttcggcaacctggccggaagccatcgctgcaatcagcggacgagtgcaacgcgatcctttggcgattgaaattgactcaacagatgctttgccacccattgaacaacaattttatgagacatccagcaaaggcaaaattcctctgttgcaacggttattaagcttgcatcagccatcctcttgcgtggtgttttgcaataccaaaaaagattgccaggctgtctgcgacgcgctgaatgaagtagggcaaagtgcattgtcattacacggcgatttggagcaacgcgatcgcgatcagaccctggtacgttttgctaacggtagcgcccgtgtactggtcgcgactgatgttgctgcgcgtggtctggatattaaatcgcttgagctggtggtgaactttgagctggcgtgggaccctgaagttcatgtacatcgcatcggtcgtacagctcgtgcaggaaatagcggtctggcgatcagtttctgtgctccggaagaagcacagcgggccaatatcatttctgacatgttgcagataaaacttaactggcaaacgccgccagctaatagttccattgcgacgctggaagcagaaatggcaacgttgtgtatcgatggcgggaaaaaagccaaaatgcgcccgggtgatgtattaggtgcactgacaggagatatcgggcttgatggcgcagatattggcaaaatcgccgtgcatccggcgcatgtctatgtcgcggtccgtcaggctgttgctcataaagcatggaaacagttacagggcgggaagattaaaggaaaaacgtgccgggtgcggttattaaaataa

SEQ ID NO: 65751 - protein, 457 aa, Escherichia coli
MTAFSTLNVLPPAQLTNLNELGYLTMTPVQAAALPAILAGKDVRVQAKTGSGKTAAFGLGLLQQIDASLFQTQALVLCPTRELADQVAGELRRLARFLPNTKILTLCGGQPFGMQRDSLQHAPHIIVATPGRLLDHLQKGTVSLDALNTLVMDEADRMLDMGFSDAIDDVIRFAPASRQTLLFSATWPEAIAAISGRVQRDPLAIEIDSTDALPPIEQQFYETSSKGKIPLLQRLLSLHQPSSCVVFCNTKKDCQAVCDALNEVGQSALSLHGDLEQRDRDQTLVRFANGSARVLVATDVAARGLDIKSLELVVNFELAWDPEVHVHRIGRTARAGNSGLAISFCAPEEAQRANIISDMLQIKLNWQTPPANSSIATLEAEMATLCIDGGKKAKMRPGDVLGALTGDIGLDGADIGKIAVHPAHVYVAVRQAVAHKAWKQLQGGKIKGKTCRVRLLK

SEQ ID NO: 65752 - DNA, 1806 bp, Buchnera aphidicola subsp
  CDS (1)..(1806): transl_table=11
atgactcatactgaaagcacattttcttttcttggtttaaatccttttattatcaaatctttatcaaaaatgggatatgttaaaccttctcctattcaagcggcttgtattccattacttctagaaggacgagacgtattaggaatggcacaaacaggaagtggaaaaacagcagcattttcattaccattattacataatcttaatattaatttaaaagcgcctcaaattttagtattagctccaacaagagagttggctgttcaagtagctgaagctttttcagatttttctaaatatataatgggaatacatgtattacctttatatggtgggcaacgatatgaagtacaactacgagcactgcgacaagggccccaaattgttgtaggaactccaggacgtttattagatcatttaaaaagaggaactcttaatctttcaaatttatatgcattagttttagatgaagcagatgagatgttacgtatgggttttatagaagatgtagaaacaattatgtctcaaatacctaaagagcatcaaacagctttattttcagcaacaatgccagaagctatacgccgtatttctaaaagatttatgaaaaatcctcaagaaatcaagatacaatcgaatatcactacacgtccagatattaaacaaagttattggatggtttacggtagaaaaactgatgccttaattcgttttttagaggtagaagatttttctgcaacaattatttttgtcaaaacaaaaaatgcaactttagaagtatctgaagctttagaacgtaatggatataatagtgctgcattaaatggagatatgaatcaagctttaagagaacaaactttagaacgattaaaaagtggtcgattagatattttaattgccacagatgtagctgctcgtggtttagatgttgatcgcattagttttgttattaattacgatattcccatggattcagaatcttatgttcatcgtataggtcgtacaggtcgagctggtcgagctggtcgggctttattatttgttgaaaatcgtgaacgtcgattattgcgtaacattgaacgtacaataaatcaaactattccagaagttcagttgccaaaaattgaagtcttatgtaaaagacgtcttgaacgatttgcaaaaaaagtacaagaacaattagaaagtagagatttagatgaatacagtgcattattagataaattatactctcctgatgatttagatataaagactcttgcttctgctttattaaaaatggctcaagggggacgacctttgattattaaaaaagatttattacaacgtccatctagagagttttcgtttaaagatgatcgcagacgtgaagacaatcatcgtaataacaatcgaaatcgtcgtgaacgtcgagagctaaaagatatagatttatatcgaattgaagcaggtcgaaatgatggagtagaagtccgtcatatagttggagctattgctaatgaaggaaatattaatagtcgcaatattggaaatattaaactattttcttcttatgcaattgtagaattacctaaaggattatctaaagatttattacaacgtctcataaaaacaaaaattttgaataagaaaataaacataaaattattacgtgatattaaaaattatgaaactagaacgcataatcgttctatctttaataaagataaaaataataagcgtcgtttttctgataaccgtttaaataaatctagtagtattaaaaacgaaacgaaatcatctttttttcgtcgtaaaagtgtttga

SEQ ID NO: 65753 - protein, 601 aa, Buchnera aphidicola subsp
MTHTESTFSFLGLNPFIIKSLSKMGYVKPSPIQAACIPLLLEGRDVLGMAQTGSGKTAAFSLPLLHNLNINLKAPQILVLAPTRELAVQVAEAFSDFSKYIMGIHVLPLYGGQRYEVQLRALRQGPQIVVGTPGRLLDHLKRGTLNLSNLYALVLDEADEMLRMGFIEDVETIMSQIPKEHQTALFSATMPEAIRRISKRFMKNPQEIKIQSNITTRPDIKQSYWMVYGRKTDALIRFLEVEDFSATIIFVKTKNATLEVSEALERNGYNSAALNGDMNQALREQTLERLKSGRLDILIATDVAARGLDVDRISFVINYDIPMDSESYVHRIGRTGRAGRAGRALLFVENRERRLLRNIERTINQTIPEVQLPKIEVLCKRRLERFAKKVQEQLESRDLDEYSALLDKLYSPDDLDIKTLASALLKMAQGGRPLIIKKDLLQRPSREFSFKDDRRREDNHRNNNRNRRERRELKDIDLYRIEAGRNDGVEVRHIVGAIANEGNINSRNIGNIKLFSSYAIVELPKGLSKDLLQRLIKTKILNKKINIKLLRDIKNYETRTHNRSIFNKDKNNKRRFSDNRLNKSSSIKNETKSSFFRRKSV

SEQ ID NO: 65754 - DNA, 2028 bp, Aspergillus oryzae
  CDS (1)..(2028)
atggccgacagcttgaagatgggtagcctttccctcaacgaatctcagcatgcgcctgctccaaactcttctggccgcgctgcctacatccctccccatctccgtcaacgccagacgggtgcgaacatggacggagcccccgccgccgctccccctgctcctggtcccagcggcccgggcaactcttggggttcgagaggcggtcctcgcggtggcaactgggccaacgctaatgctcctgatttcagccctcgcggtcccaatcccaatggtaacactagctggactcccactgaaggttctcgccggtcatttaatccagatgcttacggaaacccaggtcatggaggctcttatggcggaggcagtgccagaggctctggagatggccagtggcgcgacggcaagcacatccccggtcccgccaacgcccgcgtggagcgtgaacttttcggcctgcccaacgatcccactaagcagaacactggtatcaactttgccaactacgacgatatccccgtggaagcctccggtcaaaatgttcctgagcccgtcaacgcattcaccaaccctcctttggatgaccacctgattgcgaacattacgctcgctcattaccagactcccaccccggtgcagaagtactctattcctatcgtgatgaacggccgtgacctgatggcttgtgcccagactggttctggaaagactggtggtttcctgttcccgatcttgtctcaggcattccagaacggtccttccccaactcctgccccggcatccggccagttcagctacggccgtcagcgcaaggcctacccgacatcccttatcttggccccgactcgtgaactagtctctcagatcttcgatgaagcccgcaagttcgcttaccgctcctgggttcgtccctgcgtcgtctacggtggtgccgatattggatctcagctccgtcagattgaacgtggttgtgaccttctggttgccactcctggtcgtctcgtggatcttatcgagcgtggccgcatttctcttgtcaacatcaagtacttgatcttggacgaagctgaccgcatgttggacatgggtttcgagcctcagatccgccgcattgtggagggtgaagatatgcctcatgttaatgaccgtcaaactctgatgttctccgccaccttccctcgcgacattcagatgctggctcgcgacttcctgaaagattatgttttcctttctgttggtcgtgtcggctcaacctctgagaacatcacccagaaagttgaatacgtcgaagatcacgacaagcgttcagttctcttggatattctccacactcatggaactagcggtctcaccctcattttcgttgagaccaagcgcatggccgactctctgtcggacttcctgctcaaccagcgcttccccgccaccgccatccacggtgaccgtactcagcgtgaacgtgagcgtgctttggagatgttccgttccggccgttgccctatcttggttgctactgctgtcgctgctcgtggtctcgatattcccaacgttactcacgttatcaactacgatctgcctactgatattgacgactatgttcaccgtatcggtcgtaccggtcgtgcgggtaacaccggtattgccaccgccttcttcaaccgtggcaaccgtggcgtcgtccgcgatctgatcgaccttctcaaggaggcgcaccaggaggtcccctcgttcttggagagcattgctcgtgagggcagtggatacggcggccgtggcggccgtggtggtcgtggccgtggagccaacgccactcgtgatatgcgtcgtgtgggcggcggtatgggcggtcctccttccttcggtggcagcagctatggcggtcccagtgctggctatggcggtagctatggtggtggtgctccctcttacggcggcagcggcggcggcagctacggctacggtggcagcggcggcggcggcggctatggaaacccctcgggccctactggaccttcctcctggtggtaa

SEQ ID NO: 65755 - protein, 675 aa, Aspergillus oryzae
MADSLKMGSLSLNESQHAPAPNSSGRAAYIPPHLRQRQTGANMDGAPAAAPPAPGPSGPGNSWGSRGGPRGGNWANANAPDFSPRGPNPNGNTSWTPTEGSRRSFNPDAYGNPGHGGSYGGGSARGSGDGQWRDGKHIPGPANARVERELFGLPNDPTKQNTGINFANYDDIPVEASGQNVPEPVNAFTNPPLDDHLIANITLAHYQTPTPVQKYSIPIVMNGRDLMACAQTGSGKTGGFLFPILSQAFQNGPSPTPAPASGQFSYGRQRKAYPTSLILAPTRELVSQIFDEARKFAYRSWVRPCVVYGGADIGSQLRQIERGCDLLVATPGRLVDLIERGRISLVNIKYLILDEADRMLDMGFEPQIRRIVEGEDMPHVNDRQTLMFSATFPRDIQMLARDFLKDYVFLSVGRVGSTSENITQKVEYVEDHDKRSVLLDILHTHGTSGLTLIFVETKRMADSLSDFLLNQRFPATAIHGDRTQRERERALEMFRSGRCPILVATAVAARGLDIPNVTHVINYDLPTDIDDYVHRIGRTGRAGNTGIATAFFNRGNRGVVRDLIDLLKEAHQEVPSFLESIAREGSGYGGRGGRGGRGRGANATRDMRRVGGGMGGPPSFGGSSYGGPSAGYGGSYGGGAPSYGGSGGGSYGYGGSGGGGGYGNPSGPTGPSSWW

SEQ ID NO: 65756 - DNA, 2019 bp, Candida albicans
  CDS (1)..(2019): transl_table=12
atgtctgatattagtaaacaaatgaataatttgagtgttaacgatggtgctaacacagtaaacaacaacaacagctttagaggcggccgttcccaatacgtgccacctcatttaagaaacagacaaggtggtggtaatcaatcaggttcctcatcagaatcatcagatgttccatttggaggatctcaacgtggtggatttaactcaaatggattcaacaacaacagaggtggattcaacaatggtggctacaacaacaaccgaggtggattcaacaacggtggcttcaataacagaggtaactacaaccaatcctttggaggcagaggtggcagaggtggtttcaacaacggtggcggtagataccaaagaccaactccaggtgtcggtaaatggcaagatggtaaacacgaaccagctcctcgtaatgagaaattagaagtggaattatttggtactgctgatgattctcatttccaatcttctggtattaactttgacaattatgatgatattccagttgaagctagtggtgacaaagttccagaacctattacttcctttactgctccaccattggacgaattgttggttgaaaacattcagttgtctagattcaccaaaccaaccccagtccaaaaatactccgttccaattgttgctgctggtagagatttgatggcttgtgcccaaactggttccggtaagaccggtgggttccttttcccagttttatctgaatcttacatgaagggaccagctccagttcctgaatcaaatggtgccttctcttcacacaaagtttatccaaccatacttgttatggcaccaaccagagaattggtttctcaaatttacgaagaaagtaaaaaattcagttacagatcatgggttcgtgcttgtgtcgtttatggtggtgccgatattggtcaacaaatgagaaacatggacagaggttgtgatttgttagttgccaccccaggtcgtcttaaggatttgttggatagaggcaaagtttctttggccaacattagatacttggttttggatgaagctgatagaatgttggatatgggttttgaaccacaaatcagatacattgttgaagagtgtgatatgcctgctgtcaaggatagacaaacattgatgttttctgctactttcccaagagacattcaaatgttggcccgtgatttcttaaaagattatgttttcctttctgttggtagagttggttctacttcagaaaacatcacccaaaagatcttgtacgttgaagatgacgaaaagaagtcagttattttggacttgttatctgccaatgaaaatggattaactatcgttttcactgaaaccaagagaatggccgacaacttggccgattacttgtacgaccaaggattcccagctactgctattcatggtgacagatctcaatatgaaagagaaaaagctcttgctgccttcaaaaatggtgctgctcctattttggttgccactgccgttgctgccagaggtttggatattcctaatgtttcccacgttatcaactacgatttacctagtgatatcgatgactatgttcatagaattggtcgtactggtcgtgccggtaacgttggtattgccactgcttttttcaacagaaacaacaagaatgttgttaaaggattaattgaattattatctgaagccaatcaagaagtcccagactttttaactaaaattgccagagaaggagcttttggtaagatgactcgtggtggtggccgtggcggttccagccgtggaccatccagagatttcagaagaagtggaaattcaggatggggcaactctggtaacagtggctggggtaactccggtaacgccagtagcagtggctggggtggtaattcatcctcatcatactccaacactaacagcaattatggtggtggttacaacaataaccaacgttctaactttagcagcggtggcagttacggtaatcaaactggttccaactcctggtggtaa

SEQ ID NO: 65757 - protein, 672 aa, Candida albicans
MSDISKQMNNLSVNDGANTVNNNNSFRGGRSQYVPPHLRNRQGGGNQSGSSSESSDVPFGGSQRGGFNSNGFNNNRGGFNNGGYNNNRGGFNNGGFNNRGNYNQSFGGRGGRGGFNNGGGRYQRPTPGVGKWQDGKHEPAPRNEKLEVELFGTADDSHFQSSGINFDNYDDIPVEASGDKVPEPITSFTAPPLDELLVENIQLSRFTKPTPVQKYSVPIVAAGRDLMACAQTGSGKTGGFLFPVLSESYMKGPAPVPESNGAFSSHKVYPTILVMAPTRELVSQIYEESKKFSYRSWVRACVVYGGADIGQQMRNMDRGCDLLVATPGRLKDLLDRGKVSLANIRYLVLDEADRMLDMGFEPQIRYIVEECDMPAVKDRQTLMFSATFPRDIQMLARDFLKDYVFLSVGRVGSTSENITQKILYVEDDEKKSVILDLLSANENGLTIVFTETKRMADNLADYLYDQGFPATAIHGDRSQYEREKALAAFKNGAAPILVATAVAARGLDIPNVSHVINYDLPSDIDDYVHRIGRTGRAGNVGIATAFFNRNNKNVVKGLIELLSEANQEVPDFLTKIAREGAFGKMTRGGGRGGSSRGPSRDFRRSGNSGWGNSGNSGWGNSGNASSSGWGGNSSSSYSNTNSNYGGGYNNNQRSNFSSGGSYGNQTGSNSWW

SEQ ID NO: 65758 - DNA, 1884 bp, Kluyveromyces lactis
  CDS (1)..(1884)
atgtctgatattgcggaaaacatgtctaatttgtctgttcaggacaatgattctggtgcaacttcaggtgacagcagacgttcttatgttcctcctcatgtgagaggccaacaaagaagtggtagcggtaactatcgtggtcgttctgataacttcggtggtaacgagagatccttctttggtaacgaaagaagaggcggtggatacagcagaggcggtagaggttccgtcaactggggtggttccaactggggtggcagaaacgacagtagaggttctggcggttacggtggtggtaactcatctggtagatggatcgacggtaagcacgtcccagctgccaagaacgctaacttggaattagagttgttcggtgttgctgaggacaagagtttccaatcctctggtatcaacttcgataactacgacgatattccagtcgaagcctctggtaatgatgttccagaaccaatcagtgaattccactctcctccattggatcctttgttattggacaatattaagttggccagattcaccaagccaactccagttcaaaaatactctgttccaatcgtcgctgctggtagagatttaatggcttgtgctcaaactggttccggtaagactggtggtttcttgttcccagttctgtctgaatcattctccagtggtccagcctcaaccccagaagctgccggtaactcttacatcaagaaggtttacccaaccgccgtgatcttggccccaaccagagaattggctactcaaatttacgatgaagctaaaaagttcacttacagatcgtgggttaaacctatggtcgtttacggtggtgccagtatcgacaaccaaattaaacaaatgagatacggttgcaacttgttggttgccactccaggtcgtttgactgatttattggaacgtcgttacatctctcttgccaacgttaagtacttggttttggatgaagctgatagaatgttggatatgggtttcgaacctcaaatcaggagaattgtggaaggttctgacatgccatctgttgataacagacaaacattaatgttttccgccactttcccaagtgaaatccaacatttggcttccgatttcttgaaggactacgttttcttgtccgttggtagagttggttctacatccgaaaatattacccaaaagattctttacgttgaagacttcgacaagaacgatactttgttggacttgttggccgctagtaatgaaggtttgaccttgattttcgttgaaactaagagagccgcagattccttgactgacttcttgatcatggaaggtttcaaggctactgctatccatggtgaccgtacacaaggtgaacgtgaacgtgcgttgtctgctttcaagaccggtagagctactatcttggttgctaccgctgtcgctgctagaggtttggatattccaaacgttactcatgttatcaactttgacttgccaaatgatatcgatgattacgtccacagaattggtagaactggtcgtgccggtaacaccggtgttgctactaccttctttaaccgtggtaacaagaatgtcgctaaggaattggttagtttgttgagtgaagctaatcaagaggttccatccttcttgaccaccatcatgagagaagcttctagcggcagaggcggtgccagaggtggccgtggtggttacaaccgtggcaacagcaccagagatttccgtcgcggtggcgccccctctggtggcttcagcagcggtggcggttccagcggcggctggggtaacggtggcggctccagcggtggctggggtaactcttccggtaactggggtaactcttctaactcctcaaactctaactctggttggtggtaa

SEQ ID NO: 65759 - protein, 627 aa, Kluyveromyces lactis
MSDIAENMSNLSVQDNDSGATSGDSRRSYVPPHVRGQQRSGSGNYRGRSDNFGGNERSFFGNERRGGGYSRGGRGSVNWGGSNWGGRNDSRGSGGYGGGNSSGRWIDGKHVPAAKNANLELELFGVAEDKSFQSSGINFDNYDDIPVEASGNDVPEPISEFHSPPLDPLLLDNIKLARFTKPTPVQKYSVPIVAAGRDLMACAQTGSGKTGGFLFPVLSESFSSGPASTPEAAGNSYIKKVYPTAVILAPTRELATQIYDEAKKFTYRSWVKPMVVYGGASIDNQIKQMRYGCNLLVATPGRLTDLLERRYISLANVKYLVLDEADRMLDMGFEPQIRRIVEGSDMPSVDNRQTLMFSATFPSEIQHLASDFLKDYVFLSVGRVGSTSENITQKILYVEDFDKNDTLLDLLAASNEGLTLIFVETKRAADSLTDFLIMEGFKATAIHGDRTQGERERALSAFKTGRATILVATAVAARGLDIPNVTHVINFDLPNDIDDYVHRIGRTGRAGNTGVATTFFNRGNKNVAKELVSLLSEANQEVPSFLTTIMREASSGRGGARGGRGGYNRGNSTRDFRRGGAPSGGFSSGGGSSGGWGNGGGSSGGWGNSSGNWGNSSNSSNSNSGWW

SEQ ID NO: 65760 - DNA, 2067 bp, Neurospora crassa
  CDS (1)..(2067)
atggcggatcaactcagcagcggcatgggcaacctgtccatcgaccagcagcccccctcgggcccccagatgggaggccagggccagatgaggcgctcttacattcctcctcaccttcgcggcaagatgggcgacgctgctcctcccatggccggccccaacggtcttaacaacagcgcttgggctggtaacaacaactatgacgctcgtggcccaggcggcggcggcaactggcccgctcctggtggtccccctggccctggctttgagggccagcagggcgctggctggggcggccctcgtcctcagggcggcttcaaccccaacgcgtaccgcggcaacgctggcgctggcgccggtgccggtgccggtggtggtggcggcagcttcagcaaccgtggctctggcgatggtcagtggcgcgatggcaagcacattcctggccctgccaacccccgcgtcgagcgtgagctcttcggtacccccgacgacccgtccaagcagcacactggtatcaacttcgagaagtacgatgacattcccgttgaggcttccggtgacaacgtgcccgagcccgttcttaccttcagcaaccctcctctggacaaccacctcatttccaacattcagctcgcccgctacaatgtccccactccggttcagaagtactccatccccatcgtcatgggtggccgtgatctgatggcttgcgcccagactggttccggcaagactggtggtttcctcttccccattctttctcagtctttccacactggtccgtctccgattcccgccagcgctgctggtgcctatggtcgtcagcgcaaggcttaccccaccgccttgatccttgctcccacccgtgagttggtctctcagatctacgacgaggctcgcaagttcgcctaccgttcgtgggtccgtccttgcgtcgtctacggtggtgccgatatcggctcccagcttcgccagatcgagcgcggctgcgatcttcttgttgctactcctggtcgtcttgtcgatctcatcgagcgtggccgtatctccctctgcaacatcaagtacctcgtccttgatgaggctgatcgcatgcttgacatgggtttcgagcctcaaattcgccgtatcgttgagggtgaggacatgcccaaggtcaatgaccgccagactctcatgttctcggccactttcccccgcgacatccagatcctcgcccgcgatttcctcaaggactacatcttcctgtccgttggtcgtgttggttccacctctgagaacatcacccagaaggtcgagtacgttgaggatattgacaagcgttccgtccttctcgacattctccacacccacgccggaggtctcacccttattttcgttgagaccaagcgcatggccgattcgctgtccgacttcttgatcaaccagaacttccccgctacttccattcacggtgaccgcactcagcgtgagcgtgagcgcgctttggagatgttccgcaacggtcgctgccctattctggttgccactgctgtcgctgctcgtggcttggatattcccaacgtcacccacgtcatcaactacgatctccctaccgacattgatgactacgttcaccgtatcggtcgtaccggtcgtgccggaaacactggtattgccaccgctttcttcaaccgtggcaaccgtggtgtcgtccgcgagcttcttgaactcctcaaggaggctaaccaggaggttcctgccttccttgagaccattgcccgcgagtcctcgttcggcggtggtcgtggcggtcgtggtggtggtcgtggcggcggtcgcggtcgcactcaaactgccgattaccgcaagttcggcggttccggtggtggcggcttcggcggtggcttcggcggtgctcccgctagcggcggctacggcggcggcggctatggtggtggtggtccccccgccggtggctacggcggtggtggtggtgctggctacggcggcggcggtggcggcggcggctatggtggcggcggttacggcaaccctggcggtgccggtggccagtcttggtggtaa

SEQ ID NO: 65761 - protein, 688 aa, Neurospora crassa
MADQLSSGMGNLSIDQQPPSGPQMGGQGQMRRSYIPPHLRGKMGDAAPPMAGPNGLNNSAWAGNNNYDARGPGGGGNWPAPGGPPGPGFEGQQGAGWGGPRPQGGFNPNAYRGNAGAGAGAGAGGGGGSFSNRGSGDGQWRDGKHIPGPANPRVERELFGTPDDPSKQHTGINFEKYDDIPVEASGDNVPEPVLTFSNPPLDNHLISNIQLARYNVPTPVQKYSIPIVMGGRDLMACAQTGSGKTGGFLFPILSQSFHTGPSPIPASAAGAYGRQRKAYPTALILAPTRELVSQIYDEARKFAYRSWVRPCVVYGGADIGSQLRQIERGCDLLVATPGRLVDLIERGRISLCNIKYLVLDEADRMLDMGFEPQIRRIVEGEDMPKVNDRQTLMFSATFPRDIQILARDFLKDYIFLSVGRVGSTSENITQKVEYVEDIDKRSVLLDILHTHAGGLTLIFVETKRMADSLSDFLINQNFPATSIHGDRTQRERERALEMFRNGRCPILVATAVAARGLDIPNVTHVINYDLPTDIDDYVHRIGRTGRAGNTGIATAFFNRGNRGVVRELLELLKEANQEVPAFLETIARESSFGGGRGGRGGGRGGGRGRTQTADYRKFGGSGGGGFGGGFGGAPASGGYGGGGYGGGGPPAGGYGGGGGAGYGGGGGGGGYGGGGYGNPGGAGGQSWW

SEQ ID NO: 65762 - DNA, 1911 bp, Schizosaccharomyces pombe
  CDS (1)..(1911)
atgagcgacaatgtacagcaacaagtagattcagttggttctgtgactgaaaaattgcaaaaaacaaacatcagcagacctaggaagtatattcctccttttgctagggataagccaagcgctggcgcagctccagctgttggcgacgatgagtctgtctcatctcgtggctcttctaggtctcaaactcctagtgagttttcctctaactatggaggtcgccgtgaatacaatcgtggcggtcattatggtggtggcgagggccgccaaaataattaccgtggcggtcgtgaaggtggttacagcaacggcggtggttatcgtaacaaccgtggatttggccaatggagagatggtcaacacgttatcggagcccgtaacactcttttggagcgtcaattatttggtgccgttgctgatggtaccaaagtttcaactggtattaacttcgaaaagtatgatgacatccctgttgaagtttccggtggagatatcgagcctgttaatgagttcacttctcctcctttgaactctcatcttcttcaaaacattaaactctctggctacactcagcccaccccagttcaaaagaactccattcctattgtcacatccggacgtgatttgatggcctgtgcccaaaccggttccggtaagactgctggtttcttattccctattctttctcttgctttcgataaaggacctgccgctgttcctgttgatcaggatgccggtatgggttatcgtcctcgcaaagcctatcctaccacccttattttggctcccactcgtgaattagtttgtcaaattcatgaggaatctcgtaaattctgttaccgttcttgggtgcgtccctgtgctgtttacggtggtgccgatattcgtgctcaaatccgccaaattgaccaaggttgcgacttgctttctgctactcctggtcgtttggttgatttaatcgatcgtggtcgtatttctttggccaacattaagtttttggtgttggatgaagctgatcgtatgctggatatgggtttcgagcctcaaattcgtcacattgtggaaggtgctgacatgacaagcgttgaagaacgtcaaactctcatgttttctgccactttcccccgtgatatccaacttttagctcgtgactttttaaaggattatgtcttcttgagtgttggtcgtgtcggttccacttcggagaatattactcaaaaggtcgtacacgttgaagattctgaaaagcgtagttacttgcttgatattcttcacaccttacctcctgagggtcttaccttgatctttgtagagactaaacgcatggctgacacacttaccgactatttgttgaatagcaacttccccgcaacaagcattcacggtgaccgtacccaacgtgagcgtgagcgcgctttggaattgttccgctctggccgtacttccattatggtcgctactgccgtcgccagtcgtggtttagatattcccaatgtcacgcatgttattaactacgatttacctactgacattgatgactatgtgcatagaattggtcgtaccggtcgtgctggtaacactggtcaagctgttgcgtttttcaaccgtaacaacaagggtatcgctaaggaattgattgagttgttgcaagaggccaatcaagagtgccccagctttttgatcgccatggctcgtgaaagcagctttggtggtaatggacgtggtggccgttacagtggtcgtggtggtcgtggaggcaatgcttatggtgctcgcgacttccgtcgccctactaatagtagtagtggttatagctctggccctagctactctggatacggtggctttgaaagccgtactcctcatcatggtaacacttacaacagtggtagtgctcaatcctggtggtaa

SEQ ID NO: 65763 - protein, 636 aa, Schizosaccharomyces pombe
MSDNVQQQVDSVGSVTEKLQKTNISRPRKYIPPFARDKPSAGAAPAVGDDESVSSRGSSRSQTPSEFSSNYGGRREYNRGGHYGGGEGRQNNYRGGREGGYSNGGGYRNNRGFGQWRDGQHVIGARNTLLERQLFGAVADGTKVSTGINFEKYDDIPVEVSGGDIEPVNEFTSPPLNSHLLQNIKLSGYTQPTPVQKNSIPIVTSGRDLMACAQTGSGKTAGFLFPILSLAFDKGPAAVPVDQDAGMGYRPRKAYPTTLILAPTRELVCQIHEESRKFCYRSWVRPCAVYGGADIRAQIRQIDQGCDLLSATPGRLVDLIDRGRISLANIKFLVLDEADRMLDMGFEPQIRHIVEGADMTSVEERQTLMFSATFPRDIQLLARDFLKDYVFLSVGRVGSTSENITQKVVHVEDSEKRSYLLDILHTLPPEGLTLIFVETKRMADTLTDYLLNSNFPATSIHGDRTQRERERALELFRSGRTSIMVATAVASRGLDIPNVTHVINYDLPTDIDDYVHRIGRTGRAGNTGQAVAFFNRNNKGIAKELIELLQEANQECPSFLIAMARESSFGGNGRGGRYSGRGGRGGNAYGARDFRRPTNSSSGYSSGPSYSGYGGFESRTPHHGNTYNSGSAQSWW

SEQ ID NO: 65764 - DNA, 1857 bp, Yarrowia lipolytica
  CDS (1)..(1857)
atgtctgaactcgaaaatggtgtcaagtcgttgaatctgaacaacgacacccccgctgctccccgaagcaagtacgtgcccccccaccgggccaaggctgccgccaccggtaacggaacctccaactccgccccctccaacgaccgacgagaggctggccgaaacctgtactcccagtactccaactccttccagaacaactcccgaggctcctacgggggaggctacggaggtggtcgaggcggtcgaggcggtcgatcttggggcaacgacggtggctaccgaggtggcttccgagacccctcccagggctctttcgtggatggtaagcatgtccccggcccccggaacgagcgaaccgaggttgaaatcttcggcgttgctaacgacgagcgattccagtccaccggtatcaactttgataactacgacgagattcccgtcgaggccaccggtaacgacgtgcccgagcccatcaacgctttcacctctcctcccctcgaggagcacctgctgactaacatcaagcttgctcgatacaacaagcccacccccgtccagaagtactctgtccccattgttgctgctggccgagacctgatggcctgtgcccagaccggttctggtaagaccggaggattcctcttccccgttctgtcccagtccttcttccacggtccctcccccaccccacagcccactggccctcgacacatgcacaagaaggcctaccccactgcccttgtgcttgctcccacccgagagcttgtgtcgcagatctacgacgaggccaagaagttcgcctaccgatcctgggtccgaccttgcgtcgtctacggtggtgccgacattggcgagcagatgcgaaacattgagcgaggctgcgacctccttgttgctgctcccggtcgactcgtcgatctgatcgaccgaggcaaggtctctctggagaacatcaagtaccttgtccttgatgaggccgaccgaatgctcgatatgggtttcgagccccaaatccgagccatcgtccagggctccggcatgcccgacgttaacgagcgacagaccctcatgttctccgccacctttccccggaacatccagatgctggcccgggacttcctcaaggactacatcttcctgtctgtcggccgtgtcggttccacctctgagaacatcacccagaaggtcgagtatgttgaggatggagacaagatctctgctctgctcgacattctctctgccgctggcaagggcctgaccctggtcttcgtcgagaccaagcgaggtgccgattacctctgtgatgttctgcagagcgaggacttccccgccacctccattcacggagaccgatctcagcgagaccgagagcgagctttggaaatgttccgagacggaactacccctattctggtcgccactgccgtcgctgctcgaggcctggatatccccaacgttacccacgttgttaactacgatctccccaccgacattgacgattacgtccaccgaatcggtcgaactggccgagccggaaacaccggtattgccaccgccttcttcaaccgaggcaacaagggtatcgtgcgagagctcatcgatatcctcaaggaggcccaccaggacgttcctcagttcctcgagtccactgcccgagaggcctcttacggaggccgaggcggaggccgtggccgaggtggcttcggtggaggccgatctcgagctacccaggatttccgaaagcagggtggcggctttggctccaacgaccgattcggaggctcctccggcggctcttcttacggtggcggttcctcttacggtaaccagggtggtaacaacaactggtggtaa

SEQ ID NO: 65765 - protein, 618 aa, Yarrowia lipolytica
MSELENGVKSLNLNNDTPAAPRSKYVPPHRAKAAATGNGTSNSAPSNDRREAGRNLYSQYSNSFQNNSRGSYGGGYGGGRGGRGGRSWGNDGGYRGGFRDPSQGSFVDGKHVPGPRNERTEVEIFGVANDERFQSTGINFDNYDEIPVEATGNDVPEPINAFTSPPLEEHLLTNIKLARYNKPTPVQKYSVPIVAAGRDLMACAQTGSGKTGGFLFPVLSQSFFHGPSPTPQPTGPRHMHKKAYPTALVLAPTRELVSQIYDEAKKFAYRSWVRPCVVYGGADIGEQMRNIERGCDLLVAAPGRLVDLIDRGKVSLENIKYLVLDEADRMLDMGFEPQIRAIVQGSGMPDVNERQTLMFSATFPRNIQMLARDFLKDYIFLSVGRVGSTSENITQKVEYVEDGDKISALLDILSAAGKGLTLVFVETKRGADYLCDVLQSEDFPATSIHGDRSQRDRERALEMFRDGTTPILVATAVAARGLDIPNVTHVVNYDLPTDIDDYVHRIGRTGRAGNTGIATAFFNRGNKGIVRELIDILKEAHQDVPQFLESTAREASYGGRGGGRGRGGFGGGRSRATQDFRKQGGGFGSNDRFGGSSGGSSYGGGSSYGNQGGNNNWW

SEQ ID NO: 65766 - DNA, 1815 bp, Saccharomyces cerevisiae
  CDS (1)..(1815)
atggctgaactgagcgaacaagtgcaaaatttaagcatcaacgacaacaacgagaatggttatgttcctcctcacttaagaggaaaaccaagaagtgccagaaataacagtagcaactacaataacaacaacggcggctacaacggtggccgtggcggtggcagcttctttagcaacaaccgtcgtggtggttacggcaacggtggtttcttcggtggaaacaacggtggcagcagatctaacggccgttctggtggtagatggatcgatggcaaacatgtcccagctccaagaaacgaaaaggccgagatcgccatatttggtgtccccgaggatccaaatttccaatcttctggtattaacttcgataactacgatgatattccagtggacgcctctggtaaggatgttcctgaaccaatcacagaatttacctcacctccattggacggattgttattggaaaacatcaaattggcccgtttcaccaagccaacacctgtgcaaaaatactccgtccctatcgttgccaacggcagagatttgatggcctgtgcgcagaccggttctggtaagactggtgggtttttattcccagtgttgtccgaatcatttaagactggaccatctcctcaaccagagtctcaaggctccttttaccaaagaaaggcctacccaactgctgtcattatggctccaactagagagttggccacccaaattttcgatgaagccaagaaatttacttatagatcctgggtcaaggcctgcgtcgtctacggtggttctccaattggtaaccaactaagagaaattgaacgtggttgcgatcttttagtcgctactccaggtcgtttgaatgacttgttggaacgtggtaaaatttctttggccaacgtcaagtatttggttctagatgaagctgatagaatgttggatatgggtttcgaacctcaaattagacatattgtcgaagactgtgatatgactcctgttggtgaaagacaaactctgatgttctcagctacttttcccgctgatatccaacatttggcccgtgatttcttaagtgactacatctttttgtctgttggtagagtcggttctacttcagaaaacattactcaaaaagtcttatacgttgaaaatcaagataagaagtcagccttattggatctattgtctgcatccactgacggtttgactttgatctttgtcgaaactaagagaatggcagatcaattgaccgatttcctgatcatgcaaaactttagagctaccgccattcatggtgaccgtacccaatctgagagagaacgtgccttggccgccttcagatctggtgccgctactttattggttgccacagctgtcgcagctagaggtctagatattccaaacgtcacccacgttatcaactacgatttaccaagtgatgtcgatgattacgtccatagaattggtagaactggtcgtgccggtaacaccggtcttgccactgcctttttcaacagtgaaaacagtaacattgttaaaggtttgcatgaaattttgactgaagctaaccaagaagtcccatcattcttgaaggacgctatgatgagtgctccaggtagcagaagcaacagccgtagaggcggtttcggtcgcaacaacaacagagattaccgtaaggccggaggcgctagcgcaggcggctggggctcttcaagaagcagagataactctttcagaggcggtagtggctggggtagcgattccaagtcttctggctggggtaacagcggtggttcaaacaactcttcttggtggtga

SEQ ID NO: 65767 - protein, 604 aa, Saccharomyces cerevisiae
MAELSEQVQNLSINDNNENGYVPPHLRGKPRSARNNSSNYNNNNGGYNGGRGGGSFFSNNRRGGYGNGGFFGGNNGGSRSNGRSGGRWIDGKHVPAPRNEKAEIAIFGVPEDPNFQSSGINFDNYDDIPVDASGKDVPEPITEFTSPPLDGLLLENIKLARFTKPTPVQKYSVPIVANGRDLMACAQTGSGKTGGFLFPVLSESFKTGPSPQPESQGSFYQRKAYPTAVIMAPTRELATQIFDEAKKFTYRSWVKACVVYGGSPIGNQLREIERGCDLLVATPGRLNDLLERGKISLANVKYLVLDEADRMLDMGFEPQIRHIVEDCDMTPVGERQTLMFSATFPADIQHLARDFLSDYIFLSVGRVGSTSENITQKVLYVENQDKKSALLDLLSASTDGLTLIFVETKRMADQLTDFLIMQNFRATAIHGDRTQSERERALAAFRSGAATLLVATAVAARGLDIPNVTHVINYDLPSDVDDYVHRIGRTGRAGNTGLATAFFNSENSNIVKGLHEILTEANQEVPSFLKDAMMSAPGSRSNSRRGGFGRNNNRDYRKAGGASAGGWGSSRSRDNSFRGGSGWGSDSKSSGWGNSGGSNNSSWW

SEQ ID NO: 65768 - DNA, 1524 bp, Aspergillus fumigatus
  CDS (1)..(1524)
atggcagacgctcttgcaaatcagctcaacaacacaaacttaggggaagcaaactcggaattgaggtggaaagaacaattgaatatgcctgcgaaagacgcaagaccgcagactgaggatgtgactgccactaaaggccttgaatttgaagacttttatatcaaacgagagcttatgatgggcatatttgaggctgggtttgagaaaccctcaccgattcaagaagagacaataccagtcgctcttacgggccgcgatattctggctcgcgcaaagaacggcaccggcaagacggcagctttcgttatccccactctagaacgcatcaatcctaagagcacaaagactcaagcgctcatccttgtaccaacaagagagcttgcgctccaaacatcccaagtttgtaagactcttggaaagcatctgggaatcaacgtcatggtcactaccggagggacgggtttgatggatgatatcatcagactgaacgacgctgtgcacattctcgtggggactccaggaagagtattggacttggccagcaagggcgttgcggatctttcggagtgtcctaccttcgtcatggatgaagctgacaagttgctgtcccccgaatttacacccgtcattgagcagctcttgtcatttcacccaaaggacagacaggtgatgctcttcagcgccacctttccgttaattgtcaaatcattcaaggataaacatatgcgcaatccttatgagatcaatctgatggatgaacttactctacgaggaatcacccaatactacgcttttgtggaggaaaaacagaaggtccactgcctgaacaccctattctcaaagcttcaaataaaccagtcgatcattttctgcaactccaccaaccgagttgaacttcttgcgaagaaaattacagagttgggctactcttgcttctactcgcacgctcgaatgctccagcaacacagaaatagagttttccacgacttccgcaatggtgtgtgtcgcaacctcgtctgctccgacttgctcactcgaggtatcgatatccaagcagttaatgttgtcatcaatttcgactttccaaagaatgcggaaacataccttcacaggatcggtcgatctggtcgtttcggacacttgggtcttgccatcaatctcataaactgggatgaccgcttcaatttgtacaagattgagcaggagctgggaacggaaatacagcccattccccagaatattgacaagaagctatatgtctatgattctccagagacaattcctcgtcctatctccaatccatcacagcaacgccaaataactaatactgcggcaaatacgagcacgacagaccgccgccatcataatcctccaaatagtgggcaataccagttcaatcgaggccggggttcgtaccgtggacgggggcagggtcagcgccggagcgcacaaatcgaatcaaacaagttcggtcaccctcagggccaacacagtggcaagacttcaacagcgccggtgtcataa

SEQ ID NO: 65769 - protein, 507 aa, Aspergillus fumigatus
MADALANQLNNTNLGEANSELRWKEQLNMPAKDARPQTEDVTATKGLEFEDFYIKRELMMGIFEAGFEKPSPIQEETIPVALTGRDILARAKNGTGKTAAFVIPTLERINPKSTKTQALILVPTRELALQTSQVCKTLGKHLGINVMVTTGGTGLMDDIIRLNDAVHILVGTPGRVLDLASKGVADLSECPTFVMDEADKLLSPEFTPVIEQLLSFHPKDRQVMLFSATFPLIVKSFKDKHMRNPYEINLMDELTLRGITQYYAFVEEKQKVHCLNTLFSKLQINQSIIFCNSTNRVELLAKKITELGYSCFYSHARMLQQHRNRVFHDFRNGVCRNLVCSDLLTRGIDIQAVNVVINFDFPKNAETYLHRIGRSGRFGHLGLAINLINWDDRFNLYKIEQELGTEIQPIPQNIDKKLYVYDSPETIPRPISNPSQQRQITNTAANTSTTDRRHHNPPNSGQYQFNRGRGSYRGRGQGQRRSAQIESNKFGHPQGQHSGKTSTAPVS

SEQ ID NO: 65770 - DNA, 1518 bp, Aspergillus niger
  CDS (1)..(1518)
atgaccgacgccttagcctctcagctgaataacactactttaggggatgcgagctcagacgcgaagtggaaggagcaattgaatgtccctgccaaagatgcaagaccacaaactgaggatgtgactgctacgaaaggcttggaattcgaagacttctatatcaaacgcgaactgatgatgggtatattcgaagctgggttcgaaaagccttctccaattcaggaagagacgataccagttgctcttacaggcagggatatcttggcgcgagccaagaatggcacaggaaaaacagcagctttcgttatccctaccttggagcgcatcaatcctaaaagcaccaagacacaagcccttatccttgttcctacgagagagctggcgctccaaacgtcacatgtctgcaaaaccttgggaaagcatcttggtatcaatgtcatggtcaccacaggaggtactggcttgatggatgacatcattcggctgaacgacgcagtccatattctcgttgggaccccaggaagagtcctggacctggccagcaaaggggttgctgacctttccgagtgtcctacctttgttatggacgaggctgataaattgctgtcacctgaattcacgccagtcatcgagcaactactatcattccatcctaaagaccgccaggttatgcttttcagcgccacctttccacttattgtgaagtcattcaaggacaaacacatgcgcaatccttacgagatcaatctcatggatgagctcactctccgcggtattacgcagtattatgcttttgttgaggaaaagcagaaggtccactgcttgaacacactcttctccaagttacaaatcaatcaatctataatcttctgcaattctactaaccgagtcgagttgctcgcgaagaagataacggaattgggttattcttgcttctattcccatgccagaatgcttcagcagcatcgcaaccgggtgttccacgatttcaggaatggcgtttgccggaaccttgtttgctcggatttgttaactcgaggtattgatattcaagccgtcaatgttgtcataaattttgattttccgaagaacgccgagacttatctgcaccgaattggtcgctctggtcgctttggacatcttggtcttgctatcaaccttatcaattgggaagaccggttcaatttatataagattgagcaggaacttggaactgagatccagccgattccgcaaaacatcgacaagaagctttatgtctacgactcaccggacacaattccacgccctattgccaacccatcccagcctcagattactgctcaagccgcgaatgcaaacattggtgagcgtcgtcacaatcaccatatgaatggcgggcagtaccagtacggtaggggccggggctcttatcgcggaggtcgtggacaaggccagcgtcgcaatatgcagaacgaaaccaagtttggcactcaaggacagtcaagcggcaagtcccacccgacgcaagtgtcatag

SEQ ID NO: 65771 - protein, 505 aa, Aspergillus niger
MTDALASQLNNTTLGDASSDAKWKEQLNVPAKDARPQTEDVTATKGLEFEDFYIKRELMMGIFEAGFEKPSPIQEETIPVALTGRDILARAKNGTGKTAAFVIPTLERINPKSTKTQALILVPTRELALQTSHVCKTLGKHLGINVMVTTGGTGLMDDIIRLNDAVHILVGTPGRVLDLASKGVADLSECPTFVMDEADKLLSPEFTPVIEQLLSFHPKDRQVMLFSATFPLIVKSFKDKHMRNPYEINLMDELTLRGITQYYAFVEEKQKVHCLNTLFSKLQINQSIIFCNSTNRVELLAKKITELGYSCFYSHARMLQQHRNRVFHDFRNGVCRNLVCSDLLTRGIDIQAVNVVINFDFPKNAETYLHRIGRSGRFGHLGLAINLINWEDRFNLYKIEQELGTEIQPIPQNIDKKLYVYDSPDTIPRPIANPSQPQITAQAANANIGERRHNHHMNGGQYQYGRGRGSYRGGRGQGQRRNMQNETKFGTQGQSSGKSHPTQVS

SEQ ID NO: 65772 - DNA, 1536 bp, Aspergillus oryzae
  CDS (1)..(1536)
atggccgaagctcttgcctcacaacttaacaacacaacactaggggaagcaagctcagacacaaggtggaaggaccaactaaaagcccctgcaaaagatgcacggccacagaccgaggacgtgacagccactaaaggccttgagtttgaagatttctatattaaacgcgaacttatgatgggcatcttcgaagctggtttcgagaagccctcccctatccaagaagaaacaataccagttgctcttactggcagggatattctggcccgagcaaagaatggtaccggaaagacagcggccttcgtcatccccacattagaacgcataaatcctaaaagcaccaaaacgcaagcactcatccttgttccaaccagagagcttgcgctccaaacatctcatgtttgtaaaactctcgggaaacatctggggatcaacgtaatggtcaccactggaggaactgggttgatggatgacattatcaggttgaacgacgccgtccatatccttgtcggaactccaggccgtgttctagatctggctagtaagggcgttgctgacctttctgaatgtccaacattcgtcatggatgaagccgacaaattactgtctcctgaatttactcctgtaattgagcagctattgtcatttcatcccaaagaccgtcaggtcatgctcttcagtgcgacttttccattgatagtgaagtcattcaaggataagcacatgcgcaatccttacgagatcaaccttatggacgaactcaccctccgaggaatcactcagtattatgcttttgtggaagaaaagcaaaaagtccattgccttaacactcttttttccaaacttcaaattaatcaatcaatcatcttctgcaattcaacaaatcgcgttgagcttctcgcaaagaagatcacagaattaggctattcgtgcttttactcacatgcaaggatgctacaacaacatcggaatcgagtcttccatgatttccggaacggtgtatgccgcaaccttgtttgctctgatttgctaactcgaggtatcgatattcaagcggtgaatgtcgtgatcaactttgactttcccaagaacgctgaaacctacctccaccgaataggccgatctggtcgttttggtcatctgggtctagcaatcaatcttatcaactgggatgatcgtttcaatctatataagattgagcaagagttgggaaccgaaatacaacctatccctcaaaatatcgacaagaagttatacgtatatgaatcgccggaaaccattccacgcccaatcgcgaatgcatcacaagcacagcttgcaacgagtgggaatcaaacccagaacatgggagaacgccgccacaacaaccactcgaatggcggacattatcaattcggtcgaggtcgaggttcatatcgtggaggacgaagccaaggtcagcgccgcaatatgcagaatgagatgaataaattcggtacttcccaaaaccaacagcagagtggcaagagtcagcctgcgcaggtgtcgccaaattga

SEQ ID NO: 65773 - protein, 511 aa, Aspergillus oryzae
MAEALASQLNNTTLGEASSDTRWKDQLKAPAKDARPQTEDVTATKGLEFEDFYIKRELMMGIFEAGFEKPSPIQEETIPVALTGRDILARAKNGTGKTAAFVIPTLERINPKSTKTQALILVPTRELALQTSHVCKTLGKHLGINVMVTTGGTGLMDDIIRLNDAVHILVGTPGRVLDLASKGVADLSECPTFVMDEADKLLSPEFTPVIEQLLSFHPKDRQVMLFSATFPLIVKSFKDKHMRNPYEINLMDELTLRGITQYYAFVEEKQKVHCLNTLFSKLQINQSIIFCNSTNRVELLAKKITELGYSCFYSHARMLQQHRNRVFHDFRNGVCRNLVCSDLLTRGIDIQAVNVVINFDFPKNAETYLHRIGRSGRFGHLGLAINLINWDDRFNLYKIEQELGTEIQPIPQNIDKKLYVYESPETIPRPIANASQAQLATSGNQTQNMGERRHNNHSNGGHYQFGRGRGSYRGGRSQGQRRNMQNEMNKFGTSQNQQQSGKSQPAQVSPN

SEQ ID NO: 65774 - DNA, 1524 bp, Candida glabrata
  CDS (1)..(1524)
atgagtgaagataattcttggaagacgcaacttaaccttcctaagaaggataccaggcctcagacagacgatgttcttaatacaaagggtaattcttttgaggatttctacttgaagagagagcttctgatgggtatttttgaggctggttttgagaagccatctcctattcaggaggaggccatcccggttgccatcaccggtagagatatcttggccagagccaagaacggtacgggtaagaccgccgcatttgtcattcctacactagagaaaatcaagcctaagctgaataaaatccaggccctgatcatggttcccactagagaactggcactacagacatcgcaagttataagaaccctgggcagacactgtggtgtctcctgtatggtcacaacgggtgggactaacctgagagatgacatcttaagattaaacgaaactgtgcacgtactagtcggtacaccaggtagagtactagatctggcatctagaaaagtggcagacctttcagagtgttccctgttcgtcatggatgaagcagacaaaatgctttcacgcgatttcaagaccatcatcgagcaagtattaacattcctaccaaaggcccaccaatctttactattcagtgcaactttccctctgacagtcaaggagttcatggtgaaacacctacacaagccttacgaaattaacctgatggaggaattgacactaaagggtattacgcagtactacgcctttgtagaagaaagacaaaaacttcactgtctgaacaccctattctctaagcttcaaattaatcaagctatcatcttctgtaactcaactaaccgtgtggagcttttggctaagaagattacggatcttggctactcttgttactattcccatgctagaatgaagcaacaagacagaaacaaagtcttccacgacttccgccaaggtaaagttcgtacccttgtttgttccgatttgttgactcgtggtattgatattcaagccgttaacgttgtcattaactttgatttcccaaaaactgcagaaacgtacttgcatcgtatcggtagatccggtagatttggtcacttgggtctagctattaatttaatcaactggaatgaccgtttcaatctgtacaagattgaacaagaactgggtactgaaatagctgccattccagccacaattgacaaatccctgtatgttgcagaagatgatactgccgtccctgttcctgtaccaattgaagacccacatattgtgcatcaaagaagaatgcaagaacaacagcagcagcaacaacaacagcaaggacaacaaggacaacaacaaggttaccctggccaacaggcgtttatccctcctcaacaaggtcaaccacaattcatgcctgttcctcaacagtacatgcagatgaatcagcaacaaggcatgccaccaaaccaacagcagccaccagcaatgggttatcctccacaacaattaccaactggctatgttgcacaacaaagatattag

SEQ ID NO: 65775 - protein, 507 aa, Candida glabrata
MSEDNSWKTQLNLPKKDTRPQTDDVLNTKGNSFEDFYLKRELLMGIFEAGFEKPSPIQEEAIPVAITGRDILARAKNGTGKTAAFVIPTLEKIKPKLNKIQALIMVPTRELALQTSQVIRTLGRHCGVSCMVTTGGTNLRDDILRLNETVHVLVGTPGRVLDLASRKVADLSECSLFVMDEADKMLSRDFKTIIEQVLTFLPKAHQSLLFSATFPLTVKEFMVKHLHKPYEINLMEELTLKGITQYYAFVEERQKLHCLNTLFSKLQINQAIIFCNSTNRVELLAKKITDLGYSCYYSHARMKQQDRNKVFHDFRQGKVRTLVCSDLLTRGIDIQAVNVVINFDFPKTAETYLHRIGRSGRFGHLGLAINLINWNDRFNLYKIEQELGTEIAAIPATIDKSLYVAEDDTAVPVPVPIEDPHIVHQRRMQEQQQQQQQQQGQQGQQQGYPGQQAFIPPQQGQPQFMPVPQQYMQMNQQQGMPPNQQQPPAMGYPPQQLPTGYVAQQRY

SEQ ID NO: 65776 - DNA, 1539 bp, Coccidioides immitis
  CDS (1)..(1539)
atggcagaagcattggcttcgcagctgaacaaggccaagttaggggacaatggcgcagaaaccaagtggaaggaacagcttaaacttcccccaaaagatacaaggacacaaacagaggatgtcacagccacaaagggtttggagtttgaggatttttatatcaaacgagaattgatgatgggaatatttgaggctggctttgagaaaccgtctcctatccaagaagaaaccatacccgttgcacttaccggtcgtgatatactcgctcgggcaaaaaacggaactgggaaaacagcggcctttgtcataccaactttagaacgcaccaatcccaaaatctcgaagacgcaggccctcattctcgtacctacaagagagttagcgcttcaaacgtcacaagtgtgcaaaaccttaggcaagcatctcggtatcaatgtgatggtaaccactgggggtactggcctacaagacgatattattcgattgagtgatactgtccatatcatagttggtacacccggaagaattctcgacctcgcaagcaagggtgtggcagatttgtctgaatgcactacatttgtaatggatgaggccgataagcttctgtcaccggaatttacacctgttattgaacaactactgtcattccatcccaaggaccgccaagttatgcttttcagtgctacctttccaatgattgtgaaatctttcaaggacaagcatatgcgaaatccgtacgagatcaatctcatggatgaactcacattacgcggtatcacacaatattatgcttttgttgaagaaaggcagaaggtccattgtctaaacactctattttccaaattgcaaatcaatcagtccattattttttgcaattcaacaaaccgagtggagttgcttgcaaagaaaatcaccgagcttgggtactcctgcttttattctcatgcgagaatgcttcaacaaaatcgaaaccgtgttttccatgactttcggaacggtgtttgccgtaatcttgtctgttcggacttactcactcgaggaattgatatccaagccgttaacgtcgtcataaactttgattttccgaaaaacgctgaaacgtatcttcatcgaattggccgttccggtcgatttggccatctaggcttagcaatcaatcttatcaattgggatgatcggtacaacttatacaaaattgaacaggagcttggaaccgagattcaaccgataccgccatcaattgataaaaaactttacgtctatgatacccccgaaacaatcccacgccctatagcaaatgcgtctacagaacgtaacccacctgcacaacttgctcagagttctgacaatcaaaaccatcgccaagctcaccatataagtggggggcacgggcaacaaacagcaaatcgagggcattcactccggggatcctacaggggtggtcgtgctcagggtcaccgcggtggacatccagagaacaatcgtacgaacccaatgtcttctcgctcgaatatgccaacttctactactgcatcctaa

SEQ ID NO: 65777 - protein, 512 aa, Coccidioides immitis
MAEALASQLNKAKLGDNGAETKWKEQLKLPPKDTRTQTEDVTATKGLEFEDFYIKRELMMGIFEAGFEKPSPIQEETIPVALTGRDILARAKNGTGKTAAFVIPTLERTNPKISKTQALILVPTRELALQTSQVCKTLGKHLGINVMVTTGGTGLQDDIIRLSDTVHIIVGTPGRILDLASKGVADLSECTTFVMDEADKLLSPEFTPVIEQLLSFHPKDRQVMLFSATFPMIVKSFKDKHMRNPYEINLMDELTLRGITQYYAFVEERQKVHCLNTLFSKLQINQSIIFCNSTNRVELLAKKITELGYSCFYSHARMLQQNRNRVFHDFRNGVCRNLVCSDLLTRGIDIQAVNVVINFDFPKNAETYLHRIGRSGRFGHLGLAINLINWDDRYNLYKIEQELGTEIQPIPPSIDKKLYVYDTPETIPRPIANASTERNPPAQLAQSSDNQNHRQAHHISGGHGQQTANRGHSLRGSYRGGRAQGHRGGHPENNRTNPMSSRSNMPTSTTAS

SEQ ID NO: 65778 - DNA, 1851 bp, Cryptococcus neoformans var
  CDS (1)..(1851)
atggcttcttcctcaacgttagcgaacgacgactggaaacagggccttgctgcccctcctaaagaccttcgtccccaaactgaggacgttaccgctactcaaggatctcgtttcgaagattttggtttacgccgagaacttttgatgggtatctatactgctgggtttgaaaggcctagtcctatccaagagcaggctattcctatggcccttacaggacgagatatcctcgcccgagcgaagaacggtacaggaaagactgcctcttttattatccctacccttaaccgaatcaacacttccttatctcatatccaagcacttatcctcgttcccacccgagaactcgcacttcaaacatctcaagtctgtaaaacccttggcgctcacatccctaacctccaagtcatgattacaaccggtggtaccacattacgtgacgatatccttcgtcttcaacaacctgtccacattctcgtcggtacaccgggtcgtattttagatttgggaagcaagggaattgcgggtttgaacaagtgtggtatctttgttatggatgaagcagacaagcttctcagtgaagatttcatgcccgtcattgagcagactttggccctgtgtccacaagagagacaggttatgctgttttctgctactttcccatggaccgtcaaggaattcaaggaccaacacatggttcaaccatacgaaatcaacctcatggacgaacttactcttaaaggtgtcactcaatattatgcctatgttgaagaatctcagaaagtccattgcctcaacaccctcttctccaagctccaaattaaccaatctatcatcttttgtaactcgaccaaccgtgtcgagctcctcgccaagaaggtcactgaacttggctactcttgtttctactcccacgcgaagatgcaacaagcccatcgaaatcgagttttccacgacttccgtaatggcatgacgcggaacttggtctgttccgatttgttgacaagaggtattgatatccaggccgtaaacgttgtcatcaactttgacttcccaaggactgcggagtcatatcttcataggattggtcgatccggtcgttttggtcacttgggtcttgccatttctctcctcactcttgaagatagacataatctgtaccgtatcgaatccgaacttggcacagaaattgcccctattcccgccgtcatcgatcctgtcctctatgtcgctcccgccatggtagaggaagagcgagaatcaccgccccctaagcccgctgccatcgctgctcctcccgcgcagcaacagcctcaacaacgacaacgacaacaccctcctgtgccttcccaccaagttgctcatcatagccctgctgctgcgcccatccaacaacaacagcaacagcagcaacaacaacaacaacctcagtaccaactggcatatggccagggcccaccccagcctcaagttcctttccagcaggctaattcttctcccgcccccgctcctttaccttcttatccccaacaagctccaacccaggcccaaggacccgcgcaaatgcaatctccaccttccgagcctgctactcagccccaggcctctgctcaaatccccgttcaaggccaaactcctccaattcagccccgagctcagcaacaaggccagcaacaacccagtcaaccaggtcaagcagaaggtcagagtcaacctaacagacggccgaacactggtggctttaggggtaacggacggggtcaaggacatcgaggacgaggtagggggaggggcggacagcctggtcatcctggtgccggtgcaagccagagccaacaggctcaagcctaa

SEQ ID NO: 65779 - protein, 616 aa, Cryptococcus neoformans var
MASSSTLANDDWKQGLAAPPKDLRPQTEDVTATQGSRFEDFGLRRELLMGIYTAGFERPSPIQEQAIPMALTGRDILARAKNGTGKTASFIIPTLNRINTSLSHIQALILVPTRELALQTSQVCKTLGAHIPNLQVMITTGGTTLRDDILRLQQPVHILVGTPGRILDLGSKGIAGLNKCGIFVMDEADKLLSEDFMPVIEQTLALCPQERQVMLFSATFPWTVKEFKDQHMVQPYEINLMDELTLKGVTQYYAYVEESQKVHCLNTLFSKLQINQSIIFCNSTNRVELLAKKVTELGYSCFYSHAKMQQAHRNRVFHDFRNGMTRNLVCSDLLTRGIDIQAVNVVINFDFPRTAESYLHRIGRSGRFGHLGLAISLLTLEDRHNLYRIESELGTEIAPIPAVIDPVLYVAPAMVEEERESPPPKPAAIAAPPAQQQPQQRQRQHPPVPSHQVAHHSPAAAPIQQQQQQQQQQQQPQYQLAYGQGPPQPQVPFQQANSSPAPAPLPSYPQQAPTQAQGPAQMQSPPSEPATQPQASAQIPVQGQTPPIQPRAQQQGQQQPSQPGQAEGQSQPNRRPNTGGFRGNGRGQGHRGRGRGRGGQPGHPGAGASQSQQAQA

SEQ ID NO: 65780 - DNA, 1470 bp, Encephalitozoon cuniculi
  CDS (1)..(1470)
atgcccatgaaaagcatgatcgaaggcgtgaagaaggatgggaaaaaagggagaaggaatgatcggaaagactcttgggacaaggatggcttcacacagagagggcgtgcagaaaagaagcctgttgatctagctaagatacaaggaattcagggtcagataggaataggaaaaaacaagggagatggcaatcgtctcgattgtgggatggacaaggaggaggcagaagatggcaaggacatcatgcgctgcaggcacctttctccgggaggaggtggcatgaagaggttgctgtcggaggatgtaagagaaacagagggcataggatgggagtcacttggactcgggccggtgctgctgaaaagaatacgcgatattggctatgactttccatcgcctgtccaggtggcatcgattccacatgtcctaggaggaaagaacctgttggtcagatcgaagaatggaaccggaaagacagcatcttacatagttcccatgctcaacatgataaattcctcagagctgagcatccagggaatcatattggtacccatcagagagcttgctctacagatatcaagaaatgtcaaaagaatgtctgagggcactggggtgatatctgcgcctgtggttggagggactagcatgcaggacgacatcataagggtgtccaatggtgttcacgtgatggtgggaacgccaggaagaattgtggacctggttgagaagagggttgggacgctttcgaaaagagtgatcttggtgtttgatgaggccgacaagctgcttgatgtgacatttggagagactgtcacaaagcttctagatctgcttccaagggaaaagcagatgctactgtactctgcaacctttccttattttgttaccgggtttatcagaagatacatgaagaacccgctatgcattaatctgatgaaggagctcgctcccgtaggagttaagcagttctatacatatgtgaagccctctgaaaagcttctatgcttgaagtcccttctcttgagactaagcatcaaccagtgtgtgatcttctgcaatagcatcaagactgtggagcttcttgccatgaaaattaccgagatggggcttccttcgtacttcatccactcgaagatggctcaggaagacaggaatatagtgtttcacaacttcctgaaagggaagtgtaagattctggttgcaactgacctcatcacacgtggagtggatgctccaaacacaaactacgtaatcaacttcgacatttctaagtctcccgagtcctatcttcacaggattggacgggctggaaggtttggagcccctggagttgcaataagtttggttaccacggaagaaaaggaaatgctgatggacatagaggcaaagcttgggaaagaaatatctcctctttcggataagggtctgagccgcttacatgaaagtaacatagacaggaatcaaggataa

SEQ ID NO: 65781 - protein, 489 aa, Encephalitozoon cuniculi
MPMKSMIEGVKKDGKKGRRNDRKDSWDKDGFTQRGRAEKKPVDLAKIQGIQGQIGIGKNKGDGNRLDCGMDKEEAEDGKDIMRCRHLSPGGGGMKRLLSEDVRETEGIGWESLGLGPVLLKRIRDIGYDFPSPVQVASIPHVLGGKNLLVRSKNGTGKTASYIVPMLNMINSSELSIQGIILVPIRELALQISRNVKRMSEGTGVISAPVVGGTSMQDDIIRVSNGVHVMVGTPGRIVDLVEKRVGTLSKRVILVFDEADKLLDVTFGETVTKLLDLLPREKQMLLYSATFPYFVTGFIRRYMKNPLCINLMKELAPVGVKQFYTYVKPSEKLLCLKSLLLRLSINQCVIFCNSIKTVELLAMKITEMGLPSYFIHSKMAQEDRNIVFHNFLKGKCKILVATDLITRGVDAPNTNYVINFDISKSPESYLHRIGRAGRFGAPGVAISLVTTEEKEMLMDIEAKLGKEISPLSDKGLSRLHESNIDRNQG

SEQ ID NO: 65782 - DNA, 1545 bp, Kluyveromyces lactis
  CDS (1)..(1545)
atgggcagcgatacaagcgaaagtaataacgactggaagacccagttgaatattcctaaaaaggatacgaggcctcagactgatgatgtgttgaacacgaagggtcgttcgtttgaagatttctatttgaaaagagaacttttgatgggtatatttgaagcagggtttgagaagccttccccaatccaagaagaagctattcccgttgccattgccgggaaggatatattagcgcgtgccaagaacggtactggtaagacggcagcgttcgttataccaactttggaaaaagtgaagcccaagttgaacaaaattcaagcattgattatggttcctacaagagagttggctttgcaaacatcacaagtggtgcgcacgctagggaaacactgtggtatctcttgtatggttaccactggtggtacgaatttgagagatgacatcatgagattaaatgaacctgtacacattttggtgggtacgcccggtagagtgctagatttggcatcaagaagagtgacagatttgagcgaatgtcatttgttcattatggatgaagcggataagatgttaagtcgtgactttaaagtgttggcggaacaaatacttgggttcttaccagaacgtcgtcaactgcttttgttcagtgcgactttcccagtcaccgtgaaagagttcatggtgaagcatttgaaaaaccctcatgagattaatttgatggatgaattgacactaaagggtatatcacaattttatgcattcgtggaagaaaaacaaaaacttcattgcttgaacactttgttcagtaaattgcaaatcaaccaagcaattatcttttgtaattctactaaccgtgtcgaacttttggctaaaaaaattactgaattaggattttcttgttactactcacatgctagaatgaaacaatccgaaagaaacaaagtcttccatgaattccgccaaggtaaagttcgtacgttggtttgttccgatttgttaactcgtggtatcgatattcaagccgttaatgtggtcattaacttcgatttcccaaagactgccgaaacttatttgcatcgtattggtagatctggtaggttcggtcacttgggtttggctatcaacttgattaactggaacgatagattcaacttgtacaagatcgagcaagaattaaacaccgaaattgctcctatcccatctcaaattgataaatccttgtacgttgcggaagatagttccgcagtcccaatcccattccctttggaatccctgccaatcactgcaaatgctccccaacaacctgcaaatgctgaaccgttgcctcctcaacaaactcaagtgcaattccatgctcctcctcagcagcaacagcaacaacaacagcaacaacaacaacaacaatatcaacaattcccaaaccaacaacaacagcaatatggtcagcctctaatgccgcaaaactaccaacaacaggcttatccacctcaacctttcccatcaaaaggcttcccacaacaacaatacactcaagctcctcaataa

SEQ ID NO: 65783 - protein, 514 aa, Kluyveromyces lactis
MGSDTSESNNDWKTQLNIPKKDTRPQTDDVLNTKGRSFEDFYLKRELLMGIFEAGFEKPSPIQEEAIPVAIAGKDILARAKNGTGKTAAFVIPTLEKVKPKLNKIQALIMVPTRELALQTSQVVRTLGKHCGISCMVTTGGTNLRDDIMRLNEPVHILVGTPGRVLDLASRRVTDLSECHLFIMDEADKMLSRDFKVLAEQILGFLPERRQLLLFSATFPVTVKEFMVKHLKNPHEINLMDELTLKGISQFYAFVEEKQKLHCLNTLFSKLQINQAIIFCNSTNRVELLAKKITELGFSCYYSHARMKQSERNKVFHEFRQGKVRTLVCSDLLTRGIDIQAVNVVINFDFPKTAETYLHRIGRSGRFGHLGLAINLINWNDRFNLYKIEQELNTEIAPIPSQIDKSLYVAEDSSAVPIPFPLESLPITANAPQQPANAEPLPPQQTQVQFHAPPQQQQQQQQQQQQQQYQQFPNQQQQQYGQPLMPQNYQQQAYPPQPFPSKGFPQQQYTQAPQ

SEQ ID NO: 65784 - DNA, 1575 bp, Magnaporthe grisea
  CDS (1)..(1575)
atggccgacgttgacgccaccaacaatgaagactggaggaggaatctgaacattcccgccagggacaacaggcaacaaactgaggatgtgacaaacacgaaaggcctagaatttgagaactttggcctgaaacgagatctccttatgggcatatttgaggcaggattcgagaagccttcacccatccaggaggagagcatccccgtcgccctcaccggacgcgacatcctcgcccgcgccaagaacggtaccggaaagacagcagcctttgtggtaccagccctcgagacgatcaaccccaaggtatccaagatccaatgcctcatcctagtaccaacacgagagctggccatgcagacctcgcaagtctgcaagactctgggcaagcacctaggcatcaacgttatggttacaactggtggtacgactttgagggacgacatcttgcgtctgcaagaccctgtacacattgtagtcggtacgccgggtcgtatcctcgaccttgcgggtaaaaatgtcgccgacctcagcgaatgcccaatgttcatcatggacgaagccgacaagcttctctccatcgaattcacccccgtcatcgagcagctcctgcagttccaccccaaggatcgacaggtgatgctcttctccgctaccttccctatttctgttaaggaattttccgacaagaacatgaccaacccctacgagatcaacctcatggacgagcttaccctcaggggtatcactcaatactatgcctttgtcgaggagaagcaaaaggtccactgcctgaacactctcttctccaaattgcagatcaaccaatccatcatcttctgcaattccacgaaccgagtcgaacttcttgccaagaagatcaccgagctcggctactcgtgcttctacagtcatgccaagatgcagcagcaggcacgaaaccgtgtcttccacgacttcagaaacggagtctgcaggaacctggtgtgctctgatctgcttactcgaggtattgacattcaggctgtcaacgttgtcataaactttgacttccccaagaacgctgaaacttacttgcaccgtatcggacgatctggtcggtacggccacctcggtctggctatcaacctgatcagctgggaagaccggttcaacctttacaacatcgagcgtgacttgggtaccgagatccagcccatcccttcgacgatcgacaagagcttgtacgtctacgacaacccggagaccattccccgtcccatcaacatccccgctcagccttcctcggcgggcaatgcgcaaagcgctgcacccaatcagggcccacctccccagcagcaaagaccgcatcaaggtcaagagaactggcaaaaccagaacggcaggcacaacggttccagccaacagcagcagcctcgtggcccccaccaaaacaggggccgcggcggtgggcgcggacgtggaggcttccaaggccagggtcagggacagcgcaactacaacaacaactacaggggtggccgtggtggccacaaccaagggcagcatcaacagcaaatgcccaaccagcagtcctaa

SEQ ID NO: 65785 - protein, 524 aa, Magnaporthe grisea
MADVDATNNEDWRRNLNIPARDNRQQTEDVTNTKGLEFENFGLKRDLLMGIFEAGFEKPSPIQEESIPVALTGRDILARAKNGTGKTAAFVVPALETINPKVSKIQCLILVPTRELAMQTSQVCKTLGKHLGINVMVTTGGTTLRDDILRLQDPVHIVVGTPGRILDLAGKNVADLSECPMFIMDEADKLLSIEFTPVIEQLLQFHPKDRQVMLFSATFPISVKEFSDKNMTNPYEINLMDELTLRGITQYYAFVEEKQKVHCLNTLFSKLQINQSIIFCNSTNRVELLAKKITELGYSCFYSHAKMQQQARNRVFHDFRNGVCRNLVCSDLLTRGIDIQAVNVVINFDFPKNAETYLHRIGRSGRYGHLGLAINLISWEDRFNLYNIERDLGTEIQPIPSTIDKSLYVYDNPETIPRPINIPAQPSSAGNAQSAAPNQGPPPQQQRPHQGQENWQNQNGRHNGSSQQQQPRGPHQNRGRGGGRGRGGFQGQGQGQRNYNNNYRGGRGGHNQGQHQQQMPNQQS

SEQ ID NO: 65786 - DNA, 1530 bp, Pichia stipitis
  CDS (1)..(1530): transl_table=12
atgtctgaacaaaactggaaacaaaacttgaaccttccacagagggatacaagaccacagaccgaagatgtcttgaacacaaagggtaagtcctttgaagacttcaatttaaagagagaattgttgatgggcatttttgaggcgggattcgagaagccttcgcccattcaagaagaatccatcccaatggctttggcaggaagagacgtcttggccagagctaaaaacggtactggtaagactgcatcgttcatcattccatcattgcaacagatcaaacccaagttaaacaaaattcaagccttgatcttggtgccaacaagagagttggcattgcaaacatcccaagttgtgagaaccttaggaaaacatttaggcattcaatgtatggtgaccactggtggtacttccttgaaggatgacatcttgagattgaacgatcccgttcacgttttggtcggtactcctggtagagttttggatttggctgccagaagcgttgccgacttgtcggaatgtcccttgtttgttatggacgaagccgataaaatgttgtccagagaattcaagggcatcattgagcaaatcttggaatttttccccaagaacagacagtccttattattctctgctacttttccgttagccgtcaagtccttcatggacaagcacttgaacaagccctacgagattaaccttatggacgaattaacgttgagaggtatcactcaatactacgcatttgttgaagaaaagcagaagttgcactgtttgaatactttgttcagcaaattacaaatcaatcagtctattatcttctgtaactctaccaacagagttgaattgttggccaaaaagatcactgaattgggctactcttgttactactcgcacgccaagatgccccaacaggcaagaaacaaagttttccatgaatttagacaaggaaaggtccgtaacttggtctgctctgatttattgaccagaggtattgatattcaagctgtcaacgttgtcatcaactttgatttcccaaagactgccgaaacctatttgcatagaattggtcgttcaggtagattcggtcacttgggtttggccattaatttgatgagttggaatgatcgttactccttgtacaagattgaacaagaattgggtactgagatcaagccaattccagctaccatcgacagaaagttgtatgttgctgataacgaagatgctattcccaaaccattcaagattgaacagttgccaaaaggtaacgagaaggttcataccagagctggctatgagtacaaaggccagcctgaagttcaatcgggccagcaacacgcccaacaacaactccaaccttcacaacaaccccaacaacaactccagcaaccacaacaaccacaagctgctcctcaaggttacccaccagctttcaatggctatccaccataccagcaatacccaccccaagctggcgggtaccctccaccacaattcaacggctaccaagcagctcctggtcaacagtag

SEQ ID NO: 65787 - protein, 509 aa, Pichia stipitis
MSEQNWKQNLNLPQRDTRPQTEDVLNTKGKSFEDFNLKRELLMGIFEAGFEKPSPIQEESIPMALAGRDVLARAKNGTGKTASFIIPSLQQIKPKLNKIQALILVPTRELALQTSQVVRTLGKHLGIQCMVTTGGTSLKDDILRLNDPVHVLVGTPGRVLDLAARSVADLSECPLFVMDEADKMLSREFKGIIEQILEFFPKNRQSLLFSATFPLAVKSFMDKHLNKPYEINLMDELTLRGITQYYAFVEEKQKLHCLNTLFSKLQINQSIIFCNSTNRVELLAKKITELGYSCYYSHAKMPQQARNKVFHEFRQGKVRNLVCSDLLTRGIDIQAVNVVINFDFPKTAETYLHRIGRSGRFGHLGLAINLMSWNDRYSLYKIEQELGTEIKPIPATIDRKLYVADNEDAIPKPFKIEQLPKGNEKVHTRAGYEYKGQPEVQSGQQHAQQQLQPSQQPQQQLQQPQQPQAAPQGYPPAFNGYPPYQQYPPQAGGYPPPQFNGYQAAPGQQ

SEQ ID NO: 65788 - DNA, 1458 bp, Schizosaccharomyces pombe
  CDS (1)..(1458)
atggctgaaagcttgattcaaaagttagaaaacgctaatttgaatgaccgagaatcctttaaaggacaaatgaaggctcagcctgtagacatgcggccgaaaacagaggatgttacgaaaaccagaggaacagagttcgaagattattatttgaaacgcgaacttttgatgggcatctttgaggcgggcttcgagcgtccatctccaattcaagaagaatctatccctattgctcttagcggccgtgatattttagctagagctaaaaacggtactggtaaaacagccgcctttgtaattccctcccttgaaaaagttgatactaagaagagtaaaattcaaacattaattctcgtccccactcgtgaacttgctcttcagacatctcaagtctgtaagactttaggaaaacatatgaatgtcaaagttatggtcacaactggtggtacaactttaagagatgatattatccgtttaaacgatactgtccatattgtggttggtactcctggtcgtgtccttgaccttgctggtaaaggcgttgctgatttcagtgaatgtactacttttgttatggatgaagccgataaattattaagtccggaatttactcccatcattgaacaacttctttcctattttcctaaaaatcgacaaatctctttgtatagtgctacctttccgttaattgttaaaaactttatggataaacatcttaataaaccttatgaaattaacttgatggacgagcttacccttcgtggtgttactcaatattatgctttcgttgacgagagccagaaggtgcattgtcttaacaccttgttttcaaaacttcagatcaaccagtcgatcatattctgtaactccactaaccgtgtcgagttacttgccaaaaaaattactgaacttggatattcatgcttttattctcatgctaaaatgttacagtctcatagaaaccgtgtttttcataattttagaaatggcgtttgccgcaatttggtttgttctgatctgttgactcgtggtattgatatccaagctgtaaatgttgtcatcaattttgattttccgaagaacgccgaaacttatttgcaccgcatcggtcgttctggtcgatttggtcatcgtggtttggctattagtttcatctcttgggctgacagatttaacctttatcgaattgaaaatgaacttggcactgaaattcaaccaattccccctagtattgatccctccctgtatgtttttcctaatggtgattatcaaatccctcgacccttgactgcatctgccgatcaagtattggctgctcaacaagccaaaggacaggagggatatcataatcgtccgaacaataatcgtggtggtcatcctcgtggaggtggaaatcgtggtggttatcgtcagtccaatcgacaacccagataccgtggtcaacaaaaagcagactaa

SEQ ID NO: 65789 - protein, 485 aa, Schizosaccharomyces pombe
MAESLIQKLENANLNDRESFKGQMKAQPVDMRPKTEDVTKTRGTEFEDYYLKRELLMGIFEAGFERPSPIQEESIPIALSGRDILARAKNGTGKTAAFVIPSLEKVDTKKSKIQTLILVPTRELALQTSQVCKTLGKHMNVKVMVTTGGTTLRDDIIRLNDTVHIVVGTPGRVLDLAGKGVADFSECTTFVMDEADKLLSPEFTPIIEQLLSYFPKNRQISLYSATFPLIVKNFMDKHLNKPYEINLMDELTLRGVTQYYAFVDESQKVHCLNTLFSKLQINQSIIFCNSTNRVELLAKKITELGYSCFYSHAKMLQSHRNRVFHNFRNGVCRNLVCSDLLTRGIDIQAVNVVINFDFPKNAETYLHRIGRSGRFGHRGLAISFISWADRFNLYRIENELGTEIQPIPPSIDPSLYVFPNGDYQIPRPLTASADQVLAAQQAKGQEGYHNRPNNNRGGHPRGGGNRGGYRQSNRQPRYRGQQKAD

SEQ ID NO: 65790 - DNA, 1569 bp, Yarrowia lipolytica
  CDS (1)..(1569)
atgtctgagtggaaagagtcgttaaacgtgcccaaaaaggacacgcgtcacaaaaccgaagatgtgaccgccacaaagggtacagggttcgaggactttttcctcaaacgagagctgctcatgggcatctttgaagcaggattcgaaaacccctcgcccattcaggaagaggcgatccccattgccctcgcaggccgagatattctggcccgagccaagaacggaaccggcaagaccgccgcgtttgtgatcccagccctccagcaggtcaaccccaaagttaacaagatccaggcgcttatcatggtgcccacccgagagctggcactccagacctcacaggtttgcaagaccctaggcaagcatcttggcatcaaggtcatggtcaccaccggtggcaccaacctcagagacgacattatgcgtctggaagacacggtacacgtgttggtcggcactcccggccgagtgctggatctagcaggaaagggcgtcgctgatctcagcgagtcgcccatgtttattatggacgaggccgacaagttgctgtcgccggacttcacacccatcatcgagcaggtgctccatttcttccctgaggaccgtcagatcctgctcttctccgccaccttccctctgactgtcaaggcctttatggaccgaaacctgcacaagccttacgaaatcaacctgatggacgagctgaccctaagaggtatcacgcagtactacgcctttgtcgacgagaaacagaagctgcattgtctcaacacgctcttttctaagctcgacatcaaccagtccatcattttctgcaactccactgtgcgagttgagctacttgcccgaaagatcactgagctgggatactcatgttactactcccacgccaagatgatccagagccatcgaaaccgagtcttccatgagttccgaaacggcacgtgccgaaacctcgtctgttccgatttgcttacccgaggtatcgatatccaggccgtcaacgtggtcatcaactttgacttccctaagaacgccgagacctatctccatcgaattggtcgatctggacgatttggccatctcggtattgccatcaacctcattaactggaacgaccgatacaacctgtacaagattgagcaggaacttggaactgagatcaagcccatccctgcccagatcgacaagaacctctacgttgccgagtccagcgagaacatcccccgacccttccccattgctgatatgcctcgaggcaaggagagtaagcgaaacgagcaattccagccccagcagaaccagaaccagcagcagcaacaggacggtcaaaaccagcactctctgggtcccgtacctccccagggtcctcctcagggcattcccggccccggatacggctaccctcctcctcagggcttccctcagggaatgcctcctcaaggaatgcctcctcagggagccggcggctacatgccccctactccctatggttaccagcagcagggcttccctcctcagccgccacagggcttcaacaatggccagccccagcagccgtcgcagtaa

SEQ ID NO: 65791 - protein, 522 aa, Yarrowia lipolytica
MSEWKESLNVPKKDTRHKTEDVTATKGTGFEDFFLKRELLMGIFEAGFENPSPIQEEAIPIALAGRDILARAKNGTGKTAAFVIPALQQVNPKVNKIQALIMVPTRELALQTSQVCKTLGKHLGIKVMVTTGGTNLRDDIMRLEDTVHVLVGTPGRVLDLAGKGVADLSESPMFIMDEADKLLSPDFTPIIEQVLHFFPEDRQILLFSATFPLTVKAFMDRNLHKPYEINLMDELTLRGITQYYAFVDEKQKLHCLNTLFSKLDINQSIIFCNSTVRVELLARKITELGYSCYYSHAKMIQSHRNRVFHEFRNGTCRNLVCSDLLTRGIDIQAVNVVINFDFPKNAETYLHRIGRSGRFGHLGIAINLINWNDRYNLYKIEQELGTEIKPIPAQIDKNLYVAESSENIPRPFPIADMPRGKESKRNEQFQPQQNQNQQQQQDGQNQHSLGPVPPQGPPQGIPGPGYGYPPPQGFPQGMPPQGMPPQGAGGYMPPTPYGYQQQGFPPQPPQGFNNGQPQQPSQ

SEQ ID NO: 65792 - DNA, 1842 bp, Candida albicans
  CDS (1)..(1842): transl_table=12
atgccagatttcatattaaccatcgatagtgacgaagaagtggatgtatccgactccgaacaactccaggacatcaaccctgactttaaatttcaaatagatggtgaaactaccaacacattagaggaatttgatttccaagaaaataaagtcaaagaagtcgatttagatgaaattattaaaaaaaagggcggattaaaagaagaaagtgatgatgaagaattagctcttgatgggtttggaatgggcgcaagcaaacaagaagaagaagaggaagaagaggaagaagaagtagaagtgccggaagtcaaagaggtagtagagccagaggactcagctgaagctattgcagacttctacgaagaatcttccccacaacaaactcacacttctttccagaccttacagttgtcacgtccagtattaaaaggtattgccgagctcaaattcactaaaccaacccctattcaatctgcaagtatccccattgcgttactcggaaaagatattgttgctggtgctcaaaccgggtctggtaaaaccggtgcttacatgatcccaattattgaaagattgttatacaaaccctcaacttccaccaaagtcatcatcttgacccctacaagagagttggcgttacaagtttacgagtttggcaaaaagctttcgcaccacgtcaacaacctcaacatcggtttggcggtcggtgggttgaatttacgtcaacaagaagaacaattgaaaacacgcccagatatcgtcatcgcaacaccaggtagacttattgaccatattcgtaacagtccctcattcagtgtacaggatatccaagtattagtcattgatgaagccgatagaatgttggaagaagggttccaagacgaattgacagaaattttgtcgttaatcccaaaacacaaacgtcaaactcttttattctcagccacaatgaataccagaatccaggatttgatccaattgtcattacaaaaaccagtgcgtatcatgattgacccaccaaaatcagtggcttcaaagttattgcagcagtttgttcgtatcagaaaaagagaccagctaaaaccagcattgttataccagttattaaaaggtgtgtccagcagagtggttgttttcgttgcacgaaaggaaacagctcaccgattacgtattgtgcttggacttttgggtctaaaagtatctgaactacatggtgcattaacacaagaacaaagattgcagaatgtcaaaaacttcaagtcgttggaagtaccagttttgatatgtaccgacttggcagcaagagggttggatatccccaaaatcgaattggtcattaattacgatatgccaaaaacatttgaaatctatttgcatagagtgggaaggactgccagagctggaagagacgggacatctatcacatttgttggagaatcaagccaagaaagagctattgtcaaatctgccatcgtcaacggcaaaggtgtagccaaaactgtcgactggaaacaagcggaagaaacaaataaacttctcgaatccaaggaatctgtaatagatgaagtgttagaggaagaaaaagaggcaaaggagttgcttcgtgccgaaatggaactcaccaaggcatccaaccttatcaaacacgaacaagaaatacattcacgtccaaaaagaacttggtttaaaggtgaagtcatggaacagctcactaaacatggtaagaaagtgaactccaaaaagagaaaggccaatgaagtgaggaaagatgaaggcagaagctacaaaaaaactaaaaccgatagaatgaaaatctctaacaagaaaaaaagtaaaaagtga

SEQ ID NO: 65793 - protein, 613 aa, Candida albicans
MPDFILTIDSDEEVDVSDSEQLQDINPDFKFQIDGETTNTLEEFDFQENKVKEVDLDEIIKKKGGLKEESDDEELALDGFGMGASKQEEEEEEEEEEVEVPEVKEVVEPEDSAEAIADFYEESSPQQTHTSFQTLQLSRPVLKGIAELKFTKPTPIQSASIPIALLGKDIVAGAQTGSGKTGAYMIPIIERLLYKPSTSTKVIILTPTRELALQVYEFGKKLSHHVNNLNIGLAVGGLNLRQQEEQLKTRPDIVIATPGRLIDHIRNSPSFSVQDIQVLVIDEADRMLEEGFQDELTEILSLIPKHKRQTLLFSATMNTRIQDLIQLSLQKPVRIMIDPPKSVASKLLQQFVRIRKRDQLKPALLYQLLKGVSSRVVVFVARKETAHRLRIVLGLLGLKVSELHGALTQEQRLQNVKNFKSLEVPVLICTDLAARGLDIPKIELVINYDMPKTFEIYLHRVGRTARAGRDGTSITFVGESSQERAIVKSAIVNGKGVAKTVDWKQAEETNKLLESKESVIDEVLEEEKEAKELLRAEMELTKASNLIKHEQEIHSRPKRTWFKGEVMEQLTKHGKKVNSKKRKANEVRKDEGRSYKKTKTDRMKISNKKKSKK

SEQ ID NO: 65794 - DNA, 2247 bp, Kluyveromyces lactis
  CDS (1)..(2247)
atggctgttaagaagtttagatcattcgatgattttgttcctacaattagtgatagcgaagaagatgttccagatttagatgcttctgatgacgaaatggaaaagaagccagtgaagtcctcaaaaactaagaacaaatctaaaaagaaggccaagcaacaacagggatctcacttggacgaagatgtccatgaagatttgaatccagaattccaattctccattgacagcggagaagttaccaccaactttgcaggctgggatttccaaggtgatgagaagagtgatgaagttgagaaaaaagatgtcgatctagatgggatcattagaagaaaaggtggtttgattatgatggctgctacaggcagtgatgccgaagaaagcctatcagaagagtccgaagaagaaccagaagaaggagacgaacctggcgagagtgatgatgaagatgaattagctttggatgggttcggtatgggtgtcaagagaaaggcaacagaggaaaatgaagaagatgaagaggatgaagaagaagaggatgacgacgaagatgacgacaaaaagaccgaaatgagtcaggcagatttaggtaagggaaaagacgaagatgaagacattgaagaagacactaaagaagaaatggctgaattttatgctccagaagaggaaagtgcggatgctaaaaagatcgttcataaaactttcaacagcttgtcgttatcccgtcctgtgttgaaagggcttggaagtttaggatacaccagtccttctccaattcaaagtgctgctattcctattgcccttcttggtaaagatatcattgccggtgctgttacaggttctggtaaaacagctgcttttatgattcctatcatcgaacgtttgttgtacaaacctgcacatattgcatcaacaagggttgttgtactaactccaacccgtgaattggctattcaagtggctgatgttggtaaaaatatcggtaagtttgttaacggactaacgtttggtttggccgtcggtggtttgaatttaagacaacaagaacaagcattgaagaccagacctgatatcgtaattgccacaccaggtagatttatcgatcatttaagaaattctgcgagtttcagcgttgattcagttgaaatcttggtcattgacgaagctgatagaatgttagaagaaggtttccaagaggaactacaagaaatcatgtctctcattccaagtaagagacaaactctgttgttttctgctacaatgaactcaaaaattaagcaattaatctcgctatctctaaagaagcctgttaggattatgattgatcctccaaaacaagcagcagataaattgacacaggagttcatccgtatacgtaaaagagatcatctcaaaccggcattattatatcaattgattagaaagttggacaatacaagccagaagagaatagtagtttttgttgctaggaaagaaactgcccataaactgagaatcgtccttgggttattgggtatgcaagttggtgaattgcatggttcgttaacccaagaacaacgtctacagtctgttaataacttcaaatccttacaagtaccagtcttaatctgtaccgatttagcttcgagaggtttagatattccaaaaattgaagtggttatcaatttcgatatgccaaaaacttacgaaatttacttacacagagttggtcgtactgccagagcgggtagagaaggtcgttcagtaacctttgtaggcgaatcatctcaagatagaagtattgtcagaagtgcgatcagatcagtggaagaaaacgctgaaagtggaaaggccttgagtagaaacgttgactggacacaagtcgagcaagtcaacagcttgattggagcaaagggtgatgttgtagaggagattattgaagaagaaaagcaagagaaagagatacttagagctgaaatggaacttcgcaaaggtgaaaacatgctaaaacacaaggaagaaatcagtgcaaggccaagaagaacctggtttcaatcagaagctgagaagaagaactctaaaatgcttcaagttttggcaaaaaacaaaaagccaatcaacagtaagaagagaaaacagcaagaagcattggctgagaatcctcggctatataaaaagacacaaaaagatcgtgtcgaatatcaggaacgtcaatacagcaagaagcaagctgcctacggaaagaagggaaagaagggtaagaaataa

SEQ ID NO: 65795 - protein, 748 aa, Kluyveromyces lactis
MAVKKFRSFDDFVPTISDSEEDVPDLDASDDEMEKKPVKSSKTKNKSKKKAKQQQGSHLDEDVHEDLNPEFQFSIDSGEVTTNFAGWDFQGDEKSDEVEKKDVDLDGIIRRKGGLIMMAATGSDAEESLSEESEEEPEEGDEPGESDDEDELALDGFGMGVKRKATEENEEDEEDEEEEDDDEDDDKKTEMSQADLGKGKDEDEDIEEDTKEEMAEFYAPEEESADAKKIVHKTFNSLSLSRPVLKGLGSLGYTSPSPIQSAAIPIALLGKDIIAGAVTGSGKTAAFMIPIIERLLYKPAHIASTRVVVLTPTRELAIQVADVGKNIGKFVNGLTFGLAVGGLNLRQQEQALKTRPDIVIATPGRFIDHLRNSASFSVDSVEILVIDEADRMLEEGFQEELQEIMSLIPSKRQTLLFSATMNSKIKQLISLSLKKPVRIMIDPPKQAADKLTQEFIRIRKRDHLKPALLYQLIRKLDNTSQKRIVVFVARKETAHKLRIVLGLLGMQVGELHGSLTQEQRLQSVNNFKSLQVPVLICTDLASRGLDIPKIEVVINFDMPKTYEIYLHRVGRTARAGREGRSVTFVGESSQDRSIVRSAIRSVEENAESGKALSRNVDWTQVEQVNSLIGAKGDVVEEIIEEEKQEKEILRAEMELRKGENMLKHKEEISARPRRTWFQSEAEKKNSKMLQVLAKNKKPINSKKRKQQEALAENPRLYKKTQKDRVEYQERQYSKKQAAYGKKGKKGKK

SEQ ID NO: 65796 - DNA, 2265 bp, Schizosaccharomyces pombe
  CDS (1)..(2265)
atgctttggaatacgcagtactttcgaattgaggggatgatttccttgggatggccaaggttagcgaaaacatcaattttgaaatttgtgccaattgcacaaaatcaccggattaggaaaatgaaagtccaagatgatttcatcctcactattgatgactctgaagatgatattcattacgacgattacgatgccgatgccgtagatgaagaaatgccttccaatgtggagttgaaaaaaaaatcgaaaaaggccaccccggcaaaggattccgatttcaatggagaatttctattcgaagctgatgtcaacaaagatttatcctcagcgactgatatgaattgggattttgacatgggtagtaaaacagaatcaaaccgtgcttctaatacagtggatctcgatgccattatatctcgaaaccgtaaaccagacgatgatgaattcccttcttcttttccctctgaagaggaacttcaagagcctgagcaggaaaatatcgattcagatgatgaagacttagcaattgatggattcggtgcaggcgcaattgctgaaaatgaagacgagtcttcccaagatgaaagtgaaagcgaagaggaagatgatattactgagcctgttccttcttttgccaatatttctactcaggatttcaattccgattctgctgctggttcctccgacagcgaagaagatgaagaggaaattgctaagaaaaatgctttctttgctgaaggtgataaagaaaaatctatgatgaccactacacattcgtctttccaatctatgaatttgtcacgccctatcttaaagggcctttctaatcttggttttgaagtgccaactcagattcaagacaagacaataccacttgcacttttaggtaaagatatcgttggtgctgcagttactggtagtggtaagacagcggctttcattgttcctattttggagcgtttgctctaccgtcccaaaaaggtccctactacaagagtattgatcctttgtcctactcgtgagcttgctatgcaatgtcatagcgttgctacgaaaattgcctcttttactgacattatggtttgtctgtgtatcggtggtttgtccctcaagttacaagagcaggaacttcgtaaacgtcctgacattgtcatcgccaccccgggtcgttttattgatcatatgcgcaattcacaaggattcactgtggaaaacattgagattatggtaatggatgaagccgatcgtatgctggaagatggttttgctgatgaactgaatgaaattattcaagcttgtccaaagtctagacaaacgatgcttttttcggccactatgactgataaagtagatgatttaattcgtttatctttaaatcggccagtacgagtttttgtcgataataagaaaactaccgccaaacttttaactcaggaatttgtccgtgttcgaccacaacgtgagttacttcgcccagctatgcttatctatctctgcaaggaattatttcatagaagaactattatcttcttcaggagcaaagcttttgctcacaagatgcgagtcatatttggccttttatccttaaacgctaccgaaatccacggttcattgtcgcaagaacagcgtgtccgtgctttggaagactttcgtgatggaaaatgtaactatttgttggctacagatgttgcatctcgtggtattgatatcaaaggcattgaggtcgtaataaattacgaagctccagctactcacgaagtttatcttcatcgtgttggtcgtactgctcgtgctggcaggagtggtagagctattacattagccggtgagggcgatcgcaaagttcttaaaggtgtattcaaaaattcttcagcgcaaaacacaaaattggtcaaccgtaatctggattttaacaaagttgaaaagtttggtaaagaaattgaggaattggaacctgttgttcagaaagtgctagatgaagaaaaacaagaacgagaactaaaaattgccgaacgcgatttaaagaaaggcgaaaacattatgaaatatggtgatgaaattcgttctcgtccagcacgtacctggtttcaatccgaaaaagataaacaagcttctaaagcctccgaagcgaaagataaaaagtctttagctaaaagaaaaaagcaaatggaaaaggaagaggtgccccgagcatacaagaagacaaagaatgatagacttagcaacaaaaagtctacaaaaaaatcgaaatctaagcgcaaatag

SEQ ID NO: 65797 - protein, 754 aa, Schizosaccharomyces pombe
MLWNTQYFRIEGMISLGWPRLAKTSILKFVPIAQNHRIRKMKVQDDFILTIDDSEDDIHYDDYDADAVDEEMPSNVELKKKSKKATPAKDSDFNGEFLFEADVNKDLSSATDMNWDFDMGSKTESNRASNTVDLDAIISRNRKPDDDEFPSSFPSEEELQEPEQENIDSDDEDLAIDGFGAGAIAENEDESSQDESESEEEDDITEPVPSFANISTQDFNSDSAAGSSDSEEDEEEIAKKNAFFAEGDKEKSMMTTTHSSFQSMNLSRPILKGLSNLGFEVPTQIQDKTIPLALLGKDIVGAAVTGSGKTAAFIVPILERLLYRPKKVPTTRVLILCPTRELAMQCHSVATKIASFTDIMVCLCIGGLSLKLQEQELRKRPDIVIATPGRFIDHMRNSQGFTVENIEIMVMDEADRMLEDGFADELNEIIQACPKSRQTMLFSATMTDKVDDLIRLSLNRPVRVFVDNKKTTAKLLTQEFVRVRPQRELLRPAMLIYLCKELFHRRTIIFFRSKAFAHKMRVIFGLLSLNATEIHGSLSQEQRVRALEDFRDGKCNYLLATDVASRGIDIKGIEVVINYEAPATHEVYLHRVGRTARAGRSGRAITLAGEGDRKVLKGVFKNSSAQNTKLVNRNLDFNKVEKFGKEIEELEPVVQKVLDEEKQERELKIAERDLKKGENIMKYGDEIRSRPARTWFQSEKDKQASKASEAKDKKSLAKRKKQMEKEEVPRAYKKTKNDRLSNKKSTKKSKSKRK

SEQ ID NO: 65798 - DNA, 1197 bp, Ashbya gossypii
  CDS (1)..(1197)
atgtcgtttgatagaaatcaagatggtaagctgaaggtcaaaacttcctccaagttgccggtatcgccgacgttcgagtctatgaaactacaggagaacctgctacggggtatctatgggtatggcttcgaagctccttctgcaattcagtcgagggctatcacgcagatcatccgaggtaaggatgtcatcgcgcaagctcagtcaggcaccggtaagacagcaaccttcacgataggtatgttacaggtgatcgattcgagcagcaaggacttacaggctctagtgctgtcgccgactcgagagcttgcagcgcaaatctcgcaggtagtgcgtaacttgggagattacatgaacgttgtagctcttgcttgcactggggggaaggcgctgcagcaggatataagcaaggttaacaagggctgccatgtaatgagcggtaccccaggtcgggtactcgatatgattaaacgtcggattataaacaccaggcacgtgaaaatgcttgtgttagatgaggctgacgaactcctgagtgagacactaggtttcaagcagcaactttacgatatcttcacaaaattgccatcgtcagtgcaagtggtggtggtaagcgctacgatgagtaaggtcgtgttggaggtcaccaaaaagttcatgtctgatccagtcaagattttggtaaagcgggacgaggtgtcgctggaaggcataaagcaataccatataaacgtggataaagaagaatggaagttcgacacgctttgcgatttgtacgattccctgactatcacccagtgtgtgatattctgtaacacaaagaaaaaggtggattggctgtcgcacaagctgatacagaataactttgcagtcgcgtccatacatggagacatgaagcaagatgaccgagacaaagtcatgagtgactttaggtcaggcagctcccgcgtgcttatttccacagatgtgtgggcccgtgggattgatgttcaacaggtttcgctggttatcaactacgatctgcctgaacttctcgagaactacatccatcggataggccgttcgggcaggtttggaagaaagggggtagcaataaatttcattacaagagaagaggtcaccaagctgaagtcaatcgaaaagcattattcgatcaaaatcaagccaatgcccgcagatatcgacagtctttcctag

SEQ ID NO: 65799 - protein, 398 aa, Ashbya gossypii
MSFDRNQDGKLKVKTSSKLPVSPTFESMKLQENLLRGIYGYGFEAPSAIQSRAITQIIRGKDVIAQAQSGTGKTATFTIGMLQVIDSSSKDLQALVLSPTRELAAQISQVVRNLGDYMNVVALACTGGKALQQDISKVNKGCHVMSGTPGRVLDMIKRRIINTRHVKMLVLDEADELLSETLGFKQQLYDIFTKLPSSVQVVVVSATMSKVVLEVTKKFMSDPVKILVKRDEVSLEGIKQYHINVDKEEWKFDTLCDLYDSLTITQCVIFCNTKKKVDWLSHKLIQNNFAVASIHGDMKQDDRDKVMSDFRSGSSRVLISTDVWARGIDVQQVSLVINYDLPELLENYIHRIGRSGRFGRKGVAINFITREEVTKLKSIEKHYSIKIKPMPADIDSLS

SEQ ID NO: 65800 - DNA, 1185 bp, Chaetomium globosum
  CDS (1)..(1185)
atggcagacggagctggtatcgaccgcaaggctgatgagaagattcaattctcaacctcgaaggaggtcacggtgcatccgaccttcgagtcgatgtcactgaaagagagcctccttcgcggtatttacgcatacgggtacgaatcaccgtccgccgtccagtctcgagccatcgtccagatctgtaagggccgcgacactatcgcacaggcacagtccggaacgggtaaaacggccaccttctccatcagcatgctccaagtcatcgataccgccgtacgcgagacacaggcgcttgtcctctccccgacccgcgaacttgcgacacagattcagagcgtcgtgatggccttgggagactacatgaacgtgcagtgccatgcttgcattggtggcaccaacgtgggcgaggatatccgcaaactcgattacggccaacacatcgtatcgggaactccaggtcgtgttgccgacatgatccgccgccgccacctgcgcacccgccacatcaagatgctcgtgctcgatgaagccgacgagcttctcaaccagggtttccgggaacagatctacgacgtgtaccgctatcttccccctgccacccaggtcgtggttgtctcggccacgctcccatacgatgtcctcgacatgacaaccaagttcatgacggacccggttcgcatccttgtcaagcgtgacgagttgacgctcgaaggcttgaagcaatacttcatcgccgtggaaaaggaggactggaagttcgatacgctctgcgacctgtacgacaccctcaccatcactcaggcggtcattttctgcaacacacggcgcaaggtcgactggctcaccgacaagatgagagaggccaacttcaccgtcagcagcatgcacggcgacatgccgcaaaaggagcgtgacagcatcatgcaggatttcagacagggcaacagcagagtcctaatctcgaccgacgtttgggcccgtggtatcgacgtccagcaagtgagcctggtcatcaactacgatttgccaagcaaccgtgagaattacatccatcgtatcggccgttcgggtagattcggccgtaagggtgtggccatcaacttcgttacgagcgaggatgtgcgcattctacgagatatcgagtgtatgtggctcccatctccatgctttagctgtggctaa

SEQ ID NO: 65801 - protein, 394 aa, Chaetomium globosum
MADGAGIDRKADEKIQFSTSKEVTVHPTFESMSLKESLLRGIYAYGYESPSAVQSRAIVQICKGRDTIAQAQSGTGKTATFSISMLQVIDTAVRETQALVLSPTRELATQIQSVVMALGDYMNVQCHACIGGTNVGEDIRKLDYGQHIVSGTPGRVADMIRRRHLRTRHIKMLVLDEADELLNQGFREQIYDVYRYLPPATQVVVVSATLPYDVLDMTTKFMTDPVRILVKRDELTLEGLKQYFIAVEKEDWKFDTLCDLYDTLTITQAVIFCNTRRKVDWLTDKMREANFTVSSMHGDMPQKERDSIMQDFRQGNSRVLISTDVWARGIDVQQVSLVINYDLPSNRENYIHRIGRSGRFGRKGVAINFVTSEDVRILRDIECMWLPSPCFSCG

SEQ ID NO: 65802 - DNA, 1200 bp, Emericella nidulans
  CDS (1)..(1200)
atggcggacggaattgacaggcgagccgatgacaaaatggagtttaacacctccaaggaggtcaccgttgctcccactttcgaggatatgcacctgaaggaaagccttctccgtggtatctacgcatacggatacgagtccccatcagctgttcagtcccgcgcgatcgtccagatctgcaaaggtcgcgatacaatcgctcaagcgcagtccggtaccggtaaaacggcgactttctcgatcagcgctctgcaagtcattgatacagttgttcgcgaaactcaagcacttgttctctctcccacccgtgaacttgcgactcagattcagtcggtcatcatggcccttggtgactacatgaacgttcaatgtcacgcttgtattggaggcacaaatatcggtgaagacattcgcaagctcgattacggtcaacacgttgtttctggcacacccggccgtgtcgccgatatgatccggagacgtcacctgcgcacgcgtcatatcaagatgttggtccttgatgaagctgacgaactcctcaaccgcggatttcgagaacagatttacgatgtctaccgttatctccccccagccacgcaagttgttgtcgtatccgctacgctcccctacgatgtgcttgatatgacgaccaaattcatgacagaccccgtccgtgtcctcgtcaagcgtgatgaattgacgctcgaaggcatcaagcaatacttcatcgctgtcgagaaggaagaatggaagttcgatactctatgcgacttgtacgatactttaactatcacacaagccgtcatcttctgcaacacccgtagaaaggtcgactggctcacggacaagatgcgcgaagccaacttcacagtatcaagcatgcatggagagatgccacaaaaggaacgagacagcatcatgcaggacttccgtcagggtaactcgcgagtgcttatctccactgacgtttgggcgcgtggtatagatgtccagcaagtttctcttgtcatcaactacgatctccccaccaaccgtgaaaactacatccaccgcatcggtcgaagcggtcgattcggtcgcaagggtgttgctataaactttgttacgagtgatgacgtgcgtatcctacgcgatattgaattatactactctacgcaaattgacgagatgcctatgaatgttgccgacctcctctcttaa

SEQ ID NO: 65803 - protein, 399 aa, Emericella nidulans
MADGIDRRADDKMEFNTSKEVTVAPTFEDMHLKESLLRGIYAYGYESPSAVQSRAIVQICKGRDTIAQAQSGTGKTATFSISALQVIDTVVRETQALVLSPTRELATQIQSVIMALGDYMNVQCHACIGGTNIGEDIRKLDYGQHVVSGTPGRVADMIRRRHLRTRHIKMLVLDEADELLNRGFREQIYDVYRYLPPATQVVVVSATLPYDVLDMTTKFMTDPVRVLVKRDELTLEGIKQYFIAVEKEEWKFDTLCDLYDTLTITQAVIFCNTRRKVDWLTDKMREANFTVSSMHGEMPQKERDSIMQDFRQGNSRVLISTDVWARGIDVQQVSLVINYDLPTNRENYIHRIGRSGRFGRKGVAINFVTSDDVRILRDIELYYSTQIDEMPMNVADLLS

SEQ ID NO: 65804 - DNA, 1203 bp, Neurospora crassa
  CDS (1)..(1203)
atggctgacggcggaatcgatcgcaaggccgatgaaaagattcagttctccacctccaaggaggtaacggttcatccgactttcgagtcgatgtccttgaaggagagtctccttcgcggcatctacgcctacggatatgagtccccctctgctgtccagtcccgcgccatcgttcagatctgcaagggtcgcgataccatcgcccaggcccagtccggtaccggtaaaacagccactttctcgatctctatgcttcaggtcatcgacaccgccgtgcgcgagacccaggccctcgtcctttccccgacccgcgaacttgcgacccagattcagagcgttgtgatggctttgggagattacatgaacgtccaatgccatgcttgcattggtggcaccaacgttggcgaggatattcgcaagctcgactatggtcaacacattgtctctggcactcctggtcgtgttgccgacatgattcgccgccgtcatctccgcaccagacacatcaagatgctggttctcgatgaagccgatgagctcctcaaccagggtttccgcgagcagatctacgatgtgtaccgctatcttccgcctgccacacaagtcgtcgtcgtctctgccaccctcccttatgatgtgctcgacatgaccaccaagttcatgaccgaccctgttcgtatcttggtcaagcgtgacgagttgaccctcgagggtttgaagcagtattttattgctgtggagaaggaggactggaagttcgacactctttgcgatctctacgacactctgactattacacaagccgttattttctgcaacacccgccggaaggtcgactggttgaccgataagatgcgcgaagccaacttcactgtcagcagcatgcacggcgatatgccccaaaaggagagagacagcattatgcaggatttcagacagggcaatagcagagtgctgatctcgaccgatgtgtgggcccgcggtatcgatgttcagcaggtcagcttggttatcaactatgatcttcccagcaaccgtgaaaactacattcatcgcatcggtcgttcaggtagattcggtcgcaagggtgtcgccatcaacttcgttactagcgaggatgtccgcatcttgcgtgatatcgagttgtactactcgacccagattgatgagatgcccatgaatgttgccgaccttatctcctaa

SEQ ID NO: 65805 - protein, 400 aa, Neurospora crassa
MADGGIDRKADEKIQFSTSKEVTVHPTFESMSLKESLLRGIYAYGYESPSAVQSRAIVQICKGRDTIAQAQSGTGKTATFSISMLQVIDTAVRETQALVLSPTRELATQIQSVVMALGDYMNVQCHACIGGTNVGEDIRKLDYGQHIVSGTPGRVADMIRRRHLRTRHIKMLVLDEADELLNQGFREQIYDVYRYLPPATQVVVVSATLPYDVLDMTTKFMTDPVRILVKRDELTLEGLKQYFIAVEKEDWKFDTLCDLYDTLTITQAVIFCNTRRKVDWLTDKMREANFTVSSMHGDMPQKERDSIMQDFRQGNSRVLISTDVWARGIDVQQVSLVINYDLPSNRENYIHRIGRSGRFGRKGVAINFVTSEDVRILRDIELYYSTQIDEMPMNVADLIS

SEQ ID NO: 65806 - DNA, 1200 bp, Pichia stipitis
  CDS (1)..(1200)
atggacgatttcgacagagatttggacaacgaattggagttctcccacaagtccactaagaatgttaaggtgcatgcgacttttgaaagcatgaacctcaagccagacctcttaaaaggcatatatggctatggttttgaggctccttcagctattcagtcccgtgccatcatgcagatcattaacgggagagatactattgcccaggctcaatcgggaactgggaaaacagccactttctccataggaatgctccaagccatagatactaatgccaaagactgtcaggcgctaattctttccccaactagagagttggcagttcagattcagaacgtcgttaaacatttaggtgactacatgaacatccacacacatgcttgtataggaggaacgcatgtgggcgatgacatcaagaagttgaaacagggccaacagattgtgagtggaactccaggtagagtcgtggatatggtcaagagacagcaattatccactagaaatatcaagatgttgattttggacgaagctgacgaattattcaccaaaggtttcaaagaacaaatctacgaagtttataagtacttgcccccttcagtccaggtggttgtagttagtgcaactctttcacgagaagtgttggaaatgaccaacaagttcaccacagaccctgtcaagattttggtgaagcgagaccagatcactcttgaaggtattaaacagtatcatgttcagtgtgagaaagaagactggaagtttgatacgttgtgtgatttgtacgacaacttgaccatcacccaggccgtgatcttctgtaacaccaagctcaaagtcaactggctcactgaccagatgagaaagcagaactttactgttgtgtctatgcatggtgacatgaaacaggacgaacgtgactccatcatgaacgatttcagaacgggaaactcccgtgtgttgatttccaccgatgtgtgggccagaggaattgatgtgcaacaagtttcgctcgtgataaactacgatttgcccactgataaagagaattatatacacagaatcggtagatccggaagatttggaagaaagggggtagccatcaatttgatcactaaggaggatgttgctacgttgagagactttgagaagtattactcgacgaagatcagagaaatgcccatgaacattaacgatataatgtag

SEQ ID NO: 65807 - protein, 399 aa, Pichia stipitis
MDDFDRDLDNELEFSHKSTKNVKVHATFESMNLKPDLLKGIYGYGFEAPSAIQSRAIMQIINGRDTIAQAQSGTGKTATFSIGMLQAIDTNAKDCQALILSPTRELAVQIQNVVKHLGDYMNIHTHACIGGTHVGDDIKKLKQGQQIVSGTPGRVVDMVKRQQLSTRNIKMLILDEADELFTKGFKEQIYEVYKYLPPSVQVVVVSATLSREVLEMTNKFTTDPVKILVKRDQITLEGIKQYHVQCEKEDWKFDTLCDLYDNLTITQAVIFCNTKLKVNWLTDQMRKQNFTVVSMHGDMKQDERDSIMNDFRTGNSRVLISTDVWARGIDVQQVSLVINYDLPTDKENYIHRIGRSGRFGRKGVAINLITKEDVATLRDFEKYYSTKIREMPMNINDIM

SEQ ID NO: 65808 - DNA, 1185 bp, Schizosaccharomyces pombe
  CDS (1)..(1185)
atggcggacgaaataatggagaacgtggagcttacgacatcggaagatgtgaatgctgtatcctcttttgaggaaatgaatcttaaagaggatttacttcgtggaatctatgcgtatggctatgagactccgagtgctgtgcaaagccgggcgattattcaaatctgtaaagggagagacgttatcgcacaagctcaatctggtacagggaaaacagcaactttttctattggtattcttcagtcgatcgatttatcagtccgagatactcaagctttaatactttctcctacgagagaattggcagttcaaatccagaatgttgtacttgcattgggtgaccatatgaacgttcaatgtcatgcttgtataggcggcacatccgttggaaatgacatcaaaaaattggattatggacaacacgttgtttctggcactcctgggcgcgtaacggacatgattcgtagacgaaatttgcgaactcgcaatgttaagatgcttattcttgatgaagcggatgagctcttaaatcaaggctttaaggaacaaatttatgacatttatagatatttaccccctggtacacaggtggtagttgtgagtgctaccttgcctcaagacgtgttagaaatgactaacaagtttaccactaaccctgttcgaatattggtcaagcgcgatgaacttactcttgaaggcttaaaacagtactttatagcagttgaaaaagaggaatggaagtttgatactctgtgtgatttatatgatactttaaccattacacaagctgtgatattttgcaattctcgtaggaaggttgattggttgacggagaaaatgcgagaagctaactttaccgttaccagtatgcacggtgagatgccgcaaaaagaaagagacgctatcatgcaagattttcgacaaggaaatagtagggttctcatatgcacagacatatgggcaagaggaattgatgttcagcaagtttcattagtgatcaattacgatcttcctgcaaatcgagaaaactatatacatcgcattggtcgcagtggacgatttggtcgtaaaggtgtagctattaattttgttacaaatgaagatgtacgcattcttcgggatattgaacaatactattctactgttatagatgaaatgcctatgaatataggagatatggtttaa

SEQ ID NO: 65809 - protein, 394 aa, Schizosaccharomyces pombe
MADEIMENVELTTSEDVNAVSSFEEMNLKEDLLRGIYAYGYETPSAVQSRAIIQICKGRDVIAQAQSGTGKTATFSIGILQSIDLSVRDTQALILSPTRELAVQIQNVVLALGDHMNVQCHACIGGTSVGNDIKKLDYGQHVVSGTPGRVTDMIRRRNLRTRNVKMLILDEADELLNQGFKEQIYDIYRYLPPGTQVVVVSATLPQDVLEMTNKFTTNPVRILVKRDELTLEGLKQYFIAVEKEEWKFDTLCDLYDTLTITQAVIFCNSRRKVDWLTEKMREANFTVTSMHGEMPQKERDAIMQDFRQGNSRVLICTDIWARGIDVQQVSLVINYDLPANRENYIHRIGRSGRFGRKGVAINFVTNEDVRILRDIEQYYSTVIDEMPMNIGDMV

SEQ ID NO: 65810 - DNA, 1194 bp, Ustilago maydis
  CDS (1)..(1194)
atgtccggtggtatcaatgcaggcgacagcaagctcgcctttgaaagctctgagcacgtcaaggtcgcaaccactttcgatgccatgggtttaaaggaagatctgcttcgtggcatctatgcgtacaattttgaaaaaccctcggcgatccagcaacgagcgatcctgcccatcattcgaggtcgcgatgtcatcgcacaggctcaatcaggaacgggcaaaaccgccacgttcagcatctcgatgctacaatctatcgacacaaccctcagagaaacacaagccctggtactcagtccaacgcgcgaattggccattcagatccagtcggtcgttcttgctctcggagactacttgaacgttcaatgtcacgcatgcattggcggtaccagcgtaggcgaagacattcgaaaactcgactacggtcaacacattgtctctggtacgcccggtcgagtctatgacatgattcgacgtcgacatttgcgcacaaaaaacatcaagatgctcatccttgacgaatctgacgaactgctcaacatgggcttcaaggatcagatttacgacgtttaccgttacctgccaccttcgacccaagtcgtgctcctctcggccactttaccgcaagatgtgctcgagatgacctccaagttcatgactgatcccgtccgcatcctagtcaaacgtgacgaattgactttggaaggcatcaaacaatttttcgtcgctgtcgaaaaggaagaatggaagttcgacaccctctgtgatctctacgacaccctcaccatcacacaagccgtcatcttttgcaacacgcgacgcaaagtggattggctctcggccaaaatgaaagagaacaactttcaggtgagcagtatgcacggagagatgcagcaaaaggaaagggatgaagttatggccgagttcagacagggcagctccagggtgttgatcaccacggatgtatgggcgagaggtatcgatatcgccaacatctcgttagtcatcaactatgatctgcctaccaacagggaaaattacatccacagaattggtcgaagtggaaggttcggcaggaagggtgtagctatcaatttcgttaccgtggacgacgtcagaaccttgagggatatcgaacagttttactccactcagatcgatgagatgcctgtcaagctggaggacatgttgtga

SEQ ID NO: 65811 - protein, 397 aa, Ustilago maydis
MSGGINAGDSKLAFESSEHVKVATTFDAMGLKEDLLRGIYAYNFEKPSAIQQRAILPIIRGRDVIAQAQSGTGKTATFSISMLQSIDTTLRETQALVLSPTRELAIQIQSVVLALGDYLNVQCHACIGGTSVGEDIRKLDYGQHIVSGTPGRVYDMIRRRHLRTKNIKMLILDESDELLNMGFKDQIYDVYRYLPPSTQVVLLSATLPQDVLEMTSKFMTDPVRILVKRDELTLEGIKQFFVAVEKEEWKFDTLCDLYDTLTITQAVIFCNTRRKVDWLSAKMKENNFQVSSMHGEMQQKERDEVMAEFRQGSSRVLITTDVWARGIDIANISLVINYDLPTNRENYIHRIGRSGRFGRKGVAINFVTVDDVRTLRDIEQFYSTQIDEMPVKLEDML

SEQ ID NO: 65812 - DNA, 1194 bp, Yarrowia lipolytica
  CDS (1)..(1194)
atggccgagtttgatagagatctcgatgacgagctggagttcaagacgtccaaggacgtggacgtgacgcccaccttcgagtcgatggatctcaaggacgaccttctgcggggaatctacgcgtacggcttcgaggctccctctgccatccagtctcgagccatcacacagatcatcaagggtcgagataccattgcacaggcacagtccggaacgggaaagacagccactttctctatttcgatgttggaggtgattgacaccaagcatcgggaaacacaggccatggttctttctccgacacgagaactggccacccagatccagagcgtcattctggctctgggcgactacatgaatgtccagtgccatgcttgcattggtggaacgtcgttgtcggtggacatgaagaagctggaggctggtcagcaggtggtttctggaacccccggacggtgtctggatatgatcaagaagggctgtcttcgaaccaagaacctcaagatgttgattctcgatgaggccgacgagctactaaacaagggctttcaggagcagatctacgacatttacagatacctgcctgcagccactcaggtagtggttgtcagtgctactttgcctcactctgttctcgagatgacctccaagttcatgactgatccggtccgaattctggttaagcgagacgagctgacgctggagggactcaagcagtactttattgctgttgagcaagaagagtggaagtttgacacgctgtgcgacctgtacgacacactgactattactcaggccgtcatcttctgcaacacgaaaaagaaggtggactggctgacacagcagatgaaagacaacaacttcaccgtgtgttcgatgcacggagatatggctcagaaggaccgagactcgatcatgaacgagttccgaagcggcaggagccgggtactcatctccactgacgtttgggcccgaggtatcgatgttcagcaggtgtcgctggtcatcaattatgacctgcctcccaaccgagagaattacatccatcgaatcggtcgatccggtcgatttggccgaaagggtgtggcgatcaactttgctactaacgatgatatcaccactctgagagatatcgagcagtattatagtactcagatcgatgagatgccggtgaacgtgacggatatgatgtaa

SEQ ID NO: 65813 - protein, 397 aa, Yarrowia lipolytica
MAEFDRDLDDELEFKTSKDVDVTPTFESMDLKDDLLRGIYAYGFEAPSAIQSRAITQIIKGRDTIAQAQSGTGKTATFSISMLEVIDTKHRETQAMVLSPTRELATQIQSVILALGDYMNVQCHACIGGTSLSVDMKKLEAGQQVVSGTPGRCLDMIKKGCLRTKNLKMLILDEADELLNKGFQEQIYDIYRYLPAATQVVVVSATLPHSVLEMTSKFMTDPVRILVKRDELTLEGLKQYFIAVEQEEWKFDTLCDLYDTLTITQAVIFCNTKKKVDWLTQQMKDNNFTVCSMHGDMAQKDRDSIMNEFRSGRSRVLISTDVWARGIDVQQVSLVINYDLPPNRENYIHRIGRSGRFGRKGVAINFATNDDITTLRDIEQYYSTQIDEMPVNVTDMM

SEQ ID NO: 65814 - DNA, 1200 bp, Saccharomyces cerevisiae
  CDS (1)..(1200)
atgtcgtttgacagagaagaagaccaaaaattgaagtttaaaacatcgaaaaaattaaaggtgtcttctacttttgaaagcatgaatctaaaagatgacttacttcgaggaatatactcatacggttttgaagcaccatcctctatccaatcaagggctattacacagattatttcgggcaaggacgttatagcacaagcacaatcaggtacaggtaagacagcaacttttacaatcggccttttacaagctattgatttaaggaagaaagatttacaagctctaatactatctccaacacgtgaattagcaagccaaattgggcaagtagtaaaaaatctaggggattatatgaatgtcaatgcatttgccattacaggtggtaaaactttgaaagacgacctgaagaaaatgcaaaagcatggttgccaggccgttagcggaacaccaggaagagtattagacatgattaagaaacaaatgttgcaaacaagaaatgttcaaatgttagttttagatgaggctgatgaattattgagtgagacactaggtttcaagcaacaaatatacgatatttttgcaaaattgcctaaaaattgccaagttgttgttgtcagcgcaacaatgaataaggacattttagaagtaaccagaaaatttatgaatgatccagttaaaatcctagtgaagagggatgaaatatcacttgaaggtatcaaacaatatgtcgttaatgttgacaaagaagagtggaaattcgatactctgtgtgatatatacgattctttgaccattacacaatgtgtgatattctgtaacaccaagaaaaaagtagattggttatctcagcggctaatccaatcaaactttgctgtagtctccatgcatggtgatatgaaacaagaagaaagagataaagtaatgaatgattttagaacaggtcattctcgtgtactgatatcgacggatgtttgggcgcgcggtattgatgtccaacaagtttctttagtcattaactatgacctaccagaaataatagaaaattacatccatcgtatcggtagaagtggtcgatttggtagaaagggtgtggctataaacttcattaccaaagctgatttagcaaaacttagagaaattgaaaaattctattctatcaaaataaatccgatgccagcaaattttgcagaattatcataa

SEQ ID NO: 65815 - protein, 399 aa, Saccharomyces cerevisiae
MSFDREEDQKLKFKTSKKLKVSSTFESMNLKDDLLRGIYSYGFEAPSSIQSRAITQIISGKDVIAQAQSGTGKTATFTIGLLQAIDLRKKDLQALILSPTRELASQIGQVVKNLGDYMNVNAFAITGGKTLKDDLKKMQKHGCQAVSGTPGRVLDMIKKQMLQTRNVQMLVLDEADELLSETLGFKQQIYDIFAKLPKNCQVVVVSATMNKDILEVTRKFMNDPVKILVKRDEISLEGIKQYVVNVDKEEWKFDTLCDIYDSLTITQCVIFCNTKKKVDWLSQRLIQSNFAVVSMHGDMKQEERDKVMNDFRTGHSRVLISTDVWARGIDVQQVSLVINYDLPEIIENYIHRIGRSGRFGRKGVAINFITKADLAKLREIEKFYSIKINPMPANFAELS

SEQ ID NO: 65816 - DNA, 1821 bp, Aspergillus niger
  CDS (1)..(1821)
atgccgattcctgtggatactgcgaaatccatcaacaagaagcgcaagagaaagcacggtgcgcgcgctgcgaccgacgccgacgatgcttctccgaagcccgctgtcgagaatggagagacgaccgaagtgacggagacacctacggaaaagaagtcgaagaagaaggccgccaaggagtctgagaaggaagaaaagcccaagaagcgcaaggtagatgactccagcaacgaggatgagaatgacagcgaggaagaagtccgtgaggccgatcccgaagatgaagatgataacgagggcaaggaggatggaaatggtgcagaccttccttctttggacgctgtgcgtctgcctcagacggatggcgagccgaagaagttcacggaattgaacctctctgagaagacgatgaagggtattcaggatatgggcttcgagactatgaccgagattcagcaacgtactattcctccgctacttgctggtcgtgatgtcctcggtgctgcaaagacgggttccggaaagactttgtcgtttttgatccctgctgtggagatgttgagcgctctgcggtttaagcctcgcaatggtactggtgttcttgttgtttcccccaccagagagttggcgctgcaaatattcggtgtggccagagagttgatggcgcaccactcgcaaacatatggtatcgttatcggaggtgccaaccgccgagctgaggcagagaagctcaccaagggtgtcaacctgcttattgccacccctggacgtttgctcgatcatctgcagaacacccctggctttgtgttcaagaacctgaagacacttgttattgatgaggcggaccgtatcctggaagtcggtttcgaggacgaaatgcgtcagattgtcaagatcctgccctccgaggagagacagaccatgctgttctctgccacccagaccacgaaagtcgaggatttggcgcgtatatcgctgcggcctggccccttgtacatcaacgttgaccaccgcaaggagcacagcacagttgagggtttggaacagggttatgtcatctgtgaggctgacaagcgcttcctgcttcttttctccttccttaagcgcaacctcaagaagaagatcattgtcttcttctccagctgtaactgtgtgaagtaccacgcggagctgctcaactacatcgacctgccggtgcttgaactccacggcaagcagaagcagcagaagcggaccaacacattcttcgagttctgcaatgccaagcagggaaccctgatttgcactgacgttgctgccagaggtttggatattccggctgtggactggattatccagttcgaccctccggatgacaccagggattacgttcaccgtgtcggtcgtacggctcgtggtgtgaacggaaagggacgcagtttgatgttcttgcagccttccgaggttggtttcttgaagcacctcaaggaggctcgtgttcccgtggtggaattcgacttcccggccaacaagatcgtcaacgttcaatctcaacttgagaagttgattggtcagaactactatctgaacaagtccgccaaggaaggttacagagcctatctccaggcatatgcctcgcactcgctccggtccgtcttcgacgtgcacaagcttgacctggtcaagattgccaagggattcggattctcgacgccgccgcgcatcgacatccagctgggctccagcctgagtcgggataagaagcagcagcagcaaggacgccgaaactacggcagccaaccgaaggggctgaagtttaagcgcaagcacgaggatgactga

SEQ ID NO: 65817 - protein, 606 aa, Aspergillus niger
MPIPVDTAKSINKKRKRKHGARAATDADDASPKPAVENGETTEVTETPTEKKSKKKAAKESEKEEKPKKRKVDDSSNEDENDSEEEVREADPEDEDDNEGKEDGNGADLPSLDAVRLPQTDGEPKKFTELNLSEKTMKGIQDMGFETMTEIQQRTIPPLLAGRDVLGAAKTGSGKTLSFLIPAVEMLSALRFKPRNGTGVLVVSPTRELALQIFGVARELMAHHSQTYGIVIGGANRRAEAEKLTKGVNLLIATPGRLLDHLQNTPGFVFKNLKTLVIDEADRILEVGFEDEMRQIVKILPSEERQTMLFSATQTTKVEDLARISLRPGPLYINVDHRKEHSTVEGLEQGYVICEADKRFLLLFSFLKRNLKKKIIVFFSSCNCVKYHAELLNYIDLPVLELHGKQKQQKRTNTFFEFCNAKQGTLICTDVAARGLDIPAVDWIIQFDPPDDTRDYVHRVGRTARGVNGKGRSLMFLQPSEVGFLKHLKEARVPVVEFDFPANKIVNVQSQLEKLIGQNYYLNKSAKEGYRAYLQAYASHSLRSVFDVHKLDLVKIAKGFGFSTPPRIDIQLGSSLSRDKKQQQQGRRNYGSQPKGLKFKRKHEDD

SEQ ID NO: 65818 - DNA, 1494 bp, Kluyveromyces lactis
  CDS (1)..(1494)
atggcaggtaacaaacgtgtcagagacgctgagtctgaacaagaccatgcggaaaccgaaactgtagtcaaggacactgctactactggtgaagtagagggttcttttagtgatttgaagcttagtgatggtaccatgaaggctatcggtaagatgggcttcacgcagatgactgctgttcagactcgtaccattcctcctcttttggcagggaaggatgtgttgggtgctgccaagaccggttcaggtaagactttggcatttttgattccagctatcgagatgttacattctttgaaattcaagccaagaaatggtaccggtgtcattgtgattactcctacgagagaattagcgttgcaaatctttggtgttgctcgtgaattgatggaattccacagtcaaacttttggtattgtcattggaggtgcaaaccgtagacaagaagcggataagttaatgaaaggtgttaacatcttgattgctactccaggtcgtttgttggatcatttacaaaacactaagggcttcatctttaagaacttgaaggctcttgtcatcgatgaagcggatcgtatcttggaaattgggttcgaagatgaaatgagacagattatcaagatcttaccaaacgaggatagacaatcgatgcttttctctgctacacagaccactaaggttgaggatttggcgcgtatctctttgagaccaggtcccttgttcattaacgtggattctgagaaggatacttcaacggcagatgggttagaacaaggttacgttgtttgcgagagcgataagagattcctactattgttctcgttcttgaagagaaaccaaaagaagaaagtcattgttttcttatcgtcatgtaattctgtgaagtactacgccgaacttttgaactatatcgatttaccagtgttggaattgcacggtaagcaaaagcaacagaagagaacaaacactttcttcgaattctgtaacgctgaacgtggtattctagtgtgtaccgatgtggcagcaagaggtttggatatcccagcggtagattggatcatccaatttgatcctccagatgatccaagagactatattcatagagtaggaagaactgcaagaggtaccaagggtaaaggtaaatctttgatgttcttgaccccaaccgaattaggattcctaaggtatttgaaggctgctaaggtcccattgaacgaatacgaattccccactaataagatcgctaacgtacaagcacaattggaaaaactgatcaaatcgaactattacttacatcaaattgctaaggatggttacagatcttatctacaagcatatgcatcccattccttaaaaacggtatatcagatagataaacttgatctagccaaggtcgctaaatcgtacggattccctgtgcctccaaaggtcaacattacaatcggtgctagtgggaagaccccagccaccaagaaaagaagaaccaaggattga

SEQ ID NO: 65819 - protein, 497 aa, Kluyveromyces lactis
MAGNKRVRDAESEQDHAETETVVKDTATTGEVEGSFSDLKLSDGTMKAIGKMGFTQMTAVQTRTIPPLLAGKDVLGAAKTGSGKTLAFLIPAIEMLHSLKFKPRNGTGVIVITPTRELALQIFGVARELMEFHSQTFGIVIGGANRRQEADKLMKGVNILIATPGRLLDHLQNTKGFIFKNLKALVIDEADRILEIGFEDEMRQIIKILPNEDRQSMLFSATQTTKVEDLARISLRPGPLFINVDSEKDTSTADGLEQGYVVCESDKRFLLLFSFLKRNQKKKVIVFLSSCNSVKYYAELLNYIDLPVLELHGKQKQQKRTNTFFEFCNAERGILVCTDVAARGLDIPAVDWIIQFDPPDDPRDYIHRVGRTARGTKGKGKSLMFLTPTELGFLRYLKAAKVPLNEYEFPTNKIANVQAQLEKLIKSNYYLHQIAKDGYRSYLQAYASHSLKTVYQIDKLDLAKVAKSYGFPVPPKVNITIGASGKTPATKKRRTKD

SEQ ID NO: 65820 - DNA, 1737 bp, Schizosaccharomyces pombe
  CDS (1)..(1737)
atggctaaatccgagttaaagcggaaaaagcatcaatcgggtaatgaggaagtaaaagaaaaacgtcaaaaacctttaaaaaacgataaaaaaattgctgaagaacttcctcaagacgaagacgattacgagcaggaagaggaaaatgaagatgctgaccaaaatacttcagtagaatcagaaagtgaggaattagataatgaaaatgaagatgagcgtgttcaaaaatctgtcaacctgaacgcttcttccacttcggatattgaaaagttttcagacctacaactctctgaaaacatccaaaaggcaattaaagaaatgggctttgaaacgatgacagaaattcaaaagcgctctattcctcctcttttggccggtcgtgatgttttaggtgcagctaaaactggtagtggtaaaactttggcttttctaattcctaccattgaaatgctttatgcattgaaatttaagcctcgtaatggtactggtgttattattatatctcctactcgtgaattggctcttcaaatttttggtgtcgcaaaggagttgttgaaataccatcaccaaacatttggtatcgtcattggcggtgctaatcgccgtgctgaagctgataaattggtgaaaggtgttaacctattagttgctactcctggtcgtttactggatcacttgcaaaataccaaaggatttgtattccgcaatttacgatccttagtgattgacgaagccgacagaattttggagattggttttgaggacgaaatgagacaaatcatgaaaatccttccctcggaaaatcgacaaaccctcctgttttctgctacacagacaactaaagttgaagatcttgctcgtatctctcttaagcccggacccttgtatgttaacgttgattctggtaagcctacctctaccgttgaaggattggagcaaggttatgttgtagttgattctgacaaacggtttcttcttttattttccttcttaaaacgcaatttgaagaaaaaagttattgttttcatgtcatcttgtgcttctgtcaaatatatggcagaattactgaactatatagatttaccagtacttgatcttcatggcaagcaaaagcaacagcgtcgtacaaacaccttttttgaattctgcaatgccgaaaagggaatactactttgcaccaatgttgctgcacgcgggttagatattccagccgttgactggatcgtgcagtacgatcctcctgatgacccccgagattatattcatcgtgtaggtcgtacagctagaggaacaaagggaactggtaaatcccttatgttcctcgctccttctgagctcggtttccttcgttatttgaaaactgccaaggtttctttgaatgagtttgaatttcctgccaataaagttgctaatgttcaatctcagctcgaaaagcttgtttccaaaaattattatttgcagcagtctgcaaaggatggataccgttcctacttgcaggcctatgcctcatattctttaaaatctatctttgatattaataaattggatctcgcaaaagttgctaaatcattcggttttgctcatcctccaaacgtcaatatcactattggtgctagtggacgaacagacaaaaaagaacgacgtgcgggttataataagaagaatcacgttgatgtttattcaaaacaaagatcatcagctatttctcaagacaaagagcgtggatggagccgctaa

SEQ ID NO: 65821 - protein, 578 aa, Schizosaccharomyces pombe
MAKSELKRKKHQSGNEEVKEKRQKPLKNDKKIAEELPQDEDDYEQEEENEDADQNTSVESESEELDNENEDERVQKSVNLNASSTSDIEKFSDLQLSENIQKAIKEMGFETMTEIQKRSIPPLLAGRDVLGAAKTGSGKTLAFLIPTIEMLYALKFKPRNGTGVIIISPTRELALQIFGVAKELLKYHHQTFGIVIGGANRRAEADKLVKGVNLLVATPGRLLDHLQNTKGFVFRNLRSLVIDEADRILEIGFEDEMRQIMKILPSENRQTLLFSATQTTKVEDLARISLKPGPLYVNVDSGKPTSTVEGLEQGYVVVDSDKRFLLLFSFLKRNLKKKVIVFMSSCASVKYMAELLNYIDLPVLDLHGKQKQQRRTNTFFEFCNAEKGILLCTNVAARGLDIPAVDWIVQYDPPDDPRDYIHRVGRTARGTKGTGKSLMFLAPSELGFLRYLKTAKVSLNEFEFPANKVANVQSQLEKLVSKNYYLQQSAKDGYRSYLQAYASYSLKSIFDINKLDLAKVAKSFGFAHPPNVNITIGASGRTDKKERRAGYNKKNHVDVYSKQRSSAISQDKERGWSR

SEQ ID NO: 65822 - DNA, 1818 bp, Yarrowia lipolytica
  CDS (1)..(1818)
atgggtctgaccaagaaggaaaaagtcgaaaagaaagcccgaagcgtggtgaagggcaaggccgataagaaggccaaggtcgagaagccctcgtccaagcccgccaagtccgccaagccctccaagtccaaggacgaggttgatgagctcgatgatgagttcgatgaggttgagggtctccttgagaagggagacgttgaggaggaagacgaggaggagaccaacggaaatgaggactccgagatgagcgatgacgatgaaaaggacgtcgaaatcgaggaggaagatgacggagagggctctgatctcgaggaagaggagtccactgccgttgtcactactgcgcccgctgacgctgaggttgtccacattgcctcagacgccgagcgaaagccattcagcacaattcctctgtctgagaacaccatgcagagtctgaaggacatgggatttgagaccatgactccagtccaggagaagaccatccctcctctgcttgctggccgagatgttttgggagctgccaagaccggatccggtaagactctggcattcctgattcccgccatcgagatgctgcggaaactcaagttcaagcctcgaaacggtactggtgtgattgtggtgtctcccacccgagagctggccctccagatctacggagtggctcgagatctcatggctaaccactcccagacccttggcattgtgattggtggaaataaccgacgacaggaggaagagaagctcaacaagggagtcaacctgctggtgtgtacccccggtcgacttctcgatcatctgcagaactcccagggctttgtcttcaagaacctcaaggctcttattatcgatgaggccgaccgaattctcgagatcggtttcgagcaagaaatgaaggagattatcaagattctccccaaggagcgacagtccatgctcttctcagccacacagaccaccaaggtcgaggatctggcccgaatttcgctcaagaagggtcccctctaccttaacgtcgacgaacacaacgtcagctccaccgccgagggtctcgagcagggctacgttgtgtgcgattctgacaagcggttcctgctgctgttctccttcctgaagcgaaacgcaggcaagaagatcattgtcttcctttcgtcttgtaactcggtcaagttctacggagagctgctcaactacatcgatctgcccgttctcgatctgcacggcaagcagaagcagcagaaacgaaccaacactttcttcgagttcattaacgccaagcagggagttctaatctgcactgatgtggctgcacgaggtctggatattcccaaggttgactggattatccagttcgatcctccggatgatccccgagactacattcaccgagtcggacgaactgcccgaggttctgcctccggaaagtccatcatgttcctgaccccctccgagcttggcttcctgcgatacctcaaggctgccaaggtgcctctcaacgagtacgagttccccaacaagaagattgccaacgtgcagagccagctggagaagctcatctcgtccaactactggctcaacacctctgccaaggacggatatcgagcctatctgcaagcatacgcctcgcaccacctcaagaccgtctaccagatcgacaagctcgatctggtcaaggtggccaagtccttcggtttcaatgtgcctcccaaggtgaacatttccattggagcttccggtaagggcgccaagagcatcaagggtaaggacaaccacaagaagagaggtggacccggcggaaagaagttcacacggtag

SEQ ID NO: 65823 - protein, 605 aa, Yarrowia lipolytica
MGLTKKEKVEKKARSVVKGKADKKAKVEKPSSKPAKSAKPSKSKDEVDELDDEFDEVEGLLEKGDVEEEDEEETNGNEDSEMSDDDEKDVEIEEEDDGEGSDLEEEESTAVVTTAPADAEVVHIASDAERKPFSTIPLSENTMQSLKDMGFETMTPVQEKTIPPLLAGRDVLGAAKTGSGKTLAFLIPAIEMLRKLKFKPRNGTGVIVVSPTRELALQIYGVARDLMANHSQTLGIVIGGNNRRQEEEKLNKGVNLLVCTPGRLLDHLQNSQGFVFKNLKALIIDEADRILEIGFEQEMKEIIKILPKERQSMLFSATQTTKVEDLARISLKKGPLYLNVDEHNVSSTAEGLEQGYVVCDSDKRFLLLFSFLKRNAGKKIIVFLSSCNSVKFYGELLNYIDLPVLDLHGKQKQQKRTNTFFEFINAKQGVLICTDVAARGLDIPKVDWIIQFDPPDDPRDYIHRVGRTARGSASGKSIMFLTPSELGFLRYLKAAKVPLNEYEFPNKKIANVQSQLEKLISSNYWLNTSAKDGYRAYLQAYASHHLKTVYQIDKLDLVKVAKSFGFNVPPKVNISIGASGKGAKSIKGKDNHKKRGGPGGKKFTR

SEQ ID NO: 65824 - DNA, 1518 bp, Saccharomyces cerevisiae
  CDS (1)..(1518)
atggctaccccgtcaaataaacgttctagagattctgaatctacagaagaacctgtagtagatgaaaagagcacttcaaaacaaaacaatgccgcacctgagggagaacaaactacttgtgtggaaaagttcgaagaactaaagttatcacagccaactttaaaggccattgaaaagatgggatttaccactatgacttctgttcaggcaaggactatcccacctcttttggccggtagggatgttcttggtgctgccaagacaggttctggtaaaactctagcgtttctcatccctgctattgaactattgcattctttgaaattcaaaccaagaaatggtaccggtataattgtcattacgcctacaagagagttggctttacagatttttggagtggcaagagagttaatggaattccattcacagacatttggtattgtcattggtggtgcaaatagaagacaggaagccgaaaaattgatgaaaggtgttaacatgttgattgctacccctggaagattattggatcacttacaaaatacaaaaggatttgtattcaagaacttgaaggctttgattatcgatgaagcggacagaatcttagaaattgggtttgaagatgaaatgaggcagataattaagatcttgccaaacgaagataggcaatccatgttattttcagctacacaaacgaccaaagttgaggatttggctagaatctcgctgagaccgggccctcttttcattaatgtcgttcctgaaaccgacaactccaccgcagatggattagaacaaggctatgtggtatgtgacagtgataagagatttttgttgttattttctttcttgaaaagaaatcaaaaaaagaaaattattgtatttttatcatcttgtaactctgtgaaatattacgctgaattattgaactatattgatttgccagtcctcgaattacacggtaagcaaaaacaacaaaagagaacaaatacatttttcgaattctgtaatgcggaaagaggtatcttgatttgtacagatgtcgcagctagagggctagatatccctgctgtggactggatcattcaattcgaccctcctgatgatccaagagattatattcatagagtcggaagaaccgcaagaggcactaaaggtaagggtaaatctttaatgtttttaacacctaatgaattagggtttttaagatatctaaaggcttccaaggtcccattaaatgagtacgaattcccggaaaacaaaattgcaaacgttcaatcacaattagaaaaattaattaaatccaactattatctacatcaaacagccaaggatggttatagatcttatttacaagcgtacgcttcccactctttgaaaactgtctatcaaatcgataagctggatttagccaaagtagcaaagtcttacggttttccagtccctccaaaggttaacattacaattggtgccagtggaaaaacgccaaataccaaaagacgtaaaactcataagtaa

SEQ ID NO: 65825 - protein, 505 aa, Saccharomyces cerevisiae
MATPSNKRSRDSESTEEPVVDEKSTSKQNNAAPEGEQTTCVEKFEELKLSQPTLKAIEKMGFTTMTSVQARTIPPLLAGRDVLGAAKTGSGKTLAFLIPAIELLHSLKFKPRNGTGIIVITPTRELALQIFGVARELMEFHSQTFGIVIGGANRRQEAEKLMKGVNMLIATPGRLLDHLQNTKGFVFKNLKALIIDEADRILEIGFEDEMRQIIKILPNEDRQSMLFSATQTTKVEDLARISLRPGPLFINVVPETDNSTADGLEQGYVVCDSDKRFLLLFSFLKRNQKKKIIVFLSSCNSVKYYAELLNYIDLPVLELHGKQKQQKRTNTFFEFCNAERGILICTDVAARGLDIPAVDWIIQFDPPDDPRDYIHRVGRTARGTKGKGKSLMFLTPNELGFLRYLKASKVPLNEYEFPENKIANVQSQLEKLIKSNYYLHQTAKDGYRSYLQAYASHSLKTVYQIDKLDLAKVAKSYGFPVPPKVNITIGASGKTPNTKRRKTHK

SEQ ID NO: 65826 - DNA, 1242 bp, Nicotiana tabacum
  CDS (1)..(1242)
atggcaggcttggcaccagagggttctcaatttgatgctcgtcagtatgacgccaaaatgacagagctgcttggtactgaacagcaagaattcttcacatcatacgatgaggtttacgaaagttttgatgccatgggtttgcaagaaaaccttctgaggggcatttatgcttatggttttgagaagccatctgctattcagcaaaggggcattgttcccttttgcaagggccttgacgttatccagcaggcacaatctgggactggaaagacggcaactttctgctctggaattctccagcagcttgattatagtttagttgaatgtcaggctctggttcttgcaccaacccgtgagctagctcaacagattgagaaggttatgcgggcacttggtgactatctgggtgtgaaggttcatgcttgtgttgggggtaccagtgtccgtgaggatcagcgtatccttcagagcggtgttcatgtcgtggttggtactccaggccgtgtctttgacatgctgcgcaggcagtctcttcgccctgacaacatcaagatgtttgttttggatgaagccgatgaaatgctctctagaggtttcaaggatcagatttatgatatattccaacttttgccaccaaaaatccaagtgggtgttttctctgccactatgccaccagaggcccttgagattactagaaagttcatgaacaagcccgttaggattcttgtgaagcgtgatgagctcactcttgaaggtattaagcaattttatgtcaatgttgacaaggaagagtggaagcttgaaacactctgtgatctttacgagaccttggccatcacccagagtgtcatctttgttaacactaggcgaaaggttgattggctcactgataaaatgcgtggccgtgatcatacagtatctgcaactcatggagacatggatcagaacacaagagatatcattatgagggagttccgatctggctcatctcgtgtgcttatcactactgatctccttgctcgtggtattgatgtccagcaagtctcccttgttattaattacgatctgccgactcaaccagaaaactacctgcatcgtattggtcatagtggccgatttggaaggaagggtgtttctatcaactttgtcaccaaggatgatgaaaggatgctttttgacatacaaaagttttataatgtcgtgattgaggagctgccagctaatgttgctgatctcctttga

SEQ ID NO: 65827 - protein, 413 aa, Nicotiana tabacum
MAGLAPEGSQFDARQYDAKMTELLGTEQQEFFTSYDEVYESFDAMGLQENLLRGIYAYGFEKPSAIQQRGIVPFCKGLDVIQQAQSGTGKTATFCSGILQQLDYSLVECQALVLAPTRELAQQIEKVMRALGDYLGVKVHACVGGTSVREDQRILQSGVHVVVGTPGRVFDMLRRQSLRPDNIKMFVLDEADEMLSRGFKDQIYDIFQLLPPKIQVGVFSATMPPEALEITRKFMNKPVRILVKRDELTLEGIKQFYVNVDKEEWKLETLCDLYETLAITQSVIFVNTRRKVDWLTDKMRGRDHTVSATHGDMDQNTRDIIMREFRSGSSRVLITTDLLARGIDVQQVSLVINYDLPTQPENYLHRIGHSGRFGRKGVSINFVTKDDERMLFDIQKFYNVVIEELPANVADLL

SEQ ID NO: 65828 - DNA, 1239 bp, Arabidopsis thaliana
  CDS (1)..(1239)
atggcaggatccgcaccggaaggaacacaatttgatacgcgtcagtttgaccagaggctgaatgaagttctcgatggacaggatgagttcttcacctcatatgatgaggtccatgagagctttgatgccatgggtttgcaagagaatcttcttaggggtatctatgcttacggtttcgaaaagccttctgctattcagcaaagaggaattgtacctttttgcaagggtcttgatgtgatccagcaggcacagtctggtactggaaaaaccgccactttctgctctggtgtcttgcagcagcttgactatgcccttctccagtgccaggctctcgttttggctcccaccagagagcttgctcagcagattgagaaggtcatgcgtgcccttggtgactaccaaggtgtcaaggttcatgcctgtgttggtggaaccagtgtccgtgaggatcagcgcattctccaggctggtgttcatgttgtcgttggaactcccggtcgtgtttttgacatgcttagaagacaatctctccgccctgactgcatcaagatgtttgtccttgatgaagctgatgaaatgctctcccgtggtttcaaggatcagatctatgacatattccagcttctcccaccaaagattcaggttggagtgttctctgcgacaatgcctccggaagctttggagatcacaagaaaattcatgagcaaaccagtgagaatcttggtgaaacgtgatgagctcacacttgaaggtatcaagcaattctacgtgaacgtggagaaagaagactggaagcttgagactctctgcgatctctacgagactctagccatcactcagagtgtcatctttgtcaacactcgtcgcaaggtcgactggctcacagacaaaatgagaagccgtgaccacacagtctcagcaactcatggagacatggaccaaaacaccagagacatcatcatgagagagttcaggtctggctcgtctcgtgttctaatcacaaccgatctcttggctcgtggtatcgatgtgcagcaagtctctctagtcataaactttgacctcccaactcagccagagaattaccttcaccgtatcggaagaagtggaaggttcgggagaaagggtgtcgcgattaactttgtgactcttgatgatcagagaatgctgtttgatattcagaaattctacaatgtggttgttgaggagcttccctcaaacgtggctgatttgctgtga

SEQ ID NO: 65829 - protein, 412 aa, Arabidopsis thaliana
MAGSAPEGTQFDTRQFDQRLNEVLDGQDEFFTSYDEVHESFDAMGLQENLLRGIYAYGFEKPSAIQQRGIVPFCKGLDVIQQAQSGTGKTATFCSGVLQQLDYALLQCQALVLAPTRELAQQIEKVMRALGDYQGVKVHACVGGTSVREDQRILQAGVHVVVGTPGRVFDMLRRQSLRPDCIKMFVLDEADEMLSRGFKDQIYDIFQLLPPKIQVGVFSATMPPEALEITRKFMSKPVRILVKRDELTLEGIKQFYVNVEKEDWKLETLCDLYETLAITQSVIFVNTRRKVDWLTDKMRSRDHTVSATHGDMDQNTRDIIMREFRSGSSRVLITTDLLARGIDVQQVSLVINFDLPTQPENYLHRIGRSGRFGRKGVAINFVTLDDQRMLFDIQKFYNVVVEELPSNVADLL

SEQ ID NO: 65830 - DNA, 1242 bp, Nicotiana plumbaginifolia
  CDS (1)..(1242)
atggctggctcggcaccagaaggttctcaatttgatgctcgtcagtttgatgccaaaatgactgagctgcttggcactgaacaggaggagttcttcacatcatatgatgaggtttatgacagttttgatgccatgggtttgcaagaaaaccttctcaggggaatctatgcttatggttttgagaagccatctgctatccagcaaaggggtattgttccattttgcaagggtcttgatgtgatccaacaggcacaatctggaaccggaaagacggcaactttctgctctggagttctccagcagcttgattacagcttagtcgaatgtcaggctctagttctggctccaacccgtgagctcgcccaacagattgagaaggttatgcgagcacttggtgactatcttggtgtgaaggttcatgcttgtgtaggaggtaccagtgtccgtgaggatcagcgtatccttcaaagtggtgttcatgtggtggtcggtactcctggccgtgtctttgacatgttgcgcaggcagtctcttcgccctgaccacatcaagatgtttgttctggatgaagctgatgaaatgctctcaagaggtttcaaggatcagatttatgatattttccaactgctgccaccaaagattcaagtgggtgttttctctgctactatgccgccagaggcccttgaaattactaggaaattcatgaacaaacctgtgaggattcttgtgaagcgtgatgagctcactcttgaaggtatcaagcaattttatgtgaatgttgataaggaagaatggaagcttgaaactctttgcgatctttacgagaccttagccatcacccagagtgtcatctttgttaacaccaggcgcaaggttgattggctcactgacaaaatgcgcagccgtgaccacactgtatctgcaactcacggagacatggaccagaacactagggatatcattatgcgagagttccgatccgggtcatctcgtgtgctcatcaccactgatcttctggcacgtggtattgatgtgcagcaagtttcccttgtgattaactatgaccttccgactcagccagagaactacttgcatcgtattggtcgtagtggacgttttggaaggaagggtgttgctatcaactctgttacaaaggatgacgaaaggatgctttttgatattcagaagttttacaatgttgtaatcgaggagttgccagccaatgtggccgatctcctttga

SEQ ID NO: 65831 - protein, 413 aa, Nicotiana plumbaginifolia
MAGSAPEGSQFDARQFDAKMTELLGTEQEEFFTSYDEVYDSFDAMGLQENLLRGIYAYGFEKPSAIQQRGIVPFCKGLDVIQQAQSGTGKTATFCSGVLQQLDYSLVECQALVLAPTRELAQQIEKVMRALGDYLGVKVHACVGGTSVREDQRILQSGVHVVVGTPGRVFDMLRRQSLRPDHIKMFVLDEADEMLSRGFKDQIYDIFQLLPPKIQVGVFSATMPPEALEITRKFMNKPVRILVKRDELTLEGIKQFYVNVDKEEWKLETLCDLYETLAITQSVIFVNTRRKVDWLTDKMRSRDHTVSATHGDMDQNTRDIIMREFRSGSSRVLITTDLLARGIDVQQVSLVINYDLPTQPENYLHRIGRSGRFGRKGVAINSVTKDDERMLFDIQKFYNVVIEELPANVADLL

SEQ ID NO: 65832 - DNA, 1245 bp, Arabidopsis thaliana
  CDS (1)..(1245)
atggcaggaatggcatctgatggaactcaatatgatcctcgtcagtttgatactaagatgaatgccattctcggcgaggaaggagaggaaacattctacactaactatgacgaagtttgcgacagctttgatgcaatggaattgcaaccagatcttctcaggggtatttatgcttacggtttcgagaagccttctgctattcagcaaagaggaattattccattctgcaagggtcttgatgtgatccagcaagctcaatctggaactggaaagaccgctaccttttgctctggtgttttacagcagctcgatattagtttggttcaatgccaagctcttgttttggcacctacccgagaacttgcccagcaaattgaaaaggttatgagggcacttggtgactaccttggcgtcaaggctcaggcttgtgttggtggaacaagtgttcgtgaggatcaacgtgttcttcagtctggtgttcatgttgttgttggaacccctggtcgtgtctttgacttgttacgcagacaatccctccgtgctgatgcaatcaaaatgtttgttcttgatgaagctgatgaaatgctctctcgtggtttcaaggatcagatatacgacatcttccagcttcttccttccaaggttcaggttggtgttttctctgctacaatgcctcccgaagcccttgagatcacaaggaagttcatgaacaaaccagtcaggattctggtcaagcgagacgagctgactcttgaaggtatcaagcagttttatgtcaatgtagacaaggaagagtggaaactcgagacactatgcgatctctacgagacactggccatcactcaaagcgtcatctttgtgaacacaaggcgtaaggttgattggctaaccgacaaaatgagaagccgtgaccacactgtttcagctacacacggagacatggaccagaacacaagagacatcatcatgcgcgaattccgctctgggtcttcccgtgtcctcataaccactgacctccttgctcgtggtatcgatgttcagcaagtctctctggtcataaactttgacctcccaacccaaccggagaattaccttcatcgtattggaagaagtggaaggtttgggagaaagggagtagcaatcaatttcatgacatcggaggatgagagaatgatggctgatattcagaggttttacaatgtggtcgttgaggagttgccaagcaatgttgctgatcttctctga

SEQ ID NO: 65833 - protein, 414 aa, Arabidopsis thaliana
MAGMASDGTQYDPRQFDTKMNAILGEEGEETFYTNYDEVCDSFDAMELQPDLLRGIYAYGFEKPSAIQQRGIIPFCKGLDVIQQAQSGTGKTATFCSGVLQQLDISLVQCQALVLAPTRELAQQIEKVMRALGDYLGVKAQACVGGTSVREDQRVLQSGVHVVVGTPGRVFDLLRRQSLRADAIKMFVLDEADEMLSRGFKDQIYDIFQLLPSKVQVGVFSATMPPEALEITRKFMNKPVRILVKRDELTLEGIKQFYVNVDKEEWKLETLCDLYETLAITQSVIFVNTRRKVDWLTDKMRSRDHTVSATHGDMDQNTRDIIMREFRSGSSRVLITTDLLARGIDVQQVSLVINFDLPTQPENYLHRIGRSGRFGRKGVAINFMTSEDERMMADIQRFYNVVVEELPSNVADLL

SEQ ID NO: 65834 - DNA, 1176 bp, Nicotiana plumbaginifolia
  CDS (1)..(1176)
atggaggaagacagattagtcttcgagacatcaaagggcgtggaacccatcgctagtttcgctgagatgggcattaaagatgaccttcttagaggtgtttatcaatacgggtttgaaaagccgtccgccattcaacaacgggctgtgctgcctattatatcgggccgtgatgtcatcgctcaggcccaatccggtaccggaaaaacctccatgattgcactcaccgtttgccaaattgtggataccaaatcttccgaggtacaagcattaattttgtcacctacgcgggagctcgcagctcaaacagaaaaggtgattttggctattggagattacattaacgttcaagcacatgcatgtattggaggcaaaagcgtaggtgaagatatcagaaaactagagcatggagtacaagtagtctctggaactcctggaagagtctgtgacatgattaaaaggagaactttacgaactaggggtataaaattattgattcttgacgaatctgatgagatgttgagccgtggttttaaggatcagatatatgatgtttacagatatcttccaccggagcttcaggttgtactgatttctgccactcttccaaatgaaattctggagataacaagcaaatttatgacagatcctgttcggattcttgtaaaacgtgatgagttgactctagagggcatcaaacagttctttgtcgcggttgagaaagaagagtggaaatttgatacactttgtgatctttatgatacactcaccatcacccaggctgttattttctgcaacacaaaacgaaaggttgattggctgactagcaagatgcgtgaaaataattttacagtatcatctatgcatggagatatgccacagaaggagagagacgctattatggcagagttccgaggtggcacgactcgtgttctaatcaccacagatgtttgggcaaggggattggatgttcaacaggtgtctctggtgattaactatgaccttccaaacaatagagagctgtacattcatcgcattggtcgctctggtcgttttggtcgaaagggtgttgccataaattttgtgaagagtgatgacattaaaattctgagagacatagagcaatactacagtacccagattgatgaaatgcccatgaacgtcgctgatttgatatga

SEQ ID NO: 65835 - protein, 391 aa, Nicotiana plumbaginifolia
MEEDRLVFETSKGVEPIASFAEMGIKDDLLRGVYQYGFEKPSAIQQRAVLPIISGRDVIAQAQSGTGKTSMIALTVCQIVDTKSSEVQALILSPTRELAAQTEKVILAIGDYINVQAHACIGGKSVGEDIRKLEHGVQVVSGTPGRVCDMIKRRTLRTRGIKLLILDESDEMLSRGFKDQIYDVYRYLPPELQVVLISATLPNEILEITSKFMTDPVRILVKRDELTLEGIKQFFVAVEKEEWKFDTLCDLYDTLTITQAVIFCNTKRKVDWLTSKMRENNFTVSSMHGDMPQKERDAIMAEFRGGTTRVLITTDVWARGLDVQQVSLVINYDLPNNRELYIHRIGRSGRFGRKGVAINFVKSDDIKILRDIEQYYSTQIDEMPMNVADLI

SEQ ID NO: 65836 - DNA, 1242 bp, Nicotiana tabacum
  CDS (1)..(1242)
atggctggcttggcaccggaaggttctcaatttgatgctcgtcagtatgatgccaaaatgactgagctgcttgggactgagcaggaggagttcttcacatcatatgatgaggtttatgacagttttgatgccatgggtttgcaagaaaaccttcttaggggcatctatgcttatggttttgagaagccatctgctatccagcaaaggggtattgttccattttgcaagggtcttgatgtgatccaacaggcacaatctggaaccggaaagacagcaactttctgctctggagttctccagcagctcgattacagcttagtcgaatgtcaggctctggttctggctccaacccgtgagcttgcccaacagattgagaaggttatgcgagcacttggtgattatctcggtgtgaaggttcatgcttgtgtaggaggtaccagtgtccgtgaggatcagcgtatccttcaaagtggtgttcatgtggtggttggtactcctggccgtgtctttgacatgttgcgcaggcagtctcttcgccctgaccacatcaagatgtttgttctggatgaagctgatgaaatgctctcaagaggtttcaaggatcagatttatgatatttttcaactgctgccaccaaagattcaagtgggtgttttctctgccactatgccgccagaagcccttgaaattactaggaagttcatgaacaagcctgttaggattcttgtgaagcgtgatgacgttacgcttgaaggtatcaagcaattttatgtcaatgttgataaggaagagtggaagcttgaaactctttgcgatctttacgagaccttagccatcacccagagtgtcatctttgttaacaccaggcgtaaggttgattggctcactgacaaaatgcgcacgcgtgatcacacagtatctgcaactcacggagacatggaccagaacactagagatatcattatgcgagagttccgatctgggtcatctcgtgtgctcatcaccactgatcttctggcacgtggtattgacgtgcagcaagtttcccttgtgattaactatgaccttccaactcagccagagaactacctgcatcgtattggtcgtagtggacgatttggaaggaagggtgttgctatcaactttgtcataaaggatgacgaaaggatgctttctgatattcagaggttttacaatgttgtaatcgaggagttgccagccaatgtggccgatctcctttga

SEQ ID NO: 65837 - protein, 413 aa, Nicotiana tabacum
MAGLAPEGSQFDARQYDAKMTELLGTEQEEFFTSYDEVYDSFDAMGLQENLLRGIYAYGFEKPSAIQQRGIVPFCKGLDVIQQAQSGTGKTATFCSGVLQQLDYSLVECQALVLAPTRELAQQIEKVMRALGDYLGVKVHACVGGTSVREDQRILQSGVHVVVGTPGRVFDMLRRQSLRPDHIKMFVLDEADEMLSRGFKDQIYDIFQLLPPKIQVGVFSATMPPEALEITRKFMNKPVRILVKRDDVTLEGIKQFYVNVDKEEWKLETLCDLYETLAITQSVIFVNTRRKVDWLTDKMRTRDHTVSATHGDMDQNTRDIIMREFRSGSSRVLITTDLLARGIDVQQVSLVINYDLPTQPENYLHRIGRSGRFGRKGVAINFVIKDDERMLSDIQRFYNVVIEELPANVADLL

SEQ ID NO: 65838 - DNA, 1242 bp, Nicotiana tabacum
  CDS (1)..(1242)
atggcacgtttggcaccagatggagctcaatttgatgcccgtcaatatgattctaagatgaacgatttacttgccgctgatggaaaagatttctttacatcatatgacgaagtttatgacagttttgatgctatgggtctgcaagagaaccttctcaggggcatttatgcctatggttttgagaaaccttctgcaattcaacaaagaggtatagttccattttgcaagggacttgatgtaattcagcaggctcagtctggcacaggaaaaacagctactttttgttctggaattttgcagcagcttgattatggtttagttcaatgtcaagcgttggtgttagcacctactcgtgaacttgctcaacagattgagaaggtgatgcgagcacttggtgactaccttggggttaaggtccatgcttgtgtaggtgggactagtgtcagggaggatcaacgtattctcgcagctggtgttcatgttattgttggcacccctggacgtgtgtttgacatgctgcgaagacagtctctccgtcctgattacctcagaatgtttgtgctagacgaggctgatgaaatgctgtcacgtggttttaaggatcagatatatgatatttttcagatgctgcctacaaaagtccaagtcggagtgttttctgcgaccatgccaccagaagcccttgacatcacaagaaagttcatgaataagcccgtgagaatcttggttaaacgcgatgaattgacacttgagggtatcaaacagttttatgtcaatgttgataaggaggaatggaagctcgagacactctgcgatctatacgagacgctagcaattacacagagtgtcatatttgtgaacaccaggcgcaaggttgattggttaacagacaaaatgcgaacgcgtgatcacacagtctcagctacacatggagatatggaccagaacactagggacataatcatgcgcgagtttcgctctggttcttctcgtgtccttatcacaaccgatctgttggctcgtggtatagatgtacaacaagtatcacttgtgatcaactatgatctcccgactcagccagagaattatctccatcgtattggaagaagtggaaggtttggaaggaaaggagttgctatcaactttgtgacaacagacgacgaaagaatgttgttcgatattcagaagttttacaacgtgataatcgaagaactcccctcaaatgttgctgatctcctctga

SEQ ID NO: 65839 - protein, 413 aa, Nicotiana tabacum
MARLAPDGAQFDARQYDSKMNDLLAADGKDFFTSYDEVYDSFDAMGLQENLLRGIYAYGFEKPSAIQQRGIVPFCKGLDVIQQAQSGTGKTATFCSGILQQLDYGLVQCQALVLAPTRELAQQIEKVMRALGDYLGVKVHACVGGTSVREDQRILAAGVHVIVGTPGRVFDMLRRQSLRPDYLRMFVLDEADEMLSRGFKDQIYDIFQMLPTKVQVGVFSATMPPEALDITRKFMNKPVRILVKRDELTLEGIKQFYVNVDKEEWKLETLCDLYETLAITQSVIFVNTRRKVDWLTDKMRTRDHTVSATHGDMDQNTRDIIMREFRSGSSRVLITTDLLARGIDVQQVSLVINYDLPTQPENYLHRIGRSGRFGRKGVAINFVTTDDERMLFDIQKFYNVIIEELPSNVADLL

SEQ ID NO: 65840 - DNA, 1242 bp, Nicotiana tabacum
  CDS (1)..(1242)
atggcgggtgcagctcctgaaggatcacagtttgatgctcgtcagtatgattcgaaaatgacagaattgctaaatgctgaagggcaagatttctttacctcatacgatgaggtctatcatagttttgatgccatgggattgaaggagaacctcctcaggggcatttatgcatacggttttgagaaaccctcagcaattcaacaaagaggaattgtacctttctgcaaaggtcttgatgtgattcaacaggctcagtctggaactggaaagactgctactttttgctctggaattctgcaacaactagactatgaactactagactgtcaagctttggtcttggcacctactcgtgagcttgcacagcaaattgaaaaggtcatgcgagcacttggagactatcttggtgtcaaggttcatgcttgtgtgggaggcaccagtgtccgtgaggatcaacgcatcctttcaagtggggttcacgttgttgtgggaacccctggacgtgtatttgacatgctaaggagacagtctctccgccctgatcacattaagatgtttgtattggacgaggctgatgaaatgctttccagaggcttcaaggatcagatctacgatattttccagctcttgcctcctaagattcaggttggtgttttctctgccacaatgcctcctgaggcccttgagatcacaaggaagttcatgaacaaacccgtgaggattcttgtgaaacgtgatgaactgaccttagaaggtattaagcagttttatgtgaatgtggacaaggaagaatggaagcttgagaccctttgcgatttgtatgaaaccttggccatcacacagagtgtgatatttgtgaatactcgtcgcaaagttgattggttgactgacaagatgcgaagcagagatcatacagtctcggccactcatggtgacatggatcagaatactagggatattataatgcgcgaatttcgttctggttcctctcgtgttctcatcaccaccgatcttttggccagaggaattgatgtccaacaagtttcccttgtcataaattatgatctccccactcaacctgagaattaccttcatcgtattggacgtagtgggaggtttggtaggaagggtgtttcaatcaacttcgtaaccagcgacgatgagagaatgctgtctgacattcagaggttttacaatgtggtgattgaggagctcccagcaaatgttgctgatctcctgtaa

SEQ ID NO: 65841 - protein, 413 aa, Nicotiana tabacum
MAGAAPEGSQFDARQYDSKMTELLNAEGQDFFTSYDEVYHSFDAMGLKENLLRGIYAYGFEKPSAIQQRGIVPFCKGLDVIQQAQSGTGKTATFCSGILQQLDYELLDCQALVLAPTRELAQQIEKVMRALGDYLGVKVHACVGGTSVREDQRILSSGVHVVVGTPGRVFDMLRRQSLRPDHIKMFVLDEADEMLSRGFKDQIYDIFQLLPPKIQVGVFSATMPPEALEITRKFMNKPVRILVKRDELTLEGIKQFYVNVDKEEWKLETLCDLYETLAITQSVIFVNTRRKVDWLTDKMRSRDHTVSATHGDMDQNTRDIIMREFRSGSSRVLITTDLLARGIDVQQVSLVINYDLPTQPENYLHRIGRSGRFGRKGVSINFVTSDDERMLSDIQRFYNVVIEELPANVADLL

SEQ ID NO: 65842 - DNA, 1191 bp, Ashbya gossypii
  CDS (1)..(1191)
atgtctgacagtattaccaatccggagaactctgaaatccaaaccaactacgacaagatcgtgcacaagtttgacgagctaaagctaaaggaggtgttgttgagaggtatctacggttatggtttcgttgacccatctgccatccagcagcgtgcgatcttgcctatcattgagggccacgacgttttggcgcaggcccagtccggtaccggtaagactggtaccttctcgattgctgcgttgcagagaatcgacgagagcatcaaggccccacaggcgttgatcctagctcctaccagagagttggcgctacagatccagaaggttgtgatggcgcttgcgctgcacatggacgttaaggtccacgcttgtatcggtggtacggaccctcgtgaggacgccgaggccttgagagccggtgcgcagattgtcgtcggtacccccggccgtgtgttcgacatgattgagagacgtaacttcaagactgaccacatcaagatgttcatcctggacgaggccgacgagatgttgtcctccggcttcaaggagcaaatttacaagattttcaccatgttgccaccaaccacccaggtcgtgctattgtctgccaccatgccaaaggaggtgttggacgtgaccgacaagttcatgaacaagcccgtcagaatcttggtcaagaaggatgccttgaccttggagggtatccagcagtactatattaacgtcgagagcgaagagtacaagtacgactgtttgtccgacctgtacgactccatttcggttactcaggccgtcattttctgcaacaccagaagaaaggtcgaggagctaaccaagagattgaccgacgacagcttcactgtctccgccatctactccgacttgcctcaggcccagagagacacaatcatgaaggagtttagaaccggttcttccagaatcttgatctccaccgacttgttggctagaggtatcgacgtccaacaggtgtccttggtcatcaactacgacctgccaaacaacaaggagaactacatccacagaatcggtagaggtggtcgtttcggtagaaagggtgttgccatcaacttggttaccgacagagacgttggtgacatgagagagctagagagattctactccactcagatcgaggagctgccagccaacattgctgacttgttcgactga

SEQ ID NO: 65843 - protein, 396 aa, Ashbya gossypii
MSDSITNPENSEIQTNYDKIVHKFDELKLKEVLLRGIYGYGFVDPSAIQQRAILPIIEGHDVLAQAQSGTGKTGTFSIAALQRIDESIKAPQALILAPTRELALQIQKVVMALALHMDVKVHACIGGTDPREDAEALRAGAQIVVGTPGRVFDMIERRNFKTDHIKMFILDEADEMLSSGFKEQIYKIFTMLPPTTQVVLLSATMPKEVLDVTDKFMNKPVRILVKKDALTLEGIQQYYINVESEEYKYDCLSDLYDSISVTQAVIFCNTRRKVEELTKRLTDDSFTVSAIYSDLPQAQRDTIMKEFRTGSSRILISTDLLARGIDVQQVSLVINYDLPNNKENYIHRIGRGGRFGRKGVAINLVTDRDVGDMRELERFYSTQIEELPANIADLFD

SEQ ID NO: 65844 - DNA, 1197 bp, Aspergillus niger
  CDS (1)..(1197)
atggcttctaacgacaagggcttggaggagatccccgagggacagatcgagactaactacgatgaggttaccgactctttcgactccatggacctgaagcccgagctgcttcgcggtgtctacgcctacggttttgagcgtccctccgctatccagcagcgtgccatcaagcccatcattgccggccacgatgtcattgctcaggctcagtctggtaccggaaagactgccactttctccatctccgctctccagaagattgaccaggagctcaaggcttgccaggctctgattgtcgctcccacccgtgagttggctcagcagatccagaaggtcgttgttgccattggtgacttcatgaacattgagtgccacgcctgcattggtggtaccaacgtccgtgacgacatgaacgccctccgcgccggcccccaggtcgttgtcggtacccccggtcgtatccacgatatgattgagcgccgtgtcctcaagaccgaccagatgaagctcttcatcctcgacgaggctgatgagatgctttctcgtggtttcaccgagcaaatctacgacatcttccagctcctcccccagtctacccaggtcaccctgctgtccgctaccatgccccaggatgtccttgaggtcaccaccaagttcatgcgtgaccccatccgtatcctggtcaagaagcaggagcttacccttgagggtatcaagcagttctacattgctgttgagaaggaggagtggaagctcgacaccctctccgatctctacgagaccgtcaccattacccaggccgtcatcttctgtaacacccgccgcaaggtcgactggctcactgacaagctcactgcccgtgacttcaccgtctctgccatgcacggtgacatggagcagggccagcgtgatgttatcatgaaggagttccgttccggatcttcccgtgtcctgatcgccactgaccttctggcccgtggtatcgatgtccagcaggtctccctggtcatcaactacgaccttcccgccaaccgtgagaactacatccaccgtatcggtcgtggtggtcgtttcggtcgtaagggtgttgccatcaacttcgtcaccgctgacgatgtccgcatgatgcgtgagattgagcagttctacagcacccagatcgaggagatgcccatgaacgttgctgacctcatctaa

SEQ ID NO: 65845 - protein, 398 aa, Aspergillus niger
MASNDKGLEEIPEGQIETNYDEVTDSFDSMDLKPELLRGVYAYGFERPSAIQQRAIKPIIAGHDVIAQAQSGTGKTATFSISALQKIDQELKACQALIVAPTRELAQQIQKVVVAIGDFMNIECHACIGGTNVRDDMNALRAGPQVVVGTPGRIHDMIERRVLKTDQMKLFILDEADEMLSRGFTEQIYDIFQLLPQSTQVTLLSATMPQDVLEVTTKFMRDPIRILVKKQELTLEGIKQFYIAVEKEEWKLDTLSDLYETVTITQAVIFCNTRRKVDWLTDKLTARDFTVSAMHGDMEQGQRDVIMKEFRSGSSRVLIATDLLARGIDVQQVSLVINYDLPANRENYIHRIGRGGRFGRKGVAINFVTADDVRMMREIEQFYSTQIEEMPMNVADLI

SEQ ID NO: 65846 - DNA, 1266 bp, Aspergillus oryzae
  CDS (1)..(1266)
atgtctaacgataaaggattggaagagatccctgaggaccaaagcaccacaccacacaaaccaacatcaaatgtcggatcaaggctaactcgacttttccaatcaacaggacagatcgagaccaactacgatgagatcaccgactccttcgacgccatggagctgaagcctgagttgcttcgcggtgtctacgcctatggtttcgagcgtccctctgctatccagcagcgtgccatcaagcccatcatcaaaggtagcgatgttatcgctcaggcccagtctggtactggaaagactgccactttctccatctccgctctccagaagctcgaccccaatgttaagggctgccaggccctcattctcgcccctacccgtgagttggctcagcagatccagaaggtcgtcgttgctatcggtgacttcatgaacatcacctgccacgcttgtattggtggtactgcggtccgtgaggacatgaaggctctcggagaaggccccgaggtggttgtcggtacccccggtcgtgtccacgatatgatccagcgccgtgtcctgaaaaccgaccatctgaagcaattcatccttgatgaggctgatgagatgttgtctcgtggtttcaccgagcagatctacgacatcttccagctcctcccccagtctacccaggttgtcctgctctctgccaccatgccccaggatgtccttgaggtcaccaccaagttcatgcgcgaccccgtccgtatcctggtcaagaagcaggaacttacccttgaaggtatcaagcagttctacattgccgtcgagaaggaggagtggaagcttgacaccctctccgatctctacgagactgtcaccatcacccaggccgtcatcttctgcaacacccgccgcaaggtcgactggctcactgacaagctcactgcccgtgacttcactgtctccgccatgcacggcgatatggagcagtctcagcgtgatgttatcatgaaggagttccgctctggttcttctcgtgtcctgatcgccactgaccttttggcccgtggtatcgacgtccagcaggtgtcccttgtcatcaactacgacctgcctgccaaccgtgagaactacattcaccgtatcggtcgtggtggtcgtttcggtcgtaagggtgttgccatcaacttcgtcactgctgacgatgtccgcatgatgcgtgagatcgagcagttctacagcacccagatcgaggagatgcccatgaacgttgctgacctcatctaa

SEQ ID NO: 65847 - protein, 421 aa, Aspergillus oryzae
MSNDKGLEEIPEDQSTTPHKPTSNVGSRLTRLFQSTGQIETNYDEITDSFDAMELKPELLRGVYAYGFERPSAIQQRAIKPIIKGSDVIAQAQSGTGKTATFSISALQKLDPNVKGCQALILAPTRELAQQIQKVVVAIGDFMNITCHACIGGTAVREDMKALGEGPEVVVGTPGRVHDMIQRRVLKTDHLKQFILDEADEMLSRGFTEQIYDIFQLLPQSTQVVLLSATMPQDVLEVTTKFMRDPVRILVKKQELTLEGIKQFYIAVEKEEWKLDTLSDLYETVTITQAVIFCNTRRKVDWLTDKLTARDFTVSAMHGDMEQSQRDVIMKEFRSGSSRVLIATDLLARGIDVQQVSLVINYDLPANRENYIHRIGRGGRFGRKGVAINFVTADDVRMMREIEQFYSTQIEEMPMNVADLI

SEQ ID NO: 65848 - DNA, 1191 bp, Candida glabrata
  CDS (1)..(1191)
atgtctactgatcaaatgacccaactggatgaatcccagatcgaaaccaactacgacaaggttgtctacgagttcgatgacatgaacttgaatgagaagcttttgagaggtgttttcggttacggtttcaacaagccatctgccattcaacaacgtgctatcatgccaattattgaaggtaacgatgtcttggctcaagctcaatccggtactggtaagactggtactttctccattgctgctttgcaaagaattgacccagctatcaaggctccacaagctttgatgttggccccaaccagagaattggctttgcaaatccaaaaggtcgtcatggctttgggtttccacatggacatcaaggttcacgcctgtatcggtggtacttcctttgttgaagacgctgaaggtttgagagatgcccaaattgttgtcggtaccccaggtcgtgtcttcgacaacatccaaagacgtaagttcaaggtcgacaacatcaagatgttcatcttggatgaagccgatgaaatgttgtccactggtttcaaggaacaaatctaccaaattttcaccatgttgccaccaaccacccaagtcgttctattgtccgctaccatgccaagagacgttctagaagtcactgccaagttcatgcaaaacccagttagaatcttggttaagaaggatgaattgactttggaaggtatcaagcaattctacgtcaacgtcgaagaagaacaattcaagtacgattgtttgaccgatttgtacgactccatctccgttactcaagctgttatcttctgtaacaccagacgtaaggtcgaagaattgactcaaagattgaccgctgacaacttcaccgtctcctccatctactccgacttgccacaacaagaaagagacaccattatgaaggaattcagatctggttcttccagaattttgatttccaccgatttgttggccagaggtatcgatgtccaacaagtttccttggttatcaactacgatttgccaactaacaaggaaaactacattcacagaattggtagaggtggtcgtttcggtagaaagggtgttgccatcaacttcattgtcaacgaggacgttcaagctttgagagaattggaacaattctactccactcaaatcgaagaattgccaagtgacatcggtactttgttcacttaa

SEQ ID NO: 65849 - protein, 396 aa, Candida glabrata
MSTDQMTQLDESQIETNYDKVVYEFDDMNLNEKLLRGVFGYGFNKPSAIQQRAIMPIIEGNDVLAQAQSGTGKTGTFSIAALQRIDPAIKAPQALMLAPTRELALQIQKVVMALGFHMDIKVHACIGGTSFVEDAEGLRDAQIVVGTPGRVFDNIQRRKFKVDNIKMFILDEADEMLSTGFKEQIYQIFTMLPPTTQVVLLSATMPRDVLEVTAKFMQNPVRILVKKDELTLEGIKQFYVNVEEEQFKYDCLTDLYDSISVTQAVIFCNTRRKVEELTQRLTADNFTVSSIYSDLPQQERDTIMKEFRSGSSRILISTDLLARGIDVQQVSLVINYDLPTNKENYIHRIGRGGRFGRKGVAINFIVNEDVQALRELEQFYSTQIEELPSDIGTLFT

SEQ ID NO: 65850 - DNA, 1197 bp, Coccidioides immitis
  CDS (1)..(1197)
atggcttctaatgacaagggtctcgaagagatcccagataaccagatcgaatccaactacgatgagatcaccgattctttcgatgctatgaaccttcgtgccgaattgctacgaggtgtctacgcttatggtttcgagcgcccgtctgctatccagcagcgcgctatcatgccagttatcaagggttccgatgtcattgcccaggctcaatccggaactggaaagactgccaccttctcgatctctgctctccagaaggtcgacacaaacctcaaggcctgccaggctctcattcttgctcctacccgtgagcttgctcagcaaatccagaaggtcgtcgttgccatcggcgatttcatgagtgttgagtgccacgcctgcattggtggtaccaatgtccgcgaagatataaaggccctcaatgacggcccccaagttgtcgtcggcacccccggccgtgttcacgacatgatccagcgtcgtgtcctcaagaccgatcagatgaagatgttcgtcctcgacgaggctgatgaaatgctttctcgtggattcactgagcaaatctacgacattttccaatttttgcctcagtccacccaagtcgtcctgctctctgccactatgccacaggatgtcttggatgtaaccaccaaattcatgcgtgacccagtccgcatcttggtcaagaaggccgaacttaccctcgaaggtatcaagcagttctacattgccgtcgagaaggaggaatggaaactcgacactctttccgatctctatgagaccgtcaccatcactcaagctgtcatcttctgcaacaccaggagaaaggtcgactggttgaccgacaagctcattgctcgtgacttcaccgtttctgccatgcacggtgagatggagcaaaaccagcgtgacgtcattatgaaggagttccgctctggttcctcccgtgttttgatcgccactgacttgcttgcccgtggtatcgacgttcagcaagtctccttggttatcaactatgatctccccgctaaccgcgagaactacatccatcgtattggtcgtggtggtcgtttcggtcgtaagggtgtcgctatcaacttcgtcaccgctgatgatgtccgtatgatgagagaaatcgagcagttctacagcactcaaatcgaagaaatgcccatgaacgttgccgatctcatttaa

SEQ ID NO: 65851 - protein, 398 aa, Coccidioides immitis
MASNDKGLEEIPDNQIESNYDEITDSFDAMNLRAELLRGVYAYGFERPSAIQQRAIMPVIKGSDVIAQAQSGTGKTATFSISALQKVDTNLKACQALILAPTRELAQQIQKVVVAIGDFMSVECHACIGGTNVREDIKALNDGPQVVVGTPGRVHDMIQRRVLKTDQMKMFVLDEADEMLSRGFTEQIYDIFQFLPQSTQVVLLSATMPQDVLDVTTKFMRDPVRILVKKAELTLEGIKQFYIAVEKEEWKLDTLSDLYETVTITQAVIFCNTRRKVDWLTDKLIARDFTVSAMHGEMEQNQRDVIMKEFRSGSSRVLIATDLLARGIDVQQVSLVINYDLPANRENYIHRIGRGGRFGRKGVAINFVTADDVRMMREIEQFYSTQIEEMPMNVADLI

SEQ ID NO: 65852 - DNA, 1206 bp, Cryptococcus neoformans
  CDS (1)..(1206)
atgtctgacactaagggtgcggccgagcagggccttcaaatcgacggtgacctcatcaactccaactggaatgaggttgttgacaacttcgacgacatgaagttgaagggcgagctcctccgtggtatctacgcttacggttttgagcgaccttctgctatccagcagcgtgctatcatgcccatcgttactggccgtgactgcattgcccaggctcagtccggtaccggtaagaccgctaccttctccgtttctatcctccagaggatcgacaccactgttaagaagacccaggctcttgtccttgctcccacccgagagctcgctcaacagattcaaaaggtcgttatcgctctcggtgactaccttaacgtcgactgccacgcctgtgtcggtggtaccgccgtccgagaggacattgccaggcttaacgagggtccccacatcgttgtcggtacccccggtcgtgtctttgacatgatcaaccgaggtgctcttaagaccgaggccgttatgatgttctgccttgacgaggccgatgagatgctttccaccggtttcaaggagtccatctacgagatcttccagcttctccccggagagacccaggtcgtcctcctttccgccaccatggcccctgaggtcctcgacgtcactaagaagttcatgagggaccccatcaggattctcgttaagaaggacgagcttacccttgaaggtatccgacagttctacattaacgtcgagaaggaggagtggaagctcgagaccctttgcgacttgtacgagaccgtcaccatcacccaggccgtcatcttctgctctacccgacgaaaggtcgactggctcactcagcagctccacgaccgtcagttcaccgtctctgccatgcacggtgacatgaagcaggaggagcgagaggtcatcatgaaggagttccgatccggttcttcccgagttcttatcaccaccgaccttttggcccgtggtatcgatgtccagcaggtttctttggtcatcaactacgacctcccctcttctaaggagaactacatccaccgaattggtcgaggtggtcgattcggccgaaagggtgttgctattaacttcgtttccaacgaggacaagaacatgcttgaggagattgagacttactacaacacccaggttgaggagatgcctcttaacgttgccgacctcatctaa

SEQ ID NO: 65853 - protein, 401 aa, Cryptococcus neoformans
MSDTKGAAEQGLQIDGDLINSNWNEVVDNFDDMKLKGELLRGIYAYGFERPSAIQQRAIMPIVTGRDCIAQAQSGTGKTATFSVSILQRIDTTVKKTQALVLAPTRELAQQIQKVVIALGDYLNVDCHACVGGTAVREDIARLNEGPHIVVGTPGRVFDMINRGALKTEAVMMFCLDEADEMLSTGFKESIYEIFQLLPGETQVVLLSATMAPEVLDVTKKFMRDPIRILVKKDELTLEGIRQFYINVEKEEWKLETLCDLYETVTITQAVIFCSTRRKVDWLTQQLHDRQFTVSAMHGDMKQEEREVIMKEFRSGSSRVLITTDLLARGIDVQQVSLVINYDLPSSKENYIHRIGRGGRFGRKGVAINFVSNEDKNMLEEIETYYNTQVEEMPLNVADLI

SEQ ID NO: 65854 - DNA, 1266 bp, Emericella nidulans
  CDS (1)..(1266)
atgttctccatcaccctccgtttcatctcctgttcgggcaaggatttttttcgcggtctggaggggcggcgggacaggaaaatctttgcactacccacggcgagacacggccagatcgagtctaactacgatgagatcaccgactccttcgactctatggagttgaagcctgagctgcttcgcggtgtctacgcctacggtttcgagcgtccctctgctattcagcagcgtgccatcctgcccatcgtcaagggcaacgatgtcatcgcccaggcccagtccggtactggaaagaccgctactttctccatctccgctttgcaaaagctcgaccccaacgtcaaggcttgccaggctctgattgtcgctcctacccgtgaattggcccagcagatccagaaggtcgtcatcgctatcggtgacttcatgaacatccagtgccacgcctgcattggtggtactgctgtccgtgatgacatgaacgctctccgtgagggccctcagatcgttgtcggtacccccggccgtatccacgacatgatccagcgtcgtgtcctcaagacagaccagatgaagatgttcattctcgacgaggccgatgagatgttgtctcgtggtttcaccgagcaaatctacgacatcttccagctccttccccagtccacccaggttgtcctgctctctgccaccatgccccaggacgttcttgaggtcaccaccaagttcatgcgtgacccagtccgtatcctggtcaagaagcaggaacttaccctcgaaggtatcaagcagttctacatcgctgttgagaaggaggagtggaagcttgacaccctctccgatctctacgagaccgtcaccatcacccaggccgtcatcttctgcaacacccgccgcaaggttgactggctcactgacaagctcactgcccgtgacttcactgtctccgccatgcacggtgacatggagcaggcccagcgtgatgttatcatgaaggagttccgctctggatcctctcgtgtcctcattgccactgaccttctggcccgtggtatcgatgtccagcaggtttccctggtcatcaactacgatctccccgccaaccgtgagaactacattcaccgtatcggtcgtggcggtcgtttcggtcgtaagggtgttgctatcaacttcgtcaccgctgacgatgtccgtatgatgcgtgagattgagcagttctacagcacccagattgaggagatgcccatgaacgttgctgacctcatctaa

SEQ ID NO: 65855 - protein, 421 aa, Emericella nidulans
MFSITLRFISCSGKDFFRGLEGRRDRKIFALPTARHGQIESNYDEITDSFDSMELKPELLRGVYAYGFERPSAIQQRAILPIVKGNDVIAQAQSGTGKTATFSISALQKLDPNVKACQALIVAPTRELAQQIQKVVIAIGDFMNIQCHACIGGTAVRDDMNALREGPQIVVGTPGRIHDMIQRRVLKTDQMKMFILDEADEMLSRGFTEQIYDIFQLLPQSTQVVLLSATMPQDVLEVTTKFMRDPVRILVKKQELTLEGIKQFYIAVEKEEWKLDTLSDLYETVTITQAVIFCNTRRKVDWLTDKLTARDFTVSAMHGDMEQAQRDVIMKEFRSGSSRVLIATDLLARGIDVQQVSLVINYDLPANRENYIHRIGRGGRFGRKGVAINFVTADDVRMMREIEQFYSTQIEEMPMNVADLI

SEQ ID NO: 65856 - DNA, 1278 bp, Encephalitozoon cuniculi
  CDS (1)..(1278)
atgaaacaagtaacagaacaagcagaagactttgtggatacgaggagcagtggtacggagatcagggagtttgaggatctccggagcgactcatctcagatcaggatgtttgacacatgggaggactacgggctgaaggaggatctactgaaggggatctacagcataggatttgagacgccttcctttattcagaaggcggcgatccagccgataatagacgggagagacataagagcgcaggcacagagtggtactgggaagactggggcatttgcggttgcggcgcttcagatatgcgatatgagccaggacgtgacacagattcttgttcttgcatcgaccagggagattgcagcacagaatgcagcgaggtttgaggatcttggatgttttatgggggcaagggtcgcccttctttctggaggaagcccgattgcagcagacaaggttgcacttgaaaagaagccgcacattgttgttgggacgcccgggagggttgagcacatgatcaatataaatgaattgagcatggacaacattaagttatttgtgattgatgaggcagacgagatgctgaaggccggattccaggagcaggtgaagtctatattccgaaggatcacaaacaaggacgaggtgcagatagcaatgttctctgcaacatacgacgaggaggagctccgtgtcagtgaggagattcttatcaaccctgtgataattgacctgagatacaacgaccagaccctgaagggaataagacagtacttcattgatctgaggaaggagcctccattccggaagggaagagaggactatctgcttccaaagcttgtgacgctgtatgacatcttccgcaagcaacgcctggggcaatcgattgtgtttatcaacagcaaggaggatgccaggatagtgtatgactggctgatcaggcacgagtgggagtgtgagcttatatctgcagaactaacacaggcggagagggagaggacgctgaataggtttcgaggagggactggcagatgcctgatctcctctggactgctttcaaggggaatcgacatccagaatctctctgtggtgttctgcctggatgttccatccttcgagagaaagagcacctatatccacaggataggacgatccggaagatatgggagaaagggaatagccataaacattgtctatgagcatgagctgaaaaacctgaaggcgatcgagaggttctacaacaccacgatcaaggagcttcctgcagattttagttttcaataa

SEQ ID NO: 65857 - protein, 425 aa, Encephalitozoon cuniculi
MKQVTEQAEDFVDTRSSGTEIREFEDLRSDSSQIRMFDTWEDYGLKEDLLKGIYSIGFETPSFIQKAAIQPIIDGRDIRAQAQSGTGKTGAFAVAALQICDMSQDVTQILVLASTREIAAQNAARFEDLGCFMGARVALLSGGSPIAADKVALEKKPHIVVGTPGRVEHMININELSMDNIKLFVIDEADEMLKAGFQEQVKSIFRRITNKDEVQIAMFSATYDEEELRVSEEILINPVIIDLRYNDQTLKGIRQYFIDLRKEPPFRKGREDYLLPKLVTLYDIFRKQRLGQSIVFINSKEDARIVYDWLIRHEWECELISAELTQAERERTLNRFRGGTGRCLISSGLLSRGIDIQNLSVVFCLDVPSFERKSTYIHRIGRSGRYGRKGIAINIVYEHELKNLKAIERFYNTTIKELPADFSFQ

SEQ ID NO: 65858 - DNA, 1191 bp, Kluyveromyces lactis
  CDS (1)..(1191)
atgtctgacggtattactgacattgacgagaaccaaatccaatctacttacgacaaggttgtgtattccttcgatgatttgaaattgaaggaagaattgttgagaggtatctttggttacggttttgtcgaaccatctgccattcaacaacgtgctattctgccaattatcgaaggtaaggatgttttagctcaagctcaatctggtactggtaagactggtactttctctattgctgctttgcaaaacattgatgaaaagattaaggccccacaaggtttgatcttggctccaaccagagaattggctttgcaaattcaaaaggttgttatggctttggctatccacatggacgttaaggtccatgcttgtatcggtggtacttctttgcaagaagattccgaagctttgagaggtggtgctcaaatcattgttggtactccaggtcgtgttttcgatatgatcgaccgtagaatcttcaagactgacaacatcaagatgttcatcttggatgaagccgatgaaatgttgtctactggtttcaaggaacaaatctacaacattttcaccatgttgccaccaacttcccaagttgtcttgttgtctgctaccatgccaggtgatgtcttggaagtcacttccaagttcatgaaggacccagtcagaatcttggttaagaaggatgaattgaccttggaaggtattggtcaatactacgttaacgttgaagaagaacaatacaagtacgactgtttgaccgatttgtacgattctatctccgttacccaagctgttattttctgtaacaccagaagaaaggtcgaagaattgaccgaaagattgagagaaaacaacttcaccgtctctgctatctactctgatttgcaacaacaggaaagagacaccatcatgaaggaattcagaagtggttcttcaagaattttgatctccactgatttgttggctagaggtatcgatgtccaacaagtctctttggttatcaactacgacttgccatccaacaaggaaaactatatccacagaatcggtagaggtggtcgtttcggtagaaagggtattgctatcaacttcgtcaccaataaggatatcggtgctatgagagaattggaaagattctactctactcaaattgaagaattgccatcaagcatcagcgaattgttcgattaa

SEQ ID NO: 65859 - protein, 396 aa, Kluyveromyces lactis
MSDGITDIDENQIQSTYDKVVYSFDDLKLKEELLRGIFGYGFVEPSAIQQRAILPIIEGKDVLAQAQSGTGKTGTFSIAALQNIDEKIKAPQGLILAPTRELALQIQKVVMALAIHMDVKVHACIGGTSLQEDSEALRGGAQIIVGTPGRVFDMIDRRIFKTDNIKMFILDEADEMLSTGFKEQIYNIFTMLPPTSQVVLLSATMPGDVLEVTSKFMKDPVRILVKKDELTLEGIGQYYVNVEEEQYKYDCLTDLYDSISVTQAVIFCNTRRKVEELTERLRENNFTVSAIYSDLQQQERDTIMKEFRSGSSRILISTDLLARGIDVQQVSLVINYDLPSNKENYIHRIGRGGRFGRKGIAINFVTNKDIGAMRELERFYSTQIEELPSSISELFD

SEQ ID NO: 65860 - DNA, 1191 bp, Magnaporthe grisea
  CDS (1)..(1191)
atggccgacaagggactcgaggatgtccccgaagggcagatcgagtccaattacgatgagaccgtcgactctttcgacgagatgaacctgaagtcggagctgcttcgtggtatctatgcctacggtttcgagcgcccgtctgctatccagcagcgcgctatcatgcccgttatcaagggccacgatgtcattgctcaggctcagtccggtaccggcaagaccgccactttctcgatctcggttctgcagaagatcgacaccaacgtcaagcagtgccaggccctgatccttgccccgacccgtgagcttgctcagcagatccagaaggtcgttgttgccatcggtgacttcatgaacattgagtgccacgcctgcattggcggcaccagcgttcgtgatgacatgaaggctcttcaggacggcccccaggtcgttgtcggtacccccggccgtgtccacgacatgatccagcgccgcttcctcaagaccgacggcatgaagatgttcgtccttgacgaggccgacgagatgctttcgcgtggtttcaccgagcaaatttacgacatcttccagctcctcccccagtcgactcaggttgtcctgctttcggccaccatgccccaggacgtcctggaggtcacgaccaagttcatgcgcgaccccgtccgcatcctggtcaagaaggacgagcttaccctggagggtatcaagcagttctacattgctgtcgagaaggaagagtggaagctcgacaccctctcggacttgtacgagactgtcaccattacccaggccgttattttctgcaacacccgcagaaaggtcgactggctcacggacaagctcactgcccgtgacttcactgtgtctgccatgcacggtgacatggaccaggctcagcgtgacctgatcatgaaggagttccgctcgggttcgtcccgtgtgcttattgccaccgacttgctcgctcgtggtatcgacgtccagcaggtatcgctggtcatcaactacgacctgcccgccaaccgtgagaactacatccacaggattggtcgtggtggtcgtttcggccgaaagggtgtcgccattaacttcgtcaccgccgatgatgtgcgcatgatgcgcgagattgagcagttctacagcacgcagattgaggagatgcctatgaacgtcgccgacttgatttaa

SEQ ID NO: 65861 - protein, 396 aa, Magnaporthe grisea
MADKGLEDVPEGQIESNYDETVDSFDEMNLKSELLRGIYAYGFERPSAIQQRAIMPVIKGHDVIAQAQSGTGKTATFSISVLQKIDTNVKQCQALILAPTRELAQQIQKVVVAIGDFMNIECHACIGGTSVRDDMKALQDGPQVVVGTPGRVHDMIQRRFLKTDGMKMFVLDEADEMLSRGFTEQIYDIFQLLPQSTQVVLLSATMPQDVLEVTTKFMRDPVRILVKKDELTLEGIKQFYIAVEKEEWKLDTLSDLYETVTITQAVIFCNTRRKVDWLTDKLTARDFTVSAMHGDMDQAQRDLIMKEFRSGSSRVLIATDLLARGIDVQQVSLVINYDLPANRENYIHRIGRGGRFGRKGVAINFVTADDVRMMREIEQFYSTQIEEMPMNVADLI

SEQ ID NO: 65862 - DNA, 1233 bp, Zea mays
  CDS (1)..(1233)
atggcaggattggcaccagaagggtcgcaatttgatgacaagcagtatgacaagaaaatgcaggagatattaactgaagacttcttcacttcatatgatgatgtttgtgaaagttttgacagcatgggactgcaagagaaccttctgagaggcatctatgcctatggttttgagaagccatcggctattcagcaaaggggaatagttcccttctgcaaggggcttgacgtgattcagcaagctcagtctggaactggaaaaacagctaccttctgttctggaatcttgcagcaacttgattatggattggttgaatgccaggcattggttcttgctccaacccgtgagcttgctcagcaaattgagaaggttatgcgtgctcttggggactatttgggtgtcaaagtgcatgcctgtgttggtggaacatctgttcgtgaggaccaaaggattcttgccagtggtgtgcatgttgttgtgggcacaccaggacgtgtgtttgatatgttgcgcaggcagtctctccgtcccgacaacatcaagatgtttgtgttggatgaggctgatgagatgctctcccgtggattcaaggatcagatctatgatatcttccagcttcttccatccaagattcaggtcggtgtcttctcagctaccatgccccctgaggcccttgagatcacgcgcaagttcatgaacaaacctgtgaggattctcgtcaagagagatgagctcacccttgagggtatcaagcaattctatgtcaatatcgacaaggaagattggaagctcgacactctgtgtgacctgtatgagaccctggcaatcacccagagtgtcatctttgtgaacacacgccgcaaggtggactggctcacggacaagatgaggagtagggaccacaccgtgtcagctacacacggtgatatggaccagaacaccagggacatcatcatgagggagttcaggtccgggtcctctcgtgtgctcatcaccaccgacctgctcgcccgtggtatcgacgtccagcaggtctcacttgtcatcaactacgacctgccgacccagccagagaactacctccaccgcatcggccgtagtggtcggtttggaaggaagggtgttgccatcaacttcgtcacccgcgacgacgagcgaatcgtgtttgacgtccagaggttctacaacgtgaccgttgaggagctgccggccaatgtcgccgaccttctctag

SEQ ID NO: 65863 - protein, 410 aa, Zea mays
MAGLAPEGSQFDDKQYDKKMQEILTEDFFTSYDDVCESFDSMGLQENLLRGIYAYGFEKPSAIQQRGIVPFCKGLDVIQQAQSGTGKTATFCSGILQQLDYGLVECQALVLAPTRELAQQIEKVMRALGDYLGVKVHACVGGTSVREDQRILASGVHVVVGTPGRVFDMLRRQSLRPDNIKMFVLDEADEMLSRGFKDQIYDIFQLLPSKIQVGVFSATMPPEALEITRKFMNKPVRILVKRDELTLEGIKQFYVNIDKEDWKLDTLCDLYETLAITQSVIFVNTRRKVDWLTDKMRSRDHTVSATHGDMDQNTRDIIMREFRSGSSRVLITTDLLARGIDVQQVSLVINYDLPTQPENYLHRIGRSGRFGRKGVAINFVTRDDERIVFDVQRFYNVTVEELPANVADLL

SEQ ID NO: 65864 - DNA, 1484 bp, Pichia stipitis
  CDS (58)..(1251)
tccttttttgtgaatcccagcaaagttcttgttattttacacataaactcagcaatcatgtcctccgacggtattaaggaaattgactccgatttgatcgaaaccaactacgacaatgtcgtgtacaagttcgatgacttgaacttgaagcctaacatcgtgagaggtatctttggttacggttacgaaaccccatcggccattcaacaaagagctatcttgccaatcactgaaggtcgtgatgtccttgcccaggcccaatccggtaccggtaagactgccactttcaccatctctgccttgcaaagaattgatgaaaacgaaaagagcacccaagccttgatcttggctccaaccagagaattggctcttcaaatcaagaacgtcattacttccattggtttgtacttgaacgtgactgtccatgcctccattggtggtacctctatgcaagacgatatcgaagccttcagatcaggtgtccaagtcgttgttggtactccaggtagagttttcgacatgattgaaagaagatacttcaagaccgaaaaggtcaagatgttcattatggatgaagccgatgaaatgttatcgtctggtttcaaggaacaaatctacaacattttccgtttgttgccagaaactacccaagtcgtcttgttgtctgccactatgcctcaagatgtgttggaagtcaccaccaagttcatgaacaaccctgtcagaatcttggtcaagaaggacgaattgaccttggaaggtatcaagcagttctacatcaacgtcgaattggaagactacaagttcgactgtttgtgtgacttgtacgactccatctccgtcacccaggccgttatcttctgtaacaccagatctaaggtcgaattcttgaccaccaagttgaaggctgaaaacttcactgtctctgccatccacgccgacttgccccaagccgaaagagacacaatcatgaaggaattcagatctggttcctcccgtatcttgattgctaccgacttgttggctagaggtatcgatgtccaacaggtctctttggtcatcaactacgacttgccatctaacaaggaaaactacatccacagaatcggtagaggtggtcgtttcggtagaaagggtgtagccatcaactttgtcaccgaaagagacgttggtatgatgagagaaatcgaacaattctactccactcaaatcgaagaaatgcctgctgatatcggtgctttgtttaactaagctgcttagttcattatgtaattttaattccatagtttctctttgtcatttatatttggtcgaatacaaaattctgaaaatttactatctctgggtatttgacctaaaagaataatatttcgcattgtgtggtagttgaatcatagagctgtaattggaaccgaatagaaaggaaacttctgtttgacaatataattctatctacttcttactttcacggcagtaatccctag

SEQ ID NO: 65865 - protein, 397 aa, Pichia stipitis
MSSDGIKEIDSDLIETNYDNVVYKFDDLNLKPNIVRGIFGYGYETPSAIQQRAILPITEGRDVLAQAQSGTGKTATFTISALQRIDENEKSTQALILAPTRELALQIKNVITSIGLYLNVTVHASIGGTSMQDDIEAFRSGVQVVVGTPGRVFDMIERRYFKTEKVKMFIMDEADEMLSSGFKEQIYNIFRLLPETTQVVLLSATMPQDVLEVTTKFMNNPVRILVKKDELTLEGIKQFYINVELEDYKFDCLCDLYDSISVTQAVIFCNTRSKVEFLTTKLKAENFTVSAIHADLPQAERDTIMKEFRSGSSRILIATDLLARGIDVQQVSLVINYDLPSNKENYIHRIGRGGRFGRKGVAINFVTERDVGMMREIEQFYSTQIEEMPADIGALFN

SEQ ID NO: 65866 - DNA, 1179 bp, Schizosaccharomyces pombe
  CDS (1)..(1179)
atggtagaccaactggaggattcggttattgaaaccaactacgatgaggttattgacaccttcgacgacatgaatttgaagcctgagcttctccgtggtatttatgcctacggttttgagcgtccttctgccattcagcaaagagccattatgcccattttgggagagcgtgatgtccttgctcaagctcaatctggtactggtaagactgctaccttctcaatttctgttttgcagaagattgacactagcttgaagcaatgccaagctcttatccttgctcctacccgtgagcttgctcaacaaatccaaaaggttgttgttgctttaggcgatctcatgaatgttgaatgccatgcttgtattggtggtactcttgttcgtgatgatatggctgccttgcaagctggtgttcacgttgttgttggtacaccaggtcgtgttcacgacatgattcaacgtcgtgctcttcctaccgatgccgtccaaatgtttgttcttgatgaggctgatgaaatgttgtcccgtggtttcaaggaccaaatttacgacattttccaacttttgcctcctactgctcaagttgttcttctttctgccaccatgcctcaagatgttttggaagtcaccaccaaatttatgcgtgatcccattcgtatccttgttaagaaagatgagcttaccttggaaggtatcaagcaattctatgttgccgttgaaaaggaagagtggaagcttgacactctttgcgatctttatgaaaccgtcactgttactcaagccgttattttctgtaatacccgtagaaaggtcgattggcttaccgagcagctcactgagcgtgattttaccgtctcctccatgcacggtgatatggaccaagctcaacgtgatactttgatgcatgagttccgtactggttcttctcgtattcttatcaccaccgatcttcttgctcgtggtatcgatgtccaacaagtctccttggttatcaactatgacttacctgctaacagagaaaactacattcaccgtattggtcgtggtggtcgtttcggtcgtaagggtgtttccattaactttgttaccaacgacgatgttcgcatgatgcgtgagattgaacaattctacaatacacacattgaggaaatgcctatgaacattgctgacttgatttaa

SEQ ID NO: 65867 - protein, 392 aa, Schizosaccharomyces pombe
MVDQLEDSVIETNYDEVIDTFDDMNLKPELLRGIYAYGFERPSAIQQRAIMPILGERDVLAQAQSGTGKTATFSISVLQKIDTSLKQCQALILAPTRELAQQIQKVVVALGDLMNVECHACIGGTLVRDDMAALQAGVHVVVGTPGRVHDMIQRRALPTDAVQMFVLDEADEMLSRGFKDQIYDIFQLLPPTAQVVLLSATMPQDVLEVTTKFMRDPIRILVKKDELTLEGIKQFYVAVEKEEWKLDTLCDLYETVTVTQAVIFCNTRRKVDWLTEQLTERDFTVSSMHGDMDQAQRDTLMHEFRTGSSRILITTDLLARGIDVQQVSLVINYDLPANRENYIHRIGRGGRFGRKGVSINFVTNDDVRMMREIEQFYNTHIEEMPMNIADLI

SEQ ID NO: 65868 - DNA, 1236 bp, Ustilago maydis
  CDS (1)..(1236)
atgtctaagcccgaggacacttccgccgccgccgctgcccctgctggcgaggctggcaacaacctcaacatcgccgatggcgagatcgagtccaactgggagaccgtcattgacaactttgacaacatggagctcaaggaggagcttctccgtggtgtctacgcctacggtttcgagcgtccctcggcgattcaggcgcgtgctatcgtccccgtcatcaagggtcacgatgtgattgctcaggctcagtccggtaccggcaagaccgccaccttctcgatcgccattctgcagcgcatcgaccctagcatcaaggccgtccaggcgctcatccttgcccccactcgtgagctcgcccagcagatccagaaggtcgtcatcgcactcggcgactacatgaagatcgactgccacgcctgcatcggtggtaccaacgttcgtgaggacatggccaagctcaatgagggcgcccaggtcgtcgtcggcactcccggtcgtgtctacgacatgatcaaccgtcgtgctttcaagacggaccagctcaagatgttctgcctcgacgaggccgacgagatgctctcgcgtggtttcaaggaccagatgtacgaggtcttccagctcctgccccaggacacccagtgtgtcttgctctcggctaccatgcctcaggaggttctcgaggtcaccaaaaagttcatgcgcgaccccatccgcattctcgtcaagcgtgacgagctgaccctggaaggtatcaagcagttctacgttgccgtcgaaaaggaggactggaagctcgacacgctttgcgatctctacgagaccgtcaccatcacccaggccgtcatcttctgcaacactcgccgaaaggtcgactggttgaccgacaagctcacttcgcgtgagttcaccgtctctgccatgcacggcgacatggagcaggcgcagcgtgaggtcatcatgcgcgagttccgctcgggctcgtcgcgtgtcttgatcaccaccgacttgctcgctcgtggtatcgacgtgcagcaggtttcgttggtcatcaactacgatcttcccagcaacagggagaactacattcaccgtatcggccgtggtggtcgtttcggtcgtaagggtgttgccatcaactttgtcacgagcgatgacgtgcgtatgctccgtgacattgagcagttctactcgacccagatcgacgagatgccgctcaacgttgccgatctcatctaa

SEQ ID NO: 65869 - protein, 411 aa, Ustilago maydis
MSKPEDTSAAAAAPAGEAGNNLNIADGEIESNWETVIDNFDNMELKEELLRGVYAYGFERPSAIQARAIVPVIKGHDVIAQAQSGTGKTATFSIAILQRIDPSIKAVQALILAPTRELAQQIQKVVIALGDYMKIDCHACIGGTNVREDMAKLNEGAQVVVGTPGRVYDMINRRAFKTDQLKMFCLDEADEMLSRGFKDQMYEVFQLLPQDTQCVLLSATMPQEVLEVTKKFMRDPIRILVKRDELTLEGIKQFYVAVEKEDWKLDTLCDLYETVTITQAVIFCNTRRKVDWLTDKLTSREFTVSAMHGDMEQAQREVIMREFRSGSSRVLITTDLLARGIDVQQVSLVINYDLPSNRENYIHRIGRGGRFGRKGVAINFVTSDDVRMLRDIEQFYSTQIDEMPLNVADLI

SEQ ID NO: 65870 - DNA, 1188 bp, Yarrowia lipolytica
  CDS (1)..(1188)
atggccgacggactcaccgacatcgattcttcccagatcaccaccaactacgacgaggttgttacctctttcgacgaccttggactcaaggacgagctgctccgaggtatctacggttacggttttgagaacccttcctccattcagcagcgagccatcctgcccgtcatcaagggtaacgatgtccttgcccaggcccagtctggtactggtaagactgccaccttctctatctctgctctgcagaacattgacgagaagattaagaagccccaggctctgatcattgcccccactcgagagctggcccaccagatccagaaggttgtccttgcctttggcgagtacatgaagattgagtgccacgcctgcattggtggtacctccgtcgccgaggacatccgagtcatccaggagggtgtccacgtcattgtcggaacccccggtcgaatccacgatatgattgagcgacgaatcctcaagaccgacctcatcaagatgttcatccttgatgaggccgatgagatgctttctcgagagttcaaggaccccatctacgatatcttcaccaccctccccgagaccacccagaccgttctgctgtctgccaccatgcccgctgaggtcctcgacatcaccggcaagttcatgcgagaccccgtccgaattcttgtcaagaaggatgagctgacccttgaaggtatcaagcagttctacattgatgttgagcaggagtcctacaagtttgaggttctgtgcgatctctacgagaccatcaacgtttctcaggccgtcattttctgcaacacccgacgaaaggtcgactacctgacccaggctctgaccgaggctgacttcaccgtctcctccatgcacggtgagaccgagcagtctcagcgagatgtcattatgaaggctttccgaaccggttcttctcgaatcctcatcactaccgatctgcttgcccgaggtatcgatgtccagcaggtttctctggtcatcaacttcgacctgccctccaaccgagagaactacatccatcgaattggtcgaggtggacgattcggccgaaagggtgttgccatcaacttcgtcacctccgaggaccacggtatgctcaaggagctcgagcgattctactccactgagatcgttgagatgcccaccaacattgccgatcttatttaa

SEQ ID NO: 65871 - protein, 395 aa, Yarrowia lipolytica
MADGLTDIDSSQITTNYDEVVTSFDDLGLKDELLRGIYGYGFENPSSIQQRAILPVIKGNDVLAQAQSGTGKTATFSISALQNIDEKIKKPQALIIAPTRELAHQIQKVVLAFGEYMKIECHACIGGTSVAEDIRVIQEGVHVIVGTPGRIHDMIERRILKTDLIKMFILDEADEMLSREFKDPIYDIFTTLPETTQTVLLSATMPAEVLDITGKFMRDPVRILVKKDELTLEGIKQFYIDVEQESYKFEVLCDLYETINVSQAVIFCNTRRKVDYLTQALTEADFTVSSMHGETEQSQRDVIMKAFRTGSSRILITTDLLARGIDVQQVSLVINFDLPSNRENYIHRIGRGGRFGRKGVAINFVTSEDHGMLKELERFYSTEIVEMPTNIADLI

SEQ ID NO: 65872 - DNA, 2274 bp, Aspergillus oryzae
  CDS (1)..(2274)
atgggtcagaaacggcagcgggaccaaaagggtccgggatcctttgcgaagaaaaggaagaagagcgcaaagcctagcgatgcgactgcggaagacagcgactgggatggcattgtcggaatgaatgagctcaactggaaggaggtagctctgccggatcgtcttgaagacgctggtggtttttttggattggaggaaattgagggtgtagatattatccggtcagaaggaaatggtgagattaaattcaagaagaaagagccggaggaaacgaatactcagtctgatgatgaatgggaaggtttcggcgacgacgatcaggctgtatcccaggaggagtcgaaggagacccaagacgaacccaacgagtccgacaagaaggcgaaggtgaaagagagcaaaaatgcaaagaaggagaagaaaaaaaacgcaaaggatgcgaggaaagaacagaaagaaaaggctgttgaaagcaaggaagacaagggtattaaatccggactctcgtttgcagcccttcaggaagaagaagacgacggagcggacgtctctgcttgggagtctcttgggctctcccccgaaattctcgctggtatctcgaaaatgaagttcaccacgccaacgtctgttcaaaaggcttgcattcctcccattttggatggtcgcgatgtcatcggaaaggcttcgacaggttctggaaaaacgctcgctttcggaatccccattctagagtactatctggaaaagttacggagtaaaacccaaaaggattcagaaaagaccgagaccacaccgatcgcgcttgttttatcgcccaccagagagctggcgcatcagctcgcgaagcatattggggaggtggtcagccatgccccgggcgtcaatgctagaattgcgctcttaacaggtggcttgtcattgcaaaagcaacagagagtccttaccaacgctgatatcgtaatcggtacgcctggtcgagtgtgggaagttctcagctctggacatggtctgatccgcaagatgcaggcgataaaattccttgtcattgatgaggccgatcgacttctgagtgaaggacatttcaaggaagctcacgagatattggcggctcttgaccgtgtcgtggatggagagtttccggacgagtcaagcgacgaatctgacgatgaattagaccccaagtctgggagacagaccctggttttctcagctacattccaccgtgaccttcagcagaagctggcgggcaaaggcaagtggacaggcggtgatatcatgagccaaaaggagtcgatggagtatcttcttcaaaaactcaacttccgcgaggagaagcctaggtttattgacgtgaacccagtctcgcagatggcagagaaccttaaggagggtattgtagagtgcgctgctatggaaaaggacctctttctttacacacttctgctctatcaccctaaacatcgtacgctggttttcacgaattctatatccgccgtccgacgactaactcagctcctacaaaccctccaactcccagcccttgctcttcactcttctatggcccaaaaggcacgacttcgttccgtcgaacgattttcctctccctcatcagaccctagctccatccttgtcgccactgacgttgctgcgcgtggactcgacatcaagggtattgactttgtagtccattaccacgcccctcgtactgcggacgcatatgtccaccggtctggtcgtacagcgcgtgctggggcatcgggaaagagcgtcatcatctgctctccggacgaaatggtcggcgtggtccgactggctgcaaaggtgcatgcgaacatggccaacagaaagaaggttcctcttgaatcgttggagttagaccgtcgagtcgtgtctcgtgtcaaacagcgagtcacattagcggctcggatcgttgactccaatatcgccaaggagaaggtttcgtccgaggacaactggctccgcacggcagcagaagatcttggggttgactatgacagcgaggagttcgacaatgccgcagcgcgcgggcgcgggcgcggacgtggacgacaggagcgcgaacggaaggctggaagcacttccaagggggaattagcggggatgcgcgccgaattgaaacaactactctcacagagagtgaatgtgggtgtgagtgagcggtatctgacttcggggcgagttgatatcgaggcactcctgcgtggggagggtaacaattccttcctagggcaagtggatccgttggatttctaa

SEQ ID NO: 65873 - protein, 757 aa, Aspergillus oryzae
MGQKRQRDQKGPGSFAKKRKKSAKPSDATAEDSDWDGIVGMNELNWKEVALPDRLEDAGGFFGLEEIEGVDIIRSEGNGEIKFKKKEPEETNTQSDDEWEGFGDDDQAVSQEESKETQDEPNESDKKAKVKESKNAKKEKKKNAKDARKEQKEKAVESKEDKGIKSGLSFAALQEEEDDGADVSAWESLGLSPEILAGISKMKFTTPTSVQKACIPPILDGRDVIGKASTGSGKTLAFGIPILEYYLEKLRSKTQKDSEKTETTPIALVLSPTRELAHQLAKHIGEVVSHAPGVNARIALLTGGLSLQKQQRVLTNADIVIGTPGRVWEVLSSGHGLIRKMQAIKFLVIDEADRLLSEGHFKEAHEILAALDRVVDGEFPDESSDESDDELDPKSGRQTLVFSATFHRDLQQKLAGKGKWTGGDIMSQKESMEYLLQKLNFREEKPRFIDVNPVSQMAENLKEGIVECAAMEKDLFLYTLLLYHPKHRTLVFTNSISAVRRLTQLLQTLQLPALALHSSMAQKARLRSVERFSSPSSDPSSILVATDVAARGLDIKGIDFVVHYHAPRTADAYVHRSGRTARAGASGKSVIICSPDEMVGVVRLAAKVHANMANRKKVPLESLELDRRVVSRVKQRVTLAARIVDSNIAKEKVSSEDNWLRTAAEDLGVDYDSEEFDNAAARGRGRGRGRQERERKAGSTSKGELAGMRAELKQLLSQRVNVGVSERYLTSGRVDIEALLRGEGNNSFLGQVDPLDF

SEQ ID NO: 65874 - DNA, 2391 bp, Kluyveromyces lactis
  CDS (1)..(2391)
atggtatacggtgtttcaaaaatggcgaataagaatcgcaagaacttgaagcctgttaaaagtgataggaaagaccgtatttcaaagaatcattcaaagaagaaggttaataagaatagccttaagaaagtagccactacagatatcactgttaatgctaatgagttgaattggaagagtgttgatattccagatactttagatgatttcggtggtttctacggattagaagaaatcgatggtgtggatgtgaaagttgtcgacggtaaagtccagttcatcacgaaagataacaagaacgttaagaaagagccggagcaagtggaggaaaaggataatatcgttttccaagaggatgatgaagatgtcaacatggatgaattaattgaattcaagaattttgacgatatcaaggagggtgagttaagtgcagcttcggatgatgaagagagcgagttccatgtgtccactgaagaagaaggagaagagggagaagaagcagaagatcaagaagaagaaagatccgagaaggaaaatgttaagggggaagcaggtactgttgtcactgaagatcaaacaaatgatgacttattacagagcaacgtattttcctctaacgtcgatatcgatgatcaagagcctccagtacttcctgagtggtccgaaaatatggatctctcattcacagtgctgaaaggactctctgggcttggcttcaccaggcctacagaaattcaattgaaatctattcctttagctctgaaaggacataatatcatgggtaaggctagcacaggttccggtaagactttagcatatggtattcctatcattgaacaattaattaaagacacatcaaatgataggtctatcggcttgatatttaccccaactagagaattggcccatcaagtaactgaccatttgcaaaaggtttggacgaaaatgaataagcttaacaagtacacgattctttcactaacaggtggtttgtcgattcagaaacaagaacgtatcttaaaatatgatggttctggtagaatcattgtggcaactcctggtagatttttggaattattagaaaggaacccagatctgattcctaggtttgccaaaattgacactttagttcttgatgaggcagacagactactacaagacggacatttcgatgaattcgagaaaattttgaagttattagggaaagcccgaaaaattaaaacaagtatcgacggaaagccaactggaagtggatggcaaacaatgattttctctgccacattttcattggatcttttcacgaaattagataaaacttcatggaaaatccttaaaacagccggtggggagaacaatgaaatggaacaagttttaaatcatttgatgaagaaaattcaattcaaatctaagccagttattatcgatactaatcctgaacataaagttacatctcaggtcaaagaatccctgatagaatgtttgccaatggagcgtgacttatatgtctactactttatcatgatgtatcctggcacaactttagtattttgtaacgctatagatagcgtcaaaaagttgaatgcatttttaaacaatctaaagatttcgtcattccagatccattcatcaatggctcaaaaaaatcgtcttaggaaccttgaaaagttcaaagaacaatcagagaaaaatagcaaggtaggaaaaccaacaattttaattgctagtgacgtcgctgctagaggattggacatctcgggtatcaaacatgttttacactatcacttaccccgcagtgctgacgtatatatccacagaagtggaagaacagcccgtggtgataatgaaggtgtttctgtcatgatttgttcaccacaggaatccatgggacctttaagaaagctcagaaaggtgttatctaccaagaagagtagtaaccccaggaaaacaaaatggcagaatgatgtcccaatgttaccacttgagcctgacatcgtttctcagctgagagaaagaagcaagatagcgagcgaacttgctgatgatgagatagcaacgaaatcactacataaggatgataattggttaaaaaaggctgctgaagaattggatattgaattagattcagaagaagaggaaaaggaccaatttttagctagaaacaaaaccaaaaagttgaataaacagttggaaaagaatgaaaataaggctctaaaataccagctcaacgagttattaaaaatgccactaagaaaagatttaagaaaaagctatctaacaggaggtctgaccaatctcgctgacactttagtcaaacataaaggtcacaattccattattggacatgataaagtggatgcattgcaaacactcaagggcaagaagcataaatga

SEQ ID NO: 65875 - protein, 796 aa, Kluyveromyces lactis
MVYGVSKMANKNRKNLKPVKSDRKDRISKNHSKKKVNKNSLKKVATTDITVNANELNWKSVDIPDTLDDFGGFYGLEEIDGVDVKVVDGKVQFITKDNKNVKKEPEQVEEKDNIVFQEDDEDVNMDELIEFKNFDDIKEGELSAASDDEESEFHVSTEEEGEEGEEAEDQEEERSEKENVKGEAGTVVTEDQTNDDLLQSNVFSSNVDIDDQEPPVLPEWSENMDLSFTVLKGLSGLGFTRPTEIQLKSIPLALKGHNIMGKASTGSGKTLAYGIPIIEQLIKDTSNDRSIGLIFTPTRELAHQVTDHLQKVWTKMNKLNKYTILSLTGGLSIQKQERILKYDGSGRIIVATPGRFLELLERNPDLIPRFAKIDTLVLDEADRLLQDGHFDEFEKILKLLGKARKIKTSIDGKPTGSGWQTMIFSATFSLDLFTKLDKTSWKILKTAGGENNEMEQVLNHLMKKIQFKSKPVIIDTNPEHKVTSQVKESLIECLPMERDLYVYYFIMMYPGTTLVFCNAIDSVKKLNAFLNNLKISSFQIHSSMAQKNRLRNLEKFKEQSEKNSKVGKPTILIASDVAARGLDISGIKHVLHYHLPRSADVYIHRSGRTARGDNEGVSVMICSPQESMGPLRKLRKVLSTKKSSNPRKTKWQNDVPMLPLEPDIVSQLRERSKIASELADDEIATKSLHKDDNWLKKAAEELDIELDSEEEEKDQFLARNKTKKLNKQLEKNENKALKYQLNELLKMPLRKDLRKSYLTGGLTNLADTLVKHKGHNSIIGHDKVDALQTLKGKKHK

SEQ ID NO: 65876 - DNA, 1947 bp, Schizosaccharomyces pombe
  CDS (1)..(1947)
atgccaaagaaagctgcattggacgagcttaaatggaaggaagtcaagcttcctgaccacctagacgacttcgatgggtttatgggcttggaagagattgaaggtgtggatatcaaatatcagccaaaaggtgctatgaaagaagtaatttatgagttaccagaagttcatgaaaaaaaagataaaaagccggaaaagcgaaaaaaagatcaaaaagaagctagtgaaaaaaagaaaaagggaaaacgtacttcccctactattgaaatgacttcactaggatcaaaggtgacttctaaaaactataatgaattctctacattagaagaagaggatgaacacaattctcatggtgtggacgtctctgcttgggcacacttttcactttcaccggaaatgcttggctcgttatctaaagctggcttttcaaaaccgatgccaattcaatcattggtaattcctgaagcttctattggatttgatatcattggaaaggcagataccggttcaggaaaaactttagcttttggcattcccattttagagcattgtcttcgcaatgtagatgcaaaatacgtacaggctctagttgttgctcctaccagagaacttgctcatcaaatttgccaacactttgaacttatcaagccaagtcctaacattcgtgttatgtctataaccggtggattagcagtacagaagcagcagaggcttcttaacaagcaccctcacgttgtggttgcaactccgggtcgcttgtggtctgtcatcaacgagaacaaccttacaggaaactttaagaaaatcaagtgtttggtattagatgaagcagatcgtttactgcaaaaaagtcattttgaagaattgagcaaactacttgaaattttaggaaatcccatgcatactcagcgtcagacttttatcttttctgcaactttcgatgagggtttacagcaacgccttaaaaagaatatgaaaggcaatataactgagaaatacaacagcccgatggaaaatatgttgaaggaggttcgtttctttggcaaacccaaatttttggatgccaatcctcaaagtgcagtggcaagccgcgtattagaagggctcatagagtgtgctccagctgaaaaagacttgtatctttattatttgatcatgcgttatcctggaaaaaccatggtttttgccaatggtattgaggatattaagagaatcactccttttctaaatgagttaaaagttccatcctatcctctacatgctcaattagatcagaaaaaaagacttcaatctcttgaaaagttcaaaaataatcctaaaggagtccttgtttgcactgatgtggccgcccgtggtattgatattcctagtgttacgcacgtaattcattatcatgttcctcatacagctgatatgtatgttcatagaagcggtcgtaccgctcgcgctaacgaagatggcgtttcaattttaatgtgtggtcctaaagaactgtcacagctgaaacgactatgttatcggttgaaaaagaaaatcgagacctttattaattttcctgtggatatgtcaatattggacattttaaaaacgagggtcgtcttagcacataaaattgtaaatctcactagaaaagacggaagagtgggacgtgaggaagcttggttaaaatcgatggctcaggaattgggagttgaaagttctgatgatgaggatccggatttgccaaaaaaatctgaatctagtaagaataagaaacagatagcgcatcttcgctcagagcttgctcccttattacacgaaaaaataagaacaggattttctggtagatacttgacgagcggtcttgtaaatatggctgaaaaattagccaacgaagaagttcatgataatattatcggaatggactcaattagtgctttggaagttctgcaaaaaaggaagaagtaa

SEQ ID NO: 65877 - protein, 648 aa, Schizosaccharomyces pombe
MPKKAALDELKWKEVKLPDHLDDFDGFMGLEEIEGVDIKYQPKGAMKEVIYELPEVHEKKDKKPEKRKKDQKEASEKKKKGKRTSPTIEMTSLGSKVTSKNYNEFSTLEEEDEHNSHGVDVSAWAHFSLSPEMLGSLSKAGFSKPMPIQSLVIPEASIGFDIIGKADTGSGKTLAFGIPILEHCLRNVDAKYVQALVVAPTRELAHQICQHFELIKPSPNIRVMSITGGLAVQKQQRLLNKHPHVVVATPGRLWSVINENNLTGNFKKIKCLVLDEADRLLQKSHFEELSKLLEILGNPMHTQRQTFIFSATFDEGLQQRLKKNMKGNITEKYNSPMENMLKEVRFFGKPKFLDANPQSAVASRVLEGLIECAPAEKDLYLYYLIMRYPGKTMVFANGIEDIKRITPFLNELKVPSYPLHAQLDQKKRLQSLEKFKNNPKGVLVCTDVAARGIDIPSVTHVIHYHVPHTADMYVHRSGRTARANEDGVSILMCGPKELSQLKRLCYRLKKKIETFINFPVDMSILDILKTRVVLAHKIVNLTRKDGRVGREEAWLKSMAQELGVESSDDEDPDLPKKSESSKNKKQIAHLRSELAPLLHEKIRTGFSGRYLTSGLVNMAEKLANEEVHDNIIGMDSISALEVLQKRKK

SEQ ID NO: 65878 - DNA, 2322 bp, Saccharomyces cerevisiae
  CDS (1)..(2322)
atgggtaagaaaagggctcctcaaaaaggaaaaacggtcacaaagccacaggagataattgtagatgaatccaaattgaactggaaaccagtagatattccggacactttagatgactttggtggattttatggcttggaagaaattgacggagtggacgttaaagtcgtggatggtaaagtaactttcgtcaccaaaaaagattcaaaagtgttaaaagatagcaataaggaaaaagtcggagatgatcaggaatctgtggaaaatgaatcagggtcagattcggagtccgagctccttgaattcaagaacttggacgatattaaagaaggagagttgagtgcagcatcttattcatcatccgacgaggatgagcaaggtaatattgagagttcaaagttaaccgatcccagtgaggatgtggatgaggatgtggatgaggatgttttgaaagaaaacgtctttaacaaagacattaatatcgatgatatttctcctgtaaatttacctgaatggacgaatcttgcacctctctcaatgactattttgcagagcttgcagaatttaaattttctcagacctacagaaattcaaaaaaagtctattccagttattatgcaaggcgtagacgtcatggggaaagcctctacaggttcaggtaaaactttagcctatggtattccaattgtagagaaactgatcagtaacttctctcagaaaaacaagaaaccaatatcgttaatctttactcctacaagagaactggcgcatcaagtcacagaccacttaaaaaagatctgtgagcctgttctagcgaaatctcagtactcgatattatctttgacaggtggactctctatccaaaaacaacaacgtctattaaagtacgataatagtggccaaattgtcatcgcaacaccaggtagatttttggaactgttggaaaaagacaacactttaatcaaaagattctcgaaagtaaatacgctaatccttgatgaggctgataggctgttacaagacggtcatttcgacgagttcgaaaaaatcattaaacatttattagtagaaagaaggaaaaacagagaaaactccgagggcagtagcaaaatttggcaaactttgatcttttctgcaacattctccatcgacttgtttgataagctatcttcttcccgtcaagttaaggatagaaggtttaaaaacaacgaagatgagctaaatgccgtaatacaacacttaatgagcaaaattcacttcaactcaaagccggttataatagatacaaatcctgagtcaaaagtgagctctcaaatcaaagaatccttaattgaatgtcctccattagaacgtgacctatactgctattactttttaaccatgttcccaggtacaactttgatcttttgtaatgccattgactccgtgaagaaattgaccgtatacttaaataacctaggcatcccagcttttcaaattcattcttccatgacacaaaagaaccgtttgaaaagcttagaaaggttcaagcaacaaagcgctaaacagaaaacaataaatcattcgaatccggattccgttcaactctcaacagtattgattgcaagtgatgttgctgctagaggtttagatattccgggtgttcaacacgttattcattaccacttaccaagatctactgatatttatattcatagatcaggcagaactgcaagagcaggttctgaaggtgtctctgccatgatatgctcacctcaagaatctatgggcccattaagaaagttaagaaaaactctcgctacaaaaaatagtgtttcgacggatttgaactctagatcaactaacagaaaacccatcaagtggcaaaacactgtgcctttgttaccaattgaaaccgatatactttcacaactcagagaaagaagtagattagcaggcgaactggctgatcatgaaattgcttctaattccctaagaaaagatgacaattggttaaaaaaggctgctgatgaattaggtattgacgttgattccgacgaagacgatatatcaaagagtaattcggacactttcttactaaaaaataaaaataaaaaaatgcagaagactataaataaggacaaggtaaaagccatgagagctacgttgaacgaattgttatcagtgcctatacgtaaagatagaagacagaaatatttgacaggtgggctagtgaatttagctgataacttggtcaaaaaaagaggtcataattctatcattggtcatgaaaagacaaacgccttagaaactttgaagaaaaagaaaaagagaaataattaa

SEQ ID NO: 65879 - protein, 773 aa, Saccharomyces cerevisiae
MGKKRAPQKGKTVTKPQEIIVDESKLNWKPVDIPDTLDDFGGFYGLEEIDGVDVKVVDGKVTFVTKKDSKVLKDSNKEKVGDDQESVENESGSDSESELLEFKNLDDIKEGELSAASYSSSDEDEQGNIESSKLTDPSEDVDEDVDEDVLKENVFNKDINIDDISPVNLPEWTNLAPLSMTILQSLQNLNFLRPTEIQKKSIPVIMQGVDVMGKASTGSGKTLAYGIPIVEKLISNFSQKNKKPISLIFTPTRELAHQVTDHLKKICEPVLAKSQYSILSLTGGLSIQKQQRLLKYDNSGQIVIATPGRFLELLEKDNTLIKRFSKVNTLILDEADRLLQDGHFDEFEKIIKHLLVERRKNRENSEGSSKIWQTLIFSATFSIDLFDKLSSSRQVKDRRFKNNEDELNAVIQHLMSKIHFNSKPVIIDTNPESKVSSQIKESLIECPPLERDLYCYYFLTMFPGTTLIFCNAIDSVKKLTVYLNNLGIPAFQIHSSMTQKNRLKSLERFKQQSAKQKTINHSNPDSVQLSTVLIASDVAARGLDIPGVQHVIHYHLPRSTDIYIHRSGRTARAGSEGVSAMICSPQESMGPLRKLRKTLATKNSVSTDLNSRSTNRKPIKWQNTVPLLPIETDILSQLRERSRLAGELADHEIASNSLRKDDNWLKKAADELGIDVDSDEDDISKSNSDTFLLKNKNKKMQKTINKDKVKAMRATLNELLSVPIRKDRRQKYLTGGLVNLADNLVKKRGHNSIIGHEKTNALETLKKKKKRNN

SEQ ID NO: 65880 - DNA, 1902 bp, Aspergillus oryzae
  CDS (1)..(1902)
atgaaaactgggaggaccagaccgctccgagtcttcgacatcttggttcctccttggcctcccacggtaccgcaccggataaaactgccaagaggaaagacaaattggttcgagttttactctgcgattacacggaattggaataagctcaaaggcttgaaaaattgctggcaaatttggaaggacgtccaagagattattcgacggatcagaaagtatcaaggagagtcgaccgtcatgcaaggtccaggaaacaacgatggcgcccatccgtacgcaaccatggctgggaagctagattccaaactccttcaagccctcaaagtgatggagtttgagtacatgacacccgtccaacaccgtgttctaacagagcttccaagctggcgcagtgactgtctggtccaggccaaaactggcacaggcaaaacccttgcttttttgctacctacgttacactgtttactccaaggtcattcggcgccaccaagaggtcaggtcgctattttgatcattacgccaacacgagagcttgctcagcaaattgcaaagtcctgcgatcagcttacatcgcaacttgcgaggcctcttgagtgccacattgcagtgggtggaacagctcgggcatctgctctggcgcgtttcatgaagggggcaccgtccatccttgtagcaaccccgggacgactaaaagattatctgtccgaaccttccacggctgaaaaattgtctaacattcaaacgttgatcttggacgaagccgacacgatgcttgagagcggctttctagctgatgtgaagcgaatcctccaactcattccaccaaagagcactggctggcaaggtatgtgcttttcagccactgttccacccaaagtcaaggacgtggtcagtgttgtgttgaagccaggctacaccagcatttcaaccatcgaaaagaatgaaacaccgacgcatgagagagttccccagtaccacgtgttgataccgtccgtggcagacacctttactactctcgcctcccttctcaaccttgaaatcaagaacagctctaaaatcattgtcttcggggtcactgcaaacatggtcgctcttttcgctgcagccttctctcagggtttgacgcctttgaaggtgtttgaaatccattccaggctcagccagagcgctcgcacgaaaactacagctttgtttaaggaggcagcgaccggaattatgttcgcctcagatgtcattggtcgtggcatggatttccctaatgtcgacctggtcatccaggtcggtctgccctcaaatggcgaacagtacgttcatcgtgtcggtcgtacagcccgtgctggcaatgatggtcgcgctatcatcctcctcacagaagccgagtctttcttcatgaaggtcaatcgccacttgcccattcagcctcatccccagactgacgcgatcaatgcgggcgcctcctcatgcgccgatgccgttactaaggccatgtacagcattggtgaagagacaaagcagcgcgcttactcatcctacataggtttctttgcgggatccggtctcttgaagcaggtccgtctggataaacccggcctcgttcaactcgcgaatgagttggccatacagggaatgggatgtcctgaacccccaccaatggataaaaaggtcgtgggcaagatgggtttgaagggtgtacctggatttaattatgcgactggaaatgatttgaatggggaccgtcctgccagaccgcgtgggcgtcctgggaacaagactcgtgatgtactcagtcctggagctggtcaaggagatcgtagaggttcggtctccaagaatcgtggaggacgtcgcggtggcgggcgtggaggtcgtggagggcgtggaggaaagccgagagcagcatga

SEQ ID NO: 65881 - protein, 633 aa, Aspergillus oryzae
MKTGRTRPLRVFDILVPPWPPTVPHRIKLPRGKTNWFEFYSAITRNWNKLKGLKNCWQIWKDVQEIIRRIRKYQGESTVMQGPGNNDGAHPYATMAGKLDSKLLQALKVMEFEYMTPVQHRVLTELPSWRSDCLVQAKTGTGKTLAFLLPTLHCLLQGHSAPPRGQVAILIITPTRELAQQIAKSCDQLTSQLARPLECHIAVGGTARASALARFMKGAPSILVATPGRLKDYLSEPSTAEKLSNIQTLILDEADTMLESGFLADVKRILQLIPPKSTGWQGMCFSATVPPKVKDVVSVVLKPGYTSISTIEKNETPTHERVPQYHVLIPSVADTFTTLASLLNLEIKNSSKIIVFGVTANMVALFAAAFSQGLTPLKVFEIHSRLSQSARTKTTALFKEAATGIMFASDVIGRGMDFPNVDLVIQVGLPSNGEQYVHRVGRTARAGNDGRAIILLTEAESFFMKVNRHLPIQPHPQTDAINAGASSCADAVTKAMYSIGEETKQRAYSSYIGFFAGSGLLKQVRLDKPGLVQLANELAIQGMGCPEPPPMDKKVVGKMGLKGVPGFNYATGNDLNGDRPARPRGRPGNKTRDVLSPGAGQGDRRGSVSKNRGGRRGGGRGGRGGRGGKPRAA

SEQ ID NO: 65882 - DNA, 1608 bp, Schizosaccharomyces pombe
  CDS (1)..(1608)
atgaatatctcactgaaaggagctattttttcaactgttgggagatttaacttacccaaagttcaaggatttataagatggaactcgacaatgaaatcacagcaaccaacgctgttttcagaggttgcttctctttctagtactttcaaaaatagtttgtctcgcgcagggttcgagaaaatgactccagttcagcagcgggtattgaatgaagtttttcctaacgaagagaatgctgtagtgcaggcaaaaacaggtacaggaaagactttggctttcttgttagtggcctttaaagatgtgcttaagggaaagccacgtttgaattcctccaaaattcactccgtaatccttagcccgacaagagaattggccttacaaatttttgaagaagctagaaaattgacttatgggacgggaatccgcgtttcttatgccattggcggaaactcaaagatgagagaggaaaatgcaattcgtcgtggtaatgccaatcttctgattgcaactcctgggcgtttggaagatcaccttcagaatccaaggattcttgaatctttatctactgactctttcattttggatgaagctgaccgtttaatggatatggggtttgctgagtcaattttgaacattcatgaagctgtcacaactactaagaccaggaagttgtgttttagtgcaacaatgccgccaaaagtctctaacgtttttcgtggaattcttgggactgattttaagctcataaactgtctggatccaaacgagcctcctacgcatgagcgtgtgccccaatttgttatagaaaccaagctcgataaggtattctcttcttctctctcacttttacaacaactcacttcttcaaatccctcaagtcgtattatcgtttttcttcccaccataagcatggttgactttgttggcggagttttagaaaatcatttgaagattccttgctttattttacattccggtttaactactgcgcagcgtagatctattacagaaagctttaggaaatgtcaaagtggtattttatttgctacagatgttgtcgcacggggaatggatttccctaacattacccaggttgtccaaataactggtcctagcaataccgatgattacattcatcgaattggacgtacgggtagggctggtaaaacaggagaggcatatttaattcttctggaacaagagaaaccttttttaaatagtatcaaacatttacctttaaaacgggcaactatcgagcccttatcagatcaagctctctcaactttgaggtcggatattgaaaagtcatcgaaattttcccgtacaaatgctttgaaaactctgtatgggtctaaacctcatgtcttctctggttcgtcccaaagacgagccaccggtaagaacattcatgaatctgctattgctttattttctttacatgacgttcctggcttaatggaagaacttatatacaagtcaagaggtagaggttcaccaaaaggttttaggggatctcaattaaaatatccatcatcttcatcttcctcctttcaacgacgacctcgttcccttccttcaagaggtcgctatcaacaaagtcgtcgctag

SEQ ID NO: 65883 - protein, 535 aa, Schizosaccharomyces pombe
MNISLKGAIFSTVGRFNLPKVQGFIRWNSTMKSQQPTLFSEVASLSSTFKNSLSRAGFEKMTPVQQRVLNEVFPNEENAVVQAKTGTGKTLAFLLVAFKDVLKGKPRLNSSKIHSVILSPTRELALQIFEEARKLTYGTGIRVSYAIGGNSKMREENAIRRGNANLLIATPGRLEDHLQNPRILESLSTDSFILDEADRLMDMGFAESILNIHEAVTTTKTRKLCFSATMPPKVSNVFRGILGTDFKLINCLDPNEPPTHERVPQFVIETKLDKVFSSSLSLLQQLTSSNPSSRIIVFLPTISMVDFVGGVLENHLKIPCFILHSGLTTAQRRSITESFRKCQSGILFATDVVARGMDFPNITQVVQITGPSNTDDYIHRIGRTGRAGKTGEAYLILLEQEKPFLNSIKHLPLKRATIEPLSDQALSTLRSDIEKSSKFSRTNALKTLYGSKPHVFSGSSQRRATGKNIHESAIALFSLHDVPGLMEELIYKSRGRGSPKGFRGSQLKYPSSSSSSFQRRPRSLPSRGRYQQSRR

SEQ ID NO: 65884 - DNA, 1995 bp, Saccharomyces cerevisiae
  CDS (1)..(1995)
atgttgacctctatattgataaaaggtcgcacacctgttcttgcaagcagaaatttattagcagctctctcgaattgcaaccatattacttgggctgtttcaagaagattatacaatgatggaaacagagatcaaagaaattttggtaggaatcagagaaacaacaacagtaacaggtatagaaactcccgtttcaattctcgcccaaggacaaggtctagagaagacgatgatgaagtgcactttgataagaccactttttccaaactaattcacgtcccaaaagaagataatagtaaagaagtaacgctggactctttactggaggaaggagtccttgataaagaaatacataaagccattaccaggatggaatttcccggtttaactcctgtacagcaaaagactatcaaaccaatattatccagtgaagaccatgatgttatcgcaagagctaaaaccggtacaggtaagacatttgccttcttgattccaattttccagcatttgataaatacgaagttcgattctcaatatatggtaaaagctgttattgtcgcaccaacaagagatttggccttgcaaatcgaagcagaggtgaaaaaaatccacgatatgaattatggcttgaaaaagtacgcttgtgtctctttagttggtggtactgacttcagggcagctatgaataaaatgaataagttgagaccaaacattgtaattgccactccagggagattgattgatgttttggaaaaatactccaacaaattttttaggttcgtagattacaaagtgctagatgaagctgacagattgctagaaattggattcagggatgatttagaaactatttctggtattttaaatgaaaagaactccaaatcagccgataatatcaagactttgttgttctctgctactctggacgacaaagtacaaaagttggcaaacaatatcatgaataaaaaagaatgtctctttttagacacagtagataagaatgaacctgaagcacatgaaagaattgatcagtctgtcgtcatttcagaaaagtttgccaatagtatatttgctgctgtggagcatataaagaaacaaataaaggaaagagattctaattacaaagccattatttttgcaccaactgttaaattcacatcctttttgtgcagtattttaaagaatgaatttaagaaagatttaccaattttggaatttcatggtaaaattactcaaaataaaagaacaagtttagttaaaagattcaaaaaagatgaatccggtattttggtttgtacggatgtgggagcccgtggtatggatttcccaaacgtccacgaagttttgcaaattggtgttccatctgagttggctaattatattcatagaattggtagaacagccagaagtgggaaagaaggatcttctgtgctattcatttgtaaagatgaattgccatttgttagagagttggaagatgcaaaaaatatagtcattgccaaacaagaaaaatatgagcccagtgaagaaataaaatctgaggtcctagaggcagtgaccgaagaaccggaagacatatcagatattgtaataagtttaatctcatcctacagatcctgtatcaaggaatacaggttttctgaaaggcgcatacttcctgaaattgcttccacttatggtgtactgttaaatgatcctcaattaaagattccagtatccagaaggtttttagataaattaggtttgagccgtagtccaattggtaaggcaatgtttgaaattagagactatagtagtagagatggaaataacaagtcctacgattatgatgatgattcagaaatttctttcagaggcaacaaaaactataataataggagccaaaatagagattacgatgacgaaccgtttagacgcagcaacaacaatagacgctcattctcccgtagtaatgataaaaataattactccagtagaaacagcaacatatattag

SEQ ID NO: 65885 - protein, 664 aa, Saccharomyces cerevisiae
MLTSILIKGRTPVLASRNLLAALSNCNHITWAVSRRLYNDGNRDQRNFGRNQRNNNSNRYRNSRFNSRPRTRSREDDDEVHFDKTTFSKLIHVPKEDNSKEVTLDSLLEEGVLDKEIHKAITRMEFPGLTPVQQKTIKPILSSEDHDVIARAKTGTGKTFAFLIPIFQHLINTKFDSQYMVKAVIVAPTRDLALQIEAEVKKIHDMNYGLKKYACVSLVGGTDFRAAMNKMNKLRPNIVIATPGRLIDVLEKYSNKFFRFVDYKVLDEADRLLEIGFRDDLETISGILNEKNSKSADNIKTLLFSATLDDKVQKLANNIMNKKECLFLDTVDKNEPEAHERIDQSVVISEKFANSIFAAVEHIKKQIKERDSNYKAIIFAPTVKFTSFLCSILKNEFKKDLPILEFHGKITQNKRTSLVKRFKKDESGILVCTDVGARGMDFPNVHEVLQIGVPSELANYIHRIGRTARSGKEGSSVLFICKDELPFVRELEDAKNIVIAKQEKYEPSEEIKSEVLEAVTEEPEDISDIVISLISSYRSCIKEYRFSERRILPEIASTYGVLLNDPQLKIPVSRRFLDKLGLSRSPIGKAMFEIRDYSSRDGNNKSYDYDDDSEISFRGNKNYNNRSQNRDYDDEPFRRSNNNRRSFSRSNDKNNYSSRNSNIY

SEQ ID NO: 65886 - DNA, 2397 bp, Aspergillus clavatus
  CDS (1)..(2397)
atggatggtttcatttcgaacggcccagcggaagcgccggctaccatgcctcctcccgagccttttgaacgacctcccacgccccctccaccacctccagaggattccgccgctccccctccccccccagacacgtccgcgcctcctccgccgcccgaagatgcgattccagctccacctttagagaagaagaagaaggcaggatggggcgccaaacgcgcagcagcgactccattaagtgtggaggaactcgtacggaagaagagagaggctgatgcagcagcggctaagcctaaattcctgtcgagagccgagcgtgagaggctggcgttggagaaacgtgcgaaggaggtagacgcagaccgccggttgaagaccgagcgcaccgccaacggtgcggacagcagcagcgcgcagtcaacaccggtgtacccggagcggcccaacagcgataaacgggtcatccctaccggtccgcgagctatgcgcaacacagaggcccccgcccggtctggccctgcggcgacgcgcaacaagaactacgatatgacgccccccgcgccgcccaagccgatgtcgttcagtcttacagattcgaaaggcgacagcaagcggcaagccgaggaggacgagactgtggcacaggtggctttgatcaagcagcggtacatgggggaggagaagacgtcaaatttctccgcgaagaagaaacgcaagcggacgacggaccggaagtttaatttcgagtggaacgccgaggaggatacgagcggggactataacccgttgtaccagcaccggcacgaagccaacttctacggccggggccggctggccggctttggagacgatgtggcggactcgctggcgaagaagtatgcgcgggccttggaggatcgggaccaggaagctgggagcatcagagcccgagagatgctggagatggagaaacggcggcgggaggagagcacccggaatcagcttgacaagcactggagcgagaaaaaactggagcacatgcgcgagcgagactggcgtatcttcaaggaagacttcaacatcagtaccaagggtgggagcgtgccgaaccccatgcggtcgtgggaggagtccgggcttcccaagcgactgctggagcttgtggatcgggtgggctacaaagagccaacgcctatccagcgggcggcgatccccatcgctctgcagtcgcgcgatctcatcggtgtagccgttacgggttcgggtaagacggcgtccttcctgcttcccctcctggtatacattgcggagcttccccgcatcgacgaattcgaatggcggaagaacgacggtccctacgcgatcgtcctggccccgacccgtgaactggcgcagcagatcgagatcgaggccaagaagttcacacagccactcggcttcaacgtcgtgagtatcgtcggtggtcactcgctcgaagagcaagcctacagcctccgtaacggcgccgagatcatcatcgctacgcccggccgtctcgtcgactgcatcgaacgccgcatcctcgttctcagccagtgctgctacatcatcatggacgaagccgaccggatgatcgacctcggcttcgaagaaccagtcaacaagatcctcgacgctctccccgtgaccaacgaaaagcccgactccgacgaggccgagaactcggccgccatgcgctcccaccgctaccgccagaccatgatgtacacggcgacgatgccgtcggcggtcgagcgcatcgcgcgcaagtacctgcggcggcccgcgatcgtgaccatcggcagcgccggcgaggccgtcgacacggtcgagcagcgcgtcgagctgatcgccggcgaggacaagcgcaagaagcgcctcgcggacatcctgtcctcgggcgagttccggccgcccatcatcgtcttcgtcaacatcaagcgcaactgcgacgccatcgcccgcgaaatcaaacacatgggcttctcctccgtcaccctgcacggaagcaagacccaggatcagcgtgaggccgccctcgcctccgtccgcaacggctccaccgacgtcctcgtcgccaccgacctcgctggccgtggtatcgatgtccccgatgtcagtctcgtcgtcaacttcaacatggccacctccatcgagagctacacccatcgtatcggccgtaccggccgtgccgggaagagcggtgtggccatcactttcctaggcaatgaggatgccgatgtcatgtacgacctcaagcaaatgctcatgaaatcgcctatctcgcgggtccccgaggagctgcgcaagcatgaggccgcgcagtccaagccgacccgggggtacgcgaagaagagcgacgagagctccgggttcagggacaagggcgcctggcaataa

SEQ ID NO: 65887 - protein, 798 aa, Aspergillus clavatus
MDGFISNGPAEAPATMPPPEPFERPPTPPPPPPEDSAAPPPPPDTSAPPPPPEDAIPAPPLEKKKKAGWGAKRAAATPLSVEELVRKKREADAAAAKPKFLSRAERERLALEKRAKEVDADRRLKTERTANGADSSSAQSTPVYPERPNSDKRVIPTGPRAMRNTEAPARSGPAATRNKNYDMTPPAPPKPMSFSLTDSKGDSKRQAEEDETVAQVALIKQRYMGEEKTSNFSAKKKRKRTTDRKFNFEWNAEEDTSGDYNPLYQHRHEANFYGRGRLAGFGDDVADSLAKKYARALEDRDQEAGSIRAREMLEMEKRRREESTRNQLDKHWSEKKLEHMRERDWRIFKEDFNISTKGGSVPNPMRSWEESGLPKRLLELVDRVGYKEPTPIQRAAIPIALQSRDLIGVAVTGSGKTASFLLPLLVYIAELPRIDEFEWRKNDGPYAIVLAPTRELAQQIEIEAKKFTQPLGFNVVSIVGGHSLEEQAYSLRNGAEIIIATPGRLVDCIERRILVLSQCCYIIMDEADRMIDLGFEEPVNKILDALPVTNEKPDSDEAENSAAMRSHRYRQTMMYTATMPSAVERIARKYLRRPAIVTIGSAGEAVDTVEQRVELIAGEDKRKKRLADILSSGEFRPPIIVFVNIKRNCDAIAREIKHMGFSSVTLHGSKTQDQREAALASVRNGSTDVLVATDLAGRGIDVPDVSLVVNFNMATSIESYTHRIGRTGRAGKSGVAITFLGNEDADVMYDLKQMLMKSPISRVPEELRKHEAAQSKPTRGYAKKSDESSGFRDKGAWQ

SEQ ID NO: 65888 - DNA, 2412 bp, Aspergillus oryzae
  CDS (1)..(2412)
atggacgatatcgtgatgaacggttcgccagaggtgcctcctccacaaccacctcccgaacccgtcgagcgacctcctacaccccctccgcctcccccagaagaatccgtcgcccctcctccgccgccagaggtcgttgctcctccacctccgcccgaagaccttcctcctgcgcctccgccacctgaaccgaagaagaagaaggtgggatggggcgcgaagaagccggcagctacaccgcttagtgtagaggaactggttcgcaaaaagagggaagctgatgcggcagctgctaggccgaaattcttatcgagagccgaaagagaacgaatcgccctcgaaaaacgagcaaaggaagtcgaagcagagcgaaggctaaaggcatcaaatggtgtcgacaggagtgcgactcagtcaccttcagttagctctgaagtcaatcacagcgatggaaggactataccaaccggcccccgggctatgaggagctcagacactcctaccgcaccagctgctatgcgcaattctcattcccataataaaaaccgcgacctatcgccgcctccaccaccgaagtcaatgtctttcggtcttgcaagttcgaaaggcgacaagcgaccagtcgatgatgatgaagtagccgctcaggtagcattggttaagcagaggtatatgggcgcagaccagacgtcgactttctcagcgaagaagaagcggaagaggacgacagaccggaagttcaatttcgagtggaatgcagaagaagacacaagtggagattacaaccccctgtatcaacatcgacacgaggccaacttctttggacgtggtcgactggcaggtttcggagacgatgtcgccgacaacgtggcgaagaagtatgcaagagccctggaggaccgcgaccacgaagcgggaggtattcgggcccgagagatcctggaaatggagcgtcggcggagagaagagagcacccgcaaccagcttgacaagcactggagcgagaagaaactggagcacatgcgcgagcgcgactggcgcatcttcaaggaagacttcaacatcagtaccaagggtggaagtgtaccgaaccccatgcggtcgtgggatgagtctggtctccccaaacgtctcatggaactcgtcaacaaggttggctacaaggagcctacacctattcaacgtgctgctatccccattgccatgcagtctcgcgatctcatcggtgtcgccgtcaccggttccggtaagacggcctccttcctcctccccctgctagtctacatcgccgaactgcctcgtatcgacgagttcgaatggagaaagaacgatggcccctacgctatcgtccttgccccgacccgtgaattggcccagcaaatcgagatcgaggccaagaaattcacagaacctctcggcttcaacgtcgtcagtatagtcggaggccactctttcgaagagcaagcctacagtctccgcaacggcgcagaaatcatcatcgccacgccaggtcgtctagtcgactgcatcgaacgccgcatgctagtcctcagccaatgttgctacgtcatcatggacgaagcagaccgcatgatcgacctagggttcgaagaacccgtcaacaagatcctcgacgccctcccagtctccaatgaaaagcccgactccgaggaagccgagaactcaatggccatgagccaacacatcggcacaaaagaccgctaccgtcaaacaatgatgtacacagcgacaatgcccacagccgtggaacgcatcgcccgcaaatacctccgtcgcccagccatcgtcacaatcggcagcgccggtgaagccgtcgacacggtcgagcagcgcgtcgagttcatcgcaggcgaagacaagcgcaagaaacgtctgggcgatatcctctcttctggcgaattccgaccgccgatcatcgttttcgtcaacatcaagcggaactgcgatgctatcgcccgcgaaatcaaacaatggggtttctcctctgtcactttgcacggtagtaagacccaggaacagcgtgaagccgccctggcttcggtacggaacggccaaacggatgttctggtggctaccgatctggctggtagaggtatcgatgttcctgatgtcagtctggttatcaacttcaacatggcgactactattgagagttacactcatcgtatcggtcgtaccggtcgtgcgggtaagagtggtgtggctattactttcttgggtaacgaagatacggatgttatgtacgatctcaagcaaatgattatgaaatcatccatctctcgactaccggaggaactgcgcaagcatgaagccgcacaatcaaagcctacgcgcgggtttgcgaagaagaatgatgacaactctgcgttcggatcaaagggtggatggtga

SEQ ID NO: 65889 - protein, 803 aa, Aspergillus oryzae
MDDIVMNGSPEVPPPQPPPEPVERPPTPPPPPPEESVAPPPPPEVVAPPPPPEDLPPAPPPPEPKKKKVGWGAKKPAATPLSVEELVRKKREADAAAARPKFLSRAERERIALEKRAKEVEAERRLKASNGVDRSATQSPSVSSEVNHSDGRTIPTGPRAMRSSDTPTAPAAMRNSHSHNKNRDLSPPPPPKSMSFGLASSKGDKRPVDDDEVAAQVALVKQRYMGADQTSTFSAKKKRKRTTDRKFNFEWNAEEDTSGDYNPLYQHRHEANFFGRGRLAGFGDDVADNVAKKYARALEDRDHEAGGIRAREILEMERRRREESTRNQLDKHWSEKKLEHMRERDWRIFKEDFNISTKGGSVPNPMRSWDESGLPKRLMELVNKVGYKEPTPIQRAAIPIAMQSRDLIGVAVTGSGKTASFLLPLLVYIAELPRIDEFEWRKNDGPYAIVLAPTRELAQQIEIEAKKFTEPLGFNVVSIVGGHSFEEQAYSLRNGAEIIIATPGRLVDCIERRMLVLSQCCYVIMDEADRMIDLGFEEPVNKILDALPVSNEKPDSEEAENSMAMSQHIGTKDRYRQTMMYTATMPTAVERIARKYLRRPAIVTIGSAGEAVDTVEQRVEFIAGEDKRKKRLGDILSSGEFRPPIIVFVNIKRNCDAIAREIKQWGFSSVTLHGSKTQEQREAALASVRNGQTDVLVATDLAGRGIDVPDVSLVINFNMATTIESYTHRIGRTGRAGKSGVAITFLGNEDTDVMYDLKQMIMKSSISRLPEELRKHEAAQSKPTRGFAKKNDDNSAFGSKGGW

SEQ ID NO: 65890 - DNA, 1620 bp, Kluyveromyces lactis
  CDS (1)..(1620)
atgctaaggcccgtcagtattgatgacttaatatcagacacagttcctgcgaagaaacctcggtttctgatcaagaaacgaacatttccacaaccagaagaagaagaagcgtcaaaggcattgtcacacaccgttatcaagaggaaagataattataggaatctcgacgaagacgaactatacgaggaacaagtatctaatgaaccagatgatttactattcctagcaagaaaatccgccgaccttttgaagaaacgacaaaatgaagatgaaagtattgtcgacaattacttggggaagcattggtctgaaaagaaatatgaagagatgagcactagggattggaggattctatctgaagactttaatatctcgagtaaaggtggaacagtagagaaacctctaagaaactggcacgaattaaagttaattccggaagatttgttaaacattattacaaatgatttgcactacaacgagccaacatccattcagcgcagtacaataccgaatgttataaacaatagagacttcattggtgttgctagtactggttctggtaagacacttgcatttttgcttccaattcttataaaacttcacggtataccgccacttaattcaattactaaacatgatggtcctttggcattagtattagcaccaacaagagaattggcacagcaaatacaacatgaggggcaatcaattacgaaactatggaaacgaccttgcaatatcgtaagtattgttggtggacattccttggaagaaatttcagcaaacctaagagatggatgtgatatattggttgctacacccggaaggttacttgattgtctagattctcatcttttatttttaaagcaagtaaatacgttagtgttggatgaagcggacaagatgatagatttcggttttgaagatcagttgactacaattttagcaaagacagaaacaatttccaatagacaaacaatgatgtttacggctacattctcacctaccatagaaaaagttgctaatggctatttgaaaaagccaagctatgtcacggttggaggagaagaatctaaaccaaaaattaaacaaatagtacggtatgttccagatgaagaagaaaaacttaagatacttgtaaaagatttcctaccaaattacaaggctcctatcataatattcataaattacaaaagaacagctgactggttattcgacaaacttagagaggctcggttccgagcaacaactcttcacggctcaaaatcacaggaacaacgtgaacactctttaagtcttttgagaaatgggaaagtagatattctcatagctactgatgtcgctggaagaggtatcgatatacctaacgtttctttagtagtgaatctacaatttcctaagtcgtttgacagctttgtgcatcgtgtaggtagaactggacgtgctggtaaaactggtactgcacttacttttctaaccgaggaggaagatcattctgccatggctaaattgttcgattatgtcaaaaagaacgacttcaccggagaaaattacatctcaaaagaagctatgtcgaaatacaatgttgacaaatcttcatacaaaccaattattatatga

SEQ ID NO: 65891 - protein, 539 aa, Kluyveromyces lactis
MLRPVSIDDLISDTVPAKKPRFLIKKRTFPQPEEEEASKALSHTVIKRKDNYRNLDEDELYEEQVSNEPDDLLFLARKSADLLKKRQNEDESIVDNYLGKHWSEKKYEEMSTRDWRILSEDFNISSKGGTVEKPLRNWHELKLIPEDLLNIITNDLHYNEPTSIQRSTIPNVINNRDFIGVASTGSGKTLAFLLPILIKLHGIPPLNSITKHDGPLALVLAPTRELAQQIQHEGQSITKLWKRPCNIVSIVGGHSLEEISANLRDGCDILVATPGRLLDCLDSHLLFLKQVNTLVLDEADKMIDFGFEDQLTTILAKTETISNRQTMMFTATFSPTIEKVANGYLKKPSYVTVGGEESKPKIKQIVRYVPDEEEKLKILVKDFLPNYKAPIIIFINYKRTADWLFDKLREARFRATTLHGSKSQEQREHSLSLLRNGKVDILIATDVAGRGIDIPNVSLVVNLQFPKSFDSFVHRVGRTGRAGKTGTALTFLTEEEDHSAMAKLFDYVKKNDFTGENYISKEAMSKYNVDKSSYKPIII

SEQ ID NO: 65892 - DNA, 1449 bp, Pichia stipitis
  CDS (1)..(1449): transl_table=12
atgatggctctagagccagtttctaccacaagagacaatatcgatttcgtagagactacacattggtcagagaagagtcttgatcagatgacggcacgagactggcgtattttcagggaagattatgggataacatcgaaaggtggagatatagacaacccattgcgaacttggaatgaggcatcgatcccttcaaaattgttatccattatagtagacaaactcgagtatttggagccaactccgattcaacgagctgcgattccacttgctctaaaccagcgtgatgttgtcggaattgcagagaccggttctggtaaaactttggcctttcttatacctttgctcagctatattctaaacacagacaagaactatttggaatacgagcatcagcaggagcaaaactacaacaagccgttgggtctcattttggctcccacaagagaattggcccagcagataaccaaggaagctcagaaatttggcgatagacttggtttgaacgtagtcagcattattggtggacaccagtatgaggaaactgttcattcaatccgaacaggggtacacgttgtagtcgctacaccggggagattggtagactctttggaaagaaatattattggtttggataaatgctactacctcattatggacgaggcagatagaatgattgacatggggtttgaaaaggctttgcaatccatcttatcttatgttcccagcacagatcgtttgaacagtactatcgatctgatgatcttccacatcaaaaagaggatcactttgatgtttacagcaactatatcacccccaattgagaagataacgaagaacttccttataaagcctggctacttgtacattggtggagctggcgaggcacttgatcacattgtgcaaaatttcgaatacttgggatctgctactgggggctctgaagatttcgacagcaagagatttgacaagttggtgaggataattcagcagcactctcgagaatcgcgtcaattctcgattatcatctttgccaactacaagcgagtctgtgatttgctatcacttgagcttgaaaagaatggctttagggataatgttgttattcatggatccaaaacacaagaattgcgagaaaaagctatttcaagcttcagaagccacgagtctagaatccttattgccaccgatgttgcagccagaggtattgatgtgcccaatgtgtcgcttgttgtcaatttccagatgtcaagaaaatttgacgagtatgttcatcgtatcggtagaactggtagagcaggaaacagaggtgagagttatacttttatagacgactctgattctgacgtttttatagatttgaagaagttcttggtaaacggcggaaaaaagtgtccagattggttgatcaaacatgcatctacccagagccaggttctacgtgattag

SEQ ID NO: 65893 - protein, 482 aa, Pichia stipitis
MMALEPVSTTRDNIDFVETTHWSEKSLDQMTARDWRIFREDYGITSKGGDIDNPLRTWNEASIPSKLLSIIVDKLEYLEPTPIQRAAIPLALNQRDVVGIAETGSGKTLAFLIPLLSYILNTDKNYLEYEHQQEQNYNKPLGLILAPTRELAQQITKEAQKFGDRLGLNVVSIIGGHQYEETVHSIRTGVHVVVATPGRLVDSLERNIIGLDKCYYLIMDEADRMIDMGFEKALQSILSYVPSTDRLNSTIDSMIFHIKKRITLMFTATISPPIEKITKNFLIKPGYLYIGGAGEALDHIVQNFEYLGSATGGSEDFDSKRFDKLVRIIQQHSRESRQFSIIIFANYKRVCDLLSLELEKNGFRDNVVIHGSKTQELREKAISSFRSHESRILIATDVAARGIDVPNVSLVVNFQMSRKFDEYVHRIGRTGRAGNRGESYTFIDDSDSDVFIDLKKFLVNGGKKCPDWLIKHASTQSQVLRD

SEQ ID NO: 65894 - DNA, 1989 bp, Schizosaccharomyces pombe
  CDS (1)..(1989)
atgacagcgcaagactctataccttcgctggagcagcttgttcagcaaaaaagagttaaggaagagaaggcggcgagaccaaagtttttatccaaagctgaaagagctcgattggcccttgaaagacgacaaaaagaggttgaagaagcgaaagcaaaacagaatgacaaattattagatttaagaaaaaggacttttaccaatcatttagaaaataatgaattagcagatgatgaaaaaaaatcccaggtatcctctgtatctagcaataacagtggcacagagagctccgcaacggacgaagcattcagcatgaccattcgtcaaaggtacatgggtataaagcctcctgtggtaaaaaaaagaagaagaaatgctgataaaaaatttgtatttgattgggacgccacagacgataccatgaaggatgcggaaacctcggcatcacctgaggctacaattgctgtatttggaagggggaaattaggcggatttgatgaccagtcgattcgaaaagcgaaaagtaattctggtttgattcagcgtttgcttcaaggaacggagcaggataaggctcgcgcacacgagttgattcagcttcaagaaaaacgagccaaaaaaatagattgggacgatgtgccatggagggaaaagccattggaagccatgaaacccagagactggagaatcctcaaggaagattataatatatccattaaaggggatgatttaccaaatcctttaagaaattgggaagaagcaggcttaccaagtgagatgcttaaagttttgaagaaagttaactataaagaaccaagttctattcaaagggcagccatacctgttttactacagcgtaaagatttaattggaattgccgaaactggtagtggtaagactgccgcctttataatccctctcataattgccatatcaaaattgcccccattaaccgaatcaaacatgcatcttggcccatatgctgtagttttagcaccaacacgtgaattggcccagcaaattcaagtggaaggcaacaagtttgcggaacctttgggtttccggtgtgtttctgtcgttggtggtcatgcttttgaagagcaatcatttcaaatgagtcaaggtgctcatatagttgtagctactcctggtcgtcttcttgattgtcttgaaagacggctatttgttctcagccaatgcacttatgttgtaatggacgaggcggataggatgcttgacatgggatttgaagatgatgttaataaaattttgtcatcactcccttcctcaaatgcttctgaaaaggatgggtcaattcttgctactgcaaattcctcttcgtcaagacgtcaaaccattatgttcagtgcgaccttacccccacgtgttgctaatttggcaaagagctatttaattgaaccagtgatgttaactattggaaacattggccaggcagttgaccgcgttgaacagcgtgttgagatgatatctgacgatagcaaaaaatggagaagagttgaggagattttggaatctaatcgattttcacctcctattatcatatttgtaaatctcaagcgtaatatcgaggctattgcgaagcaattaaatgccattggttggcatgctgttactcttcatggcagtaaaagtcaagaacagagagagcgagctatcgaacagttaaggaataagacggctgatattcttgttgcaactgacattgcaggtcgtggtattgatatacctaatgtctctttggtattgaattacaacatggctaaaagcattgaagactatacccatagaattggtcgtacaggtcgtgcaggaaaatctggtacagcaataacgtttttgggaccagaggatactgatgtatattatgatttacgcgtgttattaagccgaagcgcgaaagcacatattcctgatgaattacggaatcatgaagcagcatttgttagacatgcagcaatcacccagtaa

SEQ ID NO: 65895 - protein, 662 aa, Schizosaccharomyces pombe
MTAQDSIPSLEQLVQQKRVKEEKAARPKFLSKAERARLALERRQKEVEEAKAKQNDKLLDLRKRTFTNHLENNELADDEKKSQVSSVSSNNSGTESSATDEAFSMTIRQRYMGIKPPVVKKRRRNADKKFVFDWDATDDTMKDAETSASPEATIAVFGRGKLGGFDDQSIRKAKSNSGLIQRLLQGTEQDKARAHELIQLQEKRAKKIDWDDVPWREKPLEAMKPRDWRILKEDYNISIKGDDLPNPLRNWEEAGLPSEMLKVLKKVNYKEPSSIQRAAIPVLLQRKDLIGIAETGSGKTAAFIIPLIIAISKLPPLTESNMHLGPYAVVLAPTRELAQQIQVEGNKFAEPLGFRCVSVVGGHAFEEQSFQMSQGAHIVVATPGRLLDCLERRLFVLSQCTYVVMDEADRMLDMGFEDDVNKILSSLPSSNASEKDGSILATANSSSSRRQTIMFSATLPPRVANLAKSYLIEPVMLTIGNIGQAVDRVEQRVEMISDDSKKWRRVEEILESNRFSPPIIIFVNLKRNIEAIAKQLNAIGWHAVTLHGSKSQEQRERAIEQLRNKTADILVATDIAGRGIDIPNVSLVLNYNMAKSIEDYTHRIGRTGRAGKSGTAITFLGPEDTDVYYDLRVLLSRSAKAHIPDELRNHEAAFVRHAAITQ

SEQ ID NO: 65896 - DNA, 1728 bp, Yarrowia lipolytica
  CDS (1)..(1728)
atgccagtgtcgatagaagagctcaaggctttgcaggttcaaaagaaagaggcttctaagccaaagttcatctccaaggctaagcgggccgagatggctgcgaaggccaaacagatccagaaaaacacgacatctgaagagactacgttgaaggatattcgatctaccaccgacctgaaaaggtcagttgttcaggagactgtggagaccaccaagcctctcccttcgaaacccaagccaaaatcaacctctggaaagttttcattcgactggagtgctgcagatgacacctccaaggcatatcagcccagctacagtatcgattccggagatgggcaggtgcccaaacgccaaaagcgtgacctggaggacgcacactggtctgataaacctgtggaaagcatgacgtcgcgtgactggcgtatcttcaaggaagattacagcattgtcaccaagggcggaggaaatattcccaatcctcttaggtcgtggaatgagtgcaaggaaataccaggaattgtacgtgatacaatctctcgaatgggatacaaggagcccacgcctatccagagagctgctattcctattgctctaggcattcgggatgtgattggcgttgctgagacaggtagtggtaaaactgcctcttttctgatccctctgatcagctacatttgtgaattacccaagctagatgagagatcgaaggttaatggtccctacggtcttattttggcccccactcgagaactggctatgcagatcaaagacgaagcagtcaagttctgcgcaccactcggcttcaaggtggtttctgtcgttggtggatactctgctcaagagcaggctctggctgtacaagaaggagcagaactaattgttgctacccctggccgtttgcttgatgtcattgacaggcgactgttggttctaaaccagtgttgctatgtggtcatggatgaggccgaccgtatggtggacatgggcttcgaggagcaagtccagaaggttctggcgtctctaccctcgtcaaatgctaagcccgactctgatgaggccgaaaaccttgcggctgtatccaccaggcgatacagacagaccatgatgtacactgccaccatgcccgtggctattgagaagctggctaagaagtatcttcgacgtcccggtattgtcactattggttctgctggccaggcgggttctacagtcacacagctggttgaatttcttaacactgacgagaaacgaaagcgtcgtcttcttgatatcattagtaagcgacaataccgacccccaattgtcgttttcctcaactacaagagagactgtgaggccgtttcagatgctttggttgcagcaggatggagaacagctattattcacggtggaaaacaacaggagcagagagaacaggctgttcagcatcttaagcgaggtgctgtggatgtgcttgttgccactgatgttgctggtcgaggtcttgatattcctaatgtttcgctggtcgtcaacttccagatggcgaacaacattgagtcctacacacacagaatcggacgtactggacgagccggtaagcgaggtactgccgttaccttccttggtcaggaggatgatgacgtcctatttgagctgaagcagatgatcagtcgatctgaggcaagtcctaacaaccaggagttgagcagacatcctgctgctcgaatgaagaagctgcaacagtag

SEQ ID NO: 65897 - protein, 575 aa, Yarrowia lipolytica
MPVSIEELKALQVQKKEASKPKFISKAKRAEMAAKAKQIQKNTTSEETTLKDIRSTTDLKRSVVQETVETTKPLPSKPKPKSTSGKFSFDWSAADDTSKAYQPSYSIDSGDGQVPKRQKRDLEDAHWSDKPVESMTSRDWRIFKEDYSIVTKGGGNIPNPLRSWNECKEIPGIVRDTISRMGYKEPTPIQRAAIPIALGIRDVIGVAETGSGKTASFLIPLISYICELPKLDERSKVNGPYGLILAPTRELAMQIKDEAVKFCAPLGFKVVSVVGGYSAQEQALAVQEGAELIVATPGRLLDVIDRRLLVLNQCCYVVMDEADRMVDMGFEEQVQKVLASLPSSNAKPDSDEAENLAAVSTRRYRQTMMYTATMPVAIEKLAKKYLRRPGIVTIGSAGQAGSTVTQLVEFLNTDEKRKRRLLDIISKRQYRPPIVVFLNYKRDCEAVSDALVAAGWRTAIIHGGKQQEQREQAVQHLKRGAVDVLVATDVAGRGLDIPNVSLVVNFQMANNIESYTHRIGRTGRAGKRGTAVTFLGQEDDDVLFELKQMISRSEASPNNQELSRHPAARMKKLQQ

SEQ ID NO: 65898 - DNA, 1767 bp, Saccharomyces cerevisiae
  CDS (1)..(1767)
atggcaagaccaatcgatgttagtcagctgattgctggtataaacaagaaaaaaggactagatgaaaatacatcaggtaaaatcagcaagcctaggtttttgaataaacaagaaagatctaagcaagaacgtttgaaggagaacgaagagagtttgacgcctacgcaaagtgatagcgctaaggtggagattaaaaaggtaaactctagagatgacagttttttcaatgaaacaaatgataagaagagaaatccatcaaagcaaaatggctctaaatttcacttttcttggaatgaaagcgaagatactctgagcggatatgatcctatcgtttcaactagagctatagatttgctatggaagggaaagactcctaaaaatgctgcagaatcttcatatatggggaagcattggactgagaagtccttgcacgaaatgaatgagagagattggaggatactaaaagaagactacgctattgttacaaaaggtgggacagtagaaaatccattgagaaattgggaagagctcaatataataccaagggacttgttacgtgttattatacaggagctgcgatttccttcaccaactcctattcaaaggattactattccaaacgtttgcaatatgaaacaatatagagattttcttggtgttgcctctacaggttcgggtaagactttggcctttgtaataccgatactaatcaagatgagtaggtcacctccaaggccaccatctttgaagattattgatggccccaaagcgttaattttagctccaacaagggaattagtgcagcaaattcaaaaagaaacacaaaaagttacaaaaatatggtccaaagagagcaactatgactgcaaagtaatttctattgttggtggacactccttggaggaaatttcattttctctatcggagggttgtgacatcctggtggccactccaggacgtttaattgactctttagaaaatcacttacttgtgatgaaacaggtggagacattagtactagatgaagctgacaaaatgattgatttaggttttgaggaccaagtaacaaacattttaactaaagtcgatataaatgctgactctgctgtgaatagacaaaccctgatgtttaccgctacaatgacacccgttatagaaaaaattgcagcaggatacatgcaaaagcctgtttatgcaaccattggggttgagacgggttctgaacctttgattcaacaggttgtggaatatgcagataatgacgaagacaaattcaaaaagttgaagccaattgtcgctaaatatgatccaccaataataatttttatcaattacaaacaaactgctgattggttagcagaaaagtttcaaaaggaaaccaacatgaaggtgacgattttacatggttctaaatcgcaagagcaaagggaacattctttgcaattatttcgcaccaacaaagtccaaatcatgatcgcaacaaacgttgccgcaagaggattggatatccctaatgtttccttggtagtcaatttccagatttccaaaaaaatggatgactacatccatagaattggtagaacaggtcgtgcagcaaatgagggcactgctgtctcctttgttagtgccgctgaagatgaatcattgatacgtgaactttacaaatacgtcaggaaacatgatcccttgaatagcaatatcttttccgaagccgtaaagaacaaatataacgtcggcaaacagctcagtaatgagattatatattaa

SEQ ID NO: 65899 - protein, 588 aa, Saccharomyces cerevisiae
MARPIDVSQLIAGINKKKGLDENTSGKISKPRFLNKQERSKQERLKENEESLTPTQSDSAKVEIKKVNSRDDSFFNETNDKKRNPSKQNGSKFHFSWNESEDTLSGYDPIVSTRAIDLLWKGKTPKNAAESSYMGKHWTEKSLHEMNERDWRILKEDYAIVTKGGTVENPLRNWEELNIIPRDLLRVIIQELRFPSPTPIQRITIPNVCNMKQYRDFLGVASTGSGKTLAFVIPILIKMSRSPPRPPSLKIIDGPKALILAPTRELVQQIQKETQKVTKIWSKESNYDCKVISIVGGHSLEEISFSLSEGCDILVATPGRLIDSLENHLLVMKQVETLVLDEADKMIDLGFEDQVTNILTKVDINADSAVNRQTLMFTATMTPVIEKIAAGYMQKPVYATIGVETGSEPLIQQVVEYADNDEDKFKKLKPIVAKYDPPIIIFINYKQTADWLAEKFQKETNMKVTILHGSKSQEQREHSLQLFRTNKVQIMIATNVAARGLDIPNVSLVVNFQISKKMDDYIHRIGRTGRAANEGTAVSFVSAAEDESLIRELYKYVRKHDPLNSNIFSEAVKNKYNVGKQLSNEIIY

SEQ ID NO: 65900 - DNA, 2439 bp, Kluyveromyces lactis
  CDS (1)..(2439)
atggatcaaacggaaaagctacggattaggcaagagaaacttgctaagtggaaaaaacagaaactgaataatgatgttacagcatctgtttctgtagatgctaaggaagagagactgaagaaactagaggcatggaagaagaagaagaaacaacaagatgaactcaagcaaaaggatataaaacttaccagtataaagtctgcggatagggacaggaacaaacgaaggggacagtgttcgagaaaacgtcctgcttttgggggaagtgatagtgaatctgatgatgaaaattccacatcaacgttattcaagccgcgtagaaacgatacaaatactcatgttctgacaaaagacaacagcaaggatgatttggatgatgggaatgatgcattggatgaatatatccacaagcttatcgataaagattcgaatactaaccgagtaagacttattgataatatttcagaggatgaagatgctaacgacagtagctcagagaaaacgatatctcaagaggaagctccggttgattcagagatattattcaaaaagaagggtagaaagaaaataaaagccattgattactctaaagttttaaacttaataacattaaataaatgtctttatcgtgaaccgaacgatttgggattgatgtcagagaaagatgtggaggaacttcgattatcattagataacattaaaatctcagggaaagattgtcccaaacctgtaacgaaatggtcacagcttggtttgtcctctgaaatcatggatcttatctccaacgaactacagtttgtaaccctcacaccaattcaatgccaggcaataccggctattatgtcaggcagagatgttattggtatctcaaaaactgggtcagggaaaacggtcgcttttctcctaccacttgttagacagatcaaggctcagccacctttagctcctgatgagactggtcctattggtcttatattgacaccgaccagagaattggccgttcagatacaagaagaggcacttaaattttgtaaagggtctggcatttcaagcatctgttgcgtgggaggctcggagttaaagcaacaaatcaatgaattgaaaagaggtgttgatatcattgtcgcaactccagggagattcattgatcttatgacattaaattcaggccatttgttatctcctacaagaatttcgtttgttgttatggatgaggcagatagacttttcgaccttggatttggaccccaagtcaaccaaattatgggctgcatccgtccagacaagcagtgtgttctctttagtgctacatttccaagtaagctcaaacattttgcatcgcgaaccttaaagaatcctattcaaattactataaactctaaatcacttattaatgagaacattcagcagagagtccaaatttttgatgaggaacatgttaaatttgagttcctacttaaaaggctttcggatcggttagccttgcatcgtggtgaagatgaaaagacaattattttcgttggaagccagcagctttgtgaccttttatatgacgagcttttacttaatggcatcaccacttttcctatccatgctggcaaaccttctgcagaacgtcttcgcaacttgcaaaaattcaaagaaactgacaacggaattttgatatgtactgaggtactctcaagaggtctaaacgtgccagaggtttctcttgtcattatatacaatgcggcaaagaccatcgcacaatacgttcataccgtaggaagaactggtcgtgggactaataacggcgttgcgctctccttcgttatggttgatgaacttgcatctgcctatattttggtgaagtgcatgaaagagaacgagttgagctctgtgccgatggttgtctatcaaaaattgaaggaaatgaacgacgaattttcgagtggactaaagactggaaaatacagattgatccagggttttggtggaaaaggtcttgatcacttagacgagctaaacgaagcaaaacagtctcaagaatatactgactatggtgtcgttgaaaatgaagaagatgtgacagaggaagaaagcggagcaaccaaaatggaatacacaagaggtaaaagggaagaaggacattccacaacatattttgcacatataaatattaacgaccttccgcaacttgcgaggtgggaagcaacgaaaacagagacagtctcgaacatcaaacaggagacaggatgtaattttgagagtaaaggtagcttctaccctgaaggaaaagggccaaagaatgacactgatgatcctaaattgtatttgattgtggaaggtgcagaagaaagtgacgtaacaatggcattagaactcctcaatacaaaggttaaagagggaatacgaaaagcagcagtgaaggatatccaatcaggtaaatatcgtatgtaa

SEQ ID NO: 65901 - protein, 812 aa, Kluyveromyces lactis
MDQTEKLRIRQEKLAKWKKQKLNNDVTASVSVDAKEERLKKLEAWKKKKKQQDELKQKDIKLTSIKSADRDRNKRRGQCSRKRPAFGGSDSESDDENSTSTLFKPRRNDTNTHVLTKDNSKDDLDDGNDALDEYIHKLIDKDSNTNRVRLIDNISEDEDANDSSSEKTISQEEAPVDSEILFKKKGRKKIKAIDYSKVLNLITLNKCLYREPNDLGLMSEKDVEELRLSLDNIKISGKDCPKPVTKWSQLGLSSEIMDLISNELQFVTLTPIQCQAIPAIMSGRDVIGISKTGSGKTVAFLLPLVRQIKAQPPLAPDETGPIGLILTPTRELAVQIQEEALKFCKGSGISSICCVGGSELKQQINELKRGVDIIVATPGRFIDLMTLNSGHLLSPTRISFVVMDEADRLFDLGFGPQVNQIMGCIRPDKQCVLFSATFPSKLKHFASRTLKNPIQITINSKSLINENIQQRVQIFDEEHVKFEFLLKRLSDRLALHRGEDEKTIIFVGSQQLCDLLYDELLLNGITTFPIHAGKPSAERLRNLQKFKETDNGILICTEVLSRGLNVPEVSLVIIYNAAKTIAQYVHTVGRTGRGTNNGVALSFVMVDELASAYILVKCMKENELSSVPMVVYQKLKEMNDEFSSGLKTGKYRLIQGFGGKGLDHLDELNEAKQSQEYTDYGVVENEEDVTEEESGATKMEYTRGKREEGHSTTYFAHININDLPQLARWEATKTETVSNIKQETGCNFESKGSFYPEGKGPKNDTDDPKLYLIVEGAEESDVTMALELLNTKVKEGIRKAAVKDIQSGKYRM

SEQ ID NO: 65902 - DNA, 1419 bp, Oryza sativa subsp
  CDS (1)..(1419)
atggcgaagaagaaggacgtggaggtggaggagttggatgaggaggtggttgccgctgccgccgcccccgccgcggacggtggcgaggagcaggaggccgagccaccggcgcgtcggccgtcgacgttcgcggagctgggcgtcgtcccggagctggtggcggcgtgcgacgccatggggtggaaggagcccaccaggatccaggccgaggccatcccccacgccctcgaagggagggacctgattgggctggggcagacgggctccggcaagacgggcgccttcgcgctgccgatcatccaggcgctgctcaagcaggacaagccccaggcgttgttcgcctgcgtgctgtcgcctacaagggagctggcttttcagattggacagcagtttgaggcactcgggtccgcgatcggtctgagttgcacggtgcttgttggaggagttgatcgggtgcaacaagcagtatcccttgcaaaacgcccacatattgtggttggaactcctggacgtcttttggatcatttgacagatacgaaaggttttagccttaataaattgaagtacttggttttggatgaagctgataagttacttaatgtggagttccagaaagcccttgatgatattctgaatgttatccctaaagaacggaggactttccttttttcagccacaatgaccaataaggtttctaaactgcagcgtgcttgtctaagaaatcctgttaaggtcgaggtagcgtccaaatattctacagtggacacacttagacaggagttttattttgttcctgcagattacaaggattgttttctcgttcatgttctgaatgagttgccagggagcatgatcatgatctttgtccggacctgtgaatcaacaaggctccttgctctcaccctaaggaatcttcgttttaaagctatctctattagtggccaaatgagtcaggataagagactaggcgccttaaacaggttcaaaacgaaagactgcaatatccttatttgcaccgatgtggcaagtcgtggtcttgatattcaaggagttgatgtggttatcaattatgatattccaatgaattccaaggattatgttcatcgggtgggtagaacagcacgtgcagggaatacaggatatgctgtatctttggtgaatcaatacgaggccatgtggtttaagatgatagagaagctccttggatacgagattcctgatcgtaaggtggataacgcagaaatcatgatacttcgtgaacgtatctctgactcgaagaggattgcgctgacgacgatgaaggagggcggtggccacaagaaaaagcggaggaagaacgaagatgatgaggaagaggaggagcgcaatgctcctgtttccagaaaatcgaagtccttcaacaaatcaagaagacggtga

SEQ ID NO: 65903 - protein, 472 aa, Oryza sativa subsp
MAKKKDVEVEELDEEVVAAAAAPAADGGEEQEAEPPARRPSTFAELGVVPELVAACDAMGWKEPTRIQAEAIPHALEGRDLIGLGQTGSGKTGAFALPIIQALLKQDKPQALFACVLSPTRELAFQIGQQFEALGSAIGLSCTVLVGGVDRVQQAVSLAKRPHIVVGTPGRLLDHLTDTKGFSLNKLKYLVLDEADKLLNVEFQKALDDILNVIPKERRTFLFSATMTNKVSKLQRACLRNPVKVEVASKYSTVDTLRQEFYFVPADYKDCFLVHVLNELPGSMIMIFVRTCESTRLLALTLRNLRFKAISISGQMSQDKRLGALNRFKTKDCNILICTDVASRGLDIQGVDVVINYDIPMNSKDYVHRVGRTARAGNTGYAVSLVNQYEAMWFKMIEKLLGYEIPDRKVDNAEIMILRERISDSKRIALTTMKEGGGHKKKRRKNEDDEEEEERNAPVSRKSKSFNKSRRR

SEQ ID NO: 65904 - DNA, 1839 bp, Arabidopsis thaliana
  CDS (1)..(1839)
atgagtgcatcatgggcagatgtggctgattcagagaaggccgtttctcagtcaaagcctccttatgttcccccacacctacggaacaggccatcagagcctgttgctgctcctttgccacaaaatgatcatgcagggtatggtggtcaaccagctgggtctcgttgggctcctcctagcagtgggggtggtggtgccagcggcggtggctataggaatgatggagggcgcactggctatggttatggtgctggaggaggaggtggtggtggtggtggctggaacaacagaagtggagggtgggaccgtagggaacgtgaagtaaacccatttggagatgatgctgagttagaaccggtctttacagagcaggagaatactggcattaattttgatgcctatgaagatattccagttgagaccagtgggggagacgtgccccctcctgttaacacatttgctgacatagatcttggggatgcattaaatctgaacatccggaggtgcaagtatgtgaggccaacaccggtacagcgtcatgctattccaatactgcttgcagagagagatttgatggcctgtgcccagactgggtctgggaagactgctgctttttgctttccaataattagtggaatcatgaaagatcagcatgtagaaagaccccgtggttcacgggcggtttacccttttgcagtcatcctctcaccaacaagggaattggcatgccagatacatgatgaagccaaaaaattctcctaccaaactggtgtgaaggttgttgttgcttatggaggaacacccattcaccagcagctcagggaactcgagaggggatgtgatatccttgtggcaactcctggccggttaaatgatttgcttgaaagagctagagtctcaatgcagatgattaggtttttagctctagatgaggcagacaggatgctggacatgggttttgagccacagattagaaagattgttgagcagatggacatgcctccacgtggggtgagacagacaatgctgttcagtgctacatttccaagtcagattcagagacttgcagctgatttcatgtcaaactatatatttttggctgtgggaagagttggttcaagcactgatttaattacccaaagggttgagtttgtccaagagtctgacaagagaagccatctcatggacctgcttcacgcgcaaagagagacccaagacaagcaatcattgacattagtttttgtggagacaaagaggggagctgatactttggaaaattggctgtgcatgaatgagtttccagcaacctccattcatggcgatagaacacaacaggaaagagaagtggcactgaggtccttcaaaactgggaggacacctattttggttgcaacagacgtggcagcacgtggtcttgacattccccacgtggctcatgttgtaaacttcgatctaccaaatgacattgatgactatgtccaccgtatcggacgaacaggacgtgcaggcaaatctggaatagcaactgccttcttcaacgagaacaatgcacaactggctaggtcgcttgctgagctaatgcaagaagccaatcaagaggtccccgagtggctcacacgatatgcttcacgtgcttcatttggtggtggtaagaaacggtctggtggtcggtttggtggccgtgacttcagaagggaaggctcttacagtagaggaggaggcggcggcggcggaggaggcggcagtgattactatggcggaggaggctatggtggtggtggatacggtggtgctccaagcggtgggtatggtgctggagtgaccagtgcttgggattag

SEQ ID NO: 65905 - protein, 612 aa, Arabidopsis thaliana
MSASWADVADSEKAVSQSKPPYVPPHLRNRPSEPVAAPLPQNDHAGYGGQPAGSRWAPPSSGGGGASGGGYRNDGGRTGYGYGAGGGGGGGGGWNNRSGGWDRREREVNPFGDDAELEPVFTEQENTGINFDAYEDIPVETSGGDVPPPVNTFADIDLGDALNLNIRRCKYVRPTPVQRHAIPILLAERDLMACAQTGSGKTAAFCFPIISGIMKDQHVERPRGSRAVYPFAVILSPTRELACQIHDEAKKFSYQTGVKVVVAYGGTPIHQQLRELERGCDILVATPGRLNDLLERARVSMQMIRFLALDEADRMLDMGFEPQIRKIVEQMDMPPRGVRQTMLFSATFPSQIQRLAADFMSNYIFLAVGRVGSSTDLITQRVEFVQESDKRSHLMDLLHAQRETQDKQSLTLVFVETKRGADTLENWLCMNEFPATSIHGDRTQQEREVALRSFKTGRTPILVATDVAARGLDIPHVAHVVNFDLPNDIDDYVHRIGRTGRAGKSGIATAFFNENNAQLARSLAELMQEANQEVPEWLTRYASRASFGGGKKRSGGRFGGRDFRREGSYSRGGGGGGGGGGSDYYGGGGYGGGGYGGAPSGGYGAGVTSAWD

SEQ ID NO: 65906 - DNA, 2499 bp, Arabidopsis thaliana
  CDS (1)..(2499)
atggttacaggcgataaagaatcttccttgatgaagaagaggaacaagagaagccataagagaaagcgagaggaggatttcgaacgtatagattcacttccttggagctcttctatacccattggagaagacgacgaaggcgaatccttctccactctattttcaggctcaggccagctcgacggaggttttctatcacttgaggagattgatgaagctgattaccatctaactctccctaccattgaaagtgaaataacagagagaaaacaatctccagaagatgatgatgataccaacgagacagtggatgagatgattgaaggagaagaagctgaagaagatggagaaggaagggatgatgaggatgacgaagatgacgaggagactcgtaagaaaaaagagaagaaagctaagaggaataaggagaagaaaaaagagaagaagaagaagaagcagaagaagattaatgaggccgcaaagaatcaggacgcttctgctgttagctgtgatggagatgacacagtagaggagcaagttgaggaagaagagattcctccagaatttagtgcatggagttcgatgagactccatccactactcatgaagtccatataccgcctcgatttcaaggagccaacaaaaatccagaaggcttgttttaacgttgcagcatatcagggaaaggatgttattggtgctgcagagacaggatctggaaagacacttgcttttgggttgcccatactgcaacgcctcttagacgagcgggaaaaggttggtaaattgtatgcattaaagggagaagaagcacagaaatatgctgcagatggctatttacgagctctaatcatcactccaactagggaacttgctcttcaggtgacggagcatcttgagaatgctgccaagaatcttagcgtcaaggtcgttcctattgttggtgggatgttttcagagaagcaggaaagacgtttaaaagagaaacctgaaatagttgttgcaactccaggaaggttatgggaacttatgtccgctggagaaaagcatcttgtagagctgcattccttgtcgttctttgtgttggacgaggctgatcgcatggttgaaagaggtcatttcagggagctgcagtctatactcgacttgcttccagtgacagataaaccaaatgaagggaaaacgcaaactgtgaagagtaatgacacagttttaaacgtcccgaagaagaaaagacaaacttttgttttctcagccaccatagcgctgtcttcggatttccgtaaaaagctaaagcgtggctcctcaaagtcaaagcaatcatcatctggtgaagtgaattctattgaggttttatctgaacgagctggaatgagagataatgttgccatcattgatctgacaactacatctattttggcaccaaagattgaagaatcttttattaagtgcgaagagaaggaaaaagacgcatacttgtattatattttgagcgtccatggacaagggcggacaattgttttctgcacatcagtgactgatttgcggcatatctctgggcttttaaagattcttggacttgatgtttgcacactcttctcagaaatgaagcagcgagctcggttgaagtcaatcgaccgtttccgtgcgagcgaaaatggaatactcatagcaacagatcttgtagcaaggggtattgatattaagaatgtccgaactattattcactacaaacttccacattcggcagaagtgtatgtacatagatgtgggaggactgctagagcattcgcagatggatgcagtatagctttgattgagccaaatgagacgtccaagttttacacgttatgcaagtcattctctatggaaagcgtaaagatattccctttggataactcttatatgccagctgtgaggaagcgattatatctagcacgtcaaatatatgagattgagcggaaaggctcgcgggagaatgcagacaggacctggcttaaaaaacatgctgaatcaatggaactcgaattggacgatgaagaaagtgaagaggaaagagtggacaatgtcaggcagagaaaagcgacctcagcacgacttaataagctgaaggaggaacttagcacgctcttatcacatccgatgcagcccaagaaattttcaggccgttactttgctggggttggtgtgtcgactcttatgcagaatcagtttgtagagttaaagaagcaaaaacaagcacaaatgcaaattggtggagatataaagagaagaaaacttgttgtcattaaccagaactgcatcgaacctcttcaagcccttcgtgctggtggtaacgagatgctgaaaatgaaaggtcagagtgcagagaagaggcgcgatatagcgagcttgaaaaagaaaagaaaggaagagaagatagatgtttatgatcttgcgttgtccatctttcaggtcggcgtgatcaacgaaggaaccagaagaaacagagaaaactaa

SEQ ID NO: 65907 - protein, 832 aa, Arabidopsis thaliana
MVTGDKESSLMKKRNKRSHKRKREEDFERIDSLPWSSSIPIGEDDEGESFSTLFSGSGQLDGGFLSLEEIDEADYHLTLPTIESEITERKQSPEDDDDTNETVDEMIEGEEAEEDGEGRDDEDDEDDEETRKKKEKKAKRNKEKKKEKKKKKQKKINEAAKNQDASAVSCDGDDTVEEQVEEEEIPPEFSAWSSMRLHPLLMKSIYRLDFKEPTKIQKACFNVAAYQGKDVIGAAETGSGKTLAFGLPILQRLLDEREKVGKLYALKGEEAQKYAADGYLRALIITPTRELALQVTEHLENAAKNLSVKVVPIVGGMFSEKQERRLKEKPEIVVATPGRLWELMSAGEKHLVELHSLSFFVLDEADRMVERGHFRELQSILDLLPVTDKPNEGKTQTVKSNDTVLNVPKKKRQTFVFSATIALSSDFRKKLKRGSSKSKQSSSGEVNSIEVLSERAGMRDNVAIIDLTTTSILAPKIEESFIKCEEKEKDAYLYYILSVHGQGRTIVFCTSVTDLRHISGLLKILGLDVCTLFSEMKQRARLKSIDRFRASENGILIATDLVARGIDIKNVRTIIHYKLPHSAEVYVHRCGRTARAFADGCSIALIEPNETSKFYTLCKSFSMESVKIFPLDNSYMPAVRKRLYLARQIYEIERKGSRENADRTWLKKHAESMELELDDEESEEERVDNVRQRKATSARLNKLKEELSTLLSHPMQPKKFSGRYFAGVGVSTLMQNQFVELKKQKQAQMQIGGDIKRRKLVVINQNCIEPLQALRAGGNEMLKMKGQSAEKRRDIASLKKKRKEEKIDVYDLALSIFQVGVINEGTRRNREN

SEQ ID NO: 65908 - DNA, 2499 bp, Oryza sativa
  CDS (1)..(2499)
atggccgcagcgccgccgccgccaccgcctccgcagctgcagtcctcggatccctccactccgcctcaggagaccagccaggtacgcaagggaaagaagagtcgtggcgcgaagaaacctaggagagccgccgctgccgccgccgcctcgacctcctcggccggcacgatggtcgaggaccccttcctcgtactcgccggaggcaaggaaggagggttcctggagcttgaggagatcgacgaggcggacttcggaatctttggcggtgccgtggaggatctaggagaaattgacaggaaggcaggaaaggatcagaagaagaagaagaggaagaagcggaagcgaggtgacgatgactatgctttacctggtgatggtgatttggtagttgaatgtgaggaggagggagagaagggtgagaagagggtgaaaaagaagaggaggagcaggaagaagagaaaggtgaaggaaatggaggaaaaaatggagagcaaggaagatgtctccgatgacaatgtggaagatatgcaagatggcaatgacatggaacaagataacaatgatgggctgattttgggagaggatgaagtctatgcatggcgagagcttagactgcaccctcttcttattacagcggtgcgcaggcttggattcaaagaaccaacaccaatacaaaaggcttgctttcctgcagcggctcatcaaggcaaggatgttattggtgcagcagagacaggttctggtaaaacacttgcttttggcctccctatcttgcagcgccttcttgaagaacaagagaaggccatgagattgtctcgggaggatgagagtacacaagatgaaaattctagagaaagtccacttcgtgctcttattttaacacccaccagggagcttgccaagcaggtctgcgatcatctaaaagaagcagccaagttcttaagaatccaagttgttcccattgttggtggtctatccatggaaaagcaagaacggcttctgaaaaggaaacctgagattgttgttggaaccccaggaagattgtgggagcttatgtcaacaggcaaccaacacctaattaagttacattcattatcattcttcgtgttggacgaggctgatagaatgatagagcgaggccatttccatgaactgcaatctatcattgagatgttaccagtgactaacggttctgatgaacaaactgttgggaccacgccaagttgcgaaactgtgcctatattgcaaataaagaagagacagacatttgtattctcagcaacacttgctctctcagctaattttcggaaaaagttgaagcgaggcctagttactgcaaaagcgtctgcatctactgatttgagttctattgaagcactttcgaagcaggcccgtatgaaacctaacgcagaaatagttgatctgacgaaggcttctatcttacctgagaaacttgaagagtcttttattgagtgtagtgatgatgataaggatgcctacctgtattatatattgagtgtccatggacaaggccgcacaataatattttgtacatcaatagctgcattacgtcacctttcatctatattacgagttcttggaattaatgtcctgacaaatcatgctcaaatgcaacaaagggctcgcatgaaggctgtggatcgtttccgtgaaagtgaaaattcaattttggttgcaactgatggttttgcaaggggcatggattttgatgatgtccgaactgtgattcattatcaattgccacactcaactgatgtttacatccacagaagtggaaggacagcgcggaaatcaatggcaggttgcagcattgcattaatctctcctgcagacaaggccaagttttactcactttgcaagtcactgtcaaaggagaacctccagcagtttcctgttgaccatgcttacatgcctgcagtaatgaataggctcacccttgctcggcagattgacaagattacacgtaaaaattcccaggaaaatgccaacaaatcatggcttcagaggaatgctgagtccatgggattattattggagacaagtgacagtgaggaggaacgtgtacaggggcataagcaaaggaaagcaacttctgcgaacctccagaagcttcaacaggatttgagtgagctcttgcaacgccccttgcagcctaagactttttcgcggcgctatttagctggggctggtgtttcaccgttacttcaaaagcaactggaagagttgtccaaaaggaatgttaagggcagtgctagtgtaaatgcaaataaaggatcccgatttgttgttattggtcaggatcaaatagaacccttgcaagctcttcagaattctgggcaagaggtgtgtgtgagcattgacaagcaaagagaaaagcgaaggcttgctgaaaattggaggcgaaagaagcaaaaagagaagaaaagtacacgagagcaaaagagaaaggagaagaggatagctaaagaaagggactaa

SEQ ID NO: 65909 - protein, 832 aa, Oryza sativa
MAAAPPPPPPPQLQSSDPSTPPQETSQVRKGKKSRGAKKPRRAAAAAAASTSSAGTMVEDPFLVLAGGKEGGFLELEEIDEADFGIFGGAVEDLGEIDRKAGKDQKKKKRKKRKRGDDDYALPGDGDLVVECEEEGEKGEKRVKKKRRSRKKRKVKEMEEKMESKEDVSDDNVEDMQDGNDMEQDNNDGLILGEDEVYAWRELRLHPLLITAVRRLGFKEPTPIQKACFPAAAHQGKDVIGAAETGSGKTLAFGLPILQRLLEEQEKAMRLSREDESTQDENSRESPLRALILTPTRELAKQVCDHLKEAAKFLRIQVVPIVGGLSMEKQERLLKRKPEIVVGTPGRLWELMSTGNQHLIKLHSLSFFVLDEADRMIERGHFHELQSIIEMLPVTNGSDEQTVGTTPSCETVPILQIKKRQTFVFSATLALSANFRKKLKRGLVTAKASASTDLSSIEALSKQARMKPNAEIVDLTKASILPEKLEESFIECSDDDKDAYLYYILSVHGQGRTIIFCTSIAALRHLSSILRVLGINVLTNHAQMQQRARMKAVDRFRESENSILVATDGFARGMDFDDVRTVIHYQLPHSTDVYIHRSGRTARKSMAGCSIALISPADKAKFYSLCKSLSKENLQQFPVDHAYMPAVMNRLTLARQIDKITRKNSQENANKSWLQRNAESMGLLLETSDSEEERVQGHKQRKATSANLQKLQQDLSELLQRPLQPKTFSRRYLAGAGVSPLLQKQLEELSKRNVKGSASVNANKGSRFVVIGQDQIEPLQALQNSGQEVCVSIDKQREKRRLAENWRRKKQKEKKSTREQKRKEKRIAKERD

SEQ ID NO: 65910 - DNA, 1830 bp, Arabidopsis thaliana
  CDS (1)..(1830)
atgaagagagcccaacaatcggcaagagaaacaaagcaagaagctaaagatgctagcaaagcgaagagcggtttgttcgcttcttgttccttctcttcacttggtttagataccaagctctctgaccagctcaaagaaaggatgggttttgaagctcctactcttgtacaagctcaagcaattcctgttattctctctggtcgagatgtacttgttaatgctccaaccggtactggaaagactatagcgtatttggcacccctcatccatcacttgcagggtcattctcctaaggttgatcgttctcatggaacttttgctttggtgattgtgcctacacgggaactatgccttcaggtgtatgaaaccttggagaagttactgcatcggttccattggatagtccctggctatgttatgggaggagagaaaaaggctaaagaaaaggctagattaaggaaaggaatatccattctaattgcaaccccgggacgccttcttgaccatttgaagaacacagcttcatttgtgcacaaaaatctgcgttgggtcatctttgatgaagctgatagcattctcgaattaggttatgggaaggagatagaacagataattaagcttctaggttcagggcaaaacgagcaaggggaagaagatgatattgttccaaagggtattcagaagcagaacttgttattgtcagcaacattgaatgataaagttaacgatcttgcaaaacttagtttggacgatccggtaatgattggtcttgacaacaccaaattgcaacaaaatctatcaatagagtctcctgcggctcctgactctgatgcggaagatatggtaattcatgttaacaaatccgcaaaccctttatctgaggactatggaataccatcacagctggtacagagatatcttagagtgccatgtggtgcacggcttgtggcacttctttctgttctcaagaacctttttgaaagagaagcttctcaaaaggtggtcgtcttcttttcgacacgtgatgctgtagattttcattactcacttctgagtgaattccagtggccaccgaattctgagacagaagaggaggggactaaagagttgtttctcaagtgcaaaacgttccggttacatggaagtatggagcaggaggatagaagatctgcgtttgggacctttaaaacagagaagcaggctgttctgttgagtacagatgttgctgctagaggcttggatttcccaaaagtaagatgtattatacaatatgactgtcccggggaagctaccgagtatgtgcatagagttggtagaacagctcgtattggtgaaaaaggagaagccttgttatttctacaaccgattgaaatagactatcttaaggagctgaagaaacatggtgcatcacttacagagtaccctcttatgaaagtacttgataaatttcccatacccggcaatatgccccgaatcaaaaaggtcctatctctagaatcccatccatgggtcatatctctgcagagagctcttgaatcccttacttacgccgagccaaagatgaagagcctggccaagaatgcatttgtctcttgggttaggggatatgcagctcacaagggagagctcaagagtattttcgtggtgaagaagcttcacttgggtcatgtcgccaagagttttgctctgagagaacaaccgtctttagttgggaaatcacatcacaaggaaacaatgaagagaaagagagacgaacgtcaaaaagggcaacaaggtaagaagagaaagaagatgagtggtactggcaatagaagtacacaaaaaacttga

SEQ ID NO: 65911 - protein, 609 aa, Arabidopsis thaliana
MKRAQQSARETKQEAKDASKAKSGLFASCSFSSLGLDTKLSDQLKERMGFEAPTLVQAQAIPVILSGRDVLVNAPTGTGKTIAYLAPLIHHLQGHSPKVDRSHGTFALVIVPTRELCLQVYETLEKLLHRFHWIVPGYVMGGEKKAKEKARLRKGISILIATPGRLLDHLKNTASFVHKNLRWVIFDEADSILELGYGKEIEQIIKLLGSGQNEQGEEDDIVPKGIQKQNLLLSATLNDKVNDLAKLSLDDPVMIGLDNTKLQQNLSIESPAAPDSDAEDMVIHVNKSANPLSEDYGIPSQLVQRYLRVPCGARLVALLSVLKNLFEREASQKVVVFFSTRDAVDFHYSLLSEFQWPPNSETEEEGTKELFLKCKTFRLHGSMEQEDRRSAFGTFKTEKQAVLLSTDVAARGLDFPKVRCIIQYDCPGEATEYVHRVGRTARIGEKGEALLFLQPIEIDYLKELKKHGASLTEYPLMKVLDKFPIPGNMPRIKKVLSLESHPWVISLQRALESLTYAEPKMKSLAKNAFVSWVRGYAAHKGELKSIFVVKKLHLGHVAKSFALREQPSLVGKSHHKETMKRKRDERQKGQQGKKRKKMSGTGNRSTQKT

SEQ ID NO: 65912 - DNA, 1506 bp, Arabidopsis thaliana
  CDS (1)..(1506)
atgagtcgctacgatagccggaccggcgattccacctcgtaccgtgaccgtcgaagtgactcagggtttggtgggacttcatcatatggaagctcaggtagtcatacatctagcaaaaaggataacgatggcaatgaatctccaaggaagctagatttagatggtttgactccttttgagaagaatttttatgtcgagtctcccgctgtggcggctatgacagacacagaagtagaggaatatcgaaagctaagggaaattactgttgaaggcaaagatattccaaaacctgtcaagagttttcgtgatgttggctttcctgattatgttttggaagaggttaagaaggctggttttactgaacctacgcctatacaatctcaggggtggccaatggctatgaagggacgtgatcttatcggcattgctgaaactggttctggaaagactctttcttacttactacctgctattgtccatgttaatgcccaaccaatgttagctcatggtgacggcccaatcgtcttggttcttgctcccactcgtgaactggctgtgcagatacagcaagaggcatctaaatttggttcatcctcaaaaattaagaccacttgcatttatggtggggttccaaaagggcctcaagtgcgtgatctccagaaaggtgtggagatcgttatagctactcctgggaggttaatagacatgatggagtcgaacaacacaaacctacgaagggttacttatcttgttttggatgaggctgatcgaatgcttgatatggggtttgaccctcagatccggaaaattgtttcacatattcggccagaccgtcaaactttgtactggagtgccacttggcctaaggaggtggaacaactatcgaagaagtttctttataacccatacaaagtgataataggatcttctgatttgaaagctaaccgtgcaattcgtcaaattgttgatgtcatttccgaaagccaaaagtataacaagttggtgaaactgcttgaggacataatggatggaagcagaattcttgtcttcctcgatacaaaaaagggctgtgaccaaatcactcgtcagcttcgcatggatggttggcctgctttgtcaatacatggagataaaagtcaagcggaaagagattgggttctctcggagtttagatcaggcaaaagccctataatgactgctacagacgttgcagctcgtggattagacgtgaaagatgtgaagtatgtgataaactatgacttccctggatcactggaggattatgttcacaggattggacgaacaggtagagccggggctaaaggaacagcttacactttcttcacagttgcaaatgcgagattcgccaaggaacttaccaacatactacaagaagctggacagaaagtgagtcccgaattggcttcaatgggtcgcagtaccgctcctcctcctccagggcttggaggattcagagaccgtgggagcagaagagggtggagctga

SEQ ID NO: 65913 - protein, 501 aa, Arabidopsis thaliana
MSRYDSRTGDSTSYRDRRSDSGFGGTSSYGSSGSHTSSKKDNDGNESPRKLDLDGLTPFEKNFYVESPAVAAMTDTEVEEYRKLREITVEGKDIPKPVKSFRDVGFPDYVLEEVKKAGFTEPTPIQSQGWPMAMKGRDLIGIAETGSGKTLSYLLPAIVHVNAQPMLAHGDGPIVLVLAPTRELAVQIQQEASKFGSSSKIKTTCIYGGVPKGPQVRDLQKGVEIVIATPGRLIDMMESNNTNLRRVTYLVLDEADRMLDMGFDPQIRKIVSHIRPDRQTLYWSATWPKEVEQLSKKFLYNPYKVIIGSSDLKANRAIRQIVDVISESQKYNKLVKLLEDIMDGSRILVFLDTKKGCDQITRQLRMDGWPALSIHGDKSQAERDWVLSEFRSGKSPIMTATDVAARGLDVKDVKYVINYDFPGSLEDYVHRIGRTGRAGAKGTAYTFFTVANARFAKELTNILQEAGQKVSPELASMGRSTAPPPPGLGGFRDRGSRRGWS

SEQ ID NO: 65914 - DNA, 2202 bp, Arabidopsis thaliana
  CDS (1)..(2202)
atgaagcgaacaatcaacgaagtcgtcggatctacctccgtcaatactctcgattcctccattgctaagaagcctgtcttcctcaccaaaaaacagcgggaagagttagccctaaaacgccgccaggatcaaatctccgagcaacgtgtccgtcgtgagcaacttggtcgccccgagcccgagacggaagatgtctccaatggagataccaatcgggataaggatcgagatagagatcgggaccgagaccgagaacgtgaccgagatagggagagagatagagggcgagatcgagaccgcgatagggatagagacagggatagggatagagagcgagagagagaccgtgagcgtgaccgtcgtgaacgagatcgtgaaccggatcggagaaatagagaaaaggagagggaagaggaggttaaggctagggagaaggcgcgtgttgagaaattagttgagagagagaaggagaaggaacttgacgccattaaagagcagtatcttggaggtaagaagccgaagaagagagtcattaggccaagcgagaagtttcgtttctcttttgattgggaaaacactgaggatacttctagggatatgaacgttctttaccaaaaccctcatgaagctcagcttctctttgggagagggtttcgtgctggtatggaccgtcgtgagcagaagaaacaagcggctaagcatgagaaagagatgcgagacgagattcgtaagaaagatggtattgtagagaaaccagaggaagctgctgctcagagagtgagagaagaagctgctgatacttatgactcgtttgatatgagggttgacaggcattggagtgataagagattagaggagatgactgaaagggattggcgtattttcagagaagatttcaatatctcttacaagggttcgaggattcctcgtccgatgaggagctgggaagagagtaagcttacttctgagcttttgaaagctgtggagagagctggatacaagaaaccttctcctattcaaatggcagctataccacttggactgcaacagcgtgatgttatcggcattgcagagactggttctggtaagactgctgcttttgttttacccatgttagcttacatctctagattgccaccgatgagcgaagagaatgagactgaggggccttatgctgttgttatggcccctactagagagcttgctcagcagattgaggaggaaactgttaagtttgcgcattatctagggtttagggtgacttctattgtgggtggtcagtcgattgaggaacaggggttgaagataacacaagggtgtgagattgtgattgctactccgggtcgtctgattgattgccttgagaggcgttatgcggtgttgaaccagtgtaactatgtggttcttgatgaggcagatcggatgattgacatgggtttcgagccacaggttgcaggtgtgttagatgcgatgccttcaagtaatttgaaacctgagaacgaagaagaagagcttgatgaaaagaagatttatagaactacatatatgtttagtgctacaatgcctcctggggtagagcggctagctcggaagtacttgaggaacccggttgttgtcaccattggtactgctggaaagactacggatttgatttcgcaacatgttattatgatgaaagaatcagagaaattcttcagattgcagaaactgctcgatgagctcggcgagaagactgccattgtgtttgttaacacaaagaaaaattgtgactcgattgctaagaatctggataaggcagggtaccgtgtcacgaccttgcacggtgggaaatcacaagagcagagagaaatcagcttagaaggattcagagcaaagagatacaacgttcttgttgcaacagatgttgtaggacgtggaattgatattccggatgtggctcatgtcataaactacgacatgcctaaacatatagagatgtacacacatcgtatcggacgtacaggacgtgctgggaaaagtggtgttgcgacttcgttcttgacacttcatgataccgaagtcttctatgatctgaagcagatgcttgttcagagcaacagtgcggtgcctcctgagctggcgagacatgaagcgtccagattcaaaccaggtacggttcctgatagacccccaagacatagtgacactgtctatataaattga

SEQ ID NO: 65915 - protein, 733 aa, Arabidopsis thaliana
MKRTINEVVGSTSVNTLDSSIAKKPVFLTKKQREELALKRRQDQISEQRVRREQLGRPEPETEDVSNGDTNRDKDRDRDRDRDRERDRDRERDRGRDRDRDRDRDRDRDRERERDRERDRRERDREPDRRNREKEREEEVKAREKARVEKLVEREKEKELDAIKEQYLGGKKPKKRVIRPSEKFRFSFDWENTEDTSRDMNVLYQNPHEAQLLFGRGFRAGMDRREQKKQAAKHEKEMRDEIRKKDGIVEKPEEAAAQRVREEAADTYDSFDMRVDRHWSDKRLEEMTERDWRIFREDFNISYKGSRIPRPMRSWEESKLTSELLKAVERAGYKKPSPIQMAAIPLGLQQRDVIGIAETGSGKTAAFVLPMLAYISRLPPMSEENETEGPYAVVMAPTRELAQQIEEETVKFAHYLGFRVTSIVGGQSIEEQGLKITQGCEIVIATPGRLIDCLERRYAVLNQCNYVVLDEADRMIDMGFEPQVAGVLDAMPSSNLKPENEEEELDEKKIYRTTYMFSATMPPGVERLARKYLRNPVVVTIGTAGKTTDLISQHVIMMKESEKFFRLQKLLDELGEKTAIVFVNTKKNCDSIAKNLDKAGYRVTTLHGGKSQEQREISLEGFRAKRYNVLVATDVVGRGIDIPDVAHVINYDMPKHIEMYTHRIGRTGRAGKSGVATSFLTLHDTEVFYDLKQMLVQSNSAVPPELARHEASRFKPGTVPDRPPRHSDTVYIN

SEQ ID NO: 65916 - DNA, 2283 bp, Arabidopsis thaliana
  CDS (1)..(2283)
atgtctaatcgcaaattcggaatggaaggattcggcattaatcggcaaactagctacagtttcgagcgatctcaagcaccgcaacgtctctacgtccctccctcgtctcgcggcggagacaactccgaagatgccgatcttgataacattgattacatggaaaacgaagaagctgaggaagatattgaggaaggcggttctgctgcggctagcggtggcgaggttgatgagatcgatccattagatgcttttatggagggaattcaccaggagatgaaatctgctccacctcctaagccaaaggagaaactagagaggtacaaggacgacgatgacgatcctgttgagagttacctcaaggccaagaaggatttgggcctgacactagccgccgatgcacttaacgccggttataactccgacgaggaggtgtatgctgcagctaaggcggtcgatgcagggatgctagattatgattccgatgataatccgattgttgtggataaaaggaagattgagcctattacagctctggatcatagctccatcgattatgaacctattaataaggacttttacgaggagctagaatcaatatcaggaatgactgagcaagaaaccacggattaccgtcagagattagggattcgggtctcgggttttgatgttcataggccagttaagacctttgaggattgtggattttcctcacagattatgagtgctatcaaaaagcaagcttatgaaaaacctacagcaatccaatgtcaggctttacctattgtgttgtctggtcgagatgttattggcatagccaaaactggttcaggtaagactgcagcgtttgttcttccaatgattgttcatattatggatcagcctgaacttcagagagatgaaggtccaattggtgtcatatgtgctccaaccagagaattggctcatcaaatcttcttggaagccaagaaattttcgaaagcatatggcttacgagtctctgctgtgtatggtggaatgtctaaacatgaacagtttaaggaactcaaggcaggatgcgaaatagttgttgctactcctggaaggttgatagacatgctgaagatgaaggctttgacaatgatgagagccagttatttggttcttgatgaggcagatcggatgtttgaccttggctttgagccacaagtaaggtctattgttggccagattcgtcctgatcgccagactttactattttcagccactatgccttggaaagttgaaaagttagctagggaaatcctttcagatcctattagagtcacagttggtgaagtggggatggccaatgaagatattacgcaggttgtcaatgtcataccttctgatgctgaaaaacttccctggctacttgaaaagctccctggaatgattgatgagggtgacgtattagtgtttgcatctaaaaaggccactgttgatgagattgaagctcaacttactctaaattccttcaaagttgctgctcttcacggtgataaagaccaagcatcacgaatggaaactctgcagaagttcaaatctggagttcaccatgtgctgattgccactgatgttgctgcccgaggtcttgacatcaaatcgcttaagacagtggttaactatgacatcgcaaaagatatggacatgcatgtacatcgtattggtagaacaggccgtgccggtgacagagatggggttgcctacacacttgttacgcagagagaggctagatttgctggtgaattggtaaacagtctggttgctgctggtcaaaatgtgcctccagaactcacagatcttgccatgaaggatggacgattcaagtccaagcgtgacgggagaaaaggaggtaagaaaggccgaggaggaggtggtggaaacaaaggagtacgtggagttgattttggtcttggtattggatttagctcggaatctagtaggacaccttcttctaaagctgcaccaagtagaagtggggcaatcaattcagtgagaactggagtaatggcccaattcaagaatagttttgtcgctgcaacgccatcaaatccacaaaaccaagcttatccaaacaagagaccatccctaatgggctttgtctcaggtggtactattggtggagacatgggtagaactcagagtcaagctcccccagtagcacctactcaaaacgcctcatcacacaactccagccagaatcactcacagagttctgagaatcggcctagagagaggaagagaagatctggttgggataattga

SEQ ID NO: 65917 - protein, 760 aa, Arabidopsis thaliana
MSNRKFGMEGFGINRQTSYSFERSQAPQRLYVPPSSRGGDNSEDADLDNIDYMENEEAEEDIEEGGSAAASGGEVDEIDPLDAFMEGIHQEMKSAPPPKPKEKLERYKDDDDDPVESYLKAKKDLGLTLAADALNAGYNSDEEVYAAAKAVDAGMLDYDSDDNPIVVDKRKIEPITALDHSSIDYEPINKDFYEELESISGMTEQETTDYRQRLGIRVSGFDVHRPVKTFEDCGFSSQIMSAIKKQAYEKPTAIQCQALPIVLSGRDVIGIAKTGSGKTAAFVLPMIVHIMDQPELQRDEGPIGVICAPTRELAHQIFLEAKKFSKAYGLRVSAVYGGMSKHEQFKELKAGCEIVVATPGRLIDMLKMKALTMMRASYLVLDEADRMFDLGFEPQVRSIVGQIRPDRQTLLFSATMPWKVEKLAREILSDPIRVTVGEVGMANEDITQVVNVIPSDAEKLPWLLEKLPGMIDEGDVLVFASKKATVDEIEAQLTLNSFKVAALHGDKDQASRMETLQKFKSGVHHVLIATDVAARGLDIKSLKTVVNYDIAKDMDMHVHRIGRTGRAGDRDGVAYTLVTQREARFAGELVNSLVAAGQNVPPELTDLAMKDGRFKSKRDGRKGGKKGRGGGGGNKGVRGVDFGLGIGFSSESSRTPSSKAAPSRSGAINSVRTGVMAQFKNSFVAATPSNPQNQAYPNKRPSLMGFVSGGTIGGDMGRTQSQAPPVAPTQNASSHNSSQNHSQSSENRPRERKRRSGWDN

SEQ ID NO: 65918 - DNA, 1785 bp, Oryza sativa subsp
  CDS (1)..(1785)
atggccgccggcgacctcctcctccgcacccagagcggcctccccgtgctcgcaagggccttccccagctgcctctgcctccgcgtccctgcccgccgccgccggggcgctcctcccctgaccgccgccaaggtcgacgtcgccgacgccgtcggccgccgtgtcaggtcgggcggcgcggccgtaccgaagcggcgtcgtagccgtagggacgcggaggaggaggaggaggagggcctcgcgttctcgagggtggtcacgggcaggggaagaggcgtccgcgaggagggcgtggcggaaggggaggctccggaattcgatgcggcgaagagcggtgacgagtcgggaggcgtggatggctcgtacctcagcgacacaaggtttgatcaatgcactatttctccgttgtcactgaaagccgtcaaagatgctgggtatgaaaggatgacccaggtgcaggaggcaactctgccagtaatccttcaaggtaaagatgttcttgcaaaagcaaagacaggaactgggaaaactgttgcctttttgcttccagccattgaagttctctccgcattacctaattctcggagggatcaactacgtccatctataaatttgctggtgatgtgccctactagggagcttgcaatccaagtggctgttgaggccaagaaacttctcaagtatcaccgctcgctgggggtgcaagttgtaatcggtggcacacgattaacccaagagcaacgaagcatgcaagctaacccatgccagattcttgttgctacacctggaaggcttaaagaccatgttgagaacacacctggtttttctacccgactaaaaggtgtgaaggttcttgttcttgatgaagctgatcgcctgctggatatgggattcagaagagacattgagagaataattgcttccgttcctaaagagcgacagacattgctattttctgctactgtgccagaggaggtccgccaaatttctcatattgcaatgaagaagaattataagttcattaacactgttaaggatggtgatgaggagacacatgcacaggtgagtcagatgttcatgatcgcgccactagatctgcacttctctatcttatatgatgtattgaagaagcatgttgcagaggatgcagactacaaagtgattatattctgcactactgcgatggttaccaaacttgtcgctgaaattctttcccaactgagactgaatataagagagattcattccagaaagtcacaatctgccagaactaaggtctcagatgaattcaggaagtcaaggggtctgatattggttagttctgatgtatctgcccgcggcgtggattatcctgatgtcacccttgtcatacaggttggggtgccagctgatagacagcaatatatacatagacttggtagaactggacggaagggaaaggaagggcaaggcctattactgttggctccatgggagaagtactttcttagtagcattaaggatttgtcaatatcagaggctacggtaccttctgttgattcaagcactcagacaatagtcaaagacgcagtccggaaagttgagatgaggagcaaggagtgtgcctatcaagcatggttaggatactacaactctaacaagaccattggccgagaaaaatccagacttgttaagctcgcagaagagttcagccaaagcatggagctttcagttccgccagctatacccaagcaaattcttcgaaagatgggacttaacaatgttcctgggctgagatctacataa

SEQ ID NO: 65919 - protein, 594 aa, Oryza sativa subsp
MAAGDLLLRTQSGLPVLARAFPSCLCLRVPARRRRGAPPLTAAKVDVADAVGRRVRSGGAAVPKRRRSRRDAEEEEEEGLAFSRVVTGRGRGVREEGVAEGEAPEFDAAKSGDESGGVDGSYLSDTRFDQCTISPLSLKAVKDAGYERMTQVQEATLPVILQGKDVLAKAKTGTGKTVAFLLPAIEVLSALPNSRRDQLRPSINLLVMCPTRELAIQVAVEAKKLLKYHRSLGVQVVIGGTRLTQEQRSMQANPCQILVATPGRLKDHVENTPGFSTRLKGVKVLVLDEADRLLDMGFRRDIERIIASVPKERQTLLFSATVPEEVRQISHIAMKKNYKFINTVKDGDEETHAQVSQMFMIAPLDLHFSILYDVLKKHVAEDADYKVIIFCTTAMVTKLVAEILSQLRLNIREIHSRKSQSARTKVSDEFRKSRGLILVSSDVSARGVDYPDVTLVIQVGVPADRQQYIHRLGRTGRKGKEGQGLLLLAPWEKYFLSSIKDLSISEATVPSVDSSTQTIVKDAVRKVEMRSKECAYQAWLGYYNSNKTIGREKSRLVKLAEEFSQSMELSVPPAIPKQILRKMGLNNVPGLRST

SEQ ID NO: 65920 - DNA, 2755 bp, Arabidopsis thaliana
  CDS (47)..(2599)
tcaccggtcaccgacgacgggaacttggtagttacaggaacaagaaatgtcctcgaagttccctctcggtgtacgcttcatcactcattctcttccttgtactcgtctcgcttccatgaattctggcgcccttatctattcatttcgttccgttcctgttctatccaaagcctttccttttaggttaaagtacattggattaggttcccgggtcaacttttcaacccgaccagagagatctcaacccgaattcgcgcggcgaagtggagctggaggagagattcgcgcgtccaagagcttgattgaggatgaggcagagcttagtgattgggtgagcgatttgaggactagttcgttgcgcgggaagttcacgagcgacgaagataacgcggatccagaggtggttcgtagaaacgtagacagggacaccagtaggggtccaaggagaggaagggaaggccaatctgataggttcggtggtgcgaaaaggggaaaggaaggtgaaatggataggtttgggagtccgaacaggaggagaaccagcggcgagcctgctgattcgttcgggaacaagcggttaggtgatcgagaaggttcaaggaacggtcgtgttcaaggaaagagtagtgagtcgtcttttcgtggaaggagtgatagaaatgtagattcagggtcgtcttttcgtggaaggagtgacaaaaatgttgactcagggtcgtcttttcgtggtaggaatgatagaaatgtagattcagggtcgtcttttcgtggaaggagtgatagaaatgtagactcagggtcgtcttttcgtggaaggagtgatagaaatgtagactcagggtcgtcttttcgtggtaggaatgatagaaatgtagactcagggtcgtcttttcgtggtaggaatgatagaaatgtagaatcagggtttaggagagagccaggttccgaaaacaacaggggcttggggaaacagacaagaggcttaagcctggaagaggaagatagtagtgacgatgacgagaacagggttggattgggaaacatcgatgatttgcctagtgaagatagtagtgatgaggatgatgaaaatgatgagcctcttattaagaaagcggcttctgctaaggctgttcagactgataagccaactggtgaacatgtcaaaacttcagattcttacttgtctaagacaagatttgatcaattcccactctctcccttatcgctaaaagccatcaaggatgcgggatttgagacaatgactgttgtgcaggaggctactcttcctatcattctccaaggtaaagatgtcctagccaaggccaaaacaggcactggtaaaaccgttgcatttttgcttccagcaattgaagctgttatcaaatctcctcctgcaagccgggatagtaggcaacccccaattattgtgcttgtggtatgtcctactcgggaacttgccagtcaagctgcggcagaggcaaataccttactgaagtatcacccctctattggtgttcaagttgtgattggaggcacaaagcttcctacagagcaaaggcgtatgcaaacgaatccttgccagatccttgtggctacacctggaaggctcaaagaccatattgaaaacacttctggattcgcaacaagattgatgggtgtgaaagtccttgtgcttgacgaagctgatcatctcttggacatgggtttccgaagggacattgagaggataattgccgctgttcctaagcagagacaaacatttttattttctgccaccgtacctgaagaggtccgccaaatatgccatgttgctctgaaacgggatcatgagttcatcaattgtgtccaagagggctctggggagacacatcaaaaggtcacacaaatgtacatgattgcatcactggatagacatttttcgcttctacatgtgcttcttaaagaacacatcgcagataatgtggactataaggttatcattttctgtacaactgctatggtgacaagattggtggctgatctgcttagtcagctaagcctgaacgtcagagagatccattctagaaaaccgcagagttacagaaccagagtttctgatgagttccgcaagtccaaggctattatcctagtcacatctgatgtatctgctcgtggtgtggattaccctgatgtgtcattggtcgtacagatgggattgccatcagacagggagcagtatatacatagacttggcagaaccgggcggaaagggaaggaaggggaaggagtcttattgttggcaccatgggaagagtactttatgtcatctgttaaagacttgcccatcaccaagtctccactaccgccaatagacccagaggctgtgaaaagggtgcagaaagggctgagccaagtggaaatgaagaacaaggaggcggcgtatcaggcgtggttgggttactacaaatctcagaagatgattgcaagagacacgaccagactggtggagctggccaatgagtttagccgcagcatgggacttgacagcccaccagctatccccaaaaatgttcttggcaagatgggtctcaaaaacgttcctggtcttagaaccaagtagattttcttttttcctagtgatctgctttggttttaaaactttaatgttttgtaagtgtagacgtgtagtctcttgtcattcttgctacactcttaagacttcctaactaaaaaatcctataaaagttgccttcttataaaggtcttttgtttgtaa

SEQ ID NO: 65921 - protein, 850 aa, Arabidopsis thaliana
MSSKFPLGVRFITHSLPCTRLASMNSGALIYSFRSVPVLSKAFPFRLKYIGLGSRVNFSTRPERSQPEFARRSGAGGEIRASKSLIEDEAELSDWVSDLRTSSLRGKFTSDEDNADPEVVRRNVDRDTSRGPRRGREGQSDRFGGAKRGKEGEMDRFGSPNRRRTSGEPADSFGNKRLGDREGSRNGRVQGKSSESSFRGRSDRNVDSGSSFRGRSDKNVDSGSSFRGRNDRNVDSGSSFRGRSDRNVDSGSSFRGRSDRNVDSGSSFRGRNDRNVDSGSSFRGRNDRNVESGFRREPGSENNRGLGKQTRGLSLEEEDSSDDDENRVGLGNIDDLPSEDSSDEDDENDEPLIKKAASAKAVQTDKPTGEHVKTSDSYLSKTRFDQFPLSPLSLKAIKDAGFETMTVVQEATLPIILQGKDVLAKAKTGTGKTVAFLLPAIEAVIKSPPASRDSRQPPIIVLVVCPTRELASQAAAEANTLLKYHPSIGVQVVIGGTKLPTEQRRMQTNPCQILVATPGRLKDHIENTSGFATRLMGVKVLVLDEADHLLDMGFRRDIERIIAAVPKQRQTFLFSATVPEEVRQICHVALKRDHEFINCVQEGSGETHQKVTQMYMIASLDRHFSLLHVLLKEHIADNVDYKVIIFCTTAMVTRLVADLLSQLSLNVREIHSRKPQSYRTRVSDEFRKSKAIILVTSDVSARGVDYPDVSLVVQMGLPSDREQYIHRLGRTGRKGKEGEGVLLLAPWEEYFMSSVKDLPITKSPLPPIDPEAVKRVQKGLSQVEMKNKEAAYQAWLGYYKSQKMIARDTTRLVELANEFSRSMGLDSPPAIPKNVLGKMGLKNVPGLRTK

SEQ ID NO: 65922 - DNA, 2538 bp, Arabidopsis thaliana
  CDS (1)..(2538)
atggttgaaggaaagggcttcctcgtgagctcagtgactgagcttcaccgtaaagagaaacagaagaagaaaggcaaatctggaggattcgagtcactaaatctcggacctaatgtcttcaatgcaatcaagaaaaagggttacaaagttcctacaccaattcagaggaagacgatgccgcttattctctctggcgtcgatgttgtcgctatggctcgaaccggttctggaaaaaccgcagcttttctcatccctatgcttgagaagctcaaacaacacgttcctcaaggaggtgttagagcactcatcttgtctcctactcgtgacttagctgagcagactctgaagttcaccaaggaacttggcaaatttacagatcttcgtgtatccttactggttggtggagatagtatggaagaccagtttgaagagttaacaaagggacctgatgtgattattgctactcctgggagacttatgcatcttttatctgaggttgatgatatgacgctaaggacggttgagtatgtagtttttgatgaggcagatagtctgtttggtatggggtttgctgaacagttacatcagattctaactcagttaagtgagaataggcagactttgctatttagtgccactttaccaagtgcccttgctgaatttgcaaaggctggtttgcgtgagcctcagcttgttcgtttagatgttgagaataagataagtcccgatttgaagctttcgtttttgactgtacgaccggaagagaagtattctgcattgctgtacttggttagggagcatataagttcagatcaacagaccttgatatttgtttcgacaaagcatcatgtggaatttgtcaactcattgtttaagttggagaatattgagccatctgtatgttatggtgatatggatcaagatgcacgtaagattcatgtatcaaggttcagagcgaggaagactatgttgttgattgtgacagatattgctgctaggggtattgacataccattgcttgataatgttataaactgggatttccctccgagaccgaagatttttgttcatcgtgtgggaagagctgccagggctggtcgtacaggctgtgcatattcctttgttacacctgaggatatgccatatatgttggatcttcatctgttcctctcaaaaccggtcaggccagcgcccactgaggatgaggtcttgaagaacatggaagaagtaatgaccaaaactagtcaagcaattgatagtggagtcaccgtctatggtcgtttcccacagaaaaccattgatcttatctttaatagaaccagagaaatgattgattcatctgcagaattagattcccttgaacgaacatccaccaaagcttttcgcttgtattcaaaaacaaaaccctcaccgtcaaaagaatccattaggagagcaaaggatttaccacgagaaggcttgcatcccatcttcagaagcattattgaaactggggaattagaggcaatgtcgtttttccagaaaattaaaaatttcagacccaagcaaacgatacttgaagcagaaggtgaagttgccaaatccaaacatgtgaagggtcccgctggccaatgggttgatgtgatgaagaagaaaagagctattcatgaggagatcatcaatacaagacatcagcagaatcaaaagacttccaataatcatttggagatggaagctgaacctacaacttcttttgttgatggcacagtagagggaagcaaagtaagcggtaagaaaagaaaggcacaagaaaccttcaaggacgatgaattctttatcagctccataccagtaaatcatcattcagaggcagggctatctctgaggggtaacgaaggatttggatcgaataggttggacgctgctgttctagatctagttgcagatgatgggcaagggataaagcagcaacaatcaaattatcactgggacaagaaaggtaagaagtacatcaagttgaacaatggagatcgagtaacagccagtggaaagataaagacagagagtggagctaaagcgactgcaaagaagacagggatatacaagagatggcaagagaggtctcacaagaaagtatcccgagacagcggtgatgcagacgaaaccacacgaatgtcaggtagaggaggccgagatgggaagagacggcaaggatcagtgcctaacgcacatgttcgttcagagatcaaagatctggaccaggtgcgtaaggagagacagcaaaaggcaaacaaagtttcttatctgcagagcaagagaggcggaagaggtggaagaggtggggccaggggaggccgtggtggtggggccaggggaggccgtggtggcagcagggattttggtggtggaggaagggattttggcagtagcagcgatagaggtggaagaagtggcggtagggattttggtggtcgtcgtggtggtgctagcactagtagcagaggtggtaagagaggaggaggaagaggaggtggaggtaaacgtgggagaggaagatag

SEQ ID NO: 65923 - protein, 845 aa, Arabidopsis thaliana
MVEGKGFLVSSVTELHRKEKQKKKGKSGGFESLNLGPNVFNAIKKKGYKVPTPIQRKTMPLILSGVDVVAMARTGSGKTAAFLIPMLEKLKQHVPQGGVRALILSPTRDLAEQTLKFTKELGKFTDLRVSLLVGGDSMEDQFEELTKGPDVIIATPGRLMHLLSEVDDMTLRTVEYVVFDEADSLFGMGFAEQLHQILTQLSENRQTLLFSATLPSALAEFAKAGLREPQLVRLDVENKISPDLKLSFLTVRPEEKYSALLYLVREHISSDQQTLIFVSTKHHVEFVNSLFKLENIEPSVCYGDMDQDARKIHVSRFRARKTMLLIVTDIAARGIDIPLLDNVINWDFPPRPKIFVHRVGRAARAGRTGCAYSFVTPEDMPYMLDLHLFLSKPVRPAPTEDEVLKNMEEVMTKTSQAIDSGVTVYGRFPQKTIDLIFNRTREMIDSSAELDSLERTSTKAFRLYSKTKPSPSKESIRRAKDLPREGLHPIFRSIIETGELEAMSFFQKIKNFRPKQTILEAEGEVAKSKHVKGPAGQWVDVMKKKRAIHEEIINTRHQQNQKTSNNHLEMEAEPTTSFVDGTVEGSKVSGKKRKAQETFKDDEFFISSIPVNHHSEAGLSLRGNEGFGSNRLDAAVLDLVADDGQGIKQQQSNYHWDKKGKKYIKLNNGDRVTASGKIKTESGAKATAKKTGIYKRWQERSHKKVSRDSGDADETTRMSGRGGRDGKRRQGSVPNAHVRSEIKDLDQVRKERQQKANKVSYLQSKRGGRGGRGGARGGRGGGARGGRGGSRDFGGGGRDFGSSSDRGGRSGGRDFGGRRGGASTSSRGGKRGGGRGGGGKRGRGR

SEQ ID NO: 65924 - DNA, 2556 bp, Oryza sativa
  CDS (1)..(2556)
atggcgcgcctcaacccctccaaacccagctcccgcggaggcaagccgaggtcctcctccgcggacgccatggcggagcacaagccgctgccggggcggccgaagcgggagggggaaggggcgagcaagaggaaggccaagtcgggcgggttcgagtcgatggggctgtgcgaggaggtgtaccgcggggtgcgccacaaggggtaccgcgtgcccacccccatccagcggaaggccatgccgctcatcctcgccggccacgacatcgccgccatggcgcgcacgggctccgggaagaccgccgccttcctcgtgcccatgatccagcgcctccgccgccacgacgcgggcgccggcatccgcgcgctcatcctctcgccgacccgcgacctcgccacgcagacgctcaagttcgcgcagcagctcgggaagttcactgatctaaagattagcctgattgttggtggagatagcatggagagtcagtttgaggaattggcagaaaatccggatatcataattgcaacacctggcagactcgtgcaccatctggcggaggttgaggacttgaatcttcggacagtggaatatgttgtgtttgatgaggcagattccctctttagcttggggttaatccagcagctgcatgacattctacataagctgagtgatacacgacaaacattgctcttcagcgccaccttgccacaagcccttgcagattttgcaaaagctggtctacgtgacccacaaattgtaagacttgatttggacaaaaagatcagtcctgatcttaaacttgcctttttcacgctgcgtcaggaggagaaattagctgctttactgtacttggtcagggagcgaatcagctctgaggaacagacaataatatttgtttcaaccaagcatcatgtggagttcctaaatattctgttccgggaggagggcttagaaccttccctttcctatggtgctatggatcaagaagcccgcaatattcatatttcaaaattcagggcaaggaaaactatgatacttattgtgacagatgttgctgcaaggggtctggatattccattgcttgataatgtggtgaactgggacttccctgcaaagcctaaattattcgttcatagggttggcagagtagctcgacaaggtagaagtggcacagcatatacttttgtcacttcggaggacatggcatatttattggacctacatcttttcctttcaaagcctcttagacctgctccaacagaggaggaacttctgaaggatatggagggaatgaatttaaaaattgatcgtgctcttgcaaatggagaaactgtgtatgggcgttttcctcagacaatcattgatcttgtatctgatggaataaaagaagtcatcaatggatgtacagatctaattgcattggaaaagccatgcactaatgctttccatttgtatctgaagactcgtccaatgccttcaacagaatcaatcagaagggtaaaagatttgcctcgtgaaggtcttcatccaattttcagggacgtacttgggtcagatgagctttcagctcttgcattctcggaacgcttgaaatcatttcggccgaagcagacgattttagaggctgaaggtgaagctgctaggggttcaaatcaatggctagatgtgatgaagaagaaaagagaagtgcatgagggaattataaatttagtacatcaaaagaataatgttgatcatgagccaaaggaagaattggtagagaatatttcaaactgggagagaaaagatgtttgtggtaataagcggaagttacagagctttagagatgaggaatactacataagttcagtgcctcaaaaccaacatttggaagctggactgtcagtgagggccaacgaaggatttgttgaaaatagattggatgctgctgttcttgatctagttgatgatgaaacttctggtatgcaagcacagaaaactcgatatcactggaaaaagaacaagtttgtcaagttaaatagtggggatcgtgtcactgccacaggaaagattaagacagaaagtggtgcgaagttaaagccaacaaaaacagggatatacaagaaatggcaacagaagacacatagatctatcgatactggtagaaaatttggtggctttgcagaagagggtgcatccacgacaggtagccatcaaagaggaaacagaaaacacactgcagtgggacgggggcgtcgctatataccgaacgccgacgtaccgtctgagattagaaatcccgaacaaatacagaagagcaggcagcaaaaagcaatggatattgcccgcatgaagaacagatccacaaaagagagtaaattccagaaattccagaagaacaacaggaggcacgatggacccttgaaagatggcaaattccagaagaacaggagaccggatggcaatggaaagaacaggagaccggatggcaatggaaagggacgggggaaaggcaaaggaaatgcaaatggatttggtaaagggaagggaaaaatgaaagggaagggcacaaggtga

SEQ ID NO: 65925 - protein, 851 aa, Oryza sativa
MARLNPSKPSSRGGKPRSSSADAMAEHKPLPGRPKREGEGASKRKAKSGGFESMGLCEEVYRGVRHKGYRVPTPIQRKAMPLILAGHDIAAMARTGSGKTAAFLVPMIQRLRRHDAGAGIRALILSPTRDLATQTLKFAQQLGKFTDLKISLIVGGDSMESQFEELAENPDIIIATPGRLVHHLAEVEDLNLRTVEYVVFDEADSLFSLGLIQQLHDILHKLSDTRQTLLFSATLPQALADFAKAGLRDPQIVRLDLDKKISPDLKLAFFTLRQEEKLAALLYLVRERISSEEQTIIFVSTKHHVEFLNILFREEGLEPSLSYGAMDQEARNIHISKFRARKTMILIVTDVAARGLDIPLLDNVVNWDFPAKPKLFVHRVGRVARQGRSGTAYTFVTSEDMAYLLDLHLFLSKPLRPAPTEEELLKDMEGMNLKIDRALANGETVYGRFPQTIIDLVSDGIKEVINGCTDLIALEKPCTNAFHLYLKTRPMPSTESIRRVKDLPREGLHPIFRDVLGSDELSALAFSERLKSFRPKQTILEAEGEAARGSNQWLDVMKKKREVHEGIINLVHQKNNVDHEPKEELVENISNWERKDVCGNKRKLQSFRDEEYYISSVPQNQHLEAGLSVRANEGFVENRLDAAVLDLVDDETSGMQAQKTRYHWKKNKFVKLNSGDRVTATGKIKTESGAKLKPTKTGIYKKWQQKTHRSIDTGRKFGGFAEEGASTTGSHQRGNRKHTAVGRGRRYIPNADVPSEIRNPEQIQKSRQQKAMDIARMKNRSTKESKFQKFQKNNRRHDGPLKDGKFQKNRRPDGNGKNRRPDGNGKGRGKGKGNANGFGKGKGKMKGKGTR

SEQ ID NO: 65926 - DNA, 1227 bp, Arabidopsis thaliana
  CDS (1)..(1227)
atggcgacagcgaatcctggccgtggaggtggtagaagaggcggtggagctatggatgacgataagttggtcttcgagactaccgatggaattgagcccatcacgagcttcaatgatatgggcattaaggaagatgtgcttcgcggtgtctacgaatatggattcgagaagccttccgcgattcagcagagggctgttatgccgattcttcaaggacgtgatgttattgctcaagctcagtccggtaccgggaagacatctatgattgctctctccgtttgtcaagtcgttgatacttcttctagagaggttcaggccttgatattatccccaacaagagagctggctacacaaacagagaagacgatacaagctattggattacatgccaatattcaggcacatgcttgcatcggtgggaatagtgttggagaagacatcaggaagctggagcatggtgttcatgttgtgtctgggacacctggtcgtgtctgtgacatgataaagaggagaagtcttcgtaccagagctattaaacttctgattcttgatgaatcagatgaaatgctgagcagagggttcaaggaccagatctatgatgtttacagatatcttccaccagatcttcaggtttgcttggtttctgcaactcttcctcacgagattttggagatgacatccaagtttatgacagaaccagtgaagatacttgtgaagcgtgatgagttgactcttgaaggaatcaaacaattttttgttgctgttgagaaggaagagtggaaatttgatacactctgtgatctttatgacacgcttactatcactcaagctgttatcttctgcaatactaaacgaaaggtggattatcttagtgagaaaatgagaagtcacaacttcactgtctcatcaatgcatggagacatgcctcagaaggagagagacgccatcatgaatgagtttcggtcaggtgatagtcgtgttttgataacaacagatgtatgggcacgtgggattgatgtgcaacaagtttctcttgttatcaattatgatctccccaacaaccgtgagctctacatccatcgtattgggcggtctggtcgattcgggcgtaagggtgttgcaatcaactttgttaaaagcgacgacatcaagattctcagagacattgagcagtactacagtacccagattgatgagatgccaatgaatgtagctgatcttatctaa

SEQ ID NO: 65927 - protein, 408 aa, Arabidopsis thaliana
MATANPGRGGGRRGGGAMDDDKLVFETTDGIEPITSFNDMGIKEDVLRGVYEYGFEKPSAIQQRAVMPILQGRDVIAQAQSGTGKTSMIALSVCQVVDTSSREVQALILSPTRELATQTEKTIQAIGLHANIQAHACIGGNSVGEDIRKLEHGVHVVSGTPGRVCDMIKRRSLRTRAIKLLILDESDEMLSRGFKDQIYDVYRYLPPDLQVCLVSATLPHEILEMTSKFMTEPVKILVKRDELTLEGIKQFFVAVEKEEWKFDTLCDLYDTLTITQAVIFCNTKRKVDYLSEKMRSHNFTVSSMHGDMPQKERDAIMNEFRSGDSRVLITTDVWARGIDVQQVSLVINYDLPNNRELYIHRIGRSGRFGRKGVAINFVKSDDIKILRDIEQYYSTQIDEMPMNVADLI

SEQ ID NO: 65928 - DNA, 1776 bp, Arabidopsis thaliana
  CDS (1)..(1776)
atgagctcgtatgatcgtagatttgctgatccaaattcgtatcgccaacgctctggcgccccagttggttcgtctcagccgatggatccttccgccgcaccatacaacccacggtacactggtggtggtggaggatatggaccatctccggtaatggccggtgataattccggctataatcggtacccatctttccagccacctagtggcggtttctctgttggccgcggtggtggaagaggtggatatggtcaatacggcgatagaaacggcggagggaattggggaggaggaggaggacgtggcggatcgagtaaaagagagctagatagtgtttctcttccgaagcagaattttgggaatcttgtacattttgagaagaatttctatgtggagagtcccactgtgcaagctatgacagagcaggatgttgcaatgtacagaaccgagagggatatatccgttgaaggtcgtgatgttcctaagccgatgaagatgttccaagatgctaactttccagataacattcttgaagcaattgctaaattgggatttactgagccaacacctatacaagctcagggatggccgatggcgttgaagggtagggatttgattggtattgctgagactggctctggtaagacattggcttacttgttaccagcattggttcacgttagtgcacaacctcgattaggtcaggatgatggccccattgtgttaatattagctcccacaagagaactagctgttcagattcaagaggaatcaaggaaattcgggttgaggtctggtgttagaagtacttgtatctatggtggtgctcctaaaggacctcagattcgtgatcttagaagaggtgttgagattgtaattgctacacctggtcgtttgattgatatgttggaatgtcaacacactaatttgaagagagtgacttaccttgtactggatgaggctgacagaatgttagacatgggatttgaaccccaaattagaaagattgtatctcagatccgacctgatagacaaacacttctttggagtgcaacatggccacgagaggttgaaactcttgccaggcagtttctacgagatccatataaggccattattggatcaacagatctaaaagctaaccagtctattaaccaagtaatcgagattgtaccgacgccagagaaatacaacaggctccttacactacttaaacagttaatggatgggagtaaaatcctaatttttgtggagacaaagagagggtgtgatcaagtgactagacaattgagaatggacggatggccagctcttgccatacatggtgacaagacccaatcggaaagagaccgagtcttggcagaatttaagagtggacgaagcccgataatgactgccactgatgtagcagcaaggggacttgatgtgaaggacattaaatgtgtggttaattatgatttcccaaatacattggaggattacatccataggattggtcgaaccgggcgtgcaggagctaaaggaatggcctttacattcttcacacatgacaatgctaagtttgcgagagagcttgtcaagatccttcaagaagctggtcaagttgtacctcctactctctccgcactagtccgatcatctggttctggttatggaggttcaggtggtggaagaaacttcaggccaagaggaggaggacgtggtggtgggtttggagataaacggtcaagatcgacttcaaactttgtacctcacggtggaaagaggacttggtaa

SEQ ID NO: 65929 - protein, 591 aa, Arabidopsis thaliana
MSSYDRRFADPNSYRQRSGAPVGSSQPMDPSAAPYNPRYTGGGGGYGPSPVMAGDNSGYNRYPSFQPPSGGFSVGRGGGRGGYGQYGDRNGGGNWGGGGGRGGSSKRELDSVSLPKQNFGNLVHFEKNFYVESPTVQAMTEQDVAMYRTERDISVEGRDVPKPMKMFQDANFPDNILEAIAKLGFTEPTPIQAQGWPMALKGRDLIGIAETGSGKTLAYLLPALVHVSAQPRLGQDDGPIVLILAPTRELAVQIQEESRKFGLRSGVRSTCIYGGAPKGPQIRDLRRGVEIVIATPGRLIDMLECQHTNLKRVTYLVLDEADRMLDMGFEPQIRKIVSQIRPDRQTLLWSATWPREVETLARQFLRDPYKAIIGSTDLKANQSINQVIEIVPTPEKYNRLLTLLKQLMDGSKILIFVETKRGCDQVTRQLRMDGWPALAIHGDKTQSERDRVLAEFKSGRSPIMTATDVAARGLDVKDIKCVVNYDFPNTLEDYIHRIGRTGRAGAKGMAFTFFTHDNAKFARELVKILQEAGQVVPPTLSALVRSSGSGYGGSGGGRNFRPRGGGRGGGFGDKRSRSTSNFVPHGGKRTW

SEQ ID NO: 65930 - DNA, 1179 bp, Arabidopsis thaliana
  CDS (1)..(1179)
atggaaggaactttagatgaagagaatctagtcttcgaaaccaccaaaggtatcaaaccaatcaagagtttcgatgacatggggatgaatgataaagttcttcgcggcgtttatgactacggttacaagaaaccatctgagattcagcagagagctttggttccgattctcaaaggacgagacgtcatagctcaggctcagtccggtactggtaaaacctctatgattgctatctccgtttgccaaatcgtcaacatatcctccagaaaggttcaagtcttggtgttgtctccatcaagagagctggcttcacaaacagagaagactatacaggctattggggcacataccaatattcaggcgcatgcttgcattggtggtaagagcatcggtgaagatatcaagaagctagagcgtggtgtccacgctgtgtctgggacacctggtcgagtttacgatatgataaagagaggaagcttacaaactaaagctgttaaacttttggttctggatgaatcagatgaaatgctgagtaaaggtttgaaagaccagatttatgacgtttacagagctcttccacacgatattcaggtttgcttgatttctgctactcttcctcaagagattttggagatgacagaaaagtttatgacagatcctgtgaggattcttgtgaagcctgatgaattgactcttgaaggaatcaaacaatactatgttgatgttgataaagaagagtggaaattcgatactctttgcgatctttatggaagacttactattaaccaagctattatcttctgcaacacaagacaaaaggttgattggcttactgagaagatgaggagtagcaatttcatagtctcatcaatgcatggagacaaacgtcaaaaggagagagatgatatcatgaaccagtttcggtcatttaaaagccgtgttttaatcgcctcagatgtatgggcacgagggatcgacgttcaaactgtttctcatgtcatcaattatgatatacccaacaacccggagctatacattcatcgtataggacgagctggtcgttttggtcgtgaaggtgttgccattaactttgtaaaatcttcggatatgaaagatcttaaggatattgagcgacattacggtactaaaatccgcgagatgccagctgatcttgtctaa

SEQ ID NO: 65931 - protein, 392 aa, Arabidopsis thaliana
MEGTLDEENLVFETTKGIKPIKSFDDMGMNDKVLRGVYDYGYKKPSEIQQRALVPILKGRDVIAQAQSGTGKTSMIAISVCQIVNISSRKVQVLVLSPSRELASQTEKTIQAIGAHTNIQAHACIGGKSIGEDIKKLERGVHAVSGTPGRVYDMIKRGSLQTKAVKLLVLDESDEMLSKGLKDQIYDVYRALPHDIQVCLISATLPQEILEMTEKFMTDPVRILVKPDELTLEGIKQYYVDVDKEEWKFDTLCDLYGRLTINQAIIFCNTRQKVDWLTEKMRSSNFIVSSMHGDKRQKERDDIMNQFRSFKSRVLIASDVWARGIDVQTVSHVINYDIPNNPELYIHRIGRAGRFGREGVAINFVKSSDMKDLKDIERHYGTKIREMPADLV

SEQ ID NO: 65932 - DNA, 1860 bp, Oryza sativa subsp
  CDS (1)..(1860)
atggccgccgccgccgccgccgccgccgccggcgactcgccccgccgcggaacaccggacagcgatgaggaggactacgaggagtacgtccccgtcgccaagcgccgggccatggaggccgaacgcctccgccgcgccactaaaccgccgaccacgaacgcagttgcagttgcagccccgccgccgccgccgcgctccacctcgtcgccggcggtgggtgaggttgcggtcaagacgagcctgctcgtgaaggccacgaagctgaagcgcgaggcccctgaggtgaccccggccgagcggctgctccagcaggagagggagatgatcgagcacctctccgaccgcaaggccctcatgcccgtcggcgagatcgcgaaggggatcagctactccgagccgatcaccacggggtggaggccgccgcttcgcctccgccgcatgccgcggtcccgcgcggacgcgctgcgacggagctggcacatccttgtcgacggcgacgacgtgcccccgccgtcccgaagcttcggcgacctccgtctcccggagcccatcctccgcgcgctccgcggcaagggaatcgagaagccgaccccaatccaggtgcagggtctccccgtcgcgctctccgggcgggacatgatcgggatcgcgttcacggggtccgggaagacgctggtgttcgtgctgccgctcatcatggcggcgctgcaggaggagatcctgatgccgatcgtgcccggcgagggcccgttcgggctcatcgtctgcccgtcgcgggagctcgcgaggcagacgcacgaggtgatcgagatgttcctcgcgccgctcatggaggccgggtacccggagatacggccgctgctctgcattggaggcgtggacatgaggacgcagatggaggtggtgaagaagggcgtgcatattgtagtggcgactcctgggaggctcaaggatttgctctccaagaagaagatgaatcttgataactgcaggtatttaacactagatgaggcggacagactagtcgatcttggatttgaggacgacatcagggaggtgttcgaccatttcaaggcacagagacagacactcctcttctctgccaccatgccagagaagatccagaattttgcaaagagtgcgctagtgaaaccaatcattgtcaatgtgggaagagctggagcagcaaaccttgatgtcatccaagaggttgagtatgtcaaggaggaagcaagaatcatatacctccttgagtgtctccagaaaaccccaccccctgtgctggttttctgcgagcacaaagccgatgtcgattacatccaagaatttcttcttctgaaaggtgtcgaagctgttgcaatccatggtggaaaagatgatgaggaaagaaaagacgcgttcaaatcattcaaagcctcagaaaaggatgtattggtagctacagatgttgcatccaaaggccttgatatccctgatatccagcatgtgatcaactacgacatgcctgctgagatagagaactatgtgcatcggattggaagaaccggcaggcgtgggaaaaccggcgtcgcaacgacattcatcaacaagaaccagacagagactacgcttcttgacctgaagcaattgctcatcgaatcaaagcaaaggttaccaccaattctggctgatcttgatgatccacaggaggacgataaggtggccattgctcagcagagtggtgtgaagggctgtgcgttttgtggtggccttggccatcgtatcgaggcctgccccaagcagcagctccagaacagtgtcacgcttgctcgagcaagaagtgattacttcggtggtggtggctaccggggggagatttga

SEQ ID NO: 65933 - protein, 619 aa, Oryza sativa subsp
MAAAAAAAAAGDSPRRGTPDSDEEDYEEYVPVAKRRAMEAERLRRATKPPTTNAVAVAAPPPPPRSTSSPAVGEVAVKTSLLVKATKLKREAPEVTPAERLLQQEREMIEHLSDRKALMPVGEIAKGISYSEPITTGWRPPLRLRRMPRSRADALRRSWHILVDGDDVPPPSRSFGDLRLPEPILRALRGKGIEKPTPIQVQGLPVALSGRDMIGIAFTGSGKTLVFVLPLIMAALQEEILMPIVPGEGPFGLIVCPSRELARQTHEVIEMFLAPLMEAGYPEIRPLLCIGGVDMRTQMEVVKKGVHIVVATPGRLKDLLSKKKMNLDNCRYLTLDEADRLVDLGFEDDIREVFDHFKAQRQTLLFSATMPEKIQNFAKSALVKPIIVNVGRAGAANLDVIQEVEYVKEEARIIYLLECLQKTPPPVLVFCEHKADVDYIQEFLLLKGVEAVAIHGGKDDEERKDAFKSFKASEKDVLVATDVASKGLDIPDIQHVINYDMPAEIENYVHRIGRTGRRGKTGVATTFINKNQTETTLLDLKQLLIESKQRLPPILADLDDPQEDDKVAIAQQSGVKGCAFCGGLGHRIEACPKQQLQNSVTLARARSDYFGGGGYRGEI

SEQ ID NO: 65934 - DNA, 1476 bp, Arabidopsis thaliana
  CDS (1)..(1476)
atggaggaaccaacgccggaggaggaagggggaatcaccatcatgtctaaatcccgcaaaaatcctaaaaccgtagtaaacattcagtcccagaaacttgattcggaccagaatactcctcaatttgagaaattcactaatcctaaccctagctccgacaccacatccgccactaatttcgaagggctcggattagctgagtgggcagtggaaacgtgtaaagagcttgggatgcgtaaacccactccagttcaaactcactgcgtgccgaagatattagccggacgagacgttttagggcttgctcagactggtagtggtaaaactgctgcgtttgctctacctatacttcaccgccttgctgaagatccttatggagtcttcgcgcttgtagtgacgccgactagagagctagcgttccagctcgctgagcagtttaaggctttgggttcgtgtttgaatttgcgttgctctgtaattgtgggaggaatggatatgttgacgcaaactatgagcttggtttcacgacctcatatcgttattactactcctggaagaatcaaggttttgcttgaaaacaatcctgatgttcctccagttttctctagaaccaagttcttagtgctggacgaggcggatagagttcttgatgttggtttccaagacgagttacgcacaatctttcagtgtctgccaaagagtagacaaacattgttgttctctgctaccatgactagtaacttacaggctttgcttgaacattcttcaaacaaagcttatttctatgaagcctatgaagggttaaagactgttgacactcttacgcagcagttcattttcgaagacaaagatgccaaagagctgtatcttgtgcacatcctctcgcaaatggaagacaagggcattcgatcagccatgatttttgtctccacttgcagaacatgtcaaaggttaagtcttatgcttgacgagcttgaagtggaaaatatagctatgcattctctgaattctcagtctatgcgactatctgcactaagtaaattcaagtctgggaaagtaccgatattgcttgcgactgatgttgccagccgtggattggacattcctactgttgaccttgtcatcaattatgacattccgagagatcctagggattatgttcatcgtgttggacgtacagctagagctggtagaggaggactggctgtaagcattatcactgagaccgatgtgaaacttatccataaaatagaagaggaagttggaaaaaagatggaaccatacaacaaaaaagtaatcactgacagtttagaagtcacaaaggtctcaaaagccaaaagagtggcaatgatgaagatgctagataatggattcgaagacaaggttaaagaccggaggaaattgaaacggaaaacacttgcggataaagggttgcttaagaaacggggcaaaaggcagaaatcaacagaaaattga

SEQ ID NO: 65935 - protein, 491 aa, Arabidopsis thaliana
MEEPTPEEEGGITIMSKSRKNPKTVVNIQSQKLDSDQNTPQFEKFTNPNPSSDTTSATNFEGLGLAEWAVETCKELGMRKPTPVQTHCVPKILAGRDVLGLAQTGSGKTAAFALPILHRLAEDPYGVFALVVTPTRELAFQLAEQFKALGSCLNLRCSVIVGGMDMLTQTMSLVSRPHIVITTPGRIKVLLENNPDVPPVFSRTKFLVLDEADRVLDVGFQDELRTIFQCLPKSRQTLLFSATMTSNLQALLEHSSNKAYFYEAYEGLKTVDTLTQQFIFEDKDAKELYLVHILSQMEDKGIRSAMIFVSTCRTCQRLSLMLDELEVENIAMHSLNSQSMRLSALSKFKSGKVPILLATDVASRGLDIPTVDLVINYDIPRDPRDYVHRVGRTARAGRGGLAVSIITETDVKLIHKIEEEVGKKMEPYNKKVITDSLEVTKVSKAKRVAMMKMLDNGFEDKVKDRRKLKRKTLADKGLLKKRGKRQKSTEN

SEQ ID NO: 65936 - DNA, 1506 bp, Oryza sativa subsp
  CDS (1)..(1506)
atggaggtcgacggcgaagcccgccccttcctcctcttctccaagcccaagtccagcaagaagaaacccaagcaggaagccgagccccaagtccatacccagccagaagaacccccaaaccctagcccctcccccgccatcgagcccgacctccgcgactccgacgaggcccccgccgccgccgtgaccgagcacgccggcgatgatgctgccgctgccgcggtgccctccaccttcgcggagctcggcctgtcgcagtggctggtcgacgtgtgcgattcgctggggatgcgggtccccacggcggtgcagcggcggtgcatcccgcgggcgctcgaggggagggacgtgctggggatcgcggagacggggagcgggaagacggccgcgttcgcgctgcccatcctccaccgcctcggcgaggacccatacggcgtcgcggcgctcgcgctcgcgcccacgcgggagctggcggcgcagctcgccgagcagttccgcgcgctcggcgcgccgctggggctcaggtgcctcgcggccatcggcgggttcgactcgctcgggcaggccaagggcctcgcgcgccggccgcacgtcgtcgtcgccacccccggccgcatcgccacgctcatcaacgacgaccccgacctcgccaaagtcttcgctcgcaccaagttccttgtgttggatgaggcagatagagttttagatattaattttgaggaggacctgcgagtgatatttggctctttaccaaagaagcgccaaacttttttgttctcagcaacaatttcagacaacctgcgatctttgcttgagctttctggcaacaattcatacttttttgaggcatatgaagggttcaaaacggttgataccttaaagcagctgtatatccatgtacctcctgatgctaaagagctctatcttttctatcttctgtcaaaaatgaacgaagacaatatacgttcggtgattgtgtttgtctcaacctgcaggacatgccaatatttggattttctgttggaagagcttggtcatcctgctgtttccttgcactctcataagcctcagtcgagaaggctggcagcattgcataatttcaaatccagtaaggttccagttttgcttgctactgatgtagccagtcgtggtttggatatccaaacagttgatcttgttatcaactatgacgttccaaggtacccacgagattacatccatagagttggacgaactgcaagagctactaggggagggctctcgataagctttatcacaacccagagagatatacgtctgttacatgagatagaggatgttgtggggaagcaattaggtgcatatgatggcgagatgagagatgtcaataaagatgctacaaaggtattcaaagcgaggcgtcttgcgaatatgaagatggcagatgagggccatgaagacaaggtacaagccagaaaagaacagaagaaaagagctcaagaaagaaagcggaaacacgatgagtga

SEQ ID NO: 65937 - protein, 501 aa, Oryza sativa subsp
MEVDGEARPFLLFSKPKSSKKKPKQEAEPQVHTQPEEPPNPSPSPAIEPDLRDSDEAPAAAVTEHAGDDAAAAAVPSTFAELGLSQWLVDVCDSLGMRVPTAVQRRCIPRALEGRDVLGIAETGSGKTAAFALPILHRLGEDPYGVAALALAPTRELAAQLAEQFRALGAPLGLRCLAAIGGFDSLGQAKGLARRPHVVVATPGRIATLINDDPDLAKVFARTKFLVLDEADRVLDINFEEDLRVIFGSLPKKRQTFLFSATISDNLRSLLELSGNNSYFFEAYEGFKTVDTLKQLYIHVPPDAKELYLFYLLSKMNEDNIRSVIVFVSTCRTCQYLDFLLEELGHPAVSLHSHKPQSRRLAALHNFKSSKVPVLLATDVASRGLDIQTVDLVINYDVPRYPRDYIHRVGRTARATRGGLSISFITTQRDIRLLHEIEDVVGKQLGAYDGEMRDVNKDATKVFKARRLANMKMADEGHEDKVQARKEQKKRAQERKRKHDE

SEQ ID NO: 65938 - DNA, 2379 bp, Oryza sativa subsp
  CDS (1)..(2379)
atgtcggcagggaccgccccggccgcgccgcggtacgcgccggacgacccgtcgctccccaagccgtggcgcgggctcgtcgacggcaccaccggctacctctactactggaacccggagaccaacatcacccagtacgagaagccgctgccgcccgaggaccagctcccgccgcccccgccgctccccccgccgcctccccgctccggccgaggcgaccgagaccgcgaccgccgcgaccgctcccgatcccgcaccccgccgcggcgcgaccaccgggaccgcgaccgggaccgcgacaggcgccacgacgaccacaggtcggcgccttcccaccaccatcctcttccggccgccgccgccatcgccgccgatgatccctccaccgaggcgtatcgccaccgccacgagatcaccgttgtcggggacaacgtgccagctccgataacttcgtttgagactggtggattcccaccggaaatcctcaaggagatacaacgtgctggattctcaagtccaacgccaatccaagctcagtcatggccaattgccttgcagtgtcaagatgttgtagctattgcaaagacaggatctggaaaaactcttgggtatctacttcctggatttatgcatattaaacgcttgcaaaacaacccaaggtctggtccaacagtgctagttttggcaccgacaagggagcttgcaactcagattttggaagaagctgtgaaatttggcagatcatcaagaatttcttccacgtgtctatatggtggtgctccaaaaggcccccagctaagagatttggatagaggggtcgatgtcgttgttgctacaccaggaaggttgaatgacatcctagaaatgcgaaggataagccttaagcaagtgtcgtaccttgttctagatgaagctgaccgtatgttggacatgggatttgaaccacaaattcggaagatagtgaaagaaattcctcctcgtcggcaaaccctcatgtacactgctacttggcctaaggaagtccgacgaattgcagaggatcttcttgttcaccctgtccaggtgaccattggaagtgttgatgagcttgttgctaatagtgctattactcagaatgtggagctgatcacaccgtccgaaaagcttcgccgtctggagcaaattttgcgatcccaggattcaggttcgaaggtactaatattctgtaccactaagagaatgtgcgaccaacttgcaaggacacttactaggcaatttggagcttctgccattcatggtgataagtcccaaagtgaaagagagaaggtcctgagccattttagatctgggcgatctcctattttggttgcaacagatgttgctgcacgaggcttagacatcaaagatatcagggttgtgatcaattatgatttccccactggcattgaagattatgttcaccggattggcaggactggaagggctggtgccactggtgtggcctatacgtttttctgtgaccaggattcaaaatatgctgctgatcttattaaaattctggaaggcgcaaaccaacgtgtgcctcgtgacttggcggacatggcctctcggggtgggcgtggtggtaggaagcgtaaccggtgggcaacccgctctgataggggtggttcgcattctgaactggattctaggtatggtggaagagatggtctgtcagggtcttctggcagattggatagtagtcgcagtagtcgcaggcatgactatggtgatgatggacggtctcgcaggtctgggagaggtcgcagtaggagccgtagcagaagtgacagtgataggtatagccgaagtcctaagaggtcacgccgtcatagccgtagcaggaccaggagtcggagccgaagcaggagcaggagctacactaggaaccgtcgtgctagccgcagcaggagccgtagccctggtgctagccgtaggcatgaaagaagcgctactggctctgggtctgcactgccagactctgggcacggtgagcgcaaaagaacaccagaagctgacccatcaagaaaccatacaaaccactcagacccgaaagatgaccgacacccagaggatgggaaggtgggaaaggttgatctcgatcggtcgcctactccacaagacaagtctggcccatatagtcctgcttacaatggaaaaaccagtcgctcagtgagccctggtaatcaggtggaaggaaacaacaaagctgcggaggtttctaagaatcctgatccttcatcgccaccccatcatggtaagaccagggaggacgaagaggaaggtatgatagatgaagatggagagatagctgatgatcctcgggcaaatgcaaccgtgcagaatggcggtgataattga

SEQ ID NO: 65939 - protein, 792 aa, Oryza sativa subsp
MSAGTAPAAPRYAPDDPSLPKPWRGLVDGTTGYLYYWNPETNITQYEKPLPPEDQLPPPPPLPPPPPRSGRGDRDRDRRDRSRSRTPPRRDHRDRDRDRDRRHDDHRSAPSHHHPLPAAAAIAADDPSTEAYRHRHEITVVGDNVPAPITSFETGGFPPEILKEIQRAGFSSPTPIQAQSWPIALQCQDVVAIAKTGSGKTLGYLLPGFMHIKRLQNNPRSGPTVLVLAPTRELATQILEEAVKFGRSSRISSTCLYGGAPKGPQLRDLDRGVDVVVATPGRLNDILEMRRISLKQVSYLVLDEADRMLDMGFEPQIRKIVKEIPPRRQTLMYTATWPKEVRRIAEDLLVHPVQVTIGSVDELVANSAITQNVELITPSEKLRRLEQILRSQDSGSKVLIFCTTKRMCDQLARTLTRQFGASAIHGDKSQSEREKVLSHFRSGRSPILVATDVAARGLDIKDIRVVINYDFPTGIEDYVHRIGRTGRAGATGVAYTFFCDQDSKYAADLIKILEGANQRVPRDLADMASRGGRGGRKRNRWATRSDRGGSHSELDSRYGGRDGLSGSSGRLDSSRSSRRHDYGDDGRSRRSGRGRSRSRSRSDSDRYSRSPKRSRRHSRSRTRSRSRSRSRSYTRNRRASRSRSRSPGASRRHERSATGSGSALPDSGHGERKRTPEADPSRNHTNHSDPKDDRHPEDGKVGKVDLDRSPTPQDKSGPYSPAYNGKTSRSVSPGNQVEGNNKAAEVSKNPDPSSPPHHGKTREDEEEGMIDEDGEIADDPRANATVQNGGDN

SEQ ID NO: 65940 - DNA, 1611 bp, Oryza sativa subsp
  CDS (1)..(1611)
atggagcaagaagagaatcattcagctgatcacttgtctgctcaacctggtaatggcaacgaattggaagaatcatctgtaaaggaaaggtgttttgagcagagagaagcccttgttggggagcctcgctgtgttatttgtggccgatatggtgaatacatatgtgatcagactgacgatgacatatgtagtgttgaatgcaagacaattcttctttccaaactttctgctgaaacaaggccagtagtaaaagcagcaaagcgtgtaaatcttcctgttggcgacgagagcttctgtattagggacgaaaattttcctaaaataccaagtatgcacgatggtcagattgcttcactgagaagcaaacttgatatttgtgtcaagggtgaggatgttccagatccaatcatgtgtttttcttcctctggtctccctgagaagcttgtgctcaatcttgaggctgcgggatatgtaatgcctactccagtgcaaatgcaagtcatcccttcatcaatatgtaatagaagcttacttgtctctgctgatactggttcagggaaaacagcttcttttcttgttcccataattgcacattgttcacacgtgcgatcagagagatgcacagacaagcaagggccattagctatagtccttgctccaactagagagctatgtctgcaggtggaagaacaagcaaaagtgcttggaaagggtttaccttttaagactgctctagttgttggtggagatcccttggctcagcaaatctacaggattgaaaatggcatcgagttgattgttggcacccctgggaggctaattgatctactcatgaagcacaatgttgatcttaacaaagttgatgtattcgttttggatgaggtggactgcttgctagagaggggattcagagatcaggtcatgcaaatcttccaagcactttcgcatccccaggttatgatgttttcggcaactgtaaattcagaagttgagaagatgtcaaactcactggctaagaatgcgatacatatttcttgtggaaatccaagcagaccaaacaaatcagttaaacaagtggtcatttgggtggagtctaagcagaagaagcagaaaatttttgagataatgacaagtaaacagcactttaaacctcccgctgttgtttttgtgagttctagaattggcgctgatctgttgtccgaagcaattactgttgctactggattgaaggtggtttctattcatggtgataagacaatgaatgagagaagagaaagcttgagaaggtttctcacaggagaagtgtctgttgttgtttgtactggggtattgggacgtggaatggatctcctgaaagttcgtcaggtgatattatttgacatgccaaattccattgatgaatatgttcaccaagttggaagagcatctcgaatgggtgtggagggtatggctattgtctttgttaatgaggaggacaggaatcttttcagagagcttgttcagattctgaagactgcaggtgctccaattcccagggaacttgcaaattcaaaatacacaaccggtataccccttggtggtggtaagaagagaaagctgaagtctaggtga

SEQ ID NO: 65941 - protein, 536 aa, Oryza sativa subsp
MEQEENHSADHLSAQPGNGNELEESSVKERCFEQREALVGEPRCVICGRYGEYICDQTDDDICSVECKTILLSKLSAETRPVVKAAKRVNLPVGDESFCIRDENFPKIPSMHDGQIASLRSKLDICVKGEDVPDPIMCFSSSGLPEKLVLNLEAAGYVMPTPVQMQVIPSSICNRSLLVSADTGSGKTASFLVPIIAHCSHVRSERCTDKQGPLAIVLAPTRELCLQVEEQAKVLGKGLPFKTALVVGGDPLAQQIYRIENGIELIVGTPGRLIDLLMKHNVDLNKVDVFVLDEVDCLLERGFRDQVMQIFQALSHPQVMMFSATVNSEVEKMSNSLAKNAIHISCGNPSRPNKSVKQVVIWVESKQKKQKIFEIMTSKQHFKPPAVVFVSSRIGADLLSEAITVATGLKVVSIHGDKTMNERRESLRRFLTGEVSVVVCTGVLGRGMDLLKVRQVILFDMPNSIDEYVHQVGRASRMGVEGMAIVFVNEEDRNLFRELVQILKTAGAPIPRELANSKYTTGIPLGGGKKRKLKSR

SEQ ID NO: 65942 - DNA, 1629 bp, Arabidopsis thaliana
  CDS (1)..(1629)
atggaagtagatgatggttacgtggagtatgttccagtagaggagcgtctagcgcagatgaagcgaaaggtggtggaagaacctggcaaggggatgatggagcatttatctgacaagaagaagcttatgtctgttggtgaattagccagaggtatcacttatacagagcctctctcaacatggtggaaaccccctctgcacgttaggaagatgtcaaccaaacagatggatttgattaggaagcaatggcatattacagttaacggtgaagatattcctcctccaatcaaaaacttcatggatatgaaatttccgagtccacttctccgtatgctcaaggataaaggaataatgcaccctactcctatccaagttcagggtcttcctgttgttttgtctggcagagatatgattgggattgcgttcactggttccggaaagacgttggttttcgtgcttcctatgatcatattagctctgcaggaggagataatgatgcctatagctgctggagaaggtcccattgcgcttgttatttgtccgtctagagagcttgctaagcagacttacgatgtggttgaacagtttgtggcatctttagtcgaggatggatacccgcggttgaggtcgttgctatgcattggaggagtggatatgagatcacagttggacgttgttaagaaaggtgttcacatcgttgttgctactcctggaaggttgaaggatatcctcgccaagaaaaagatgagcttagatgcttgcaggttgttgacactggatgaagcagataggttggttgatttgggtttcgaagatgacataagacatgtctttgaccactttaagtctcagcgtcaaacacttttgttttctgccacaatgcctgcaaaaatccaaatctttgccacaagtgctctggtgaaacctgtaactgttaatgtaggaagagctggagctgcgaatctcgatgtcatacaggaggttgaatacgtcaagcaagaagcaaagattgtttaccttctggagtgtctgcagaaaaccactccaccggttttaatattctgtgagaacaaagctgatgttgatgatattcacgagtacttgttactgaaaggagtggaagcagtggctatccatggaggaaaagatcaagaagacagagattacgcaatatctttgttcaaagctgggaaaaaagacgttttggtcgcgaccgatgttgcttcaaagggtttagatttccctgatatacaacatgtaatcaactacgacatgcctggggagattgagaactacgtgcataggataggaagaacaggtcgctgtgggaaaactgggatagcaactacgtttataaacaagaaccaaagcgaaatcacgctgctcgatttgaaacacttgttgcaagaagctaaacagaggattccacctgtccttgctgagcttaatggtccaatggaagaaacagaaaccattgctaatgcaagcggtgtcaagggttgtgcttattgtggtggtctcgggcatcggattctacagtgtccaaaatttgaacatcagaagagtgtagctatatctagttctaggaaagaccattttggctctgatggatacagaggagaggtgtaa

SEQ ID NO: 65943 - protein, 542 aa, Arabidopsis thaliana
MEVDDGYVEYVPVEERLAQMKRKVVEEPGKGMMEHLSDKKKLMSVGELARGITYTEPLSTWWKPPLHVRKMSTKQMDLIRKQWHITVNGEDIPPPIKNFMDMKFPSPLLRMLKDKGIMHPTPIQVQGLPVVLSGRDMIGIAFTGSGKTLVFVLPMIILALQEEIMMPIAAGEGPIALVICPSRELAKQTYDVVEQFVASLVEDGYPRLRSLLCIGGVDMRSQLDVVKKGVHIVVATPGRLKDILAKKKMSLDACRLLTLDEADRLVDLGFEDDIRHVFDHFKSQRQTLLFSATMPAKIQIFATSALVKPVTVNVGRAGAANLDVIQEVEYVKQEAKIVYLLECLQKTTPPVLIFCENKADVDDIHEYLLLKGVEAVAIHGGKDQEDRDYAISLFKAGKKDVLVATDVASKGLDFPDIQHVINYDMPGEIENYVHRIGRTGRCGKTGIATTFINKNQSEITLLDLKHLLQEAKQRIPPVLAELNGPMEETETIANASGVKGCAYCGGLGHRILQCPKFEHQKSVAISSSRKDHFGSDGYRGEV

SEQ ID NO: 65944 - DNA, 1656 bp, Arabidopsis thaliana
  CDS (1)..(1656)
atggcggcatcaacttcaacccgattccttgttctgctcaaagatttttctgccttcagaaagatatcatggacttgtgctgcaactaattttcaccgccaatctcgttttttatgccatgttgcgaaagaagacgggtctcttactcttgcaagccttgatttggggaacaaaccacggaaatttgggaagggtaaggcgatgaagcttgagggaagttttgttactgaaatgggtcaaggtaaggtaagagcggtaaagaacgataaaatgaaagttgtcaaggaaaaaaagccagctgagatagtgtctcctttgttttctgcaaaatcctttgaggagcttggcctcccggattccttgttagacagtttggaaagagaaggtttctctgtcccaacagatgtccaatcagcagctgtcccggcaataatcaaaggtcacgatgcagtgattcagtcttacacaggatctggcaaaacattagcttatctgcttccaatattgtccgaaattggtcctctagcagaaaaatctagaagttcgcacagtgaaaatgataagaggactgagattcaggcaatgatcgtggctccatcaagagaactcggtatgcagatagtaagagaggtagagaaactgctcggacctgttcaccgtagaatggttcagcagttggtaggaggtgcaaaccgaatgaggcaagaagaggcccttaagaaaaataaacctgcaattgttgttggcactcccgggagaattgcagagataagcaaaggtggaaaattgcacactcatgggtgtagattcttggtgctagacgaagtcgatgagcttttatcgtttaatttccgagaagatatccatcgaatactagaacatgtaggaaagagatctggggctggtcctaaaggagaagtcgatgaacgggctaaccggcagaccattctagtctctgcaactgtgccattctcggttatccgagcagctaaaagctggagtcacgagccggttcttgtccaagccaacaaagtcactcctcttgataccgttcaaccatctgcaccggtaatgagcttgactcccacaacttctgaagctgatggccagattcagactactattcagagcttacctccagctttaaaacactattactgcatctcaaagcatcaacacaaagtcgacacgttaaggagatgcgttcacgccctcgatgcccaatcggttatagctttcatgaaccactcaaggcagctcaaagatgtggtctacaaactcgaagctcgtggtatgaattcagctgagatgcacggagatctcgggaagctagggagatcaacagttctaaagaagttcaagaacggggaaatcaaggtacttgtgacaaacgagctctctgcccggggtctggatgttgcggaatgtgatctggtggtgaatcttgagcttccaactgatgcggttcactatgctcatcgagctgggagaacagggaggctgggaaggaaagggacggtggtaacagtgtgcgaggaatcacaagtgtttatagtgaagaagatggagaagcagcttggtttgcctttcttgtattgtgagtttgttgatggagagcttgttgtcactgaggaagataaagctattataaggtga

SEQ ID NO: 65945 - protein, 551 aa, Arabidopsis thaliana
MAASTSTRFLVLLKDFSAFRKISWTCAATNFHRQSRFLCHVAKEDGSLTLASLDLGNKPRKFGKGKAMKLEGSFVTEMGQGKVRAVKNDKMKVVKEKKPAEIVSPLFSAKSFEELGLPDSLLDSLEREGFSVPTDVQSAAVPAIIKGHDAVIQSYTGSGKTLAYLLPILSEIGPLAEKSRSSHSENDKRTEIQAMIVAPSRELGMQIVREVEKLLGPVHRRMVQQLVGGANRMRQEEALKKNKPAIVVGTPGRIAEISKGGKLHTHGCRFLVLDEVDELLSFNFREDIHRILEHVGKRSGAGPKGEVDERANRQTILVSATVPFSVIRAAKSWSHEPVLVQANKVTPLDTVQPSAPVMSLTPTTSEADGQIQTTIQSLPPALKHYYCISKHQHKVDTLRRCVHALDAQSVIAFMNHSRQLKDVVYKLEARGMNSAEMHGDLGKLGRSTVLKKFKNGEIKVLVTNELSARGLDVAECDLVVNLELPTDAVHYAHRAGRTGRLGRKGTVVTVCEESQVFIVKKMEKQLGLPFLYCEFVDGELVVTEEDKAIIR

SEQ ID NO: 65946 - DNA, 2397 bp, Arabidopsis thaliana
  CDS (1)..(2397)
atgtactcgttaattctccgggaaagatctggatccatcacagggtccttatggaaccgaatatcctctcggaacatgggtggtggtccgagaaccttccctggaggactaaacaagtggcagtggaaacgtatgcacgagaagaaagctagagagaaagagaacaagctcttggatcaagagaaacagctttacgaagctcgaattaggaccgagatccgagctaaaatgtggggaaatccagattctggtgagaaaacggcgaaatcgaagcagagtcatggaccaatgagcccgaaagaacatatcaaaaccttggctgatcggtttatgaaagctggagcagaggatttttggaacgagaacgatggtccggtgaagaaatcagatcaagggtcgagatcaggttcggattcgattgattctacttctaattcgcctattgatgtgaggagattagtttctgcgacatgtgattctatgggtaaaaatcgtgttttcggtagtagtaggagaggtttttcgagtatgagtagatttaagagaaatgagagttcttgtgatgaaggagatgactttgatgctaaaaagctagatactttgagtcctttttctcctaaatttgctggtaccaaggagaaagtgaagagctcgaggagtgttgttggagttataaggaacaaaggtttgtttggaagaaggaagtttaggaagaacgatagttcaactgaagaggattcagatgaagaaggcgatgagggaaagatgataggttggatggatatgaggaaaacgggaagcagtgcgtcgttagggaaccacgatatcaagctgacgaaaagagtgaatcgtaatgtcacggatgaagagctttatcctcctttggatattaatacagttagagaagatctcagtaaaagaaaatctgtggataatgtaatggaggagaagcaagagcctcatgactcgatttacagtgcaaaaagatttgatgagtcttgtatatctcctttgacgctaaaggcactttctgcgtctggcattcttaagatgactagagtacaggatgccactctctctgagtgcctagacggtaaagatgcattagtcaaagccaaaactgggacgggaaagagcatggcgtttttgcttcctgcaattgaaacagttctgaaagctatgaacagcggtaagggcgttaacaaagttgctccgatttttgctcttatcctctgtcccacaagagaacttgcaagccagatcgctgcagagggcaaggctctactcaaattccatgacgggattggtgttcagactctaattggtggtacacgcttcaaacttgatcaacaacgcctagaatctgagccatgtcagatactaatagcaactccgggaagactcttggatcatatagagaataagtctggcttaacatcgcgtttgatggcgcttaaattgtttatagttgacgaggctgaccttttgctagacttaggattcaggagagatgtcgaaaaaatcatagattgtttgcctcgtcagagacaatctcttctcttttctgcaaccattccgaaagaggtccgtcgagtctcacagcttgttttgaaaagggatcactcttatatcgacacaatcgggctcggttgtgtagagactcatgataaggtgaggcaatcttgtattgttgctccacacgaatctcatttccacttagtacctcatcttctaaaagagcacatcaacaacacgcctgattataagataatagtcttttgctcaaccggtatggtaacatcactgatgtatactctactccgggaaatgaaattgaacgttagggagattcatgctagaaaacctcagctccatagaacacgtgtatcagacgagtttaaggaatcaaatagactgattcttgtcacatctgatgtatctgctcgtggaatgaactatccagatgttactttggttattcaggtcggtataccgagtgacagagaacagtatatacatcgactaggtagaactggaagagaaggaaaaggaggagaaggattgcttttgattgcgccatgggagagatattttcttgatgagcttaaagatttgccacttgaaccaattccagctccggatcttgattcaatagttaaacatcaggttgatcagtcgatggctaagattgatacaagtatcaaagaagcagcgtaccatgcatggctcggttattacaactcggttcgagaaaccggtagagacaaaaccacgttagccgagttagctaatcggttttgccattctatcggtttagagaaacctcctgctttgtttcgaagaaccgcggttaagatgggtctcaaaggtatttctggtattccaatccgaaaataa

SEQ ID NO: 65947 - protein, 798 aa, Arabidopsis thaliana
MYSLILRERSGSITGSLWNRISSRNMGGGPRTFPGGLNKWQWKRMHEKKAREKENKLLDQEKQLYEARIRTEIRAKMWGNPDSGEKTAKSKQSHGPMSPKEHIKTLADRFMKAGAEDFWNENDGPVKKSDQGSRSGSDSIDSTSNSPIDVRRLVSATCDSMGKNRVFGSSRRGFSSMSRFKRNESSCDEGDDFDAKKLDTLSPFSPKFAGTKEKVKSSRSVVGVIRNKGLFGRRKFRKNDSSTEEDSDEEGDEGKMIGWMDMRKTGSSASLGNHDIKLTKRVNRNVTDEELYPPLDINTVREDLSKRKSVDNVMEEKQEPHDSIYSAKRFDESCISPLTLKALSASGILKMTRVQDATLSECLDGKDALVKAKTGTGKSMAFLLPAIETVLKAMNSGKGVNKVAPIFALILCPTRELASQIAAEGKALLKFHDGIGVQTLIGGTRFKLDQQRLESEPCQILIATPGRLLDHIENKSGLTSRLMALKLFIVDEADLLLDLGFRRDVEKIIDCLPRQRQSLLFSATIPKEVRRVSQLVLKRDHSYIDTIGLGCVETHDKVRQSCIVAPHESHFHLVPHLLKEHINNTPDYKIIVFCSTGMVTSLMYTLLREMKLNVREIHARKPQLHRTRVSDEFKESNRLILVTSDVSARGMNYPDVTLVIQVGIPSDREQYIHRLGRTGREGKGGEGLLLIAPWERYFLDELKDLPLEPIPAPDLDSIVKHQVDQSMAKIDTSIKEAAYHAWLGYYNSVRETGRDKTTLAELANRFCHSIGLEKPPALFRRTAVKMGLKGISGIPIRK

SEQ ID NO: 65948 - DNA, 2436 bp, Oryza sativa subsp
  CDS (1)..(2436)
atggggggcgggccgaggacgttcccgggcgggctgtcgaagtggcagcacaagcggatgcacgagaagctcgcgaggcacaaggagcgggggctcctccgccacgagaagcagctctacctcgcccgcctccgctccgagatccgcgcctcccgcctgcccgccgccggcgcctcccctcccgacgacggcgacgggcccacctcctcgcgcgcccacatccgcgccctcgccgaccgcttcctcttgcccggcgccgaggatctctggaacgaagacgacgggcccatccaccgcgccgaccggccgcggccgccgaggaggatcgtctccgttggcgggaatggcggcgaccgccgtaagttggactctacaaagcaggagctaccgaggggtgggaaggagccgcgtctggctgcgttcaatcctaggagggatttccagacggccgcgccctggtggtggcaatggagctcgtcttccgccattccttcgcgaacaaaggaggcatccttctgtttcttcggtcccaagagatcctactcagtgatgcctctgttccaggcgcatcaggagtccagtggtacatcgatggtgccgctgattgctagaggtcttgccagtgctcggattgctccctcgcagttgaatggagagaggttctactcgttcgcagcagggcgatttggcaggaaattgaggccagactcctcagatgaggatgatgaggatatatcaactgcgaagaaggatatgaggtttgcgaggtttggagcatccagtgaggaggaatcaggatacgatgaattggaggcgagaagtgccatcaggaagaaatggagcagtgctgctttgaggaactgtgatatgaagaaggagaggagagcgctcaagtcctatgaggaagaaaacaacgatctcgctggtagcttccgagagctgcgagaggagataaagaacagggaagtgttgggtgctgagcggaggcgttacgagtcgaggggcgaatctttgtttaccaataaaagatttgaggaatgtggtatctctcccctaacagtaaaagcactcactgatgctggatatgtacagactaccgttgtgcaggaaacagcacttcctatgtgtcttgaaggcaaagatgttcttgtcaaggctaaaactggaactggcaaaagtgcagcttttctgctccctgcaattgaatcagtcttgaatgctatgaagagccatacaaatcatcgagtgtctccaatattttcgcttatcctttgccctacaagagagcttgccatccagctcacagctgaggcaaatgttctgttgaagtaccatcaaggaattggtgttcaatctcttattggtggcactagattcaagctagatcaaagacgtttagaatctgatccatgccagattttagttgctacacctggtagactgctcgatcacattgagaacaaatcttcattctctgttcgcttgatgggattgaagttgcttgtattggatgaagctgatcatttgctagatttgggtttccgtacagacattgaaaagattgttgatagtttgccacgtcaaagacagacactactattttctgctacaatcccaaaggaggttcgaagggtttcacagctagttttaaaaagggatcatgtttttgttgatacagtgggcttgggagctgttgaaactcctactaaggtggagcagttgtatctcgttatgccacatgagctgcattttcatatggtttatcgccttctccgagaacatattgatcaggaagtggactataaggtgattgttttctgcacaactgccatggtgactgaatttatgtatataatgcttcgagatttgaagctaaatgtccgagaaatccattcaagaaagcctcagctctatagaactcggatatcagaagaatttcgagattctagtcgcttgattctggtgacctcagatgtttcaacacgtggagtgaattatccaggtgtcaccttagtcattcaggttggtgttccttcagatagagagcactacatccatcgacttggaaggaccggaagagaaggtaaatctggtaaagggattcttttgcttgcgccatgggaagagtatttcttaaatgagatacatgatctcccggtgcagaagtctcaaacaccaaacattgacgaggagatgaaacgaaaggttgatggttcaataaagatagttgatatgagcatcaaggaggcagcatatcacgcatggcttggctactacaattcaataggtgatgttggaagagacaagaccatgcttgttgacctagcgaacaggttctgtaaatccatcggtttggaaaagcctccagcactgtacaggaaaactgctctgaagatgggccttaaggatgtacctgggattcgaatcaggaaatag

SEQ ID NO: 65949 - protein, 811 aa, Oryza sativa subsp
MGGGPRTFPGGLSKWQHKRMHEKLARHKERGLLRHEKQLYLARLRSEIRASRLPAAGASPPDDGDGPTSSRAHIRALADRFLLPGAEDLWNEDDGPIHRADRPRPPRRIVSVGGNGGDRRKLDSTKQELPRGGKEPRLAAFNPRRDFQTAAPWWWQWSSSSAIPSRTKEASFCFFGPKRSYSVMPLFQAHQESSGTSMVPLIARGLASARIAPSQLNGERFYSFAAGRFGRKLRPDSSDEDDEDISTAKKDMRFARFGASSEEESGYDELEARSAIRKKWSSAALRNCDMKKERRALKSYEEENNDLAGSFRELREEIKNREVLGAERRRYESRGESLFTNKRFEECGISPLTVKALTDAGYVQTTVVQETALPMCLEGKDVLVKAKTGTGKSAAFLLPAIESVLNAMKSHTNHRVSPIFSLILCPTRELAIQLTAEANVLLKYHQGIGVQSLIGGTRFKLDQRRLESDPCQILVATPGRLLDHIENKSSFSVRLMGLKLLVLDEADHLLDLGFRTDIEKIVDSLPRQRQTLLFSATIPKEVRRVSQLVLKRDHVFVDTVGLGAVETPTKVEQLYLVMPHELHFHMVYRLLREHIDQEVDYKVIVFCTTAMVTEFMYIMLRDLKLNVREIHSRKPQLYRTRISEEFRDSSRLILVTSDVSTRGVNYPGVTLVIQVGVPSDREHYIHRLGRTGREGKSGKGILLLAPWEEYFLNEIHDLPVQKSQTPNIDEEMKRKVDGSIKIVDMSIKEAAYHAWLGYYNSIGDVGRDKTMLVDLANRFCKSIGLEKPPALYRKTALKMGLKDVPGIRIRK

SEQ ID NO: 65950 - DNA, 1707 bp, Arabidopsis thaliana
  CDS (1)..(1707)
atggttgaatcggacaagtcatccgttgaagagctgaagaagagggttaggaagagaagccgtgggaagaagaatgagcagcaaaaggctgaagaaaaaacccacactgtagaggaaaacgctgatgaaacgcagaagaagagtgaaaagaaggttaagaaagtgagaggcaaaatcgaggaagaggaagaaaaggtggaagcaatggaagatggtgaagatgagaagaatattgtgattgtcgggaaagggataatgactaatgtgacttttgattccctcgacttatctgagcaaacttctatagctatcaaggagatgggctttcagtacatgacgcaaattcaagctggatcaattcagccccttttggaggggaaggatgttcttggtgctgccagaactggttctggtaaaactcttgcttttctcattccggctgttgagttgctgtttaaagagcgtttctctcctcgcaacgggactggtgtgattgttatttgccccacaagggaacttgctatccagactaaaaatgtggcggaggagttactcaagcatcattcacagacagtcagcatggttattggtggcaataacagaaggtcggaagcacaacgcattgccagtggttcaaacttggtgatagcaactcctggtcgtcttcttgaccatcttcagaatacaaaggctttcatttataaacacttgaagtgccttgtgatcgatgaagctgataggatactggaagagaattttgaggaagacatgaataagattctaaagattttaccaaagactaggcaaactgcgttattctctgccacccagacctctaaggttaaagatcttgctcgggtgtcattgacatcacctgttcatgtggatgtcgatgatggcagacgcaaggtgacaaatgaaggattggagcaaggctattgtgttgttccgagcaaacaaagacttatccttctaatttcctttttgaaaaagaacctaaataaaaagattatggtatttttctcgacttgcaagtcggtacaattccatacggaaatcatgaaaataagcgacgtggatgtctctgatattcatggaggcatggatcagaacagaagaactaaaacctttttcgacttcatgaaagcaaagaaaggtatcttgttatgtactgatgttgctgctcgtggtctcgatattccttccgtggactggattatacagtatgatccaccagacaagccaacggaatatatccatagggttggtcgaacagcccgtggagaaggagcaaagggaaaggcattacttgtcttgattcctgaagaacttcagtttattcgctacctgaaggctgcgaaagtacctgttaaagagcttgagttcaatgagaagaggcttagtaatgttcaatctgcgctggagaaatgtgttgccaaggactacaatctgaacaagttagccaaagatgcgtacagggcttatctctcagcatacaattcacactctttgaaagacatctttaatgttcaccgacttgacctcctggctgttgctgaatcgttctgcttctcttcgccgcctaaagtgaatctgaacatagaaagtggagctgggaaggtgaggaaggcgagaaagcagcaaggtcgcaatggcttcagtccttacagtccctatggcaagtccacacctacaaaggaggcataa

SEQ ID NO: 65951 - protein, 568 aa, Arabidopsis thaliana
MVESDKSSVEELKKRVRKRSRGKKNEQQKAEEKTHTVEENADETQKKSEKKVKKVRGKIEEEEEKVEAMEDGEDEKNIVIVGKGIMTNVTFDSLDLSEQTSIAIKEMGFQYMTQIQAGSIQPLLEGKDVLGAARTGSGKTLAFLIPAVELLFKERFSPRNGTGVIVICPTRELAIQTKNVAEELLKHHSQTVSMVIGGNNRRSEAQRIASGSNLVIATPGRLLDHLQNTKAFIYKHLKCLVIDEADRILEENFEEDMNKILKILPKTRQTALFSATQTSKVKDLARVSLTSPVHVDVDDGRRKVTNEGLEQGYCVVPSKQRLILLISFLKKNLNKKIMVFFSTCKSVQFHTEIMKISDVDVSDIHGGMDQNRRTKTFFDFMKAKKGILLCTDVAARGLDIPSVDWIIQYDPPDKPTEYIHRVGRTARGEGAKGKALLVLIPEELQFIRYLKAAKVPVKELEFNEKRLSNVQSALEKCVAKDYNLNKLAKDAYRAYLSAYNSHSLKDIFNVHRLDLLAVAESFCFSSPPKVNLNIESGAGKVRKARKQQGRNGFSPYSPYGKSTPTKEA

SEQ ID NO: 65952 - DNA, 1773 bp, Oryza sativa subsp
  CDS (1)..(1773)
atgcacccgatcaaactctgtgcccgctcgccccggccgtcgtccaagaagcggaagcgccccgccgccgccgccgctactccgccggaatctgaaccggagccggtacacaacaccgccgcctgcaattcggagggagagaacaacgcgacggggaagaggagggagcacaacaacaagaagatgaaggaggagaagagcaagaggaagaagaagcagggggaggggaagaagggatcagggattctgacggacaagctcttctcggatctccccatctccgacctcaccgccaatgccatcagagacatgaactacacccacctcaccgagattcaggctagatcgataccgcctctgatgttgggaagcgatgtgatggcgtcagccaagaccggctcagggaagacgcttgcgttcctcatcccggcgatcgagctgctctgcaggctgcgcttctcgccgaggaacgggaccggagttatcgtgctttgcccaacaagggagctcgctatccagacacacaatgttgccaaggaattaatgaggtatcattcacaaactcttggatatgtaattggtggtattgacttgaggggcgaggctgagcagctcgcgaaagggatcaatgtattagttgcaacgccaggaaggcttctggaccatatgcaaaaaaccaaaagtttcaaatatgaatgcctaaagtgccttataattgatgaagctgatcgtatacttgagcaaaattttgaggaacaaatgaaacaaatatttaaactccttcctcggcagggtaggcagactgttcttttttctgctacacagactgaaaaggttgaagattttgcgaagttaacatttgggagcaaagaagaaaggcagcgaacacttgtttatgttggagttgatgatcatgaatcaaaggctactgttgaaggattgaagcagggctattgtgtcattcctagtgagagaaggtttctggttctgtatgctttcctaaaaaaggcactttctgagaagacgaaggtcatggtgttcttttcatcatgtaattcagtcaaattccatgcacaacttctgaatttcatccagatagagtgttatgatatccatgggcaactaaagcagcatcaacgaactagtacattttttaagtttcacaaggcagaacatggcatcttattatgcactaatgtggcagcacgaggacttgatattcctgatgtggactatattgtgcaatatgatcctccagatgaaacaaaggattacattcacagagttggtcgtactgcccgtggcgataatggcaaaggaagtgcaatactgttcttactaccgaaagaattacagttgctcattcacctgaaagcagctaatatttctgtatctgaatatgtgttcagacaagagcttgtgccaaaattgcaaccttaccttcattatgactcaagttttgagcaggagaaaattgttggtgggaattacatcctaaacagatcggcgaaagaagcctacaaatcctatcttttggcatacaaatcacactctatgaaagacatttttgctatccatcaacttgatttgacgagcgtagcggcttcgttctgttttagtgagcctccaaaggtgaatctggacctggagagcagtgcgtcaaaacatcgaaagaagaggaatgtaaacactggcaggaggcatggtatcggcccttcaaacccatacggaaggaaaggcagtgatgatcgtaggcagtttgcaagattctag

SEQ ID NO: 65953 - protein, 590 aa, Oryza sativa subsp
MHPIKLCARSPRPSSKKRKRPAAAAATPPESEPEPVHNTAACNSEGENNATGKRREHNNKKMKEEKSKRKKKQGEGKKGSGILTDKLFSDLPISDLTANAIRDMNYTHLTEIQARSIPPLMLGSDVMASAKTGSGKTLAFLIPAIELLCRLRFSPRNGTGVIVLCPTRELAIQTHNVAKELMRYHSQTLGYVIGGIDLRGEAEQLAKGINVLVATPGRLLDHMQKTKSFKYECLKCLIIDEADRILEQNFEEQMKQIFKLLPRQGRQTVLFSATQTEKVEDFAKLTFGSKEERQRTLVYVGVDDHESKATVEGLKQGYCVIPSERRFLVLYAFLKKALSEKTKVMVFFSSCNSVKFHAQLLNFIQIECYDIHGQLKQHQRTSTFFKFHKAEHGILLCTNVAARGLDIPDVDYIVQYDPPDETKDYIHRVGRTARGDNGKGSAILFLLPKELQLLIHLKAANISVSEYVFRQELVPKLQPYLHYDSSFEQEKIVGGNYILNRSAKEAYKSYLLAYKSHSMKDIFAIHQLDLTSVAASFCFSEPPKVNLDLESSASKHRKKRNVNTGRRHGIGPSNPYGRKGSDDRRQFARF

SEQ ID NO: 65954 - DNA, 1809 bp, Oryza sativa subsp
  CDS (1)..(1809)
atggcggcggcggcggcggtggcgaagtcggtggaggccggcggcgaaccgggcggtggtggtggtggtgcgtggtccaccgtctcccgctccggccgctcctcctactccgccggtggtggcgtcggcggcgggaaggtgggggagctcgcggaggggttggcgggggtggagatcggcggggaacggaggctggacaagtacgacatccccgtggaggtgagcggcgaggacgtgcccccgcccgcggacgggttcgaggcggccgggctggtggaggccgtgctccggaacgtggcgaggtgcgggtacgagagccccacgcccgtgcagcgctactcgatgccgatcgcgctcgccggcagggacctgatggcgtgcgcgcagacggggtccgggaagacggccgcgttctgcctccccgtcgtgagcggcctcgtcgcggcgggagggagcggaatcggccaccgggagaggtcgtcgttcaaccgcgccgccgcgaagccccgcgcgctcgtgctagcgcccacgagggagctcgccgcgcagattaatgaggaggccaagaagttctctttccaaactggacttagagttgtggtggcctatggaggaactccaatgtataaccagctccgtgatctagagaggggcgctgatattcttgttgctacacccggtcgccttgtggacatggttgaaagatcaaaagtctcccttgaggcaatcaagtacctggtaatggatgaagccgacaggatgctggatatgggctttgagcctcagataaggaagattgttgaaagaatgaacatgccaaggaagtctgtgagacaaactatgcttttcagtgcaaccttcccaccagagattcagagactggcttcggactttttgtcgaactacatatttatcactgttgggagggtgggttcaagtactgacctaattatgcagaaggttgaactcctctctgacggggagaaacgaggctacctgcttgatcttttacagaggcaatctgtcggtgtggctaacagtaagctgcagcaacctctgacattggtgtttgtggagacaaaacgagaggccgactctctgaggtactggctatacagcaaaggtttccctgcaacagcgatccatggtgacagaacacagcaggaaagggagagcgcactgagatcctttaagactggcctcactcctataatggttgccactgatgtagcctcacggggcctggatgtcccaaatgttgctcatgtgatcaactacgatcttcccaagagcatagaggactacgtccacaggattggaagaactggcagagctgggaaggctgggtcagccacggccttcttcactgagtctgaccactcgctggcgaagggcttactggagctgatgaccgaggcgaaacaggatgttcctgactggctcgtacagtatgcagagaggccgtactatggaggttcaagctacggtggaagaaaccggaggtctggtggcgggggcaacaggtttgccggcagagatttccgccagggcagtggcggcggctactcaggtggtggtggtggcggcggctactcaggtggtggtggtggcggcggctactcaggtggtggtggtggctactcaggtggtggccgtggtggtggctactcacgcggtggccgtggtggctactcaggcggaggcggtggcggtggtggagacccctaccgagcaagtgctccacccccgcggtactacccttcgtacccgatgggcacggccgacatcaacgcctctggctgggactaa

SEQ ID NO: 65955 - protein, 602 aa, Oryza sativa subsp
MAAAAAVAKSVEAGGEPGGGGGGAWSTVSRSGRSSYSAGGGVGGGKVGELAEGLAGVEIGGERRLDKYDIPVEVSGEDVPPPADGFEAAGLVEAVLRNVARCGYESPTPVQRYSMPIALAGRDLMACAQTGSGKTAAFCLPVVSGLVAAGGSGIGHRERSSFNRAAAKPRALVLAPTRELAAQINEEAKKFSFQTGLRVVVAYGGTPMYNQLRDLERGADILVATPGRLVDMVERSKVSLEAIKYLVMDEADRMLDMGFEPQIRKIVERMNMPRKSVRQTMLFSATFPPEIQRLASDFLSNYIFITVGRVGSSTDLIMQKVELLSDGEKRGYLLDLLQRQSVGVANSKLQQPLTLVFVETKREADSLRYWLYSKGFPATAIHGDRTQQERESALRSFKTGLTPIMVATDVASRGLDVPNVAHVINYDLPKSIEDYVHRIGRTGRAGKAGSATAFFTESDHSLAKGLLELMTEAKQDVPDWLVQYAERPYYGGSSYGGRNRRSGGGGNRFAGRDFRQGSGGGYSGGGGGGGYSGGGGGGGYSGGGGGYSGGGRGGGYSRGGRGGYSGGGGGGGGDPYRASAPPPRYYPSYPMGTADINASGWD
